United States Patent Application Publication US 2026/0022370 A1 - sequence listing, part 2

SEQ ID NO: 5841 - DNA, 425 bp, Homo sapiens
  source 1..425: mol_type = other DNA
gtacttatctgtgcttactaactgtgtaattgtcacagttaagtaatttgtatacaattataatacaaataagtaatttgttgtacaaattacttaacttctctgtgataatactcacctcagagagttattgtttggaaaagattagggagtggggggcaagtgccctgccctctgcctctgccgagaggccatatggtgctggaaccatcttggttccaggcccgggaagttgaacatctccaaagtttacaaaatgatagtactctccagaggaaactttaatggacacttaatatatagtattagtgtatgcactctggttaacaaaaaagaaagtgtatttattttcattgagaagaagaaaccgaaaactctggcatttaaataaataaagaagaatttatttttccttttcaggtcat

SEQ ID NO: 5842 - DNA, 370 bp, Homo sapiens
  source 1..370: mol_type = other DNA
taatatttattttgaaggattgttgtcacaactaacttataagtgtataaaatgcctaatctaggtttgtattattatttgtttactattaccagatccagattcaaaaagccactttacatagctacttttgttaaatggatgtcaaataaatacataatgatacttaataaaggccttcatttttctgataatagtcccagagctgccaggctgggattccaattccaaacatggtatgctctcctcattctgcttgggaaaaacagagagcaggatgtggccgcatcatcccacgtaggtttttctgctaagaaccaaatttgaagactcccaagaaacagctctgcagggagagccagagccttgc

SEQ ID NO: 5843 - DNA, 346 bp, Homo sapiens
  source 1..346: mol_type = other DNA
cttgctattcatttttaaataggtcaatgaaagagaaatactctatgacctagagtcctagagtgtagggcctccttgcgcatgcgctgaagggggcaccctaggacttcggacggcgtttgccgaggctggcatattttggcgcgaaagatgccgggtctggttgactcaaaccctgccccgcctgagtctcaggagaagaagccgctgaagccctgctgcgcttgcccggagacggcgcgcgatgcgtggtcagtgcgcagccggagagggcgcggccgacgagccccgggccgcggcctgtgccttccggtgcctctgcgccccgccccattgcggcgctctg

SEQ ID NO: 5844 - DNA, 325 bp, Homo sapiens
  source 1..325: mol_type = other DNA
cgtaatcccagctactcagtgccctcccagcctggataaaataaaataaaaaagagtttattgcctgtttccaacctgcaggaaaaaaatccaatgattatatccatttcattgcgaaatggtatttttcaattttattcatcagtatattaacgaatatatgactgaataattcatactgaattcagatatagggggttataggaccttttaaattcccccacttgctattcatttttaaataggtcaatgaaagagaaatactctatgacctagagtcctagagtgtagggcctccttgcgcatgcgctgaagggggcaccct

SEQ ID NO: 5845 - DNA, 444 bp, Homo sapiens
  source 1..444: mol_type = other DNA
aacctctggtaataatagagaattattgaaaggataccaaaatgcaacatgaggactttttttggatcttgactggaacaaaccaactataaaagataatttttggaattatttatagtactaaggaattattgttaattttgttagatatgataacggtagttaaatttttaaaatctatgtcagtttgagatgcagactaatttaagggtaaaataatattatgtctaggatttctttaaaaaagcaaaatgttgctaatgttattaaaagtagaatcacttttgcttatgtttaaaattttccattataaatagttttcaaaagcaagatcaacagttactgatgtcctaacccatcctaaacactgatgctaatgagtgagaaggttctgagatctcccagggatttccgagagggctctggagtatagagggaagccag

SEQ ID NO: 5846 - DNA, 385 bp, Homo sapiens
  source 1..385: mol_type = other DNA
aaggaagtccaaatgttcacctgaagacaactgtggtcattaggtaggagcagttacttccactcccgcacctgctgctgaggactcttcagctcccctctggcaggacccgggagaggaaagagccctcagctggtccatcctaaagtggtggggtcacattctcgagaactgtgctcagctaaccatgctggtgattggcaccgtcataattcctgtgtttttgtagtgaagagacctgaaagaaaaaaaaatacggtaatctcttcatttgctagttcaagtgctggacttgggacttaggaggggcaatggagccgcttagtgcctacatctgacttatataggtgagagacaagattgtctcatatccggggaaatcata

SEQ ID NO: 5847 - DNA, 592 bp, Homo sapiens
  source 1..592: mol_type = other DNA
gaggagccgcaaacaaacgacgtccgtgattggctccgttcgggcttcggctcccagccgaagcgggcgagcgtggggctcggccggcgattcccagacgcctgttacgcgggcggcgggtgcgcagacagcgctcctcacacagagcagctcctgacccgggcgaatgcgggcttgtgccgccgccgccgccgccgccgcccgggccaagtgaggagccggccccgcagccgctgacagggctctgggctggggcaaagcgcggacccgcgggagggggccccgagggacggaagcggttgccgggttcccatgtccccggcgaatggggaacatgcctggggtctgaagggagctgcctccgccaccgccatggccgctggatccagccgccgcctgcagctgctcctggcgcaatgaggagaggagccgccgccaccgccaccgcccgcctctgccgccgtagttcgccgggcccctgccgtcagcccgccggatcccgcggcttgccggagctgcagcgtttcccaaaaaaaatccccgaggaaaatataatattcgaagtactcattttcaatccctctcttttctc

SEQ ID NO: 5848 - DNA, 512 bp, Homo sapiens
  source 1..512: mol_type = other DNA
accgtcgggtcgtcagccacgacccgagtcaggcatctccccgctcctgggaccggggccgaaggccaatcaggcagtgagagccgattggccgccgccgcgattcaggccaatgagacagcgctcccttcgctttcttctccccaccttggagagggaggggaagtcctgactggccagactgtcctggcggcggcgcccagccgtattggccactgttgccattgtcgaatgaacaaggcgaattcaccctttgcttttccgggaggagccgcaaacaaacgacgtccgtgattggctccgttcgggcttcggctcccagccgaagcgggcgagcgtggggctcggccggcgattcccagacgcctgttacgcgggcggcgggtgcgcagacagcgctcctcacacagagcagctcctgacccgggcgaatgcgggcttgtgccgccgccgccgccgccgccgcccgggccaagtgaggagccggccccgcagccgctgacagggctctg

SEQ ID NO: 5849 - DNA, 538 bp, Homo sapiens
  source 1..538: mol_type = other DNA
cctcctgtgggtggggagagcccctccacccctctgctcgcttgagcgctcagagcccagggccgccgaccgcagcactttccgatttgctgcaccgagggcccgcggtccctgtgtgcggtttccaccgttgttggaggcggccgcaggcgaaccgtcgggtcgtcagccacgacccgagtcaggcatctccccgctcctgggaccggggccgaaggccaatcaggcagtgagagccgattggccgccgccgcgattcaggccaatgagacagcgctcccttcgctttcttctccccaccttggagagggaggggaagtcctgactggccagactgtcctggcggcggcgcccagccgtattggccactgttgccattgtcgaatgaacaaggcgaattcaccctttgcttttccgggaggagccgcaaacaaacgacgtccgtgattggctccgttcgggcttcggctcccagccgaagcgggcgagcgtggggctcggccggcgattcccagacgcctgttacgcgggcggcggg

SEQ ID NO: 5850 - DNA, 560 bp, Homo sapiens
  source 1..560: mol_type = other DNA
aagaccttccagtaggcttatagacagctatacaagcaagtactacttctgcttaagattcataacagaagatggtgtagaaagggctgaaaaagaaattgattccttgctttgtaatgattacttctttgactgctgtgtcagacaaattaaatttgtggaccacttcccagagtgaatctgactcaggctgcacgcagaatgcagaaagttcttcttggttgaacaggagtgcacagtgttgtgaaatacttaaaaaactaaatagagcttgaagttcactagaaatcttatcttcatcttaagtgttcatcaaagagtctgggatgatataaaacattttgtgtttcatctacccaagtcccatgtttagattattttaacataatttgtgaatgatagtttcacattttcactcaagttttgcatgaatcacaaagcagaatggtaccttttgaagagcagttctgcaatatttaggtagaacactgtataccatatatactatataccatatatactatatataccatatatattatatgccataaacaggatta

SEQ ID NO: 5851 - DNA, 502 bp, Homo sapiens
  source 1..502: mol_type = other DNA
tttcttatgtataagctttgttaaaaaaaaaaaaagctaagcattttttctcatttctattcattacttttcaaaatcataaaatgtaatttcagaaaaacgttaattagaattactaaattagtaccagatcaggattttcccaaactgtagttttgacctgcagtacaaactctatgctttgagtttttaaactaactcattaatttgagctatctcatgatacacatttctgccttaaaaaagaaaaaaataatacagcggaacctccagtaagggtccgggggaatcctcggactttaaattcctgcggttttaaatcaccactaaattactgtgtgctcacagttttaaaggggacggggggggcacgtgacgcgcgaactgtcaggctctttggcagcctgccactccgcgccccgcgcctcgtgaggcagagcccgccccggagcggcgcgcgcaccccaggactcgcgtcgcgtgactcggccaaggcgcgcag

SEQ ID NO: 5852 - DNA, 590 bp, Homo sapiens
  source 1..590: mol_type = other DNA
tctgctctccttactagttatggcaggaaaggcgccttaattaggagcattttagggagttaaccctgtcaaagggggacaccgctccccggcccgagggaggaggggctgccggcaaacgctggactcaggatcttcccagcagagcagggcggccgccggccggtcttcccggccctgccttcccggtgccccgctgccctgctgccgtgaccccgggatgcggggtctcctctgcctccctgggcctcccccttcagccatggggggcggctccgcttcctaggccgcgggtcccggaccttcccgggccccccacggcaccgcccacctggccaccgccgcagcccgcccgggccgccgccagccagcagcccctcccggggtggggtttcccttccccctacccctttgtggcagggacccacgggacaccccctctgcctccgctccacgtccagggggccgaaggggcgccggacgagggaccgtgcggagagaggggttcggcggcgccaggactcccgcgggctccccggagcaggggtcggaaggagggggagcgggagccgcgggggccgctgcagcag

SEQ ID NO: 5853 - DNA, 330 bp, Homo sapiens
  source 1..330: mol_type = other DNA
tctgctctccttactagttatggcaggaaaggcgccttaattaggagcattttagggagttaaccctgtcaaagggggacaccgctccccggcccgagggaggaggggctgccggcaaacgctggactcaggatcttcccagcagagcagggcggccgccggccggtcttcccggccctgccttcccggtgccccgctgccctgctgccgtgaccccgggatgcggggtctcctctgcctccctgggcctcccccttcagccatggggggcggctccgcttcctaggccgcgggtcccggaccttcccgggccccccacggcaccgccca

SEQ ID NO: 5854 - DNA, 512 bp, Homo sapiens
  source 1..512: mol_type = other DNA
gttatggaaatattgtttacattttttcccctgaggagaaggggaacccaattacaataagatacatgcccctatgagtattttcatacctgtaaggatgtttttaattctttgcatctgaagagtgctaaggattttaggttttagtattttaactaagatgaacatcatttttcctattaatcattatttcgtacctgtgaaaaataagcttacacttaatgttgtatgaatctagcatggtaaagtacagaaaagcttattctcttcttagcttatttaatcctcacaacaactttgctaggtggacaggagtcattaaaaactcagagactttaagtgacttatccataataagccctggttatgtcagtaggggcagggcgcactgcgagaagagcacttcgcgcatgcgcatatcaccgagcgaacgcgccgtgttcgaggcggagctccttgttaacgacatccccaacctctgctaggcgcacttcctgaagctgaaggtcagc

SEQ ID NO: 5855 - DNA, 439 bp, Homo sapiens
  source 1..439: mol_type = other DNA
tagttgtgatatgtaaatagtactcaaaaagagttttattctggcacacctgttaattaccagtttactgggcatatattatgtgctgcgaatgttacacagactgtcttatttaacctcataatgctttgggttctgactccaaagcctagaacttcagcaagcttcagggtctttaaaagatttcccatcaggagagagcagttaaacaccagctctttaaaattatatatatatataaaatatatatgcatatatatagaatataatatatatgcatatatataaaatatatatgcatatatatagaatataatatatatgcatatatatagaatatatatataatataatatatatatgcatatatatagaaacattttctgaacaatcctaacagcctgataaaagagtaagcactatattacgcccattttgc

SEQ ID NO: 5856 - DNA, 436 bp, Homo sapiens
  source 1..436: mol_type = other DNA
taattaccaatggttaaaaattggagcttcatcttatcttgaaaaatcagctagcctactttatgcctaatttacaagattgtttttgtgaagttagatatggaaaaatctgacaaaagcagaaactcaatatatgttttctcctttctttaacaaaactcttaaagaatttataagaaaactaaacgtactttaagaaattaagaaacatatcagtttgctctaagtgaaatatctcaggggttcacccaagaacctgagctcatggaggcacctgcagaaaactggttctggtcccccagtgtacacatctgcagctggactgccctgttccttcctagcctgagtcaggactgagcagagccttttgaaataagcctacttttaactggaataaataattggtcaatctctacctcaggtgtaaccggttaaa

SEQ ID NO: 5857 - DNA, 237 bp, Homo sapiens
  source 1..237: mol_type = other DNA
actctcttcttaaatttaaaacagttttaagcgggctccagttctagaacaacttgggattgtgttagaccctcggactctcccagttgggtccagggccacactcggcgcagccaagcccgccctacccgaggtcgcacacgggccgctccggggtcaatggttctttggaggaccaagaggcccttcgatcaagcgagtggccaatgaaattgaaggctctgccctccatgccca

SEQ ID NO: 5858 - DNA, 300 bp, Homo sapiens
  source 1..300: mol_type = other DNA
tattgagtctaggacataataggttataattataacttagcgtttaagttcgtggactccgcgttcaaaaaatgaatgtgcctgctttttttttttttttttttaataaaagaattgacaatacactgctccgcgacccccacccgcgcgacgacgccgccgccaccgcgtcgtcacacggagcaaagtcccctgggaagtgtagtcttcaggccctgggagggacttcagccacgggccgaggacttgggcatggagggcagagccttcaatttcattggccactcgcttgatcgaagg

SEQ ID NO: 5859 - DNA, 423 bp, Homo sapiens
  source 1..423: mol_type = other DNA
agaaccaaatctatcctgatacagtttttttttctgcactgaataatacatctttcaaaatgattattgtgactcacagaaatagcttaaaatatattcttgatacggtttacagagtgagaaatatttctttaaagaaattaaatatctttgtatatctacttacgcaatcaattccttaggctctagaaggctatatattctgaaactgtcattaagccattattggtaacacacttgctcccatacctaaggtggcgtccaaattcgcacgcttgcaggcattctattgattcacacttgaccccgcccccttcacctcccagctttgccggggaagaagcagggcggggcaagctaggggccggcccgggggcggggcctgcctcccacggcgggagggcggagcctgctctggagcct

SEQ ID NO: 5860 - DNA, 377 bp, Homo sapiens
  source 1..377: mol_type = other DNA
ttacccagtggctagcttacagtagatactcagtaaatagttgttgatttagaatattgtcatttaaatcaaaaaaatgttttcacggaaggaattgatgtgagatttttagtgctctagaactgcacagcctgcaactaggtaatgaatggtcaccgttttacgttcctcagcatgctggctaaagctaccatcatatactaggagatctattagaaaccctaggctatcttgcataatgcttctcaatctgaaataattttttacagaataccaatacgttaagaagagctacttccctgatctacctattatgggcagcccattttatgaagttagcatggccttcctattagccacggagaactctatggttc

SEQ ID NO: 5861 - DNA, 384 bp, Homo sapiens
  source 1..384: mol_type = other DNA
gttacgtgcctgtaatcccagatactcaggaggctgaggcaggaagtgagccgagatcacgccactgcactctatccagagcgagactcaaaagaaaaagaaaacaccaaagccgggattctatatttttttcactcaatcctgaatgagtttatctgaagatgataagataaagaacgctagactgagagttaaacaagctctctggggctctgtctcctcatctgtaaaaagagggagctgcatgtcatttgcacaagttgctgcttcagccagcctgaaggctgtgccagcctccttcagcacagctgggcctgccggaaaatgatccttcttaaaaggattttcctccttcctcaagggaaagaaaacctattgatataa

SEQ ID NO: 5862 - DNA, 339 bp, Homo sapiens
  source 1..339: mol_type = other DNA
aaaacaaaggactattttttagtgacccacatggtggatggaaagcttgcagtggtcttacggcctccgccagaaagtggtatctgtcactggccaaaacaagtcacctctagagccaaatctttagtttgttagcgtttatttgaacatctatatgaaaactccacttttaagtttctttttaagtcttatgcttcaaaacccacatataaccataaagcctttcttgatgaatacacctgtttctctcactggattacaaactcagagtcaaagcagcattttctatgactgaaacatttaatccttttaaaatttaagtgtctaaagcagaaactg

SEQ ID NO: 5863 - DNA, 305 bp, Homo sapiens
  source 1..305: mol_type = other DNA
tgtgaagttatgtaatcattaagatgagtatacataacacaagattcaataaattcaaactaacattactcttattgccaagagagttgaaatgacagttccttccctttccttaggggtttaaggaaagcatgagtgatttcagtcttttgctggagctcctcactgacactcattgcagagcctgaagcacatcactaagtcgctgtttgttacttctgtggttaattatttttcatcaacaaaatcaaaaggaggctccagtatttcgggtgccttctcggtcaaggttggtaacaaacaag

SEQ ID NO: 5864 - DNA, 321 bp, Homo sapiens
  source 1..321: mol_type = other DNA
tcgaatactttgataatcagtatttgataacctccgagcaggttagaggatcgtcccgaggggtactgtgggaacaaaacccagaggggtttgtgcctcatggtcctcactcacagcgcacagtgtggaaggcgcagcgcggctgcttctcgactgaagcagctggacgcgcaccgccccaccggagcgtctcacgttctgattggcttattagcaaagggcgctccgccccttgactccgaggctcctagtcccgcctccaggccccttcccgcgtcgcgacgcacgctgccccggaaggccgcggcgctgtagtgcggc

SEQ ID NO: 5865 - DNA, 439 bp, Homo sapiens
  source 1..439: mol_type = other DNA
aaactttctcgagtttacattaaattcatgaaatttgacacaaaaagacaattatttatctattttaaggaccgggtccggcggaccgagattctggggcctctgggctccaggccttggataagacactaggccctgtgcctggacactgcacctccccaggcctcagtttccacaccagatctctacagagtgggcgtgagggcaggccgattctccctccaggagcctggggtcctggcctcctggtaggcgccctggggccctctcctggggctcccacgccgcactacagcgccgcggccttccggggcagcgtgcgtcgcgacgcgggaaggggcctggaggcgggactaggagcctcggagtcaaggggcggagcgccctttgctaataagccaatcagaacgtgagacgctccggtggggcggtgcgcgtc

SEQ ID NO: 5866 - DNA, 283 bp, Homo sapiens
  source 1..283: mol_type = other DNA
aatgcattttaatttaggcatagtgaaaattccagatctgccacttagtggacaggtactttgaacaaatttcttaaactttctataaaatggggatagtaatatgaattagaataaatatatatgttatagatatacaacatagatgtaattcatatatattaacctttcaatagtagatgttcaataaattacagctattgttaccctgggatttgcaaagataatctttcttaaacatagacttagagttaaactgagttgctggtaggctggcagctgt

SEQ ID NO: 5867 - DNA, 337 bp, Homo sapiens
  source 1..337: mol_type = other DNA
tcaggccatggcttcagagggtgcaagcccaagccttgacagaggtttgggaacctctgcctaggtttcagaagatgtagaaatgtctggatgcccaggcaaaagtttgctgcaggggcaaggccctcatgcagaacctctgctggagcccccacaaagagtccctactgaggcactgcctagtggagctgtgagaagagggccactgtcctcttggagctgcccaagaccatggttagaactttaagattggaatggctgtatttacctaacattgtatctaggaagtaactaacttgcttagaatgatacagtttggctgtggccccgcccaaat

SEQ ID NO: 5868 - DNA, 160 bp, Homo sapiens
  source 1..160: mol_type = other DNA
aggacattttttaaaaggaaaaatctcctcttattccatcatttattcaacaagcattgttgggtgccaagtgaggcccctctcccagatttgcaaccctgtcttccttaggaaacaaatatattagcagtgtcacttctgtacaaatgtggctttattt

SEQ ID NO: 5869 - DNA, 394 bp, Homo sapiens
  source 1..394: mol_type = other DNA
gacttgacacttaactggcatcttatctaggtagataatgctaattcaaaattctgcagcctttggaatttaaaatgttcaaaatgatttgtctggatgagaatcgattttcataacttttgatacactaaacagtttgagtttctagttttaattcatacgaggaaatatcttctagtatagtttaatgcttctggaaactctccacactttggttgtggaaattggcagggatcactttttattatcttatcaaaatctgtaaagctactgaattatatattctttaatacatatagacctacgtcaatgagtttaaactgcaaggggttaaatttcttcctcaagtgtggtcaaaatctgtagagaaaagaggaacagcttctcttaaaga

SEQ ID NO: 5870 - DNA, 591 bp, Homo sapiens
  source 1..591: mol_type = other DNA
ggataagaaaaaataaaataaatatgtacctacttataatatttttataagaaaaaataaataaacattagaatattagaataaataatagaataaataaataaatatacctacttgaacagtgctatggaaagctgcagcaggatttttttaaactcccataactttttatttttctataatattttacttttatagttgtagaaacttgagtcaacttctctagtttatctctaccttctagaaacaaatatttatttatttatttatttatttatttatttatttatttatttaggctggagtgcagtggcgccgttcaagtaactctcgggcctcagcgtcccgagtagctgagatttcaggggcgtgccacttcctagaaaatctgaacagacattacgtgtaaacttcatattactgtgtttttagtaaaacaatgttttgcaagaagttatatccacataattctagaaggatttcccgagaacttctggaggaaagtgggaatcttctcccgcagtcccccgggaggcgggggcggagcaggaaacggcggcgcgcggggcgggaggcggagccgtggggagc

SEQ ID NO: 5871 - DNA, 314 bp, Homo sapiens
  source 1..314: mol_type = other DNA
cccagggtccagtggtcaagccaggactggacttcggaccaccagtgtgtggatgaacaacaaactgtcactttgtcacttttaatgtctccagagatcagggaggcatgccgctgcttctctcttttgaagctcaagtgccacagacctcagaggcacataaatgggactttgattctagattcttagattaggatcatctagtgaagcacatggcctctctgccctcacgttgaactgaactgcgtacgtttgtagtcattctcatcagtggaaatgcccacctgccccaagcaagagcactgtccctggct

SEQ ID NO: 5872 - DNA, 473 bp, Homo sapiens
  source 1..473: mol_type = other DNA
aaaatgcaaaggcttggtaattaatcagctgactttaaagcactattgctatgtagtcatgtttagtgtgattaaattaatgtgatttccccataggctagaaaacttaagtccctagtacctggaacatagcaagcacttaataactatattaggaataaataaatagagatttataaaagcttccattatacacaggatagctcacataaataatattaacggtatctgatacatgtaagataaacagttcattcattaaggggagtaggaagttccctttgtcaaaaactattttaccttaaattgctattaatagagatgatattttaagcccgtttgcaaatgcaaatgcaaataggttcaccgtatgtgaaacacattatgttcttttgacccaagaatatttctttttaaattagatcttgaggctgcaagaggaggaaatcccccttctctggatttcccactgg

SEQ ID NO: 5873 - DNA, 477 bp, Homo sapiens
  source 1..477: mol_type = other DNA
tccttctcctaccctgtatttgagggaaaggaagctccattgaagaaaagaaatggaaactttgttgagtatccattctatacagggcactttccgagaagaaatctgcatttttatttgaagttcttaacagtattttgcaaacattttatcatgttatttcctattttttttttgctttataaataaatacatactccctccttattctaaaaagaatttgaagcacttctaatttgtataatgtcccattaagtcaccctaatttattcaacaaatttccttggtttttaaaattattttctgtaacaaatgatcctgctaaaaaaaaaatctccgcacgaatattattttgttctggaaatttccgcattgtatgctttatttgagacaaaaaaactggttttctacaaaagaaattaattttccacttattcataaaatattgtggcaggcaccgtgccaggggcctcgctg

SEQ ID NO: 5874 - DNA, 523 bp, Homo sapiens
  source 1..523: mol_type = other DNA
tatagcaattagataggtagactgattgatctatctgtggattgatctatgtgtatatcaacatagaaaggctcaaaaacaacataacatagaatatatttagcatacaatttaagtgaaattttaaagacacaccaagtaagacatattttaattttaaagacacacatataaaaatggtatctgtaatattttatttcctaaaaataactacaaaaataaaaaacaaaagggttaaaagttttaattctgagtgatagaaatatagatgtttgttatttgttttaccgtatgttaaacatttccagatatttaaataagagtaattctttctaaagtcaagtaaattctaaactaaccttgacattattagtaagttttgctttaaaaaaaataaaattttgtgttagaagttttaaaacatttggaaattctagttgcggcttcagatttcataattcagatgatgaggaagcaagaagacttgcctggcggcattttagtgaacgcctcttttaaaaca

SEQ ID NO: 5875 - DNA, 485 bp, Homo sapiens
  source 1..485: mol_type = other DNA
gcaggcggcgccggggggcggggcgtgcgcgacgcggtgtacaggcctgcgccagtgcggggcgtgtaggacgtgcgccacgcgctggagacccgcggcgccagcctagtgcccctggcgccgcatcctgagccagcctcgcgatatgtacccatggaatgtgcaactttcgtgatctgtaaactgttttcaatgaacatatgcttttatcagaaaacacataattggactctgctcagtcaggctaatctgagaaattaacatgtatgttttcaatttgttttctatttacctattttctaaaaacattcccccctgctccagggtccggggaggaggaggccttttccttcaacgacctggtaggggaaccacaaggaaattgtttcccttttgtgaaaagatgggtttgatccatgtatctggcccagttccaggacacgttgaactcaccgcggtcacctttgctccgcggtgattggcct

SEQ ID NO: 5876 - DNA, 490 bp, Homo sapiens
  source 1..490: mol_type = other DNA
acgaggaccccgctgcaggccaatcaccgcggagcaaaggtgaccgcggtgagttcaacgtgtcctggaactgggccagatacatggatcaaacccatcttttcacaaaagggaaacaatttccttgtggttcccctaccaggtcgttgaaggaaaaggcctcctcctccccggaccctggagcaggggggaatgtttttagaaaataggtaaatagaaaacaaattgaaaacatacatgttaatttctcagattagcctgactgagcagagtccaattatgtgttttctgataaaagcatatgttcattgaaaacagtttacagatcacgaaagttgcacattccatgggtacatatcgcgaggctggctcaggatgcggcgccaggggcactaggctggcgccgcgggtctccagcgcgtggcgcacgtcctacacgccccgcactggcgcaggcctgtacaccgcgtcgcgcacgccccgccccccg

SEQ ID NO: 5877 - DNA, 484 bp, Homo sapiens
  source 1..484: mol_type = other DNA
gcaggcggcgccggggggcggggcgtgcgcgacgcggtgtacaggcctgcgccagtgcggggcgtgtaggacgtgcgccacgcgctggagacccgcggcgccagcctagtgcccctggcgccgcatcctgagccagcctcgcgatatgtacccatggaatgtgcaactttcgtgatctgtaaactgttttcaatgaacatatgcttttatcagaaaacacataattggactctgctcagtcaggctaatctgagaaattaacatgtatgttttcaatttgttttctatttacctattttctaaaaacattcccccctgctccagggtccggggaggaggaggccttttccttcaacgacctggtaggggaaccacaaggaaattgtttcccttttgtgaaaagatgggtttgatccatgtatctggcccagttccaggacacgttgaactcaccgcggtcacctttgctccgcggtgattggcc

SEQ ID NO: 5878 - DNA, 397 bp, Homo sapiens
  source 1..397: mol_type = other DNA
tcgtcttgtttctgcctcagatgataaaactctaaaattataggatgtgagatctggaatagcatgtatattttacacactttcatgaccattaataaaggacctcaacagacacgtttcttaacctttacgaaacttttccaggggaaacttaaaccaggaattttacaatgcataaattctggaacccatgcaaagcaggagcttcccccgtttctacgttagctgccgtttaggcagcttacgcgtcaggtgtgggcctaagcctgcagctaaggtaggcccttctctgtgacaatttccaaaaagaaatggtttttgaaacaacgatccaaggtccgggacagaaatgaacattggcgacttttttgcgcaggcgcagatggccgtctcccat

SEQ ID NO: 5879 - DNA, 534 bp, Homo sapiens
  source 1..534: mol_type = other DNA
cctgagactgcctgagtagctgggactacaggggcatgaggccacactgaccgcattatgttactttataaagtggttctcgtagaagtttcttcacagaactatgatttaatatacatcttatctttaaaaacatcttttcttcattaatatctaatgaagaaatttctaatttatgtattggttcctataaaatacagaccttagagacaaattcttcctaagaccccagtattaagctttttttttttaaactaatgattggttttattagttttataattttctttagtctcaactatgttaagaattattttatacgtaacctgaataggattatatcttattctttgcatcttcagtgttttagcacagtgtttgttgaattaatgataaaatagagttttaatgatttatgatgtctgtgctttgtttttagatgtatgagtactgtgtataaaatcagttaagacctttgattggtcttgcactccttgttttgtttttttagccataatgtaaacagttaaatta

SEQ ID NO: 5880 - DNA, 222 bp, Homo sapiens
  source 1..222: mol_type = other DNA
attttgagagtaaaacgatcatgtagtttcattattattattattattattgttattattatttttgagtagctggtccagaagcttcctgcattcatgctgcatgtaagctgatccgcccagcttagcaaagacaggtttgtacatataactttctccaacctttcgtctcccggcagcctctgcgacaagcgccggaggggcgcgcgtaggcgctcgggc

SEQ ID NO: 5881 - DNA, 503 bp, Homo sapiens
  source 1..503: mol_type = other DNA
tcaaaagtgcagactccgaattttgtaaatatacatgtgtttgctggcataggaaatacaccaaatggtcacattgtttaagcatatatcacttttgtaatcctcaaaaacacaaaatggaacatccttttgttcatggatggaacaatggaaccattatttaaaacatatcagtgagtctcttggcagtagggccccgtccctgtccgccaccgcacacagctggaactgggtccgcctggaaacccgggggccgggcccccagagggctttcgcagcctggccgcccccggaaggtgcccggggcttcgtgttcctgggtgctgaccgtgcactccccgccgcccgaggacttagagctctggaagtagctctccagcttccttcgtactcgggggccggacttgtacacccgcacgaggactggccgcgtcgggagggcgcgggggctccgggaggcagctgggcggtaaaggcgcggcccgccctgcggactgggcgca

SEQ ID NO: 5882 - DNA, 535 bp, Homo sapiens
  source 1..535: mol_type = other DNA
ctcacatagctactgaggctacatgtggccacactgggttgcaaagacgtggtatgataaaaagaatgtaaaaatctcattacatgctgaaatgattaagttttggatatgtcaagctaaataacatcattacagttaatttcatctgtttctttatcctttaaaaatttcctaaaaatcattaaaattaatttcatctgtttctttatcctttaaaaaatatggctgcaaaaattttagaatgaaccccactctgtgcttcagaccacagtggtccctaagatcagggccttgctctgctctttgggcagcaattcagtgctgttggttaccagatgaacacattcaaattttcaaaaatgggtaagtttaacatggattcagaatgtgaattactttttaggatcaaataatagtaataagaaacacaggagaaacttactttctttgcatagtctactcacaagggaggcctggccctgggacccgggtccgcgcccgtcccccttctccccgcccacctcgagcctgcagg

SEQ ID NO: 5883 - DNA, 370 bp, Homo sapiens
  source 1..370: mol_type = other DNA
cggagtctcactctgtcacccaggctggagtgcaatggtaggacctgtctcactgcaacctctctgccagttccagcgattcaaaagtgcagactccgaattttgtaaatatacatgtgtttgctggcataggaaatacaccaaatggtcacattgtttaagcatatatcacttttgtaatcctcaaaaacacaaaatggaacatccttttgttcatggatggaacaatggaaccattatttaaaacatatcagtgagtctcttggcagtagggccccgtccctgtccgccaccgcacacagctggaactgggtccgcctggaaacccgggggccgggcccccagagggctttcgcagcctggccgcccc

SEQ ID NO: 5884 - DNA, 547 bp, Homo sapiens
  source 1..547: mol_type = other DNA
catgctgaaatgattaagttttggatatgtcaagctaaataacatcattacagttaatttcatctgtttctttatcctttaaaaatttcctaaaaatcattaaaattaatttcatctgtttctttatcctttaaaaaatatggctgcaaaaattttagaatgaaccccactctgtgcttcagaccacagtggtccctaagatcagggccttgctctgctctttgggcagcaattcagtgctgttggttaccagatgaacacattcaaattttcaaaaatgggtaagtttaacatggattcagaatgtgaattactttttaggatcaaataatagtaataagaaacacaggagaaacttactttctttgcatagtctactcacaagggaggcctggccctgggacccgggtccgcgcccgtcccccttctccccgcccacctcgagcctgcaggagaggggaccccgagggcccagaggcaccggacctactcacccggcaggccgctctcctcggtgcagacagcacagggaggatgcgcccagtcc

SEQ ID NO: 5885 - DNA, 283 bp, Homo sapiens
  source 1..283: mol_type = other DNA
ttaagttttactatagaagtgaaagcttaatgccggagtctcactctgtcacccaggctggagtgcaatggtaggacctgtctcactgcaacctctctgccagttccagcgattcaaaagtgcagactccgaattttgtaaatatacatgtgtttgctggcataggaaatacaccaaatggtcacattgtttaagcatatatcacttttgtaatcctcaaaaacacaaaatggaacatccttttgttcatggatggaacaatggaaccattatttaaaacata

SEQ ID NO: 5886 - DNA, 428 bp, Homo sapiens
  source 1..428: mol_type = other DNA
actgagggctgacctctaagtaccacatcagcgctgtcttccgaaagcagtcatgggttctacctgctggcacttggtatagctcttaccaacctcccttgccccttcagcctagatggtaaggggaggaggctacttcaccatcacctgtgtaaataatttctttattaaattatcttcaattattaattttgagtataccatcgatacttgatacaccaggtaacagtattaaacacagtgccaggcatatcaaaggccttcaatacgcgttgattgaattaaataatgccctgacctgactccagccctggcttgattcctgtgttttaatgactttatctcatttaatcttcattataataacatgaaatagttactgtacagatgctattgactgaggctacataactaataaaattgcagtg

SEQ ID NO: 5887 - DNA, 309 bp, Homo sapiens
  source 1..309: mol_type = other DNA
gaggtatcggtagcactggacacgggccatccatggctgaccatggagtcatccttgatattaattgagaatccggctatcccctgatatcctggggttatcaggttacatgtctcatctgttccaggaacacaagtatatactgtgttcaccatagctccgtgagctcagcgagggttcagtgagtaaactgtgagtgtaattgtttcccccacatttctagacatgtagtaataatcacaatgatttgcggcaaaaattaaatgatctttgcgtttgggcaaggtctggtgccccaaagctgccgac

SEQ ID NO: 5888 - DNA, 460 bp, Homo sapiens
  source 1..460: mol_type = other DNA
ataacttgtgtctgaaaaattatagattataacaaatagcctgtttactaaattttgcttagttcaaattaggttcccagagatatctgggtgatcctaaaaaagattttcatctttaaaaagtattttatgtcaacatatattagcatctgctttttatgaaatttcaaggcagacaccaaaagtcagatttctaggacttcaaaagtgaaaattccacaatgatgaaagaattgaggagtgggcattatttgcttttccaggaaatgccaaaaagccataatactttctgtgaaaaaagttaaagttgttatctttcgaagaaaagagaagggactcagctttcttcccatttatgaaatgcatgttcataacgttgatgtcacatgtgaaagcatttttgggcttttcaaagcaatctccccaaaaaaagaatcatttggttttggaaaagaaaaca

SEQ ID NO: 5889 - DNA, 332 bp, Homo sapiens
  source 1..332: mol_type = other DNA
taattgagaatccggctatcccctgatatcctggggttatcaggttacatgtctcatctgttccaggaacacaagtatatactgtgttcaccatagctccgtgagctcagcgagggttcagtgagtaaactgtgagtgtaattgtttcccccacatttctagacatgtagtaataatcacaatgatttgcggcaaaaattaaatgatctttgcgtttgggcaaggtctggtgccccaaagctgccgacccgtggagcacaggtgaactgaggccgccttcccggggcgccgctggccagccccaaagggttactttggccttggctgtgggc

SEQ ID NO: 5890 - DNA, 462 bp, Homo sapiens
  source 1..462: mol_type = other DNA
tcagtgacctgttaagtgacgtcatgttgagttagtaacttcagaaattataggcgaaggattatctcataaaaatcatttcttacgtgcaataagtactacctatttttgttacttttttgtcttacatatccaaagaggagatccaaactagccaatttcattcatatatatgtaaactttacccatttcgcctgcaagatttttgccccaaagatccatctccagtgatcacacagctgtttgtttattttggtatacaaattcagaagagtcaagcaatttggcttgggaacgcaatcacaggattctttgcccgaggttcgagctagcctcgcattccaggctgccaagagcggctcgcgaaagcacgtgtttgtatttccacacccggggtatcaaaacaaagctgcgtggtcccgcccagcatccgtcacgtgacctccacgtgagagccggcgt

SEQ ID NO: 5891 - DNA, 510 bp, Homo sapiens
  source 1..510: mol_type = other DNA
tcctgagcagcaggaggcggaggctgctgtggtcgccctcggcctccggaccgcgcctggtgcgcctgcgcggcccgagccgggccggcggggaggcggggaggcggggcaggcggcaaggaggctggggtccgccctcccctccgcgggtggcgaggaaacaccggcgtgcctaataaacaactcagtgacctgttaagtgacgtcatgttgagttagtaacttcagaaattataggcgaaggattatctcataaaaatcatttcttacgtgcaataagtactacctatttttgttacttttttgtcttacatatccaaagaggagatccaaactagccaatttcattcatatatatgtaaactttacccatttcgcctgcaagatttttgccccaaagatccatctccagtgatcacacagctgtttgtttattttggtatacaaattcagaagagtcaagcaatttggcttgggaacgcaatcacaggattctttgcccgaggttcg

SEQ ID NO: 5892 - DNA, 453 bp, Homo sapiens
  source 1..453: mol_type = other DNA
cgtgacggatgctgggcgggaccacgcagctttgttttgataccccgggtgtggaaatacaaacacgtgctttcgcgagccgctcttggcagcctggaatgcgaggctagctcgaacctcgggcaaagaatcctgtgattgcgttcccaagccaaattgcttgactcttctgaatttgtataccaaaataaacaaacagctgtgtgatcactggagatggatctttggggcaaaaatcttgcaggcgaaatgggtaaagtttacatatatatgaatgaaattggctagtttggatctcctctttggatatgtaagacaaaaaagtaacaaaaataggtagtacttattgcacgtaagaaatgatttttatgagataatccttcgcctataatttctgaagttactaactcaacatgacgtcacttaacaggtcactgagttgtttattaggca

SEQ ID NO: 5893 - DNA, 483 bp, Homo sapiens
  source 1..483: mol_type = other DNA
gctttcgcgagccgctcttggcagcctggaatgcgaggctagctcgaacctcgggcaaagaatcctgtgattgcgttcccaagccaaattgcttgactcttctgaatttgtataccaaaataaacaaacagctgtgtgatcactggagatggatctttggggcaaaaatcttgcaggcgaaatgggtaaagtttacatatatatgaatgaaattggctagtttggatctcctctttggatatgtaagacaaaaaagtaacaaaaataggtagtacttattgcacgtaagaaatgatttttatgagataatccttcgcctataatttctgaagttactaactcaacatgacgtcacttaacaggtcactgagttgtttattaggcacgccggtgtttcctcgccacccgcggaggggagggcggaccccagcctccttgccgcctgccccgcctccccgcctccccgccggcccggctcgggcc

SEQ ID NO: 5894 - DNA, 724 bp, Homo sapiens
  source 1..724: mol_type = other DNA
ctgatgttcacaatgtgtaaaaacttgaacgtttagagatcgcaaagggccttgataaaaaacataaatatttgcaaggttgcctttccatatttgtcgctttgagggttcctaagtcagaaacccctatgccggggccaagggaggcggctggcaggcctggagcgcgggcaggcgcctgctcccggaggagagacagcgcgggctggcgctccgcgacccctcacctctcttgcccacagcacgagcagcgcgatgtcccagctggagaagccgtaggcctggcgcgccgagttctggatgggaccccaggtgttccagaccaggccagcggcgcccgtatacccgcccgggacccgggaccgccgcgggcagcgccgccgccgccgcctcccggcttctccaggaggcccccagcccaggcccgagcccgggccccagcagcggctgcctctcctcttcgctgctccagcgagagcccatggcgacgcgtcgcccgcgaagccactgccgggcgcagtccgggtcaccgccgactagcccagcgcagaatagtcctgagcagcaggaggcggaggctgctgtggtcgccctcggcctccggaccgcgcctggtgcgcctgcgcggcccgagccgggccggcggggaggcggggaggcggggcaggcggcaaggaggctggggtccgccctcccctccgcgggtggcgaggaaacaccggcg

SEQ ID NO: 5895 - DNA, 499 bp, Homo sapiens
  source 1..499: mol_type = other DNA
gaaatagataagcctggaacttttatcttccccatttaacagatgagaagtggaggctcagagcagtgactggctgagcgttcttgatcctggggctgctgtgagtagagggtttgccaaggctccctgggccttggctttgtggatgggccccaagggaggctcctgtgaggctcctcagcatcttgacaggctgtggccttgctgctgagagctgcctcagccaggtacatcactgtcaccgagctcaccatggcggtcgtcgggcagtgtttgctgcctgaggttgcatcaactctgtcccaagagagaggcccactctgggtgctcctggcctgagggtagaggcctcaggccgatgcaggcattatgcagagatgcagcatctttgctgcacaagcatttgtctgggtcctgccctagaaatgcttcaagtaataaaatcaggatgacttaagaaatctcccacggccaccaacatgccctggtggagacgggg

SEQ ID NO: 5896 - DNA, 361 bp, Homo sapiens
  source 1..361: mol_type = other DNA
gcccgggcagctaggattcaattctgtagggtgcgtattactaaccccagtttacagctgaggaaactaaggttaaccctaatccggccagttctggctttccagctcaggccgtgggcaggccgcgccgatggccctcggggatgtcacactcggagtcctaggtcttgccgccggaatgccggccggggaaggggcttcggcccaccgggctggtcaccacactcggcaggcccggggcgggagtcggccgagcagccgcgggatgcagggcgccccctcgcgctcctccgcgcgcctcgaggctggcgggtgcagcgcccgccgcggcaggtctgctccagcccctccctgctctctc

SEQ ID NO: 5897 - DNA, 309 bp, Homo sapiens
  source 1..309: mol_type = other DNA
agggtctcaccctgtggcctaggctggggtgcagtggcatgatcttggctcactgccctttaatggctaaataaattccattagatggatgtacactggtgatatagtaatctatgtttaactttttgaggaaccaccagattgttttccaacagctcaataatgttttactgaagttaaatagaatcctgtccttcacaggcagcctgcgtgagatactgtttctgaagctccaggcacagagtagccacgtggcctcggagcccagtccgcacccgcagcccccagctgagccaggctgcagactac

SEQ ID NO: 5898 - DNA, 395 bp, Homo sapiens
  source 1..395: mol_type = other DNA
caagggccagaccatgctggccacattacagatttcaggctgtattttggaagatatcttaaggtcaacgggcaaagtttctccttgtggcggggaagctcttcaatatgcctgccgcttaaaaggcacttattcagaagttaattgattgacaatttgtagttctgtaactatttaaccccgtgcttaacacggtgcttggcacatggtaaacagtcaggaaatgcctgtttaataaggggtcgcagggtcagcatctggggggccaggtctttttctggcgcaggtgcgagagaagctgccaatctctcctggagcggccccgggagcttccgcgggcgcgagccacgttggacgcgccgcagcgtcgccgaaaggtccctcccaggccccac

SEQ ID NO: 5899 - DNA, 787 bp, Homo sapiens
  source 1..787: mol_type = other DNA
gcgctggagccctggccgggggcgggggaagaccgcgctccacccaggtctggtgacgggaccgcaggctggatgcggctcctagtcccaggggggtgcccgcggccaggcctgaggatgcccgcggggcgccgaggctggggccatggccaggccgggggcggaggcggcctcgcgcggctgtgagccgaggcccgggcggcgcggggggcggggaggcggagggctctccggcggcggcgagcggcgcgagcggccggagcggcgcagggcccgaagcgtgcatggcgcgccctgagccgggctcccgcgggcccccccggagcgcctctcgggcgccgcggctctcaggcgggcccctctgggccggctgcttctgagccccgccttactccccgggagaagcctgcctgcgtcggggcagaaccgcggcagcgctgcgccggattccgtcctccgcctagtcgttccgcgccggccgcggtgggcccgcagccggcgacgaggagcttggggcttgcgaagcgggcgcgacagctctccgggccggcaggtcccggccggccccgctccgtttgcgggaaagggagaggcgagaggggaagggccgcaccgcaggagccggtccctgacccggaccccgccccctgcgcggacgcgccgaaggctcggctcggctttcgccggggccacgcatccactctcgccgcgagaggtgggggatgcgggcaacggcccccccgggctccaggaccctcccccccggggctccggagctgttgctccg

SEQ ID NO: 5900 - DNA, 301 bp, Homo sapiens
  source 1..301: mol_type = other DNA
cagctggttgaagcaatgcccacaagctgcttatttttagtcactatagctataaaccctcacgatgagcgagtccggacgacactggattctaggccgcctgggtggaatctccaacccggcatggtccctgcagcctcaagggctgataccggaaagcataattgttttgattcaacatgcgccaggagcgtctttgccctcagccaagatggcggctgccgtggaccctgtcccggctccgccccgcggccctggccccgcctgtctcctcgcgtagtccggcccgagccgctcgcgc

SEQ ID NO: 5901 - DNA, 443 bp, Homo sapiens
  source 1..443: mol_type = other DNA
tgcctatgaagaggctgtttcctccctctctcagggaggacaagtagccagctagatgcacagcttttcgatgcctaaaaaagatgcatcttagtcattcctgttaaccttagaaaaaaggtgaagacacaattgtacattattaggggtagaattttcgcaatgtaaataaattacatctcaagttctgatccttttcagcagaaattctttcagtcactgagaagcaaagtgccgttgcctttgcacaccaaggaagagctcctctccagagcttcactgcatgcaggtgtttctcaaaatcttttaagtctctgaattataaacagagcatcatcttgtccagccccctcctagagaaggagactgaagctcagagtggttaagttattattattatgattatttttgcataattataatcacatcactggcattgtttt

SEQ ID NO: 5902 - DNA, 421 bp, Homo sapiens
  source 1..421: mol_type = other DNA
agcaagttgaataagctcccagagcctcagtttctgcatctataagctgggaatagctttctctgtctcatcctaaaagagcgctttataaaagccaggtgtttccgtgggggtctggctctccggcccctgagacccctccagggcccccacccggtgcgccctcctttggcacagccgccgggccagagagcgctggagccctggccgggggcgggggaagaccgcgctccacccaggtctggtgacgggaccgcaggctggatgcggctcctagtcccaggggggtgcccgcggccaggcctgaggatgcccgcggggcgccgaggctggggccatggccaggccgggggcggaggcggcctcgcgcggctgtgagccgaggcccgggcggcgcggggggcggggaggcggagggctc

SEQ ID NO: 5903 - DNA, 426 bp, Homo sapiens
  source 1..426: mol_type = other DNA
aatgtattctcaataaatgataacttattatttttacatattggtaattttcaagttttatgatgaaatgtatttaaaattaagaataataaaatatcacaaaagagttgacgatcgctctaatgagtagtcgtctgttccagcaggccctggaccaggagtcagggcttaaggtgtgcaagtgactctgatgatctgtgatctgctaaagcagtttctactttctgccagaagtgcttaatgtagagagttagtgactattaaatacagattatagatatctattataagaactatttctcgcttcccctttcctagaagaaggggtcggcatcgccctggggcactttgtgtataaaagacagagcctctcatcttcacagaggagctgtgggaccctgaagggaagacagggctgtgctttgt

SEQ ID NO: 5904 - DNA, 477 bp, Homo sapiens
  source 1..477: mol_type = other DNA
tcattaaattcttttttgtcttagaaaatatatttttctcttaaaatgttatttatgttagcctataatgggcttattgatgttttaaaatgaattaatatttcccagttttaatttccaatactgtaaatattgacagcagctctgggggccctcaataatttttagaagcataatggggcccacccagggggtctcctaggtgttaatcagatatgaatcaaaggatgttcctttggaactatgaaaataccttctcttgctggaggaaaaggagaggagtgctccaaggatcattcctgaagctctccagggctcacacagtctgttgggcctcatcagtgcagttccttatgagaaacacagcacagcttcttcagcccctccgaggactcagctctctcagattagaatctgcagctcttcccccaggactccattgagagcctctgcagtggcagccagaggtttcaaagg

SEQ ID NO: 5905 - DNA, 488 bp, Homo sapiens
  source 1..488: mol_type = other DNA
ttataataattcactagtctatatatctatatatttgtttttttctgtatttatgttttattttacaattaaaaaatttttaaaaacactccttaacctgcagtaaacagtttttttaaaaaaaacaaaatataaaatatttcatattgggtgcaaactaaataatttaaagaactttgtaggtatcttccaaacagttgcaccactggaggatattagaaaactgaggcccagaggcagccagtgtctcatggcatcagaccccgacctaaggcctaggtctcccagtgtacagcccgctgaccgccgcctgcgaggagttaactggggctgcggattctccgctccggactccgaggcagaaggcgggtgggcgtgggaagggcagcaggtccactccccacgccgcgctctcactcgctctcctcagcgcgcgtccggccccgccccgccccgccctgcccagtcccggacgcgcctcgcgggct

SEQ ID NO: 5906 - DNA, 363 bp, Homo sapiens
  source 1..363: mol_type = other DNA
cagagaccagcctggccaacagggtacctgtaatcccagctcttcgctgcgttgaaatggaataaactgagttatctctcttcaacttgatttaaatcattaacccaaaactcaaatgagtgcacatgccaatactaagaatgttgtgtcatttttcatcaaaagtaattacctcaacacgaggtcttatttttatagaatatcaagaacaaaatccggcggctccgccccggccccgccccagccatgccttggccccgcccaacccctgccggtgggtgacaagccgttgcgtacgcccaaggcgctgggcctggagcagttccggaagcggaagctcggcgggcgggccaagaaggtccg

SEQ ID NO: 5907 - DNA, 358 bp, Homo sapiens
  source 1..358: mol_type = other DNA
ttgacattaattgtaacagacttttaaagcgtagctcttttctccattaaaaagaaatgacctgaggtcaggagaccagcctggccaacagggtacctgtaatcccagctcttcgctgcgttgaaatggaataaactgagttatctctcttcaacttgatttaaatcattaacccaaaactcaaatgagtgcacatgccaatactaagaatgttgtgtcatttttcatcaaaagtaattacctcaacacgaggtcttatttttatagaatatcaagaacaaaatccggcggctccgccccggccccgccccagccatgccttggccccgcccaacccctgccggtgggtgacaagccg

SEQ ID NO: 5908 - DNA, 355 bp, Homo sapiens
  source 1..355: mol_type = other DNA
ttaagtgtattaaacatccaggtagttgtatatatcagtactttgtatagtattagtagacataagcactcatttcgaatatatgtacgtgtaggtgtgacaaatatccatatatttttctaaatttattttgtatactgataacctatgatttaccagaatattttcatttctgttaatagtgttttaaaaaacctttgaatagtattcagattgttataccaatctataggtagtgctatgtagaaaactttgttgttttttacttattatgttcatagactaatactaggttctgtaagagaagtggcatatgatttctatagacaatatgtgctctagtctgaacaatgtt

SEQ ID NO: 5909 - DNA, 309 bp, Homo sapiens
  source 1..309: mol_type = other DNA
atcaacctgttaagaggacaaacagggatgtgcagttgcctgtgggttccaagtgatactcatagaaaccctctgagattcttttcatttatgaaaggctatagaatgcattgttacactatcaagagatttaaaaatggaaaataactttacaaaatgttagaattgaggaatgttaagatagaatggacctttctcccacttctttgatgaaatccaaaggcaggaaagctgggctttgctcttcaactcagagagtctatgatttcaactctgtgattcaaaagacgtgtgtaaggagttgtcaaa

SEQ ID NO: 5910 - DNA, 384 bp, Homo sapiens
  source 1..384: mol_type = other DNA
tgagtcatgattaccccattgcactccagcctgagccctactgttcaaagcgaaggtaatacctaccttcagagtttactgtgaaactttgatgtcatcatgtttgtaaaagtgccctggcaaaacccagattcagatcctgactctgtcacttgctgactgtcatcttggacaagtttaacctctaatgagttcatgtgtgtaatgcacttagaacaattcctggcaccaaaaactcattgtaagaagtgttgttactatgattcctgaggaattctcacctgtccagtcccctagcagcgccctagcgggaccctgggaacccgccgctgcaggagaggcggggcggctctgtgacgtcgcgcccggcgctacccctggtga

SEQ ID NO: 5911 - DNA, 234 bp, Homo sapiens
  source 1..234: mol_type = other DNA
gaagtctgcctggaaaaattaaaccttctatctaccagtatctaccaggtgcaacaccagaaacattatattcttcttttgctttgtacagtaacgctcccaggctccccatcccatattctattggaggagccactggcctcggacttgactgtggattttcattctcatccaggcaggctcggtctgcacacgctcccggcacagtcagcctctgtgtgggaggactggtgg

SEQ ID NO: 5912 - DNA, 687 bp, Homo sapiens
  source 1..687: mol_type = other DNA
cgagcaggagagccagctgccgctgctgggggacagcgggcgcccaggcagcccgcaccccggccccgggccccggccccagccagacagcaggcggccagcgccctggggaaggggtaccatgggggagctggcggcaggcacccccagcccgccgcgcgcctccgcctgagggaggctcagcgtcctctgccccagccccgccgcccaacgcccgccctcgaagctccgcggccgccagctctgcggccgcagcagctgcgccccgcgccctccgcccaccgggcgccgagcagccctcggccccaggcttcttcggctcccggctgcccgcggacgccctccccgggcagggcgcggggggccagggctgaaggctactgcctcggacgcggcgtctcgttggggggcagtgccccctcggcgtcggggctgggggagggcgtgggggctgggaactccgcgcccctccgccttcaccccagttgcgggagtctgtgttggggaggtgggaggcggtcccctcggaccgccttctcccagagcgcggggatgggcggtgttggctcactttgcagcgcgccgctccggctaccggcccctgtgcctgtcagcggggctcccggcggccgccctgggtcggcacccctcctcgccgtcgggggcccggggccctgatgtgcacag

SEQ ID NO: 5913 - DNA, 346 bp, Homo sapiens
  source 1..346: mol_type = other DNA
tggagacatccatagatatttttaaattctttgagcccaggagttcaaggcctctattaaagaaaattttttaaagaaaatctacaaccgtggaatataggaattcttttacattttttttttaaatggggaaactgaagataaaagagctagcaggtggcaaaactgagctttgaaggttggttacctgaggcactgttatcattattagtaatcagcattacagtacctacctgtttggtgccaagggctcaaactccacccgtttgccccgtgcccacagcgttggtgccacaggcagcgttacatgaggctccggccgctgctggccaggtctcctgcccac

SEQ ID NO: 5914 - DNA, 747 bp, Homo sapiens
  source 1..747: mol_type = other DNA
ggccgcggggccgggaggagcaccggcggcgcgagcggagaagctgagcgcgcagcgcccgggccgcagagccccctggacaagcctggcgtgtgccctgcagccccgggctcgcccggcggccccgccccctccctggcccgggcttttcctgcggagctcaggaagccggcctagcacagcctcgaacaatagctcgggactcgggctccgctccccgggaggccggcgcggggccgctgggactgggggcgtaggcgccgccgggggcccgcagcgagccctcggccccggccggagcttcaattcagctcggcgctcccggggtcattgttgcgggagccgggggaggagctggggaggcggctgctgcggcggcggcggcggcgggagccagaggggcgagcaggagagccagctgccgctgctgggggacagcgggcgcccaggcagcccgcaccccggccccgggccccggccccagccagacagcaggcggccagcgccctggggaaggggtaccatgggggagctggcggcaggcacccccagcccgccgcgcgcctccgcctgagggaggctcagcgtcctctgccccagccccgccgcccaacgcccgccctcgaagctccgcggccgccagctctgcggccgcagcagctgcgccccgcgccctccgcccaccgggcgccgagcagccctcggccccaggcttcttcggctcccggctgcccgcggacgccctcc

SEQ ID NO: 5915 - DNA, 364 bp, Homo sapiens
  source 1..364: mol_type = other DNA
aacttttttagcttaaatttaagggttattttccttaagctagaataaagtattgccttatatacacaatggagaagggatttatttgtacagattatttattgattatttctttaagggatttatttgtaaagaccaaatatgtttggattttcagattgtctagcaatattatcctcctggataacctgaggttgtcacgtactagatgctatgaagttaataaaagaattgagtaaaggtccctgtctttgataacttatctaataactagcaaataactctcatgaaaggtgggacttcaagcccggggaaacccacgggtgcagcaagccgtgacgtcatcggggcgccggaggcccgg

SEQ ID NO: 5916 - DNA, 455 bp, Homo sapiens
  source 1..455: mol_type = other DNA
tgtttttgagtctatcagtttgatcatggaaactgacagattatcaggccagtctctacaaaacatgtaaaaattgtccgggtgtggtggcttgagcccaggaggtccaggctgcagtgagccaagactgggccagtgcactccagggtttgtacgtcccatctcaggccgccggcagtgaggctttgggaggatgaggcggtaccggcacgacccccgtacctgcccgcccctttcccgtggcgacgggcggctaagcaacgggagcgggctctactcagtggtttcgagccccccacgccccaagtgagtcgcaagcgacttccacctgggcccgtagggcctccgcgtcccgggccggtccccgcacagggcggagctggcccggcccggagctcgccccgccccgcctcaccgtaagctgaccgtgtggcggccgggcgagggcctggcag

SEQ ID NO: 5917 - DNA, 315 bp, Homo sapiens
  source 1..315: mol_type = other DNA
tgtcaaacattgtccaattgtacactttataaatgtacactttggtgtatgtcaattataccttcacaaagagctgtctccaaccttgagggcggcaccttctacgctgccctgacagcggcaggtcttagcttcattgggatcccctgaggaggagacctgagtctcaggagtatttccctctgtcacccaggcgctgggattccaggagccacagagtctagaagccaagagtaacaccaaaaccgtttgaggctgaactctttccggtaggtgaaactcaacttccggcggagcttttaaaaggcttttttg

SEQ ID NO: 5918 - DNA, 217 bp, Homo sapiens
  source 1..217: mol_type = other DNA
gggcgacagagtgagactctgtctcacacagagcagagagatcaaatcagctgttctaagttttctagttaggttaaatgccatgatggggattctcagaactacagctggaggaaagtggtttcctgcactcatatgtgtatcagaatgtcctgacttattttgggctttgagtcagaaaaataatgctagctataacgtcaattaatgactggac

SEQ ID NO: 5919 - DNA, 481 bp, Homo sapiens
  source 1..481: mol_type = other DNA
cagtactgagaccctccactccgggaaaggagtctcgatagctcctattgtgcaggggagtagctcttaatttgctgagcctttttgaagaagacctgtctttgagttaggtcaactccagacctagagtagctgaaaggagcctttccagttccctgagttgtttgaaacccttaaaagagagctgcttctttgaagatgttttgcatccaagggtgctattctgaacatcatttcctgtctttctctttgtactcatggaacaacagaaaggcaaaatgcctgttttatcctgaaaataggaaactggttctaggccaaggaacactgttaacgacacctagttacagatagcaacaaaaccgggctgttttcacccagccatggggcaatccagggccaagggtcactggtgaatggcgatgacattcatttccaaaagccttgggacccacgtgtcatttcagggctgttaaaaacc

SEQ ID NO: 5920 - DNA, 380 bp, Homo sapiens
  source 1..380: mol_type = other DNA
cagggttgaatcttttaattaacctctttgaacacttttccataagatgaggaaataattctacctttctgatgaggttgtacttgacacccaggcagtttgaaagtgtgggtctttcctgaccagggcagcccatcaccccacttcaccatgcagcactgtgcttcattagtgttcttgcagaagagaggtgatgatgaaaatcaggggcttggaggatggtacctgaccccgaggacacaggaagctcccatggatcaaagctgctgagcaggaggctgccagacctttgtaatgctgagcctctccagggcattgtcccagctcagcaggcagcgcaggacctctgtgtgccttgcaagccagggatgcctccctag

SEQ ID NO: 5921 - DNA, 109 bp, Homo sapiens
  source 1..109: mol_type = other DNA
tcagatcacctgatgttaggttggcctaatgtactgcacaacagagcactatgtcatgatatggtttggctctgtgtaaatctcaccttgaattgtaacagagtctctt

SEQ ID NO: 5922 - DNA, 339 bp, Homo sapiens
  source 1..339: mol_type = other DNA
atggaatcttcatattattatgaagaaatccaatgttagctgagctctatagaggggtccagggccggatctgcagacactccactttccaagcgctgggcatagggagtcccccgctctaagagagttccttcccaggcccagcctggggggcctgcggctcgggtccagcttccacggccaccctgggctggtgacacgcaggcgccggaatcgaagccacgctgtgtccaggtctctgcgccagacgagggcgggcgccgcggagcgcttcccgtgtgcggggcttcccacaatgcaccgggccggcagtggcggcgaccgcggcggcgctctagc

SEQ ID NO: 5923 - DNA, 288 bp, Homo sapiens
  source 1..288: mol_type = other DNA
ttgtcaaggaagcaggtttggaaaattttaaaaagggatgtttgtagaaaattaaaaccctgtaatcccagctactccggaggaggttgcggtgacctgagatcgcgccactgcacgccaaaaaaaaaacttgcaagtattaccttttgctgaatgtgtttaacctgctgaaagttatagagctctgatctttccgggagaactggcttaagcagctgaccaggtcctccgcggacccccggttccgcctccagctgcagctccgggagccctcactggttggccgcg

SEQ ID NO: 5924 - DNA, 325 bp, Homo sapiens
  source 1..325: mol_type = other DNA
gcactcggccgggcgcggtggctccagtcccagctacgatcgcgccactgcactccagtccgcctccttcagggacccgccgccctgacccaagatggcggtgagggaagtgagctcacggctgtgggtggggcggcggccgcggccctggcattcgcgcttgggtctggagatagcgcgagagactcaccggctcctgggaacccagtcgagggcccgggccaggggcataagagccgagtggctcgcctctggccctgggagaggcggccccgggagccggcgtcccgcccccggcggcctcattccccgacccctccccggc

SEQ ID NO: 5925 - DNA, 240 bp, Homo sapiens
  source 1..240: mol_type = other DNA
cttgttttacaaatccaaaaccaaggcctaaacaaggtgaaagatttgtctctgttctgagatctctaatttccatgacagcttctttttaatttataataatgattggcactcggccgggcgcggtggctccagtcccagctacgatcgcgccactgcactccagtccgcctccttcagggacccgccgccctgacccaagatggcggtgagggaagtgagctcacggctgtgggtggg

SEQ ID NO: 5926 - DNA, 363 bp, Homo sapiens
  source 1..363: mol_type = other DNA
ttgagcccaggggttcaaaaaaccctgtttataaaaatataaaaattagcctggtgtggtcatgattaccccattggcaacagagtgagactctgtctcaacaagttgggccctgggccctactgccagctgtaaggtaatatctaccttcagagtttactgtgaaactttgatgtcatcatgtttgtaaaagtgccctggcaaaacccagattcagatcctgactctgtcacttgctgactgtcatcttggacaagtttaacctctaatgagttcatgtgtgtaatgcacttagaacaattcctggcaccaaaaacgcattgtaagaggtgttgttgctatgattcctgaggaattctcacc

SEQ ID NO: 5927 - DNA, 229 bp, Homo sapiens
  source 1..229: mol_type = other DNA
ttctaaatttttttcaaagttttcaatgctggtgaggaactgcgttctttccttctaacagacaggatcctcagcgcctgttggccctgctggggggtgcctcccagtggaggcagtctgcccattctcagccaggacatttaagtctgcagaggttactgccctgcccccagaggtggagcctacagaggcaggcaggcctccttgagctgtggtgggctccacctta

SEQ ID NO: 5928 - DNA, 420 bp, Homo sapiens
  source 1..420: mol_type = other DNA
tcatgattaccccattggcaacagagtgagactctgtctcaacaagttgggccctgggccctactgccagctgtaaggtaatatctaccttcagagtttactgtgaaactttgatgtcatcatgtttgtaaaagtgccctggcaaaacccagattcagatcctgactctgtcacttgctgactgtcatcttggacaagtttaacctctaatgagttcatgtgtgtaatgcacttagaacaattcctggcaccaaaaacgcattgtaagaggtgttgttgctatgattcctgaggaattctcaccgtcccctagcagcgccctagcgggaccctgggaacccgccgctgcaggagaggcggggcggctctgtgacgtcgcgcccggcgctacccctggtgacctggcagcggagcccgcgc

SEQ ID NO: 5929 - DNA, 232 bp, Homo sapiens
  source 1..232: mol_type = other DNA
gaagcagatttcactgaaaattttgaggtacaggcaccatatagcttaaggttgtctcaaagattatatatacacatgtaacatatatctgtgtgtataaaacattcagagatgaggggttcttcctcatccttagagaagaacaaagctttgtattctctaaggacacatagaagccactttacaaaggttcctttctctacctccttccctcagaagaagggggaaggat

SEQ ID NO: 5930 - DNA, 449 bp, Homo sapiens
  source 1..449: mol_type = other DNA
tcagctttgtgagtctgaatcttgattccacagctgtgtaacctcctaggataatggtacctacctcataaggatattgcgactatgaaatgggttattctatgtaatacataaaagcacttaagagtagtatctgccacataagtcctatctaaatgttagctgctgattaagacggtggcaaactacgtgttttcaaaggaactaaatcctattttgcagcttaggaatagtaagttccgagttaagtcactggacccagcggcgaaggctgggacttgaaccccggcctgacccgaaagccggcgctctagagggtcaggtcctcagccctcacccggcccagttgagatccggacatgaccatctctcgcagcctcagagaggctcccggaccttcttggcccgccccccgagcttccgcttccggaaaggatcacgccgaaggc

SEQ ID NO: 5931 - DNA, 551 bp, Homo sapiens
  source 1..551: mol_type = other DNA
ttatcagacttaaagtctgcaggagagggataatgaggcatgttcggcctccacttccccttatggcctgaaccagtttttcaggttaaattctaaaagtatcatttattttttggtttaaaatataatgatatattttaccaagtcttgttccctcaggcccggactgggaattgccaatttcgtatatgagaatgtttaaaaaaataggccttactgattaaacatactcgagtatttaaaggagaatttatccactgggatgctttaaaattacagccgcataggcgcctctcccgtagcgctcccgcgggggcgccagtggggccccagctgcgaggagggcccgggctcgcgagactcggtcccccacttccgtccccgcgatccccggctcccagccccccgggcccccggcggggctctgcgctgccggagcttgggcgtctgctgctgtcccggagcgccaagtcgtccgaggtccggccgcccggccggggcggggccagggaggcccggccttcccgcttcctgcctgagccgcaggcccg

SEQ ID NO: 5932 - DNA, 462 bp, Homo sapiens
  source 1..462: mol_type = other DNA
cttcaggaggtcttgagaacatgtgcccaaggagggacttcaagttaagttcatttaagaaataaatttgtttgatccagacaacttaaacatttcaatttatcagacttaaagtctgcaggagagggataatgaggcatgttcggcctccacttccccttatggcctgaaccagtttttcaggttaaattctaaaagtatcatttattttttggtttaaaatataatgatatattttaccaagtcttgttccctcaggcccggactgggaattgccaatttcgtatatgagaatgtttaaaaaaataggccttactgattaaacatactcgagtatttaaaggagaatttatccactgggatgctttaaaattacagccgcataggcgcctctcccgtagcgctcccgcgggggcgccagtggggccccagctgcgaggagggcccgggctcgcgagactc

SEQ ID NO: 5933 - DNA, 511 bp, Homo sapiens
  source 1..511: mol_type = other DNA
acagcctctctaaggctctgcatcagatatctgatatgtgataccatatgggagcactgatgtgttcaggcacatcactcccggcattctacatggccttgcctgagaccgggctggccaggatctctgggaaaaccaggggctgtttttctctcggagaggcgggtaggcactgggcgggcagaagcgccgctatccacccggatgcgcagctgctaaggggccgcctctgcaagcggctgcaaagtgtccgtagcacatggcaggtagcgagtgagtgagtcaccggcttggcgagggtacttagccttgccagcgctcagaactgccagccctgctgggtgcttgggacttttcaaagccctgggaattctccaagggtccgcgcaggcccctgcggggttggcttttacatggcatagacccgcccggagagggtgcgctgcgctcccgccatagtcccaccaccggtgagcgccgcccccctcacgggctctggccttaaccagag

SEQ ID NO: 5934 - DNA, 333 bp, Homo sapiens
  source 1..333: mol_type = other DNA
tacatgcattaagccattcaacaaacatttatttagcgaacagcctctctaaggctctgcatcagatatctgatatgtgataccatatgggagcactgatgtgttcaggcacatcactcccggcattctacatggccttgcctgagaccgggctggccaggatctctgggaaaaccaggggctgtttttctctcggagaggcgggtaggcactgggcgggcagaagcgccgctatccacccggatgcgcagctgctaaggggccgcctctgcaagcggctgcaaagtgtccgtagcacatggcaggtagcgagtgagtgagtcaccggcttgg

SEQ ID NO: 5935 - DNA, 484 bp, Homo sapiens
  source 1..484: mol_type = other DNA
ctccttcccagctgtggggctggggagggcccagcagggtgcctagcaagccaggattgctgcggactaaagcagtctacgaacgcttttgtagactgcgaagcattgtttggtctagcgcgcgcaatttccggagggttaccgtatttatccaaaaatacgtcctttcagcgggggacagagctgcttgggggacgtgggccagaccgggccagacaggctccccagcgcttcccgctcaaagccggccctcgtggacgccgcgatggggggcgtgcgcgtctggcagctccgggatccccgagcatccgccgctcaagtccgggagccgcgcgggcgggccggggcggggccagggcggggccagggcggggcgggacgtgtgacgcgcagcgcgggccaatggggcgcgcgcccggggccgagcctcctgcgagccttcgcggcgcccgctgcgtcacgtgagcggcggggagtgagtgcc

SEQ ID NO: 5936 - DNA, 448 bp, Homo sapiens
  source 1..448: mol_type = other DNA
tgactgtgcttccccatagatactgggaaaatctagcaggatccctgagctgggggaccagacatcctggtgcccctggcttcaagcagctggtggatctggcaaccctagccagcactggggtcgccaccccgagtttctgattctggggcgaggattgaaaacttgcttttcagtgcttggcacgtggcgacccgcgttcaccaggcccaggcctgggccaggcgctgtcctggcggcgtcagggaggacatcgtgcccagagctcggacccagcagcccggccccgcgccctccctgtcccgcggcccgcaggcccagccctcaagcgcccagcctccgcggcctttgtggcgtcacagccagcctgagagccctgctcctggagctgagaactgcagcgcggaggcttcggagcgagcggtgggtgcgctcgcggtccggggag

SEQ ID NO: 5937 - DNA, 671 bp, Homo sapiens
  source 1..671: mol_type = other DNA
cctcagggctgacccacaggatgctctcagaggagcaagcactcagaaggcagctgggcttccacgtgcgggccctgcactggggcttgcctaacggcactccaccgccttgcagctaggacatggccaaaggccacagagggagacccgggccttggtttctccatccatatttgggaatgagggtcatccctcaggcaggtccttcaaaaagagctttgggagggggtggtgtgccccccagcgggagctgaagagagcacacttgccactgagggcccccactgcacctgagccctccagtggggagccaaggagggcacacctgctgctgggtgctcccgctccacctgtcaccccaccccccagcaggaggtagcaggaggagggtcatcatcaagatgcagatccccacatcgaatgtttggtgtggtgcaccagagggctgccacagcacaccaagctgtcccggacagcacagccctcctggaaggggaagtgagcccagcccccctccccactgtgaagctgccctcccgcagagcaatgtcctccccaggtcagcgctgtaggccagtgaccctccgacctgcacatggctccctgcacaggccaggcgcccaatgagaggctggaggaggtggccctggggctagaggtccctgccctat

SEQ ID NO: 5938 - DNA, 433 bp, Homo sapiens
  source 1..433: mol_type = other DNA
agtagttatttttcaggtcctgcgtatcagggccccgcgcccggcatcctggatctgccggctgccgagtgactcgccctgggtgaccgcgcacgcttaatcagcgacgcagtcaatgcctacgatattaatacgattcgaagtcaagacaagcctcgtcttccacgcgccgctcgccctcgtaggtgccggcgctccgccccccgaccccgcgccccgccccaccccgcgccccgccctagtcggtcccggcgccccgcccccgcctccgcctccggcgccccgcagcccagcctcacgtcacgtcagcccagcaggcctcgcgcatcgcccggcggcgtccgcgcacgcgcggttccgagccggactctacgccggggcttggcgcggatcgcgtcccggggcggcgcacgcacacctgggcggggcgcgg

SEQ ID NO: 5939 - DNA, 584 bp, Homo sapiens
  source 1..584: mol_type = other DNA
ctgggcagcaagaccctgcggttagacgtgggctcctgcccacagggtcctcagagctcacgtggtgcccagagaagttgtgcaagctccattccccgggggatgtaagctgagaccgccacctgcatgagctagattcaggcaggacctggagaccctggaggaaagcaaggctgcagggtagccttgggggtcccggagagccatggacagggcaagtctcagcccttgggcccctggcatctaaggcagcaaaggggacaccgcccggggtggggcacgccaccgcgacaatgcctcttggccttgggggcacccctgggcaaaccctaggggcggggcccagaggcgaggggcttccccaatcagacttcggccccattccattgggtgagggtgggggcacgaaaagaggagcgggcttgcggccccaccgtgtcccgcctcctcagtccccagcgactcgcaggggctggtggggctggggtccagctgccgtgctcccctgccctgcgccgcgccgcgcgtcttggtaggcgctgcgctgccggggccgggtcctgggccagtgcaactccgccccc

SEQ ID NO: 5940 - DNA, 383 bp, Homo sapiens
  source 1..383: mol_type = other DNA
aatattagtaaatgaaattcatcagcatattaaaagtgttacacactattaacaagtaatatttatccctagaatgtaaggattattttttcataatgaaaatatcaatgtactacactacattattagaatgaggaggaaaagacatgatcatttcaattgatgtatagtgaaaaactggaaactttttctctaagatcaagaacttcccgttcgaagaagtgaagttacctccgttcgaacggctgaaccacttccaggaaacagcttttctgcagggccagccctggcccatccctgggccagaggggcttcaggctggagtctgagcctcatgggtcagcagctgtgatgtcaccaattgtgacctcaagggcttctga

SEQ ID NO: 5941 - DNA, 443 bp, Homo sapiens
  source 1..443: mol_type = other DNA
gaagatgtgacttctttaagctataagtcagtgaattcatttaataccattgacagccttagctagtgccatgctatggtgcacaagacccagtcctaattgactgggaataccaggcacaggtaaacagtcaacaatattgaattctgcagtaagctgaagtcatgctgggtttatacattcatctaaccatctcggaaactgtccacagggagagtggccctcctttggaccactttatcaaggcagcatgagataatgttaataaattaatagataggactcagtttatatttcatgtgatcagaacattttaccttggacaggtttaatttgtctgccatcttttgctcatgaaaattgccataaaaaataaacagtttgaaaggtatacattatttaaaagcaggttttacagctgtgcgacagatgtccagggaatg

SEQ ID NO: 5942 - DNA, 489 bp, Homo sapiens
  source 1..489: mol_type = other DNA
ctcagcataatttggaaatttacatcatactaatgaactccttcatgcagtgggtaaattgcttgttctagtaaatttgagtgcaaattaactctggatgtgcatttactggtagatactgtatattttaactgtgaatttgcagtgaatggatccatattcagaccattgcaatgaaatgtgggctcacaaaacagctccacatgtgtttaaaaaagttgatgtagtttgaaaaactattataaagcacttgtcagaaagatgtcatattagtaactgatttgtatatttttaaatttattttatttcattttatttttttcatcactctgtcatcgaggctagagtgcagtagtcactgcaacaggtgcaagtgattctcccgcctcagcctcctgagtagctgggatttgtatattttaaagaatagcataaatataatattcagaatgtgtttttttaaaacaatactaacatctaaatatgtat

SEQ ID NO: 5943 - DNA, 263 bp, Homo sapiens
  source 1..263: mol_type = other DNA
cctcataggagcagggcggccagcctcattcagaaactccaggttttgctggagtgcagtggcgccatgctgggtgcattgcaatagcaaacgcaatatatttatttagcttgtgtgatctaaacttttaaaaatatcaatctttccaattcacacttcccataaaaattgaagaacgtatattttaaggcgcttggtacccgcccctttgcgaagggcaggtgacacctagggcggctgcctcgctgagagtggccagcgag

SEQ ID NO: 5944 - DNA, 264 bp, Homo sapiens
  source 1..264: mol_type = other DNA
ctcccttacacatagggtcctgtgtaagaagcctacacacaatgcctgtccacacatggtatgtacactgaaattaaaagaggcctccttctgctcaagggcaggacactcgctgtcttgaggggcgctgtaatgccagggccaggtccctgctcgtctggcgctcagcccgtgctggtgcttggctctccctcaagggggagctcccaaaggcgccacccgattggtgaagcctctggcgtcggccaataggagcgtgtgccg

SEQ ID NO: 5945 - DNA, 520 bp, Homo sapiens
  source 1..520: mol_type = other DNA
ccgagaggcacacacaggatgctcatcacagctttgctcatcatggcccatgtccatcggcgatgcctgcgagcagctgccctgtgccctcaccacacagagcagacagagcaaacagcacaggctgagcacccaaaacagcgtcccattctggggtgcagggacacctgggcccggtatgagtccattccctttccctgttaaccatgtgaactgtagagagttcctcttctgtaggggtgacgtgatctacagatgggggccaagtccccagccgggactcagcccggttgcgtccaccgggaggccctcccggatgcctcctgcctggctgcccctcagccttgccatgcaggctgggggtattgcctggacagctctggcccccgctgccccacgctacagccggagttcgcgtctcgccacgcctctgccgcgggactttcctccctgggctgcgtccccagccgggaatgcgccaccagcctggggcctgcagggggcgcccgggctccccgcg

SEQ ID NO: 5946 - DNA, 748 bp, Homo sapiens
  source 1..748: mol_type = other DNA
tacagatgggggccaagtccccagccgggactcagcccggttgcgtccaccgggaggccctcccggatgcctcctgcctggctgcccctcagccttgccatgcaggctgggggtattgcctggacagctctggcccccgctgccccacgctacagccggagttcgcgtctcgccacgcctctgccgcgggactttcctccctgggctgcgtccccagccgggaatgcgccaccagcctggggcctgcagggggcgcccgggctccccgcgcaggtgcccgcccatctgacagagcggaacgcgcgaggccgagagctgggaacacccggccccgcaaggtctgggccccgtgaaaggaggccatgctcctagcctgggcacactgagccaggccctgttcctggggtcgcgggctagcccgctcgagagcggggggctcccggaactgcccgcgcggccccggcgcccagagagttgaggcgggcagaagacgcgcggtgggcccctgcaggcgcgcggcgcggggcagagcgccctctggaggccgccgccggccccgcccccgccccgcccccgggctctgggcggcgcatgcgcgcggcgcggggctccgcgggcggcgagagcgaggccggtccgcagccgcgcggcgctcggcgccccattcatgctgggcatcggctgcgcggccacgcagcggagcccgggcgcggcggcggcctcggcctgggcggcctacgcggcttcg

SEQ ID NO: 5947 - DNA, 444 bp, Homo sapiens
  source 1..444: mol_type = other DNA
tgggaaataccctggtgttgttaacatgcccctgctgctgctacttgatccagcaaccacactggggttatggggctgctggccataccaggattgccacaaagcttaggaaataactgaagcactgactttttttttttttttttcctgagtagctgggattgttcaccatgttggccaagctggaggatgcacactatgtggtgacacacttaacaatggcatcgccttctaagggagagaggacaattactgtccccttatacagaggagaggagaggcagagaaggggtcagtcctcagccttctctacttccaagcactgacaaagaaaggaggaattcctgcggtgcagagcaccctgggcaaccccaggcctcccaggaacagggaaactgggacagactgtttcttccacctgggaggagtctcccagacccctcc

SEQ ID NO: 5948 - DNA, 335 bp, Homo sapiens
  source 1..335: mol_type = other DNA
cgagggtgtccacaaaaccctctagaggacatatttgacctcgtgcccgaggcatggcggcgccgcgtggagcagggcgctgggaggcggcggccctgcggcgtggcgcggctggagcgcgtggcgccggggagggtccccgacacgccttcccccaagctgccccaggtcacccctgcagggcgcccgaagcgcccgcacgcgagggggcggtccccggaggctccgccccgacggtccggccgcggcccaggccgggaggtggagcgcggctgccgccagctggtccactgacaactgctgccagctggaaggcgagtgagaaacgcaggcct

SEQ ID NO: 5949 - DNA, 289 bp, Homo sapiens
  source 1..289: mol_type = other DNA
caatccacttccacctggtagcagccagagggattctctctagaaaaacatctagctcttttttgatcaggggcttgcacatccgggccctgccatgacctctgcaacgtcagaaaaccaggctctagacggagtctcactctgtcacccaggctggagtgcagtggcgggatctcggctcaccgccgagtagctgggaacaggcggagccaccgcgcccggcctctgttgtggccctggtgtgaccgaggtcacgcagccagcaagtgtcgtcgggtcccctggagcc

SEQ ID NO: 5950 - DNA, 431 bp, Homo sapiens
  source 1..431: mol_type = other DNA
ctctagaaaaacatctagctcttttttgatcaggggcttgcacatccgggccctgccatgacctctgcaacgtcagaaaaccaggctctagacggagtctcactctgtcacccaggctggagtgcagtggcgggatctcggctcaccgccgagtagctgggaacaggcggagccaccgcgcccggcctctgttgtggccctggtgtgaccgaggtcacgcagccagcaagtgtcgtcgggtcccctggagccgctcccaccacagcgcaggcgagcgcacgcgcacagcgccgggccgcacacctccgggctctgggcggagcgcctcgggcgttgtaggcgggaccggaccctctggcccgcccctccgtgtcccttctggtcgccagtggacgccgacgtcatgacgtcgcgttctgggtcacgtgaac

SEQ ID NO: 5951 - DNA, 400 bp, Homo sapiens
  source 1..400: mol_type = other DNA
agaggctgagcttctttctaactcaggaactcttcaggaaggcaagcatagaacagttagcaaatgcaaggtctcggaaccaatctgatcctgagccagactgcctagctctaaagtccctctgcttcccagggaacgggtgaccgcgcggggagagagcggcatccgggcgcgaggtgcgaggcccaggtctgcgggcggccgggccaagcccccgagcctcggcggtgctgattggccggcctggcgggggggacgggcggagggacggccgcccgcgcgtccgcttcgtctccgcgggggcgcgcccgcggcacgcggccgggcggggccgggcgtgagtgacggccatgcggaccaatggggcgggcgcgcgccgccgccgccgcccgcgcggccc

SEQ ID NO: 5952 - DNA, 745 bp, Homo sapiens
  source 1..745: mol_type = other DNA
tccccaggaggaagcgagcagagccctagcgatgctccctgcccacctcgcaagtggagggtgccgcgggaaccccctgggtggggttgcacagacggccgcgggcctggcgctgtccgggggctggctcgctcgcccatggcctctccccaccccgcctcagtcgcacggcgaggagctgcgcttcgtggagaacggctgccacgacaaccccacgctggacgtggccagcgacagccagtcggagatgcaggagaagcaccccagcctgaacggcggcggggccctcaacggcccggggagctggggggcgctcatggggggcaagcgggaccccgaggactcggacgtgttcgaggaggacacgcacctgtgagcgcccgaggcgcaggccgagtgggccgccaggaccaagcgaggtggaccccgaaacggacggcccggagcccgcaccagccccgcgcctacccgggccgcccccgcggcctggccctcggcgcgggctccttcccccgcccgaggggcaggcctcaaagcccgccttggccccgctttcccgcccctgaaccccggccccgcgggcggcgggcggcgcttcctgcgccccgggactcaattaaacccgcccggagaccacgccgggcccagcgggcggggcggggcgggcggggcaccccggggcaggggcggggccgcggggcggggaggccggggcgggcgggtcctccggacgccgctgcagagc

SEQ ID NO: 5953 - DNA, 392 bp, Homo sapiens
  source 1..392: mol_type = other DNA
acagaggtgacctccaccttgcactcaataaatgctcactgctatgataagggtcattatgaaaattgaggctagaaaagtggccccccagcttgggttattattaaacaagaggagggccgggttctagaccagcctggccgtcccagttactcgggaagctgaggcaggctgcagtgagccgagattgcaccactgcactccagcctgggtgacagagtgagaccctgtctccaggcctgatggcctggcatggggccaggcataccgcatcattacatcttagctgaattcaaatttggaatagtgcttattcattcattaaacccaggtgaaaggagcccttcccctcacccagccctgcctgggcagggatgcatgaagctgacagg

SEQ ID NO: 5954 - DNA, 693 bp, Homo sapiens
  source 1..693: mol_type = other DNA
tggtgtgtcctcccgcgctgaggctcccatgaacccagctcattcaggcctccctgacagtcctcgggcggccaccccggggcgcggctgtccacgaggcgcggaggagaggagtgcgtggctgggtcggcgggcggcgcccccgctcctccccgcgggccgggcacacgtgggccccgggcgccgcctccccgcgccgcccgccgcccgccgggtcccgcgcgtccccacccacctcgggccgcccccgccgccgagccggcccagggataaagtggcggcgcagacgccgcaccctgtcgccgcgaagccggtcgcgcgcagctcgtcccggccctggcccgccgcaaacgaggatccgctgcgctcggggaacgcgacagcggcgctcgtggccccggtaactgcctcccggcccctgccccagcccgccagtgccgccgtcaggggtggggagcagcactggggtcccggacacgcccggcgtgggctcccgctacccatgtgtgtgcgcgcgtgtccgagtgtgcgcgcgtgtgcgcgcgcgcgcgccctccctgctccttgtgcagacacccggcgaagcccacccggttttcccagcggcacctgtgctgtcggagacgcacaggaagcaaagtcaccaggtgcctcggcggagctagttactagtagtggagaatcgcagcgccg

SEQ ID NO: 5955 - DNA, 587 bp, Homo sapiens
  source 1..587: mol_type = other DNA
agtgcacatgtgtacacgtgttggtgtgtcctcccgcgctgaggctcccatgaacccagctcattcaggcctccctgacagtcctcgggcggccaccccggggcgcggctgtccacgaggcgcggaggagaggagtgcgtggctgggtcggcgggcggcgcccccgctcctccccgcgggccgggcacacgtgggccccgggcgccgcctccccgcgccgcccgccgcccgccgggtcccgcgcgtccccacccacctcgggccgcccccgccgccgagccggcccagggataaagtggcggcgcagacgccgcaccctgtcgccgcgaagccggtcgcgcgcagctcgtcccggccctggcccgccgcaaacgaggatccgctgcgctcggggaacgcgacagcggcgctcgtggccccggtaactgcctcccggcccctgccccagcccgccagtgccgccgtcaggggtggggagcagcactggggtcccggacacgcccggcgtgggctcccgctacccatgtgtgtgcgcgcgtgtccgagtgtgcgcgcgtgtgcgcgcgcgcgcgccctccctgctcctt

SEQ ID NO: 5956 - DNA, 379 bp, Homo sapiens
  source 1..379: mol_type = other DNA
gacaaggcatttgtgccatgcaccgagttctcactctgactgcaaccgcctcccgggttcaagcgattctcctgagtagcagtgcacatgtgtacacgtgttggtgtgtcctcccgcgctgaggctcccatgaacccagctcattcaggcctccctgacagtcctcgggcggccaccccggggcgcggctgtccacgaggcgcggaggagaggagtgcgtggctgggtcggcgggcggcgcccccgctcctccccgcgggccgggcacacgtgggccccgggcgccgcctccccgcgccgcccgccgcccgccgggtcccgcgcgtccccacccacctcgggccgcccccgccgccgagccggcccagggataaagtgg

SEQ ID NO: 5957 - DNA, 359 bp, Homo sapiens
  source 1..359: mol_type = other DNA
gacctttaaagctttctttaacatttaaggtccgtggcttcattcttgaagttagcgattttctggctacagagctaaaataatagtaagataataaagttatgttgccaccactgaaaacagttttattttgctttggtttaagctaactgagctaatacagctgccgtattttatgacaactctcagagagacttaacactaaaaattactggttgtgtatctgatcaggtcttttggtcattttgcaagtgtaaaagactaacgggaacaccggcatttttcaaagctcgatttccaaaggccttcagtcgctctggcacgcgggccagcgcgggaacactctgcgcaggcgcaca

SEQ ID NO: 5958 - DNA, 523 bp, Homo sapiens
  source 1..523: mol_type = other DNA
acagagctaaaataatagtaagataataaagttatgttgccaccactgaaaacagttttattttgctttggtttaagctaactgagctaatacagctgccgtattttatgacaactctcagagagacttaacactaaaaattactggttgtgtatctgatcaggtcttttggtcattttgcaagtgtaaaagactaacgggaacaccggcatttttcaaagctcgatttccaaaggccttcagtcgctctggcacgcgggccagcgcgggaacactctgcgcaggcgcacagcgttccgcgggggacgctcagtagggtacgggacgcgcgcggggagaccctgtgcagcgacaccggggctgtagtcgccgtctggaaccagcgcgggaataggtgcgcaggcgcacagtggctggagggcagcggcggcgtggtctcgggccacttccaagcagagggcagcacctgtcccctcggaggcgctgccagcgccctccctcctcctccgcagggcgcgggacc

SEQ ID NO: 5959 - DNA, 510 bp, Homo sapiens
  source 1..510: mol_type = other DNA
gcattaagtctgtttttagatgacatcatacctaggtactctcccaggaggccttcctgaattcttctgtgaggcagactacttcggaaccgggtttgcttaatgactcagacagcgagggtgctcgctgggataaggtccctgctccagggagcttacggtctattcactaacgtcaaagagcagtgagtgctagggtctccgcctgcctgcagggccacgcgcgcactcgacgcttcgcgcctgcctccgtgaggccgcacagccccagtctcgggaggcgtgacacacccgtctgcgcagccgcacacccccagtcccggcgggccccgcgcgccaggccccttcccgacaggccccaggagccccgctgcatgccggggcttgaggtctcggcgaagcggcgcggcgcggcgaagcgcggcggccggcgggcgcgcgtggcaggaagcggaagcgatccgaggcccggccccggccccgccccgcgccgcgccgcgccgcttgccg

SEQ ID NO: 5960 - DNA, 385 bp, Homo sapiens
  source 1..385: mol_type = other DNA
cctccctcaggagcatctcctggcagggtgtcgatgggaccacatggtggacgcaagcatatcctctgagagctggagcctccccactcaccagccaagggcagcctgcactttcagctagagttcagcagagtctttatttttataaacaattaattttaaaaagtggaatagtgggctcacacctgtaatccctgaggctgcagtgagctgcaaccacaccactgcactctagcctaggcagccgagcaaaccagaatagcccgtttctgtagtttgaattctctacagaagagaagggaatgagtctaataacttaagtttgttttcctctttttatttgtctgctaagaaggctagaagcaaattgagtacgcacagacaa

SEQ ID NO: 5961 - DNA, 375 bp, Homo sapiens
  source 1..375: mol_type = other DNA
aagaagtaaacgatatcattatgaaacctgaacaattatataggttttgaagcctgaagatttaattacactaccttacagggctgtggaattttgaaaactgcaaaatgttatttacagtcaactgaaaaaacattggttagtaaccaatcccagtttaagctctgaacctcagttcttctgtttccaaaacggaaataataacttgagatttgcgtaagaggagtggtacccgggggccactgcctcgtgcaacgccccagccctagatcaaatccggggcgtggtcccactgtgctcccgaccccagcctcggcaggaagcgccggctacgggggagcagcagccgcgatgggcgcagccgccggtctaggc

SEQ ID NO: 5962 - DNA, 172 bp, Homo sapiens
  source 1..172: mol_type = other DNA
tacagactctcagggtgagaatttctgagtcagagataaagtttcaactcaaacagcaaagatcttgttaaagctcttaaagatggagcttctgtacagagcactgattggtgcgttttacagagcgctgattggtgcattttacaatcctcttgatagctatagaaaagtt

SEQ ID NO: 5963 - DNA, 271 bp, Homo sapiens
  source 1..271: mol_type = other DNA
agatcttgttaaagctcttaaagatggagcttctgtacagagcactgattggtgcgttttacagagcgctgattggtgcattttacaatcctcttgatagctatagaaaagttctcccatctcgggctcctagaggcttcaggcaggaggagccaccggagcacggcgctcggctgtgcccgtgagcctcaggagggcggaagcttccgggccggaacgggtgtgcacagcgcgccggttacgggggggcaacttaacgggccggaccgcg

SEQ ID NO: 5964 - DNA, 442 bp, Homo sapiens
  source 1..442: mol_type = other DNA
tcccccagttctggaggccagaggtctgaggccgcactccctctggaggctgcagggagaaccctcctggcccccagctagataatccaggatgatctcatctcgacatccttaatttaattacatccgaaaagatcctttttccaaataagctcacattcagaggttccaaggattaggataaacgtcagtaatcaatatttatcatcaattcctatttttccactgactcgctgtgtgaccttggccactgtcctagacagggacagactttccctgctcagctgctgcccagccatcggccgaggctggaatcccgtggctgcctctgcccctccggacctcaccagcaggggcaggcccatatgcccaggtttgcctggtgaggagctgggggcgggggtatgccccgccccgggagctgacggctctggagggcagc

SEQ ID NO: 5965 - DNA, 528 bp, Homo sapiens
  source 1..528: mol_type = other DNA
gagcctccgtctccccagtctgtacaatgggagggaggaagacttgtgcgcccggcccacaggacttagaagacggagacctcagaccaccgcacctcggggaccccccccggaggaaaaaaaatgccacctcttgcccgggggcgtctccctccagctggcgccggcgccagtccgggtctccacggcctcgccccaggcaattgggcccgttggcctgcgaaggccacgcccggggaggggtgccccctccccctttctggagccaccggccgggccacctccactgggtcaagcacagccctgagcggccgcgtgtccgaggcccaggtgccctctagagcccacccagacagcgcccgagctaggggagggaacggctgaccagcggcccgggctccagcatcgagggatcccggttggcagcaggggccgccaggagcgcgcagggagggggcccgccggctgaggggggccggcccgcgggtcagtcccggagtccagcggttcgggaattgcggacgcagc

SEQ ID NO: 5966 - DNA, 764 bp, Homo sapiens
  source 1..764: mol_type = other DNA
gcttagcaggcggctcgggcaggcgggtcccccaagggcacgagacgcgctggttcccagcccaatggagctctgcgccccccagccccgcgctttacctgcgctgaggcctcggacagacaaacggacgccagacgcctaggcaggaggaggcctcagcctgagcccgcggccccttggcgctgccctgaactggcctgggagggggtgacgggggcgcgcccgcggagctgggcccagccgggcgcccccggagccgaggggaccgagggctttcctccgggtgacgtcaggggctcggcgtcgcggtggcggggccgcccggccggagaagccgcctccccgcccctcccccactctcccgggggtggccgggaccccagccctcctcctgcccccgacccacctgggggccctctggacatctaccccgggagcctcgggcccaacagggaagagggctggaggacgctgttgagtccccccagtactcggcaccgagcctccgtctccccagtctgtacaatgggagggaggaagacttgtgcgcccggcccacaggacttagaagacggagacctcagaccaccgcacctcggggaccccccccggaggaaaaaaaatgccacctcttgcccgggggcgtctccctccagctggcgccggcgccagtccgggtctccacggcctcgccccaggcaattgggcccgttggcctgcgaaggccacgcccggggaggggtgccccctccccctttctggag

SEQ ID NO: 5967 - DNA, 396 bp, Homo sapiens
  source 1..396: mol_type = other DNA
cacctgggcacgggagcacagaagggactgtctttgcccacaaacccaggggccttctggggattgtgagagtctgccccaaggagatgctcagggggtcccccccaggccgtctgtctgaggatgtcctcgcggccacagctgtgtgcacatgtgcagggatgtgtgcgtgtcccgtgtgctcacagctcctgagggtccccggggagagtctcagtaagctttctgagcaagcatccctgaggtcaggggcgcgcgtgtgcgctccggagaggggtgtggatgcacagggtgtgcgcgccctgagtgcctagcggcccttggccggccaggcggctggacctggtaggccgggtgcagagccccgggtaccctcctgccccctgcggcgctccc

SEQ ID NO: 5968 - DNA, 366 bp, Homo sapiens
  source 1..366: mol_type = other DNA
agtagctggaattacaggcgcctgccatggtgacctcaggtgatccacccgcctaattactaaacattttagtagagatgttttgaaactttgcatatttttagcattcatccgtggatgttggggaaggccaacttttactttctcaatctgagcaaaatttcactgttttaaggacacttcgggaggccgaggtggggtggcgggcgcctgtagtcccagccacccgggagagtgagctgagatcgtgccactgcactccagcccagctctgagaggcaggcgccgggtcggcttcccggttgccccggacagcccttgcccaatgaacggctgctcagtggcgggagggcgggctaccgcgcc

SEQ ID NO: 5969 - DNA, 410 bp, Homo sapiens
  source 1..410: mol_type = other DNA
acagcttaacctgacaaccacgtcatggttgccacattgctggtcggggagtggcccctctcctgccctgcgccagacaaaggcagtctactagacagatcttggttcaaaacctcgctccaccagtttctgtgttgagctagaccaagtgacatgatatactgagtctcagttccttatttgtaaaatggtgataataatttttggttaagtaattaaagtaaggataaaggacacaactggaatggccagttcaacatggcgccgtcctgctccttgtatgagcctcaaagatggggacaaccatttgggggcagacatccaggctcagtcccgaggcagccggaacgtgacgcaaggttgaggcggggctcctcccccgcaccctggcgtcgtccgctcggggcggc

SEQ ID NO: 5970 - DNA, 395 bp, Homo sapiens
  source 1..395: mol_type = other DNA
cgtttttggggagaccgatttggctaataaaacctgggcggttacagcctggcctgtcagaggtgactcagttgtatccagaccgctccttttccaaaaaatatatgtaacatacatgtcaactgtggccacccatggctggcatttatggaaacaaccgctggtcaccgccgtcacgacggccagagattatacccgccgagatgcccgcggcccagggccagctcctttggccgcgcaagcgcagtggggccggcgggtaggcgtgtgacgtcatcaggcggcgcgggccagccaggtgcacgtgactaaggccttgggcgcggcaggtggtagccttggcctctccatcccctgctgcgggggaccgcgcaagcgcagtgagtactgcacgt

SEQ ID NO: 5971 - DNA, 282 bp, Homo sapiens
  source 1..282: mol_type = other DNA
tgtcccagtgagacttgcaagtgagttattaaataaatttttgtggtttacaacacactggtggtacgagcagggctgcggcagctcctggggtgcccagaactatcctcacaggacctcagatgagaagcagaggtcggctaaatttttttataaatctgcgtcacccaggctggagtgcatcccgagtagctgggatattaatagcagatcctgcagcttgttatcattttaaaagtttgctgacctcttacaagtactaaaacctctttcaggccctca

SEQ ID NO: 5972 - DNA, 355 bp, Homo sapiens
  source 1..355: mol_type = other DNA
atttgaacctgggtcccaagtccagcttcctgccctggtgagctgtgaggcttaaatgagttaagccacataaagtacttagctcaacttagtaactgtaagctattatcattatgatcgaatccaggaacattcaactgcaatctatgataaacaaatagagtgccgaattggggaacttgggcccagggcacgcgcccccgctcacctgtagcgttgcagctccgcctccagccgccgcacccagcgctgcaagccgggcacctgttgcgccagcgcctccagctctcgcacgcggtgcaggctgcgcagcaccacctgccgggcctcctccgcgcgccgccgcacctcggcc

SEQ ID NO: 5973 - DNA, 594 bp, Homo sapiens
  source 1..594: mol_type = other DNA
ttacatggactcctatgaccaaatattattggaacacaaagacccctgctcgggaggtgccattcggagccatggccccttgctgagcctctcactgcgcaggtggaagccctgcagcacccaggaggggcaggcagggagcctcccgcggctgatccgcgtgactggggtgagcccccgcggagagtctgggcaggtgaggggcgcgggctcccggcccgggctccgtcaggtggacttggcacttggagggcccgcgagcccaagaggggagccagccggcagcgcgcacagcccaaacggggcacgggcgccggggccccctgcagcgcctccccatggccagctccccgccggcacctcggctgcgagcaccgccgccgcccgcggggcctccccgtgctcatcagcccaccctggccaccgtgagtggcccagggctgcacgggtagccaatgacaaggagcgtctgcaggcgtctgcaggcgtttccggcgtgctgctggatcaggctttgcctaaagccagggctaaccctggaatgactctgattcataaaatcctgcattcaggtgaaaacccccgggtggggat

SEQ ID NO: 5974 - DNA, 323 bp, Homo sapiens
  source 1..323: mol_type = other DNA
ggggctatgtaccatggggagccgcagcagtccggatttcaacacagtgttgcgctcatgatcactaacaagaattctcatggcagagcccacagcttcctttgcttttattaaagaatgggaggtgggagctgatggagggggaggaaggagccatcaacccctacctcccatcgtgaaactccttaatgagtgaatgcaaatgaaggcgccatttgacaaactgcgcgcagtggctgagggggaaagccccgccccgcggagccccgcccccaggccgcacgccctcgcgtctcgagtggctgggcctgcggccctccctg

SEQ ID NO: 5975 - DNA, 449 bp, Homo sapiens
  source 1..449: mol_type = other DNA
ctcaccctgcttggccatgcaggaggaggaaggaggctggagtgcaatggcactccatcccaaaatatatttatcttttaaaggaagctttatgtcactaacataaatggtgctctagaagaaaatgtactgcaaatgttaaaaccataggccaaaattctagctagagattcacacttggtgaggagggaggagagttaaaaatgaagtcactctccccaccgctgcccagcccacacctctgtgaggcaggcaggaccggtcactgctccccagcagagccacgtttctcaggggtctcccttctgggagcaggtgaggggccaccctcagtcctccacaacagtgggacccccttctataaaccggggttgagactgtgcccaaggcgcgggcccctgagggcctcctgcctctggaaataggccccaaggctgcactggggggat

SEQ ID NO: 5976 - DNA, 494 bp, Homo sapiens
  source 1..494: mol_type = other DNA
gatccattccggagggggtacttagtctaggcctgcaggcccggagctccagccatggtctccgcctgtccctgaccggcggtctgggaggcagcaggtaggggatcccgggcaggcggaccaggcctgggtggggggcggcgggacagcacctgggggtcccgccagacggatccgcagctgaggtgagcctgaggctcggagctggggacggagtcgagttcgggctgagggtcggctaggcggaacccgggtcgggctgaggtgggcccggccagcctgagggcggagccgggggcgggcgggggcgggctggggcgggcctacaggccagactggtgtggcacggagctgaggaccggccggagctttgcggagggcccggcttggcgggtccgggggggagccgaacccgcggggcaccgggtccgggcggggccgagccgggccggggcgggagccagccggggtggggcggggccgaggccgaggca

SEQ ID NO: 5977 - DNA, 378 bp, Homo sapiens
  source 1..378: mol_type = other DNA
gccagcctggattctggcaccactctcggagactgcactgcccgcctgtcagagtgggcactcagtgatccattccggagggggtacttagtctaggcctgcaggcccggagctccagccatggtctccgcctgtccctgaccggcggtctgggaggcagcaggtaggggatcccgggcaggcggaccaggcctgggtggggggcggcgggacagcacctgggggtcccgccagacggatccgcagctgaggtgagcctgaggctcggagctggggacggagtcgagttcgggctgagggtcggctaggcggaacccgggtcgggctgaggtgggcccggccagcctgagggcggagccgggggcgggcgggggcggg

SEQ ID NO: 5978 - DNA, 206 bp, Homo sapiens
  source 1..206: mol_type = other DNA
gtcccagcgatgtgctcaggacagtgaccgcacgcctggaacttaaatttttattttaaaagaggaggggagctgtctttagtactcctgtttccagaactaagatcacacgtctgcgtgtgatgacgccgcgtgccggcgctaccggaagaccgcctgacggagcgccagatgggcagttagaatccaaacagtgtctgtgagaa

SEQ ID NO: 5979 - DNA, 238 bp, Homo sapiens
  source 1..238: mol_type = other DNA
tgctgctagggtgcccatcactagttagccgtggtggagggagtccctgcagctttgctcgggcccgtcccagcgatgtgctcaggacagtgaccgcacgcctggaacttaaatttttattttaaaagaggaggggagctgtctttagtactcctgtttccagaactaagatcacacgtctgcgtgtgatgacgccgcgtgccggcgctaccggaagaccgcctgacggagcgccaga

SEQ ID NO: 5980 - DNA, 517 bp, Homo sapiens
  source 1..517: mol_type = other DNA
tttttgtttcgaataaagccattctagaatgagacaaaattctaaaatattttatagttaacagtttaaattgggtttaatcttgacaagactatctagggctatatacacaaatctcttttggagaaaataccacaactaaactgaagtctaatgaccttcccagggaggcccctcgccaagggcctggcaggaggggagaaactttctgcggccccaagctaatggcagtcactgcaccgagaccagctggccaagacagaccaccaaggtcagccagatttccacccagtctggccgggcccggacccagctgggaatgaaccgagaagcaccgggacccggatcccggcgtgaaaggccgcgcgcggggcacggcgggaaaagacgctgcgcgcagaaacacccgccccgcgccgcgctctagtgggcggccctgccgcgggcggctctgattggactgccgaaccccgcgcgctgattggccgcgtgggcgaggcggaggagagccgtgcgc

SEQ ID NO: 5981 - DNA, 219 bp, Homo sapiens
  source 1..219: mol_type = other DNA
tatccaaagtatttacaaaataacgtagaagttctatgctgtttcgcccagcttgcagtgaactgcgggccagtgtgtgccaccaacaacgaggcaggggctcctcctcctcccttggtatacggaaagaagcgtagggagcagagtgggatgctagtcagtacccctccggcggagctaaggttaacataggcgcagagcgcggaatgcgcctgcgca

SEQ ID NO: 5982 - DNA, 345 bp, Homo sapiens
  source 1..345: mol_type = other DNA
cgctgtcccagcaccaagcccaggggtgggagcggtagagggtggttgagtgaatcagctaacaggataaatggaggctccaaagggccagcggcctcacccttagagattcagctgaggggcccgccttccatgaccctgtgccgactcagcgcggcgggaaccttccctgccagccctgaaacacgctgggggcggggaggaagtatgtctcccaaggcagtcactgtctcctggggaaacgggagggggagaagacgccgcctccggggcccgagggcaccgcgggaaccaagggcccttgggggcggggcctggcgccgggagcgcgggctgaggcggggc

SEQ ID NO: 5983 - DNA, 280 bp, Homo sapiens
  source 1..280: mol_type = other DNA
gataaatggaggctccaaagggccagcggcctcacccttagagattcagctgaggggcccgccttccatgaccctgtgccgactcagcgcggcgggaaccttccctgccagccctgaaacacgctgggggcggggaggaagtatgtctcccaaggcagtcactgtctcctggggaaacgggagggggagaagacgccgcctccggggcccgagggcaccgcgggaaccaagggcccttgggggcggggcctggcgccgggagcgcgggctgaggcggggc

SEQ ID NO: 5984 - DNA, 408 bp, Homo sapiens
  source 1..408: mol_type = other DNA
atgtggcccatggcaacaatctgtttgcaagcgtcacaaagatgcttaggtgtttctctttaactttttaaaaattgagctaaaagccaccatttaaccattttaaagtgtacagttcagtggttgctgaacatttcacataaatggaatcacatcttatggccatcctatggatctggtcctcaggttctgtaactccaaaccatggcgcagggcctatttttcctatgagaaaactgaggcctgagacctgcggaagatcccacatttcacgggaagcctttcaccaagcccagaactgggcggggcgtggatttgctcgctgcccctcccaacgaggtggggccagcaggcgctcggcagggcgggctcgctcttaacacgtgacagcgctcagccaattggcgc

SEQ ID NO: 5985 - DNA, 526 bp, Homo sapiens
  source 1..526: mol_type = other DNA
caaattccagctctaccagctgtaagtttagcagcaagttacttaacatctcaaagttaaaagactctgtaaaaagacctctttcaaagtagttcttagtattaaattttgaaaaaagtaggtaaatcttaacctcctcatcttagatgacaagagcacctgggctccagaccctagtaactaaacccgtgggcttcgaggtaacttaccggaggtgacggtgggggcagctccgcggtcccccagactcagactctcgagcagggtccggctgcagcaacgagcccagcgccgcaacgcccagggtgtggggcggagtaagatgtgaaacctcttcagctcacggcaccgggctgcaaaagcgccccagacgccgccgctgctttccggccgccccctcggctacgccccgaccaatcgctcgcgctctggttgcgctggcgccttaggggctccagtgccaccgcgctcggagcaaggcgccctcgcactcagcttaccgcgcatgtacgttgccaggggtaac

SEQ ID NO: 5986 - DNA, 458 bp, Homo sapiens
  source 1..458: mol_type = other DNA
aacaatagctagctacagcttgacttttacacttagagcaagcgacgctgattttatcttaacatttagagcaagtgacactggttttcataaatggagtaataaagtttccttgtaaaatgtgaaatcataattaaaataaataccctcgggagtttctccaaccgccaaggggcgggagggcgaccctgcagtctcccaggccggggttcagtgccctcggcccaggcagcaagcccgctgccccccgctgcagcggctcgcgcactccccgcgaggactcgacctctacctgcgttacccctggcaacgtacatgcgcggtaagctgagtgcgagggcgccttgctccgagcgcggtggcactggagcccctaaggcgccagcgcaaccagagcgcgagcgattggtcggggcgtagccgagggggcggccggaaagcagcggcggcgtctgggg

SEQ ID NO: 5987 - DNA, 331 bp, Homo sapiens
  source 1..331: mol_type = other DNA
gcttagccagcacctggcacatagtgtcagctaccatagccgtcttaacagactgctatgttatagatttaggcgataacaatggaataggtaataactgaatcaaaaggtgacaaagtcattccccttcagttcctagcaacaatagctagctacagcttgttacttttacacttagagcaagcgacgctgattttatcttaacatttagagcaagtgacactggttttcataaatggagtaataaagtttccttgtaaaatgtgaaatcataattaaaataaataccctcgggagtttctccaaccgccaaggggcgggagggcgaccc

SEQ ID NO: 5988 - DNA, 324 bp, Homo sapiens
  source 1..324: mol_type = other DNA
ccaggcagtcaggcccttgtattcccaggggcctgcaaataaatgtttaagaattccaattccatgcaacaaggattgggctcctgggccctaggctatgtgtctggcaccagaaacggaagctgcaggttgcagcccctgccctcatggagctcctcctgtcagaggagtgctgggcccatggtccctatttcaaacccaggccaccagactgagctgggaccttggtcatgcagaagttaggggaccttctcctggcccctcttagaagccaattaggccctcagggggattaatccccatgctgattcagccaggagctta

SEQ ID NO: 5989 - DNA, 303 bp, Homo sapiens
  source 1..303: mol_type = other DNA
cctgggaggatgtcagtctccacaggaggcaactgtgggctccaggaccaaggccttgctctggctggggggcccgactggccggcaccgggggagcggcggcggcggctacggggagggaccctggggccgcgggcgggtcctggagggcgcgggcggcgggacccgcggacggcggggcgtggcccagggcggccaggggcaggcgggggtcccgggggcgggcggggccggggcggggagtgagggcgtgtccgcagcggagccgcccccgccccgcccccgggctgcgcggcgaggctg

SEQ ID NO: 5990 - DNA, 343 bp, Homo sapiens
  source 1..343: mol_type = other DNA
tggggggcccgactggccggcaccgggggagcggcggcggcggctacggggagggaccctggggccgcgggcgggtcctggagggcgcgggcggcgggacccgcggacggcggggcgtggcccagggcggccaggggcaggcgggggtcccgggggcgggcggggccggggcggggagtgagggcgtgtccgcagcggagccgcccccgccccgcccccgggctgcgcggcgaggctgacccgggcccgggcgccggggtcgggggcggctggcgcgggcaggaagcgcatcgcggcccgggcccgccccccgcctcccgccgcctccgggctcccggctccc

SEQ ID NO: 5991 - DNA, 427 bp, Homo sapiens
  source 1..427: mol_type = other DNA
tccagacccatacttaactagaagtaaagaaatattagtagatatactttatacatgccacactatattttgtaatcattgataacttgcctaaatcccaaagtgactttttcaagtcagaaacagtcttaataagattctattttcattttaaatgattttgccaacctaaaatgaaaaataagggtagattgctttttctttgtatttattgaaccaagctacctaaacagtgttattttatttagaatgtttttaatcttctttaagcgattctttcaaccttatctgatttaaatgagaagacaaatgagtgtggtgcttttgtcttttataaaagatgctcacagctcagatactgtctgtgatctccattctctctagcaaactgcgtgcgcgcgcacacacacggatgcttgtttggcag

SEQ ID NO: 5992 - DNA, 453 bp, Homo sapiens
  source 1..453: mol_type = other DNA
tcttagatatacctctcagaagatttttactaattgaaaacttaattttgtgagaccagggactccgttctcattacataagtaataaaaataaaatatacaatcctctgcccttttccaagcagcctgctaggtggaatgaagggagcttacctggagcaactcagcactacctgcagcggcgcagctcaaccagccagagaccgcgtgggaaggcgggctaggggaggggccacgccttccagggcccatccccgcccctgcggcgtgcgcgcgcccgtccgcccgctcccttgcgcgtgcgccgccggccgggggcggaggttgtgggcggtggcggctgtggcgggggcgcgcgcgcgctcgctctctcgcgccggttcgccctcccgcgccggggctgaggcggcggcggcggtggcggtgactgaggcggcggcggctgaggcggcg

SEQ ID NO: 5993 - DNA, 567 bp, Homo sapiens
  source 1..567: mol_type = other DNA
atagccataaaaattatggtgcctggccaaggctacagtgaggtcagattgcaccactgcactccagcctggaatgagaccctgttttaaaaaaaaagtttcaggctagatgtggcagtcccacatctgggactttgggaactgactcggggggcaagctccttggcacccatgctgtgcaggggctgcagactcgaatgtccctcctcagtgactgtggtggccgagagcagccaggctcagctccacctggctgttgacaggaggaaatgggggcccattctttttcaagagaagccataaatccaaaattttctaagttatcttggttttaaaatgttggttattcagatttttttcaaaacactgtggaagtcaatgtagcctacaggccgccacttttggctgaaagctttcctctggctcctattacacagaggagaaaactcaccctggagcctgcggggtggctcacgcctgtaatcccagagacgcaggagtctgaggttgagcccaggagttcaaggctgcagtgagccgtgatcgcgccaccgcactccagtctgg

SEQ ID NO: 5994 - DNA, 564 bp, Homo sapiens
  source 1..564: mol_type = other DNA
gagcagccaggctcagctccacctggctgttgacaggaggaaatgggggcccattctttttcaagagaagccataaatccaaaattttctaagttatcttggttttaaaatgttggttattcagatttttttcaaaacactgtggaagtcaatgtagcctacaggccgccacttttggctgaaagctttcctctggctcctattacacagaggagaaaactcaccctggagcctgcggggtggctcacgcctgtaatcccagagacgcaggagtctgaggttgagcccaggagttcaaggctgcagtgagccgtgatcgcgccaccgcactccagtctggcgcgtgttctcgtcaacagatctccagaggtggtgcagaaacgaccccgcgccggcgccccatcctgcggccagtgcctccgcgccccggctccggtccccaccgtccccgccccagatttccggaggagcaggcgggcggggtcccgcggggccggctgccgtcagcgccccttcccggcggccgcgacccctcccccgccgcctggcgcagatataagcggc

SEQ ID NO: 5995 - DNA, 229 bp, Homo sapiens
  source 1..229: mol_type = other DNA
gtgcctgtggtcccagctactctggccgagatggcaccactgcattccagcctgggtgacagagccagactgtctctcagctactcggggctgtaactcgatagatgtattaaaaactactgctttgtacattttaagcaggtgaactttatggtatgtaagttatatctcaccagaactctaaaaatccagcttgggatatattagttttcctgagcatcattttctc

SEQ ID NO: 5996 - DNA, 537 bp, Homo sapiens
  source 1..537: mol_type = other DNA
ctaggaagagggaaaaaccagggcttgctttcacccttaaagaaaactctgggtcacataatttttgttgtaaagtttaaaataaaatagtaatgtctatttggggccctagtttagaaaaaccctgtgatctctataaagtattaagaaaatattgaactttcaaattttatgatttcatgtcctctaatttttttttaagcatgaatcttttttttaataagagttagaaagtaaacataaaacattttctctcacttacattcatagtttttaaaagcctagggaaagttgaacagaatctgtttgcagctattgttcaattaatgtaaagtatctggttactgggcatgttgcataatgcacgttttcagtgctgacaacgagctccttgataacaatggtaatttgttaaatttttttggaagtcccctataacagtcttcttttccagctcagaccgcaactgagctgtgtgtcgctagctaatattaacatagcttgcaacagaacactgttgctagaaataggagaatt

SEQ ID NO: 5997 - DNA, 287 bp, Homo sapiens
  source 1..287: mol_type = other DNA
agcatatacggaaattttcttttgatttattaaaaccaatcgttctaaaaagcacttgtgaacattgacacacagctcacggtgctccagtccctggcaggagcatggacaccgcttcccctacagactttgtagagagcgctgcctcggggacagcgatgactctcagcttgggccgaccccgcggccgccccacgggaatgcgtggccgacacggggcgtgggcgaatctccgaccctcgcggtccgggccgaagtctcggccttcacttcaaacacgaatgcgc

SEQ ID NO: 5998 - DNA, 329 bp, Homo sapiens
  source 1..329: mol_type = other DNA
tttattaaaaccaatcgttctaaaaagcacttgtgaacattgacacacagctcacggtgctccagtccctggcaggagcatggacaccgcttcccctacagactttgtagagagcgctgcctcggggacagcgatgactctcagcttgggccgaccccgcggccgccccacgggaatgcgtggccgacacggggcgtgggcgaatctccgaccctcgcggtccgggccgaagtctcggccttcacttcaaacacgaatgcgcctgcgcgcagggttcgcggctggcccaggagtgcggggcgcgactgggcggccggcggcggggaggg

SEQ ID NO: 5999 - DNA, 337 bp, Homo sapiens
  source 1..337: mol_type = other DNA
acagctcacggtgctccagtccctggcaggagcatggacaccgcttcccctacagactttgtagagagcgctgcctcggggacagcgatgactctcagcttgggccgaccccgcggccgccccacgggaatgcgtggccgacacggggcgtgggcgaatctccgaccctcgcggtccgggccgaagtctcggccttcacttcaaacacgaatgcgcctgcgcgcagggttcgcggctggcccaggagtgcggggcgcgactgggcggccggcggcggggaggggcagaccagcacggcctcgcggagccggcccggcggaccgtgacgggtcccctc

SEQ ID NO: 6000 - DNA, 503 bp, Homo sapiens
  source 1..503: mol_type = other DNA
cacggtgctccagtccctggcaggagcatggacaccgcttcccctacagactttgtagagagcgctgcctcggggacagcgatgactctcagcttgggccgaccccgcggccgccccacgggaatgcgtggccgacacggggcgtgggcgaatctccgaccctcgcggtccgggccgaagtctcggccttcacttcaaacacgaatgcgcctgcgcgcagggttcgcggctggcccaggagtgcggggcgcgactgggcggccggcggcggggaggggcagaccagcacggcctcgcggagccggcccggcggaccgtgacgggtcccctcttctcacgccgggagcaggctcccgcctcgcaccgctgccccgcgagcagctcctcttctcccgaggcgcgcggggcgcccccgcgagccccgcggctgagaccccgcagcctggaggagggctgtccggccccatttctagaaacttccaggttctgaaggaaggggaggt

SEQ ID NO: 6001 - DNA, 568 bp, Homo sapiens
  source 1..568: mol_type = other DNA
gcttcccctacagactttgtagagagcgctgcctcggggacagcgatgactctcagcttgggccgaccccgcggccgccccacgggaatgcgtggccgacacggggcgtgggcgaatctccgaccctcgcggtccgggccgaagtctcggccttcacttcaaacacgaatgcgcctgcgcgcagggttcgcggctggcccaggagtgcggggcgcgactgggcggccggcggcggggaggggcagaccagcacggcctcgcggagccggcccggcggaccgtgacgggtcccctcttctcacgccgggagcaggctcccgcctcgcaccgctgccccgcgagcagctcctcttctcccgaggcgcgcggggcgcccccgcgagccccgcggctgagaccccgcagcctggaggagggctgtccggccccatttctagaaacttccaggttctgaaggaaggggaggtcccctggatgggggggcatctctagggcgccgccccgctggcgtgagctggggacgttgcgcaccccgagatagtggctgggcggggaactccttcctcag

SEQ ID NO: 6002 - DNA, 408 bp, Homo sapiens
  source 1..408: mol_type = other DNA
gtgtcgcattgtctagattctagaacctggcatatactaggtgtttaacaaaccttgttaggaacttggagaaagttactaccttgtgcaaactacccaagttgaaaaccagtagttatcttcccaggtaataaacagcacaaatctacctttaaagtaaatcttaaccttaaggtaaaacgaacaattccttgcttcttcacctttttaaacatttacattttggcaaagcagtccaggagcgaggagatcgcagccatggcgtccttccccctcgcaggggagcctggctagccccaaggaggatgtcgtggtcggagcggcgcccggggctgcccaagtcttgcgggtaatcgggacaccgcgggccacggctgtttggaaccgtggccagggacggagaaagca

SEQ ID NO: 6003 - DNA, 319 bp, Homo sapiens
  source 1..319: mol_type = other DNA
tttgaagacaaatattgcatgaataaaaaatatctaataaccatcatgtgaattctatgacttttcccatctgtataaataagcaaaatagaaatgacatgttggagttctctgcagagaatctcttgtgtagggcttcctggaagtcacatggagatttgttcaggcagtgttaaaaaagcttgtgcatttgtagctagaagagtggagaaaaaattgcccttccctcttcttttacctacaatatgagtggattcccttcagagaaaggattattggcctccttattgggatgttcctcactgataaaaagagaagc

SEQ ID NO: 6004 - DNA, 377 bp, Homo sapiens
  source 1..377: mol_type = other DNA
attacttaaaatcgtgacattttataattttgatttttagagattgcattaaaacttaccttgattactgaattttattggcatccatttactatcctgtatagtacttatttctttgcaagatagttttgtatacgcaaattacaggaccttgcacagctcccagaggagtagctcctccatcacagcgaggactggctcctgcacgtgagagtccaatctcaagagcgggaatcggaagtctcccggtgtgacgtctcagttccgtgatgagcctcgggcccagaggcgccaggctaggaaagcttggcccgccggtcctcctctgctttctccgtccctggccacggttccaaacagccgtggcccgcggtgtc

SEQ ID NO: 6005 - DNA, 289 bp, Homo sapiens
  source 1..289: mol_type = other DNA
aggccttggtgtctgaggccaagcaggtgctttgccttgcgccaggtttagggcgcggccacacctctagccccgccccaccgcaggcccaacccagaggctgctttcggttaccctagggttcctgggccctggacttcaacccggtctgcaagccccgtgcctcccgcaccggtcgcggcgccccgcccccaggcgcctaggttcctcccctgcagggattgggccttgcagcaccgcccaggctcggattggtccgaggtgagacccgcccctctgcccattgggc

SEQ ID NO: 6006 - DNA, 461 bp, Homo sapiens
  source 1..461: mol_type = other DNA
gagaaggttgaaatagctacactttaaagttcttatttccaaatttctacaaacagtaatctgacaaataagggaattagtagaagaataaatgtcctagtcacatacatggttattagtgtattagctatctattattgcataacaaattaccctaaagcttaatgactcaaaaaaacggtaatcatttattttctcggcttaactggtggatccacttcctaggtggctcaggaaatgaaggctagctttctccacagggagcaatccctagaaggcatacatcatttctatgggtgtagtctacagatgtgttgttttggaccagaattctgagtcagtttcctcatttataatagaaaaataaatacttcctttcaggaccgttttttatgattaacaaatataggattatgaagcgctgcttagcataatgcattgccttctaaagtttaaactgt

SEQ ID NO: 6007 - DNA, 585 bp, Homo sapiens
  source 1..585: mol_type = other DNA
gattttggctaatatctcctccaacctgctttgttaccccttaatagggtgagaaggaagaccttccatctcccctcgtcatcattaattccaaagtccaatttgtgagtctgacaatatagttgtctagtttgtctatggtagcagacataatcagaaacaatgccctgtatttgaataagttcatttgtctgaatttgaataagtttgaaataggaagctttctgcagcatatttatatctatctttaagcataagtactccctaagtatttctttatctattagaaactcatcatgagatgaagaaaatactctttgtccattaatttactcatgcattacttactaaaaataattgttaagcacccatctaagaagttttctttggtgagtgctccaccctagagtggagagatctaaatcaagtgtccccaggagctcagttgagcgacaaagctgactgcgggcgcggcaggaccacggagagcgccgccgccaaggcctgggcggggcctgagctcgggttcccggggcaagtctccgtcagcaacccccagggggcgctcgcgcggaggtttcggaa

SEQ ID NO: 6008 - DNA, 226 bp, Homo sapiens
  source 1..226: mol_type = other DNA
gccaggctggtcttaacaatttttcaaaataaacttgctgttacttttcttctttaatttaaaaatacctctataggctacatgagagtttttgaaaaagtagccatggtcctataactttggactcccaacagattaagaatcactggtctaaggtttctaaagtcagggccagcctggatgacagagcaagtctcagctcaaaatttacatgacattatttaca

SEQ ID NO: 6009 - DNA, 336 bp, Homo sapiens
  source 1..336: mol_type = other DNA
aggatgattcgtatctcagagagttgaagattaagcagctttaagtaaacttctaaacactgtctctctctgagacggctgaggcttcagactgcctcttaaggttgcgaccctactctccgcaggacataagcggaggggcgcggccctaaggcacacgccggaggggcgtggtcatgggcacccgccggaggggcgtggtcatgggcacccgcgcgcgcccaggggcgtgtccttttcagcacccaccgaggcgccagccccctgacgcgctgcgtggaatccaaatcccacggccggtatcagctgactgggtctcgtgacagcctgggcggg

SEQ ID NO: 6010 - DNA, 449 bp, Homo sapiens
  source 1..449: mol_type = other DNA
aggatgattcgtatctcagagagttgaagattaagcagctttaagtaaacttctaaacactgtctctctctgagacggctgaggcttcagactgcctcttaaggttgcgaccctactctccgcaggacataagcggaggggcgcggccctaaggcacacgccggaggggcgtggtcatgggcacccgccggaggggcgtggtcatgggcacccgcgcgcgcccaggggcgtgtccttttcagcacccaccgaggcgccagccccctgacgcgctgcgtggaatccaaatcccacggccggtatcagctgactgggtctcgtgacagcctgggcgggcgtattagagcgcgctcgctcaaagcctgatctgcggagggggcggggaggcagcgccgcggcggcaccaggaacccgcggcagcggagctgcagggccccggcggggaggag

SEQ ID NO: 6011 - DNA, 437 bp, Homo sapiens
  source 1..437: mol_type = other DNA
gtacatatacagcatggaatactatgtagccataaaaaagaatgagatcatgttctttgcaggcacgttctcacttataagtgggaggatacatgtttacctgtgtaacaaacttgcatgtgtacccctgaacttaaaagtttttttttaaaaaagagaaaaatagaaaaaaaatttctgcaggaatcataaatttctcttctttctcttggaaaaaataaaccagactgaaggattttgaaggttcatattctatagtttaaataaatattaaatgatgtggcataaaaatgttaaattctattgcaaatacctaatgattacttataatttaatctttgataatttagtcttcaaaaagatattttccttggttaaaatcatatttgctttcttccttaggcaaaataactttagagagtatttctctagatgct

SEQ ID NO: 6012 - DNA, 625 bp, Homo sapiens
  source 1..625: mol_type = other DNA
tttttattgcaatttaattgttgaagaaactggattagttgtcttatagatttcattacattcctgcaatgtcctttaatatgttccatggagtttatccttttaactcctggaattttataatattattcaactatttgacatcattcctaacatttctcattaaatctttatatgatttcaaatctcctcaaacctctttttataataaatcagaaaaaagaatccgatcatttgtttgagactttgtacagatgtgtttaacttaatctgatccagttgtgtgcagccttgtaattgaaaatctagtcaaatggtagttttcccaagggactagacttactagtaaacattaaaagtaatttttgcaaaaagacccttgtagtgataaaataaaattttgcattaaaatgaaaaaatatttttaaaatttgacccttaagaaattaataaaagtcatatacgttgacatataaaatattatattagacatataaaatttctcagcttttctagcatgctgattcttggatgatatagagtgttacaaaagaattattatcttaatgaatcaggaagaaccttcaaggtgaaatgtcaaactagaaatttccttttataatct

SEQ ID NO: 6013 - DNA, 496 bp, Homo sapiens
  source 1..496: mol_type = other DNA
gatacatgtttacctgtgtaacaaacttgcatgtgtacccctgaacttaaaagtttttttttaaaaaagagaaaaatagaaaaaaaatttctgcaggaatcataaatttctcttctttctcttggaaaaaataaaccagactgaaggattttgaaggttcatattctatagtttaaataaatattaaatgatgtggcataaaaatgttaaattctattgcaaatacctaatgattacttataatttaatctttgataatttagtcttcaaaaagatattttccttggttaaaatcatatttgctttcttccttaggcaaaataactttagagagtatttctctagatgcttgactaagtggaaactatgaaaggtctatagtttttgaaaaaagatggattttctcaaatttgtaacctaaaccacttaagaagttgaatttaacttcacagatggttttacaggaaataaaatatcatttaaacaaaagtagctg

SEQ ID NO: 6014 - DNA, 547 bp, Homo sapiens
  source 1..547: mol_type = other DNA
ctagaaaattttactccatggcagtcatgaagaattctttgttagccaagggcaatactgcagtgcatcatgtactataaacaataccctccaagggtcagagagggtctttgttagcatccttgagaattatcaagtattttctaggtagtatgggaaataattgttacagagattctttgcagaggaggtgttttgcaatgttaattgttctccgggagcattgcaatcacttctagcagggcatatgcaattgggatgaactgaagaagagtctgtgattcagaacaagttgaataaatatgcaccaaatgccctgtacttgtaaatatttatgacatgctgtcagtataaattatatttactatatatttcaaaatatttttgttagcaaacatttgctttaaaaagatgcatttctatactctctacataaagttgtggatttcatactgataaattttcaaatgcaaaacaaatactccttctttatgtgtagacacagggaatatggaggttctgcacctggaacagaagaaacagtggc

SEQ ID NO: 6015 - DNA, 455 bp, Homo sapiens
  source 1..455: mol_type = other DNA
aggatatagataaaactctcaagtgtttctttctaatatttaagtcacttacatatatctaattttaaaaatgcattatataagatgatttattaatttagaaatattgttctttttttcagatttgtgtgatgccccagaaattctgcttaacccacaagtacccatggcataatgttaggacaattgcttttttccaatttatcttaacaccataacaattgattctgttgtgcttcataatgaccttttctttattttattttaatttattttaagttgagcctgcaggtttgttacataggtatgtctaatattcagcagctatatttgtgaggcatatattaatagtaagaataatgattatttgtgttcaattcaactaagattcaaaactaatgaagcgggattttttgctccttagttcagctaaaatcgtgtgcaggcaggccccc

SEQ ID NO: 6016 - DNA, 358 bp, Homo sapiens
  source 1..358: mol_type = other DNA
aaattttctcttctagattactgtcatcagcatacaaatatgatgttattttttaaaaagcttttttctaagtaagaccttcgatcttatgtctttaaagttagtccagacatatctacttggatgtctaaaaggcataaggcagaaatgaaataatcttcgtctcttcctttccaaaatacagtcatgcattgcttaatgacagggataaatatgttgttaagtgatttttgtcacgtgtaaacatcctaggatggtatagcctattatgcactgatatataattatgttttatgatcataaatgtctcataatggagtcacttatgacaagtgactcagcttacagtgaaatcact

SEQ ID NO: 6017 - DNA, 611 bp, Homo sapiens
  source 1..611: mol_type = other DNA
ggcgtccccatgagcgggacgtgggaagcgcctcacttctcgtcccccgcgcctgcctccgaccggcgacgcaggttacctgtagggagcggaccaagttcccgctccagctcctggacccgctgctgcaggcgctccacagactccgccatggctgggactccggccgccaacgctcccagcccgggccttcgccgccgccttcgccccacgttgctcggctgggcccgcgaggggtacgtggggaggcacctcgccgctgccttcctagcccagagccctggggacgagacacgtctccgagactcccacaggccttcctcggagccgcttccggtgcgtcgcagacctcgctgggccggctaaacccggccgcagcagcaccggggggcaggaggccagcgatgttgccttgctaaccgggtatctaagagaaacagggtctttttattcttaggctcgacagtctgacggccctttttctgaacgggaccctgcagggcaacgatgaccatttaaaattgaggcctccatgctcagcaacggcgcgtaggctgtgtgcggttggctggagccagaccccaccccggcctcggcccatgctctagagg

SEQ ID NO: 6018 - DNA, 463 bp, Homo sapiens
  source 1..463: mol_type = other DNA
gtattagtaacaatgttatttttagaataaagttttaagaatgtattatctattgtaaaacatcagatactcgaattctcagaaaaaaagaaggcatctatttctcagcttaattgccttggtgaatcctcaagggacataaatccatcctttaacaaagctccaattgggaagcccccagcatcgaattcggagggccggcaatagcagctcatgcctgtagggtgcgtccactgactgcaggatcaatgtacaaatttttttccgcttcggccccaaagccagacaagtgctggtttaggtaggtgctgtcgaacttgtgctggggcagcacttcggccaaatcggacgagtgccgaagtccttcaggattggggcaacgtcccctctagagcatgggccgaggccggggtggggtctggctccagccaaccgcacacagcctacgcgccgttgctgagca

SEQ ID NO: 6019 - DNA, 547 bp, Homo sapiens
  source 1..547: mol_type = other DNA
ttagcaggtttaatatttgatctcatcttctgaaatttttaaaacgggcgtccccatgagcgggacgtgggaagcgcctcacttctcgtcccccgcgcctgcctccgaccggcgacgcaggttacctgtagggagcggaccaagttcccgctccagctcctggacccgctgctgcaggcgctccacagactccgccatggctgggactccggccgccaacgctcccagcccgggccttcgccgccgccttcgccccacgttgctcggctgggcccgcgaggggtacgtggggaggcacctcgccgctgccttcctagcccagagccctggggacgagacacgtctccgagactcccacaggccttcctcggagccgcttccggtgcgtcgcagacctcgctgggccggctaaacccggccgcagcagcaccggggggcaggaggccagcgatgttgccttgctaaccgggtatctaagagaaacagggtctttttattcttaggctcgacagtctgacggccctttttctgaacgggaccctgcagg

SEQ ID NO: 6020 - DNA, 444 bp, Homo sapiens
  source 1..444: mol_type = other DNA
tccatctgctgaattgttgataagcctttaatgaaactcaaagtttaccttagcaggtttaatatttgatctcatcttctgaaatttttaaaacgggcgtccccatgagcgggacgtgggaagcgcctcacttctcgtcccccgcgcctgcctccgaccggcgacgcaggttacctgtagggagcggaccaagttcccgctccagctcctggacccgctgctgcaggcgctccacagactccgccatggctgggactccggccgccaacgctcccagcccgggccttcgccgccgccttcgccccacgttgctcggctgggcccgcgaggggtacgtggggaggcacctcgccgctgccttcctagcccagagccctggggacgagacacgtctccgagactcccacaggccttcctcggagccgcttccggtgcgtcgcagac

SEQ ID NO: 6021 - DNA, 517 bp, Homo sapiens
  source 1..517: mol_type = other DNA
tccaattgggaagcccccagcatcgaattcggagggccggcaatagcagctcatgcctgtagggtgcgtccactgactgcaggatcaatgtacaaatttttttccgcttcggccccaaagccagacaagtgctggtttaggtaggtgctgtcgaacttgtgctggggcagcacttcggccaaatcggacgagtgccgaagtccttcaggattggggcaacgtcccctctagagcatgggccgaggccggggtggggtctggctccagccaaccgcacacagcctacgcgccgttgctgagcatggaggcctcaattttaaatggtcatcgttgccctgcagggtcccgttcagaaaaagggccgtcagactgtcgagcctaagaataaaaagaccctgtttctcttagatacccggttagcaaggcaacatcgctggcctcctgccccccggtgctgctgcggccgggtttagccggcccagcgaggtctgcgacgcaccggaagcggctccgagga

SEQ ID NO: 6022 - DNA, 397 bp, Homo sapiens
  source 1..397: mol_type = other DNA
aattttacattaagacaaatctaatgcaagacaggccttattatttatctaagcctcaattttctcacttatataatgggggtaaaatatacacacaataactgcttgctactaaatgcacctagcaataaaatcttgtataaggcttgccatgtacaagcgctcacaactatgacagagatagatattactattatcttcattgtacggaaagtttcacaacttgccaaaggttaggcagtgaattgcaatcagtcttccatctgctgaattgttgataagcctttaatgaaactcaaagtttaccttagcaggtttaatatttgatctcatcttctgaaatttttaaaacgggcgtccccatgagcgggacgtgggaagcgcctcacttctcgtc

SEQ ID NO: 6023 - DNA, 528 bp, Homo sapiens
  source 1..528: mol_type = other DNA
atctctaaaaattctggaccattaaccgttcatatttggaaaacagtgcaccctaagacttctactgcggctttatatatcacaaactaaaaccttttttaaaaatcaaaactgttatgctctttaaaggaaaaaagcaacaataaaatcttccttatctactttaacactatacaatttttaggaattttacattaagacaaatctaatgcaagacaggccttattatttatctaagcctcaattttctcacttatataatgggggtaaaatatacacacaataactgcttgctactaaatgcacctagcaataaaatcttgtataaggcttgccatgtacaagcgctcacaactatgacagagatagatattactattatcttcattgtacggaaagtttcacaacttgccaaaggttaggcagtgaattgcaatcagtcttccatctgctgaattgttgataagcctttaatgaaactcaaagtttaccttagcaggtttaatatttgatctcatcttctgaaat

SEQ ID NO: 6024 - DNA, 515 bp, Homo sapiens
  source 1..515: mol_type = other DNA
gttaatctgtttattcccatcttttaggaggatattaacattttaaagtactaatcaaagtaggttagcttagtctagaatacattaatttcagaaacccagtgtgcatgagcattatcattttttttaataagaaaaaacacgttgaagctttgccattatatgaaagagcacactgaaaaatttagctgtgcttaggtaagaatttttttcttttattcgaagtagctttgtcttagaatagcacaaaatatgtattactgaatgttttcaagaagtacaaatgaagcctgcatgatctattttgcagaggtatgtatgcattttatactacatctggctctggctcaggatgcagagaatacctaactttgcttagcaataacatggttttaatgatatccatatgaggaaaaagaggggaaatgggcaaatatttacagcttcttttttttgaattggtaagaggttatattctcattttaagagggagattttgaaaaagctgctgaatt

SEQ ID NO: 6025 - DNA, 157 bp, Homo sapiens
  source 1..157: mol_type = other DNA
gtttcagactgtaaaatctaaaaatctacatgcatactgagagagagaaattttgggacccaggcctgtgctccctgtgaggcacgcccgccagggagcctcgagccgggcggacggcctccaccagcgtccggtccactgctggagcccgcctggc

SEQ ID NO: 6026 - DNA, 381 bp, Homo sapiens
  source 1..381: mol_type = other DNA
tggccaagtgtctggcaccgcgccactcagacagggtgggtaatgtggggattaaacacaccttccctcaatgcaggatctcaggtctccaccccagaccttctggatcagaatccgcattttaacaagagagtcaagtgattcttatttatattagaatttgagaagtcaattgatctggtaattgatcaactgagcaaccgaacccccagagacatcggagcgggcgctgccgatggtctcaccacgtgaccggcgctgagccttccgtgcgaccggattggctgtcgcggacgctgacggacaaggccggggcgggccagagcctggtcggaggggcgcgcgcgggggcccgaggggcgaaggcgcgagtgcgcgaga

SEQ ID NO: 6027 - DNA, 675 bp, Homo sapiens
  source 1..675: mol_type = other DNA
attaaggcttataatatattctagtatttcaagtttatcactagttactaaatatcaatttttaaataacatgttcttttttgctcttttatcaaaagggaaaattctagcttcagaaaataaataaattcaaaatgttctgtgggaatattgcatttttcaaatggaagaacttccaactgaccagaagttcaacatacttttcactgaaacaatttttaataaatacaaatacatggcattgagtacctaatataggcctgacagttaagtcctttttttctggaagatccagtaacaatgtttttacaaatcaatgtaataataaagggttttattttccttcatatttttgtttttagcattctagtcttaaatactagattagaatttagttcagttccccagaagcaaatagcttttcttttgcaatataactaattcctaatatttaatatgtgtttaaatgaatctttttctatacaatgtaaatggtaactttggtaaaatgttcccatgagttgttagaaagatttaactagctttgtaatttaagttttaaaacataaatatttgcagcttgatgttggagcccagaattcaacatttataaattctcattctgagagaagaatcttcaactttttagatttttaacaagatacatcattaatg

SEQ ID NO: 6028 - DNA, 207 bp, Homo sapiens
  source 1..207: mol_type = other DNA
aacaagacagtcccctccttttatcagggatagaatcatcatctagactcaagtcagggcgttaagcaatgtgctgagcagctaatgaaagatcttttagtaaatgggacctatggcttaacgggtttgttctgggccaggaaacacacgtgcatcctgcccccttggcgatcccacagcggcaggcagacgcaggcgcaggcgctt

SEQ ID NO: 6029 - DNA, 395 bp, Homo sapiens
  source 1..395: mol_type = other DNA
tgaaagatcttttagtaaatgggacctatggcttaacgggtttgttctgggccaggaaacacacgtgcatcctgcccccttggcgatcccacagcggcaggcagacgcaggcgcaggcgcttcctgcgcgcgcgcctcttcctccggcacgcgccgctgctagccgagcactctcgccagaacctctggctcgcgcgtgccttttcccctcaggttgtggggagagcggaatcctgctccgccgtcgcagcagcagcggcagccccggcagcctcgggcgacagcggcggcgcgcgagcccccgggcggaccgtaccaccgctcgccagcacgcagggggagccgcccgtctcgccgcgcacgcctcggcgaccccgcggggctgaggcgtcgcc

SEQ ID NO: 6030 - DNA, 500 bp, Homo sapiens
  source 1..500: mol_type = other DNA
cgacatttgaaaatgagtttcatctttagctcatccttgtgcatgattgaagtgtacacattttttagttaaaatataagcatatagaaggcacaagttcaatatttttcatgataaggatgtgtaatagaacaggccacaccgtccactgggccgcttgctctttctgagcctcacagtgtcttgaccatgttcctggaacatcttcccctacctagtctaaggtaagcttgagggcgggaagttttccagcccagggggagggagcagctcctccgtgggggaccttcccaggagcaggatttagcctcggagtcttcctctgtggactgcgcagataggactggtggcacggaccagctctgcagccctggagtcaggagcagagccccccggctcccagcccgccgtagccgctcctggcaccgagcgagccgcgatgacaatgggcgggtcgtctccagagctcagaagggcaacccggcccgcccaggccggga

SEQ ID NO: 6031 - DNA, 409 bp, Homo sapiens
  source 1..409: mol_type = other DNA
ttactatctttaggctctaaaaagaaaagaaaaaggacatggcattatacttttacattagtaaatccaaagtcattttctcatgaataataaaatgatcctcattagtatagtggctagattttataaaataagaaaaaatttttttaaaaaagaataaaatgggttcagtcccagaatctccccagtactgagtggatgcagtattaattctacctacatctacaaaatggaactaataccttttcccgcatgcctggtataagacaggtgtaaaataaatatctattgaggaaatcctttcttacggcgctgggcctactcgcagcggagactaggcttctgctgcagctgccgatggcgtcacttccaccggaaaaggcaagcgcggccgcgcggttggcgcgaa

SEQ ID NO: 6032 - DNA, 438 bp, Homo sapiens
  source 1..438: mol_type = other DNA
tgccaggctcagacgaagcttctgctgagccgcctggacgcagcgcccctgggtggcggcagggaggcggccccaacgccgcggaggccaccagcgggtgcagagggccaggaaagctggtctgcgcgcggctcagctgcctccgtaggccatggagccgagcagatccgggtcttcgggtggccgcaatgtccccttccttctaccagacgctggtgctggaaaagtggctgtttatagaaggcccgtgtatatctgatagagttagaaaatcacacatcttgtaaattcccatttgttaaaaaaataataataataataataataataataataataataggacataaatgcgctccttatgagactctaataatgcctgatgatctgaggtggaacagtttcatcctgaaagtgaaaccattccctggtgccaaa

SEQ ID NO: 6033 - DNA, 582 bp, Homo sapiens
  source 1..582: mol_type = other DNA
tgatccaaatgagcagctggttgtaggcgcgcctgatattggcagctcctctctcgctggccaggtctgcgggggcacccacagacaggtctgaccgccctgacggcggacgactgcgctgtggaaacaaatgtcccctgacaatttctgtcattttctggattcaagcggggcagcgagacacggtcccccccggggggctctcaggggtacggcgaggaggttctctcctgcccgggtgcgggctcgggtgggcgggcgcacgccccccagccccgcagccccgcgggccccgcatgacatcagaggctggggagcgcacagagcgcaggcgccggcggaggaggcaggcgggagggggccgactggcgcggctctggagagcgctcctccgccccgcgcgccgtccctgcgccccgctccgcccgcgcctctctcccagcgccgcgcctcgggcgtaaagagcgcgcccctcgcaccgcagctcctcctcctcctccgccgccggacacgcagccgcaggccgggaccgggacgcagctggggagtcagggacgcgcgcagccagcccttccccctccg

SEQ ID NO: 6034 - DNA, 387 bp, Homo sapiens
  source 1..387: mol_type = other DNA
gtgtgcctcgatggagtagaggtggcattgtcagcctggcgaccccgggatagggcactgtcctggagatagtggcactggcatttgatccaaatgagcagctggttgtaggcgcgcctgatattggcagctcctctctcgctggccaggtctgcgggggcacccacagacaggtctgaccgccctgacggcggacgactgcgctgtggaaacaaatgtcccctgacaatttctgtcattttctggattcaagcggggcagcgagacacggtcccccccggggggctctcaggggtacggcgaggaggttctctcctgcccgggtgcgggctcgggtgggcgggcgcacgccccccagccccgcagccccgcgggccccgcatgaca

SEQ ID NO: 6035 - DNA, 378 bp, Homo sapiens
  source 1..378: mol_type = other DNA
aatgcctccagagctggattcctcactgcagctgccccactattcattccagtcagtggggtgcgtcctgtttgtccacaccccccccatggctcaggtccagagacttcgggccccaccggaactgagggcccaggttttctgcgagtgcaaacaagcagagactggctccgtctccccaagaacgtcgggaggggtgctggggctcccctccacccccggctcacgttggcccctccagcgcccgcctcctcccggcaggcgggatcgggcagtcaagcctcgcgggtcgctgcggcgtcacacctgtctgagggggcggcggcggcggcggcggcggggcgggggctcgtagcgcctcggcggcggccacttata

SEQ ID NO: 6036 - DNA, 311 bp, Homo sapiens
  source 1..311: mol_type = other DNA
agcctatgccaaagaaatgcctccagagctggattcctcactgcagctgccccactattcattccagtcagtggggtgcgtcctgtttgtccacaccccccccatggctcaggtccagagacttcgggccccaccggaactgagggcccaggttttctgcgagtgcaaacaagcagagactggctccgtctccccaagaacgtcgggaggggtgctggggctcccctccacccccggctcacgttggcccctccagcgcccgcctcctcccggcaggcgggatcgggcagtcaagcctcgcgggtcgctgc

SEQ ID NO: 6037 - DNA, 810 bp, Homo sapiens
  source 1..810: mol_type = other DNA
cgtgccagtgcactccagcttgggtgaaataaataaataaaaatataaaaataaataaaattttgtaacgtaaaaatagggttactttctggaaaacaaatatatgtagtataaattctaataatagatactaagataaaggatgatttctatttatttgagttttcccactaaacaggaaagcatgctgcttcagaacggccgcatccaggcgtttccggggacctggggcgcccactgagctgcaggcgcggccggtggctccagcctggcccgtccgtcgggaaaggcgcgtggggcggggaccggctcttgcggagagggtgacccgagcccttcgcccgccgaggcccagcgcgttgcccaggccggcccgcccagagcgaaaggtgcgtgcgcgctcccggggaggcggcggcgcgcacgggcgcgtcccgcgggcagcccccaactccggacgatgcagcgaggaggcggcggcggcggcgcgctccggaggtctgaagccactgctggctgccacgggccggcggtgcgatgagctgggcagccgcccccggctcggggctgtgagcggctcggggccgggggtgggcggcggtgcggcgggcggccgacgctcctcttcggcggcggcggcggcggccatgcgtggggcggcgcggctggggcggccgggccggagttgcctcccgggggcccgcggcctgagggccccgccgccgccgccgctgctgcttctgcttgcgctgttgccgctgctgcccgcgcctggcgctgccgccgcccccgccccgcggcccccggagc

SEQ ID NO: 6038 - DNA, 550 bp, Homo sapiens
  source 1..550: mol_type = other DNA
tgtgattatagtgatgcagaacgatgaggtcagttgatcacgtgaggtcaggagttcgagtaatcccagctactcggagtgcgtgccagtgcactccagcttgggtgaaataaataaataaaaatataaaaataaataaaattttgtaacgtaaaaatagggttactttctggaaaacaaatatatgtagtataaattctaataatagatactaagataaaggatgatttctatttatttgagttttcccactaaacaggaaagcatgctgcttcagaacggccgcatccaggcgtttccggggacctggggcgcccactgagctgcaggcgcggccggtggctccagcctggcccgtccgtcgggaaaggcgcgtggggcggggaccggctcttgcggagagggtgacccgagcccttcgcccgccgaggcccagcgcgttgcccaggccggcccgcccagagcgaaaggtgcgtgcgcgctcccggggaggcggcggcgcgcacgggcgcgtcccgcgggcagcccccaactccggacgatgcagcga

SEQ ID NO: 6039 - DNA, 497 bp, Homo sapiens
  source 1..497: mol_type = other DNA
ctagctagacagcagccctggcagggaggccgcactggggtctctcggggaaggtgagtactgggcgcagctcgctcgcccacctggccactgctgaccacctggcggggccgaaccccacgccgggctgcgccacgccagactccgccagtgtgcagggcatagcgggccaggccgagggactgggcttcggggcggacccaagccggcggggacgcgcctggtggttcgcaggccgttgcgcaaaccggccgcaagccatgaggccggcagcctgggccgcctccagaaggttgcgcaccggcggttacagggttgccgcaagcacgcccctgagccttcccgccgttacctcgggccggcgctgcgcacgcgcgccaccgctaagggagcaagcgtctgccgcggtggccgggtgccggtaagggtttccagcgcccccggcctactcgtgtcgggaggaaagggacttgcgtggcacccccagacctccccgt

SEQ ID NO: 6040 - DNA, 340 bp, Homo sapiens
  source 1..340: mol_type = other DNA
ctcaccctggtgtcctcatttacaacacagggatgaagcgaaaagccagcggtggcacaccttgcactctgcgtaaaggggcgcctatgtaggtgggtcaaattgaccggattttccaacccactgtggctggaagcattcacttagcccggggcactgtcccagcccagattgtctccagccggacacaccgcggcctggagggcgctgggcgcggaggaacggagctcgggggccgggccggcgctcggccagcagcgccgcctccccggaggaaggcgggggccgggagaacctgagcatagcagccgcctccggcgcgggccgaccctggggctgc

SEQ ID NO: 6041 - DNA, 282 bp, Homo sapiens
  source 1..282: mol_type = other DNA
tactaaacaagctaggcctccaactgttacgtgtacattttgtaccccgtccgggatgaaggtgccttccctcataaggggcagggcagcttcctataggaggccgcctccaaaccccaggctgagtgcggtcccggtacccacccctccaacacgcggtgcctgcgtttccagggacagggaatcaatttctatatattacagctttgtaaacataatatttataaaatcaaagcgggaaagccttgttccttgctagaaatgagccgacaggccgtccct

SEQ ID NO: 6042 - DNA, 429 bp, Homo sapiens
  source 1..429: mol_type = other DNA
tgtcttcaagtatctccatgataaagtgttcttttaaagggctagctagacagcagccctggcagggaggccgcactggggtctctcggggaaggtgagtactgggcgcagctcgctcgcccacctggccactgctgaccacctggcggggccgaaccccacgccgggctgcgccacgccagactccgccagtgtgcagggcatagcgggccaggccgagggactgggcttcggggcggacccaagccggcggggacgcgcctggtggttcgcaggccgttgcgcaaaccggccgcaagccatgaggccggcagcctgggccgcctccagaaggttgcgcaccggcggttacagggttgccgcaagcacgcccctgagccttcccgccgttacctcgggccggcgctgcgcacgcgcgccaccgctaag

SEQ ID NO: 6043 - DNA, 368 bp, Homo sapiens
  source 1..368: mol_type = other DNA
cgtccgggatgaaggtgccttccctcataaggggcagggcagcttcctataggaggccgcctccaaaccccaggctgagtgcggtcccggtacccacccctccaacacgcggtgcctgcgtttccagggacagggaatcaatttctatatattacagctttgtaaacataatatttataaaatcaaagcgggaaagccttgttccttgctagaaatgagccgacaggccgtccctcagctgcggcttcctgcctcaggcacggggaggtctgggggtgccacgcaagtccctttcctcccgacacgagtaggccgggggcgctggaaacccttaccggcacccggccaccgcggcagacgcttgctcc

SEQ ID NO: 6044 - DNA, 518 bp, Homo sapiens
  source 1..518: mol_type = other DNA
gggctcccagagcaaaggcctccatgtggggggaacgcccccagcagggtgggcccgtagtgcccaggggtacctgctgctgttggctgggcaggccaggccgggctaaaggcaggagctaagactttcgtttcagatcaaagaggatcgggggggagctcctgactccaacaccccacccaactccctcctagggagagagagcttgttgacagcactgtcgtgggaggtcggctccagccctctcgagaaccctccggagaccgagcgctcagccagagaagccctggagcccaggaccagcgcttcaagtgcaccgggcgggaggcaggggcgcagggagggaggctctggaccggccgcccctgctgactatggccccggtgcaggtcaaggcttgggcccgggagggtagcgccctcccaggcgggccctaatggcgtgttgaaaagcagcgccctgcggctccagcggcgggggagcgccctcttccgcgccctcgccctctcccgtgtggg

SEQ ID NO: 6045 - DNA, 525 bp, Homo sapiens
  source 1..525: mol_type = other DNA
gctgagcctgggagaattgctcctatctccaagcactgaaggcctggcccacagcaacagtgcacctcgccttgcaccggcctgggagagccctcttgctgtcctcggggtcagggccctctgtggaagttcacaatgcactgggaatccggttccctgtggaccctggagcaagtgcccacaggtttgcctcccgcaggccaggcactgttctgtgaactgtggattctgtagtgaacaaaatagacacccattttaatgagggctctggaggagaggcacgggtgcgcccctggagttgctctgaagatgaacgaaggctcgtttgatcatttaaagcggatccggcctccccagctccttcgctgggcaccctatggggggacagggtgagttgggcgggccgctgcggttctccgagagcaccacgagggggagcccggacccctcctagcgccttccgatgcaagcaaaagtttttcttaaactaacaatgccagtgtaaggaagagctgatggtggggg

SEQ ID NO: 6046 - DNA, 427 bp, Homo sapiens
  source 1..427: mol_type = other DNA
tccggttccctgtggaccctggagcaagtgcccacaggtttgcctcccgcaggccaggcactgttctgtgaactgtggattctgtagtgaacaaaatagacacccattttaatgagggctctggaggagaggcacgggtgcgcccctggagttgctctgaagatgaacgaaggctcgtttgatcatttaaagcggatccggcctccccagctccttcgctgggcaccctatggggggacagggtgagttgggcgggccgctgcggttctccgagagcaccacgagggggagcccggacccctcctagcgccttccgatgcaagcaaaagtttttcttaaactaacaatgccagtgtaaggaagagctgatggtgggggatcccgctccctcccgcgtcagtcgcccacgcagcgctccgggaagtcc

SEQ ID NO: 6047 - DNA, 547 bp, Homo sapiens
  source 1..547: mol_type = other DNA
tgacttatttattgttatttatatgcttatatatttatagatttatcattttatcaagatttttacgaagatactcaattggaggttcctaattctggagaaatttccattttacaaatatattcttggagagggcaggttctgtttcagagcagaccatattacacggtgttattaatatccattaatatatttgtgttttatttaacagtaacagttaacaataacagttaaaaataagtatcacttcttttaaaattcacacaacttcggaatgtctggccagcagcgcgctgccctcaaggggcctccttgaaggccccttgaagagggccaatattgaccccgcggcgccgccatacaggagactgccctcgccgaggccacagcggctctcgcggcgcccctggaggcccccttcctgccttggccagaggggcggggcgtaggctcggagagtgggcggggcctggcgcgtgggcggggctccgggcgggccggccgccgagggtggggccgcgggtggctgggcggggcgcgctcgggc

SEQ ID NO: 6048 - DNA, 793 bp, Homo sapiens
  source 1..793: mol_type = other DNA
aagtatggttgcatatgtattgaatatgtacagacttttttttcttgtcattatttcctaaacaatagagtataacagctatttacataatacttatattgtattaagtattacaagtaatctagaaatgctttaaagtatatgtatgcaaatattacacattttatgtggtccgtggagggtcctggaaccaatcccctttatgattcacttacaaataactatatgaggcagatatttaatatatgatgaaataataggtattttaaaaatcttaactgattaaagcttctcaaaggaagaaaacttacaaattcagtatgtagtatgtgccaaatttcacttgcttatatgtatctaaaacttttctatgtctactttcttaatacttccaagaacaaattttcaaatatgttcatcatcagttcaagaaaatgtttgataactatgatagtcttttgctttaaaaaattttacatctgagatcaacagatctttttgtaaattcccatttgagaatgaaagttaaagatttgggtatttacttcccttcaaataaaaaataaaaaactattcttaatagtttcaaattcgaagttcagtagcctgttcttttttttataaaatattaaagagaaaaagccgaaaatgttctacatactctttttcttctagtttgagaagaaactgctttatgtggattgacacctcacataccctgagtttaagaagttagcattatctgagaaggtactatttttaggtccagctgtaatgttctttggtacacaag

SEQ ID NO: 6049 - DNA, 452 bp, Homo sapiens
  source 1..452: mol_type = other DNA
gcagagcgccacatggcgctaccaagtcgggccccggcgttggcgggcgaagagagctgtcggctcgcagagagcatgctccattctgagagtcgaagtagcagcttgcgcatgcagcgctagcgacgacggctttgcccgttggggtaacggtcgtcgtcgccgccagcagaggcctgaggcgccacacagcccgcgggatccattaaggccgcagcagcccgggccctaccgagctggagtgcgggggaggggcctgcggcggggccttgctgtgtgcgctgggcggcggcggggcctggcggtgtgagcgcttgccttccgcggccggggagtgctgagggcggcggcggccgtcgtgctcggcggagatggccggccccggagtgtgcgactgaggcgcgaggggcgccgccgcggcccggccgggcttgccccccgccccctcccgc

SEQ ID NO: 6050 - DNA, 587 bp, Homo sapiens
  source 1..587: mol_type = other DNA
gccctgcaagtaatcacgaaaacagtgctgattattttactctgtgtaaatagaaccgtgtaacaattttatttgaaggagagcttagaaaagatctcttatgcaaagcttttaaaaatgagagtggcttttagaatatttgtcattttccacgtataagacaaccatgcacagctaatcaaaattaggaagttatattcttactgcttaatatttaagtgttgataatataaaaaaaacctgtcttcaaatggtaatagaaattataaatcgagattatatgtgttcccttgatatcttaagcttgtaactaacacgtaccacatttacatgttccatatacgtgcctgtgtacatatgtaacatgtgccacaatagatttacacgcatcataattttcactttgcaaacgtatagagtacctactgtgcatgaacaaaaggcaaaagcttgttttaaaaaacaaaacatttgcaaggatttgggtttgttctagagcaagatccacacagaagagctaggtcttttaaaaaagctaggtctttcaaaaaaaaaaaaaaggagttcgttttgtttttaaaacagga

SEQ ID NO: 6051 - DNA, 405 bp, Homo sapiens
  source 1..405: mol_type = other DNA
tcagcaagctctgacttatggcaaaactctatccctacctctgtcagattcctgaataaagtttgccttaccattcttaaacatgaataattaagtgtcatgaatagttttttctactactgattagaggttagtgctcattatctggcacatattaatgatagctggagtgcagtgatgcaatcacggctcactgcagcctcgacttcctgggccaagccatcctgccgccttagcctcccgagtagctggggtcacaggtgcaagccgccatgcccagtgcttaataaatgttggttaaatcttataatcattttaaggactatcgcgaccctcctcgggcagagcccccgcggctctacacagccgatgctgcgcaagcgccgtacccacgctttagcacat

SEQ ID NO: 6052 - DNA, 556 bp, Homo sapiens
  source 1..556: mol_type = other DNA
taaacataaatagtttgttaatgatttcaccttactctaagatttatttcagagctactgaaagagctgagtctaatgacgccaatcggcctagggccggcggtgtttcgtctagattaatggcgagggaagtccccaatagtgaaagcgcttgtaccctcgggtttccgcagggcgtctcgagagctgcggcggccctgagacctagggaggagcctcggtgaaggaacccggggcgggttcctgcctagatgggcggcaactcggcgagccggacgcgcaggcgccaccgtggccgtccttccgccagccgcgggcggcccaagaaccgtccacgcctctcgcgattggctgaactgcgcgagcgctccgtgtgggggcggggccgccacgcagcggccacgtttcccgccccgctggtgcgcgtgcgcgcaatccccactggaaagcgtttgcgcgcgcccctgccgcggcccctagctcgcgcctcctttccgggcaggcccgtcccgtcagcaaggcagtgagcaccgcggccagcagagggcggtccgga

SEQ ID NO: 6053 - DNA, 271 bp, Homo sapiens
  source 1..271: mol_type = other DNA
aattttgccaaccgcaatggactaaaatcttcattacccactccaggcctgaaggggcaagggtcatgcaggggaggtcctgaatcacatcctgcttatctgcaggtgaaaaccagcaagcacctcctgtttggatgcccgaagacttttactgcctccgtgcccacttgcagcggactacgtagccctgggcatgcttcaaacaagcgccctccaagggcgtaagctagaggggcccgggcgggcgctttcccgtggaccctcccacctc

SEQ ID NO: 6054 - DNA, 326 bp, Homo sapiens
  source 1..326: mol_type = other DNA
tcattacccactccaggcctgaaggggcaagggtcatgcaggggaggtcctgaatcacatcctgcttatctgcaggtgaaaaccagcaagcacctcctgtttggatgcccgaagacttttactgcctccgtgcccacttgcagcggactacgtagccctgggcatgcttcaaacaagcgccctccaagggcgtaagctagaggggcccgggcgggcgctttcccgtggaccctcccacctcgcggaggaagccccgcagtctccaactccggcgccagtcaggttgtggggtgggggcggcggagggcggagagcgcaggcgcaga

SEQ ID NO: 6055 - DNA, 387 bp, Homo sapiens
  source 1..387: mol_type = other DNA
ttacccactccaggcctgaaggggcaagggtcatgcaggggaggtcctgaatcacatcctgcttatctgcaggtgaaaaccagcaagcacctcctgtttggatgcccgaagacttttactgcctccgtgcccacttgcagcggactacgtagccctgggcatgcttcaaacaagcgccctccaagggcgtaagctagaggggcccgggcgggcgctttcccgtggaccctcccacctcgcggaggaagccccgcagtctccaactccggcgccagtcaggttgtggggtgggggcggcggagggcggagagcgcaggcgcagagtccgcgcggcggcgcccctctccctccgcagtactccgggcagcgcccgcctcgattttccca

SEQ ID NO: 6056 - DNA, 233 bp, Homo sapiens
  source 1..233: mol_type = other DNA
ctgtctctgaggtcgaggctgcagtgagcagtgatcacgccactgcactccagcctgtgtctcaaaataattattatttgacataccaaatttgggcacagtgtacaaaattattagattacaaaatattaggttagaagtactacaaagacagagatcacgacctcccagctactcgtgccactgcgctccagcctgggcgaagagtgagactacactggactgactgctca

SEQ ID NO: 6057 - DNA, 227 bp, Homo sapiens
  source 1..227: mol_type = other DNA
aatcccagctactgggcctgcagcaccggcgaggggaagaaccaacttactgatgcctcagccagtggctggagacttttagagggccctcagactcgcctcaaattaagcacatgtcttacatccagagcagtgggggctgaactcaggtgcggcgctgaggacagttctggtccggggcacggcgcttgattgacattgcccgcgcggatccgcctgcccaccgc

SEQ ID NO: 6058 - DNA, 512 bp, Homo sapiens
  source 1..512: mol_type = other DNA
attttaaaaattgacttatgaatatcttctccacattcttgttgagggaatggactgttgaattcctaagaactagcacatagtaggccttcagtgaaggtttcttgaatgaataaataaatgaccaactttcccaaggttacattgtaagttctgaaacttgaaccaaaatacattatactctagaacccatgtttattccactattgtatttgcacattagggtggttaaagtccttcaagggctaaattttaaagggctaaatactatctattgaaatggttttaatttttcagtaatacattcacgtgactaaaagtcttctttttgcaaatgcatgcaaatatgaagctatatattattctttaccctcctgacttttagaagggtattttaaattttttcaaatatctttagtttttctgaagtgggtacatattagaaaaaagagccctgctgatgcaacatctgggtttgggcagaaaggagggtgcttcggagcccgcccttt

SEQ ID NO: 6059 - DNA, 297 bp, Homo sapiens
  source 1..297: mol_type = other DNA
aaaattttgcattgcccaagttgcatgttcccacggtaaacaagttgaagtatgtggtgttagataagcttcattcaggcatgaatttcactgctgttggctgctaatgaaccaacaatttatattaaataagctgtttttaaacagaaatacacatacagtaagtttatctactgatgatgaaaataatgataccatgattaactagaatcaactataccttattatgcgggccacatggatgaagccagtgcccctctacagaggggagcctttatctcacttcaatagataaat

SEQ ID NO: 6060 - DNA, 403 bp, Homo sapiens
  source 1..403: mol_type = other DNA
cccccaacctgcccagcacacgacaagttaggggcagcatcaggagcagatcctaagcctctccgtgaccaggccaaggacgtgtcagccacagagtcctcatgtggttcttgtggcatgacatggaaatcaacgggttccaatgcttatggaccaagagcatagatctaggatttggcctaagctgaggtgggagccccacccctaggcactgggacaagtcccttaacttatcgtggggacacgtcagccttttctccagatggcggcgctctccggaggagccggagctggagggaggccggtctggcccggagcagggagtccttctgctccctggcacggctctgcgctgaacccacccggcctgcggagagcagacaagttgattagaagagctccc

SEQ ID NO: 6061 - DNA, 456 bp, Homo sapiens
  source 1..456: mol_type = other DNA
attaagtttttgccacaaaaggattttatttaaaataaaaataggggagtgtaaaacaaacataactgcttttcacatgtgaaagaaaactggcttagaagttttctttgccatgaaggagttcaccttcagtgactaagctactagagttgccgggcctagggacaggagacattgccagtgcttagccaggctggccaggactaaccatctgctcctatcaatttgagttgagcaacaaacattttgaccaaatatcagctctataaagtttttcagtcctgggtttccaagttggcatccccagggcaaaccagcagtctgatcagacctggggcaggtgggcagggctatctgcccggggggtgcggccgcccctgcacagcaggctatcgcttggatcctggattttactgaggctccacctcttcttgaggtggggcggggggagctgga

SEQ ID NO: 6062 - DNA, 199 bp, Homo sapiens
  source 1..199: mol_type = other DNA
actttgggagacctacaagctgtttctggggtccttggacacatagaaaactaaagtctgctcaggagcaggcctacctgctcacactagagcatccagggggaactgtgaatcctgctcatggcctgccacatcagtgaggaacagccactgtgactgacactggggaacaagtggatacagttttctccaggtgaaa

SEQ ID NO: 6063 - DNA, 358 bp, Homo sapiens
  source 1..358: mol_type = other DNA
aattaaggtgaaacaaagacatctctttctttctttttcttttcaccctgtcacccaggctggagtgcaatggcacgatctcagatcactgccaagtagctgggacaccatgttggccatgctggttcgctctgtcgcccaagctggagtgcaggggcgcgatctcaggtcactgcaacctccgggcctcagcctctgaagtagctgtgattacagactggaaagaaatttttaaacaaacaaatatctagaaaaaaattaattacatttgtggatgtatatacaaaaaaatattgactgcataaaacattccctgggatcccatgaccttcccggtccctctctcgcgagatctgga

SEQ ID NO: 6064 - DNA, 481 bp, Homo sapiens
  source 1..481: mol_type = other DNA
gagtgtgtgtgaaaaggagcttttttcccactcttccgggggctgcagcgactcctagataagtggccatgttttatcaaatgcctattaagtttttgccacaaaaggattttatttaaaataaaaataggggagtgtaaaacaaacataactgcttttcacatgtgaaagaaaactggcttagaagttttctttgccatgaaggagttcaccttcagtgactaagctactagagttgccgggcctagggacaggagacattgccagtgcttagccaggctggccaggactaaccatctgctcctatcaatttgagttgagcaacaaacattttgaccaaatatcagctctataaagtttttcagtcctgggtttccaagttggcatccccagggcaaaccagcagtctgatcagacctggggcaggtgggcagggctatctgcccggggggtgcggccgcccctgcacagcaggctatcg

SEQ ID NO: 6065 - DNA, 407 bp, Homo sapiens
  source 1..407: mol_type = other DNA
atgttaacaggccaattgcaaccatactgtgaaaaccttactggttgcaagcaaattaatcaagtataattgaaagcatacttttatttaggaaatatttagatatccccattttcgagaaatgttaacacatattgtataacgctttctatgttcattaacctttattttatagatgaggaaactcaaacagaaggtaacccaagcattctggctattctgggatcgcaatttccccacctataaatatgaaagtgaacttcaaactatgtatgtggctccacgtactactttttccaaatatgaatactggaatccataaactgcaatttagcgtcagggcgagactccgcctctggggccccgcccaccgcgagcggcaggtggggccggcagatcttctttgc

SEQ ID NO: 6066 - DNA, 446 bp, Homo sapiens
  source 1..446: mol_type = other DNA
aattaatcaagtataattgaaagcatacttttatttaggaaatatttagatatccccattttcgagaaatgttaacacatattgtataacgctttctatgttcattaacctttattttatagatgaggaaactcaaacagaaggtaacccaagcattctggctattctgggatcgcaatttccccacctataaatatgaaagtgaacttcaaactatgtatgtggctccacgtactactttttccaaatatgaatactggaatccataaactgcaatttagcgtcagggcgagactccgcctctggggccccgcccaccgcgagcggcaggtggggccggcagatcttctttgcgcatgcggaaaccgctgcccgcttcaccagagcgtggccagttctggctgccttgcctagcgttggccaatagttggctgtcgaaagtgccg

SEQ ID NO: 6067 - DNA, 327 bp, Homo sapiens
  source 1..327: mol_type = other DNA
tagatcacgtgattctgccggcttgaattgtacacttcaaaaggtggaattttatggtgttgttcgcctaggactggggaggcgtccctaggctgagtcgccccggcaccacggatctgacccgggtaagtgctgggccgcgggagaggctgcggcgccgaccccagcccctggcgctctagcgcgccctgccgggcccaggggactcggcgcgggtgggctggacttcgtaggcgcgcgtcctgggggccggggtgcacgcgggggcgacagggtcgaggcacccggcccgggctccccactggcgcgcccgcagcggcgctcaat

SEQ ID NO: 6068 - DNA, 526 bp, Homo sapiens
  source 1..526: mol_type = other DNA
actatttgcattttgagaactgaaaatgcaatctgctaacccaaacacagcctaagtgtagtcccagctgccaagagcccttggatctcccatttgactgcaacacagtctgttgcaacatttgactgtaacatgtttgaaaagacaagttgtcaacatgtgacagcctcaggtagggcctgacgcttcgtccgtcaacaaatatttattggggtcctccaaatgtcagctgggtcattcaggtctggaacatcgagaacatgctgacccgtaccccagcaagggctcgtagtcgcggcggggtaggagagagggcagtctctggtggccaggtaacccaggcttcactttcaccgtgacagggcacccaaggagtgcgttggaagcgccagcgtcccccgccccccgtagtgagccaaccggagggagcggggcggacccagcttcccggggccaaagaggggctggccctcgacgcgctcgggctcgattggccgccctcccccggcggtggtaacggtcgcgg

SEQ ID NO: 6069 - DNA, 552 bp, Homo sapiens
  source 1..552: mol_type = other DNA
aaaaggaaagagaatattttgattgctatccatcggctccagcctttcgataaagctgttgaaacagtagagtcattccaaatcagtaattgatgtgagtttcattcggagctccacctgctctgatcattaaagggttagaaaccatgggccttgcccttgttgggcgccccacagatggccaagacgggccggtccccggaagttccccgttccaagctttacagatgccagaggagctggcagcgttgcaggctcgcaggacctgaggctggggaggcctggctgagcctgtccagggagggcctcgaatgccagctgagtccagactatactgtgtattatagaccgcgtgtattggtgagtcattaaccacctagggcagcacttggtccacccggactggcgagtgcacacctccggctgacgcctgcgccacgtgctggggtcggaggccgagctcaccggctggttgctctttagagcgggcaggagccaggcgggcggcccgcccctctagggcggagacttccggagctgccgagaactggg

SEQ ID NO: 6070 - DNA, 119 bp, Homo sapiens
  source 1..119: mol_type = other DNA
tccattaacaattcccttttcaaaagaaggaccataaatcagtgatgtctaggatcagcctgaacaggtatattttatattgatgttcaatacctactgtcaggtaataatccacacgt

SEQ ID NO: 6071 - DNA, 343 bp, Homo sapiens
  source 1..343: mol_type = other DNA
gaaaagctaggattacaggcctgagccgctcatcctttaaggacctaaatgacatgggggcttcatgcccaccttaagtagtttgggtctttaaaaaaggaatgagactcataaagaggttttaaggagcgaatgctattgctgccatgaacagatattccttccccatagctgcagagcaggcacagggctgtttttccccaccgtctagcccagagcggggccagcggccggctcctacccacacttgctggcaggaagactggacgcactgcgtgcgcggagggtgcggccttcggctagcggcgggaggggtggcctcctgcgctggtcgccccagggg

SEQ ID NO: 6072 - DNA, 260 bp, Homo sapiens
  source 1..260: mol_type = other DNA
tggagtgcagcccaggttgaagcaagtagttgggactgaaaagctaggattacaggcctgagccgctcatcctttaaggacctaaatgacatgggggcttcatgcccaccttaagtagtttgggtctttaaaaaaggaatgagactcataaagaggttttaaggagcgaatgctattgctgccatgaacagatattccttccccatagctgcagagcaggcacagggctgtttttccccaccgtctagcccagagcgggg

SEQ ID NO: 6073 - DNA, 472 bp, Homo sapiens
  source 1..472: mol_type = other DNA
agctaggattacaggcctgagccgctcatcctttaaggacctaaatgacatgggggcttcatgcccaccttaagtagtttgggtctttaaaaaaggaatgagactcataaagaggttttaaggagcgaatgctattgctgccatgaacagatattccttccccatagctgcagagcaggcacagggctgtttttccccaccgtctagcccagagcggggccagcggccggctcctacccacacttgctggcaggaagactggacgcactgcgtgcgcggagggtgcggccttcggctagcggcgggaggggtggcctcctgcgctggtcgccccaggggacctgagaggcgcgacaaacagtcggcgcgtttggtactcgcgcctgcagtccgcgccggctgcgcctgtttctcggccaggggagcaaggccacgcggcctacgcagccgagtcggaaccaaccggttgtgc

SEQ ID NO: 6074 - DNA, 423 bp, Homo sapiens
  source 1..423: mol_type = other DNA
caaggtgagatgtcactactgcatttctcaaaaaaaaaaattgtccttgtagagaaagggccctcttgattttcattggaatttgcagagaaaaactcagcctaagaagctaatattttctaaataaagtttggagaaaaatcacctgtctggttaactaaattgcatgcagtttattcagatgtcaaatatctatgttgaatttggtgtgtgtacatatgtatgtgtatatatttttatttatatgtatataagaataatttttttccttttaatgtacatatatataatttgtgaagtgataaaagtgtatttaaataatttatttctgctgacttactcttggtttttaaaatatcacattatttaattggcctgttacattattggctatattgaaatctaaggactaattgtagatta

SEQ ID NO: 6075 - DNA, 286 bp, Homo sapiens
  source 1..286: mol_type = other DNA
gaaaaaatgtaaagaatcatttaatcattcattcatttattcaacaaaagtttgctgtgaatacataaattatgtatttatttgagacaagagtctcactctgtcacccatgcaatggcacaggtgatccgcccgccttggcctcccagactgctgggattacaggcgtgagccacggcgcctaaaggtgtaagttttaactttatgcacttgtgaataagtagttaagggcccggaagacttccggcccaagaactgggtgtgactcggaatccctcccaaccac

SEQ ID NO: 6076 - DNA, 410 bp, Homo sapiens
  source 1..410: mol_type = other DNA
cctcaggtgatccacccgtttcggcctcccaaagtgctgtttcctcatcattaaatggagataaacacacccacacggttgggtagttgccgtctcggagctccagaagtgtgcagccctccctctgacttcagaagcctgaagctactaagcccgcagccgtctcttcgcagccttaatcagtgcccgggcaaaggcctgcagagaattctctgggcctcgcaccaggcccagggccagagtccgaggaagcccgatagcggttctcggcctccttagtgcaaagtccactaccagcggtctggaaggccacgttgcctaggaaactggggcggggcttgggaaacgacggccctgcgcgcagtttgcgcaggcgctccggccctggcctctgactatcgcgagaatcg

SEQ ID NO: 6077 - DNA, 391 bp, Homo sapiens
  source 1..391: mol_type = other DNA
ttgggacagcccatttggagaacattcctgaaccaagggtccttttttagcagaatcatgttcccagaaaacacttttgcaccttgcttccacagggaagcaagagagatttggtctcttaagtcagtcactctttcaaagctgacccaaccacttacaagttgtgattagacatgtgatttaacctccatgatcctttctcatctgtaaaataaggatggttaaacataatagtatgcatgcttgctatgagtgctggattcatggctgatagactccaggcttgaggcctgggtactagtggtgtgggacaaggggcccatggggacccagccagccactgctctagggccctgctatgaactttacaaagaaaagttcttttgagttg

SEQ ID NO: 6078 - DNA, 511 bp, Homo sapiens
  source 1..511: mol_type = other DNA
aaaaattaaaaataattattttttaaaaagatactattaagtaaaaaaaatgaggattcaagtttgttgtattctactttttggataaaaagacgagggaaaatatatctttatatttgattttataaagaaactccggaaagataaattaatcaaatagtttcctgtttaacagtagcaatagtggaaaatggcttgaatttctaactatgtgaatgttattacattaatacctgctttaaaatgcaatgaaatgtgaaatgaagtagatcatatgtactgatttgcaaagatttccataatatgtcaaatgaaaatgccatacattccttaggtctagtggaaagaaaagtcagggaatctcaagtttcactggatgggattgccaagggcattccaaggatccttcagggccccttcttggaccagacagatttgtaatcccaatggccctttgcctgctaagggaatgccttcttacatcaagaggaagcagagctcggcgagcctg

SEQ ID NO: 6079 - DNA, 362 bp, Homo sapiens
  source 1..362: mol_type = other DNA
attaataaacagtatattgcttacatttgcagattgtgcatcagaatcacccagaaggctcaaataacatcaactattttacttatttatttatttatttattgagccagagtctcactctgtcgcccaggctggagtgtagtggcacgatctcggctcactacaagagtagttgggactgacctcaggtgatccgcccgcagagacgtggaaagtgccccaattttctcgaccggcgcgaggctttagacaaaggcctgtaagtggcccttcctttgtagccccgcccctgcgcccgccctcgctaagcggggaggagcgaccgctactgggaatccagctgtcgccgccccgcagagccc

SEQ ID NO: 6080 - DNA, 438 bp, Homo sapiens
  source 1..438: mol_type = other DNA
actccattaggaaactgtattggcagaatccaaggcctctctctgcaaggctcccatgagccctgggggcttatggaagggaagcaaatttgggacctaaatttcctaagaaggttttaggggatagggaccccaattttctcattccaaataaatgcttccctgctttgaggtctggcgtttaccagggcagataaatcaagaaatcgctatgtaagtttctttttttatttttttttgcgacaagcgggtgaccactagaagaatgctttcattataagcaaatctagataattttattttctaataagtaagtgggcgttactttcatgtatttttttaaaagaaaattaaataaaaatacaaaacaacggggcttaggaccctgggcggggccagggccgggtctccttagggcccgccccagcgaaggggcgg

SEQ ID NO: 6081 - DNA, 475 bp, Homo sapiens
  source 1..475: mol_type = other DNA
cactcagtgattttctctattataaaggtgataaccatagggggagatactaaattatgcagtaaattcctgcagcttctgcttctttttctaaaaacaagacagtattcatactataatgtactatgaccatgaaatttctgtgcttaaatggaaggtgaaattcttccctaaaatatagggtcttttttctaggaatactgagctgtatgcttcatgaactatgcattgattgataaaatcaattactactgaaagaagttcctaagtgaacctatatatttttttctttaactctttaaatatggcattgctattatttgtaaacactgtcctttgttcaaatagaattctatcaaaaaaccatgtctggttccatggaagcatggagtttccaccaacataccagctccgcatcctgctatctacctagcatggtagagagacagaccctcagactgatatatgtaaatgc

SEQ ID NO: 6082 - DNA, 355 bp, Homo sapiens
  source 1..355: mol_type = other DNA
catgacgtcaacaacataaaggtggcaactcagcctctaagagccgcggctgcccctgcttctcggagatgacgcggagccctgctaggcgctgctctagtgtgcgcctggcgccctccccagaccagtcctcgcgccaccccagatgaccctcaggcctcgggtgggagtggaggcgcggggctggagggctctccggagccgcccaccagggtcctctgggggcccggtcccgactgggcagggggacctggacagggccccggggggccttggggcggggagcgcggaacccggcgccgatgcccgcgttcatgatccgtgacgtcacgggccgtcccggggtgagcgcctg

SEQ ID NO: 6083 - DNA, 604 bp, Homo sapiens
  source 1..604: mol_type = other DNA
tcgatgggaaactatcaggtatccatcttacattgttttctaatcgtgaaaaatctgtaaatggcacccatttttcttcagttaataacgtaaaaaagcctgcattttcatgattaaagtctttaacttgatggagcttacgttgaaaaacaaagtttatatttttaaattttatcttttaattccatttatgaacttttattcttttaaaaacaaacccaagtattttaattctacttgcctttttgccatatggaatcacctcatcccttgtcacgattgcataatattccatagtaggaatgtttcatgaactgcaagcattgttcataattctgtttgtgagcctatataggagtatccgtgcacaaacctttttatgcattttttcaaagtaaatccgcttgcgaacccggaaccaagtcgatcgccagttccctgttcaggagagtgcagccgtgattggcgcgttcactcaggccaggggcgccccaggtctcaggtgctaggagcgcggtgacctaccaccgccacgcctcgcggcccctttcattgaaagagccccagagtgcgtgacgtcacgacgctcacaccaatgggagcc

SEQ ID NO: 6084 - DNA, 313 bp, Homo sapiens
  source 1..313: mol_type = other DNA
acaataaatacgtgtcaatacacacttttgtcacataaagcatcatcttatgctccatccagttggctgctaagaggctctgctcatagcacaggctctgtgctgtgatagagctaatcatgtagacacatttactaggaaacattcccgatgaaatgcgcactctgcatctagactctgtctgcatctagactctgtctgcatctagactctgcctggtacctggcacagaccctcgaggctccagcgctggttcctgcgcctcgggtgggcggggaacgctcctttaagagatgagttggagcctgatctc

SEQ ID NO: 6085 - DNA, 503 bp, Homo sapiens
  source 1..503: mol_type = other DNA
catttactaggaaacattcccgatgaaatgcgcactctgcatctagactctgtctgcatctagactctgtctgcatctagactctgcctggtacctggcacagaccctcgaggctccagcgctggttcctgcgcctcgggtgggcggggaacgctcctttaagagatgagttggagcctgatctcagggggataataaaccacccttttgcgttgagtaaaggcagtgactgggtgtctcctccccgtcaggggcacccaccctggcgctccaggagcgcttgaatgaatccgggaggacccgcgcgcaggaatgagtgggcgggtgagtgaatggcgaccgcgccgccgccttggcacaggggcgcgggcgcgggctccacttccctctcccgccagctggtggcctcgagaaggtggcggcgccggcagcggcccgagctgggacggccggggcgcgggatggtgggggaaggggcgttcccggcgaccgcgccttccgcg

SEQ ID NO: 6086 - DNA, 637 bp, Homo sapiens
  source 1..637: mol_type = other DNA
tagcaaattcgaatccgtatctattttgcctggctgagctgacagcaaagacctctcagagaaatctggtggaaatctccaccagctagtgctctgaggatcttcagcagcggctccaaggaagccgcgggccgggagcaggtgggaagggcgactgcgcggggccacgacctccccgggtctctgcagaccgttggagacggggtctacgtggcagcaggcgcaccccagacgcgcgcgcccacccggcgatagcatcagcggcgccagggcaggcacatgcaaagcacccacactagggcccgggccggccagggctgtgttcctgggccttggcgcgcctccgcgcagtccctgatcgcaggtcaggagctcggcttgtccgtgcccgtggctttgcacgccgagggctctgcagactgaccagtctctccgggctgtgctgggcctcccagaggcagtgtcctctcagcaaccccgcgcggtcgcccccgcccagccgcaccgcaacaccgcctccggggcggagctccagggctcctggtgcagggccggccgaactgagacggggcgcggcggggtcggcagggggcgctgccgggccccgcgagctccccggtggcgggtgcgcgccgcc

SEQ ID NO: 6087 - DNA, 351 bp, Homo sapiens
  source 1..351: mol_type = other DNA
cacccccaactccaattcttcaggttagagatttgagtttgagctcaatttttagaggtcaaaaatcataaagaaatctgaaattcaagttcatgtttcgcaggcctggaggcctcagatgagcctgagcccttatacttgctttttattccaaagaaactagccaaacttggcagattcaagtttaaacattgtcttttcaacatgccccctgcatgttgctgaattttaagcttcagctgaatcgatcatcaacagatgtatatatgggtagatggatgtatgaacaaatctgtttccaatccattgtacagtgcactagcccttaaattaatttgagttaattcttaa

SEQ ID NO: 6088 - DNA, 394 bp, Homo sapiens
  source 1..394: mol_type = other DNA
atagcattaggaatattaatagtacctatcacagcttttttgttgtgataataccaataaatgaaataatcttcataaaaatgttcactaagtatttaatttttattttacaattatcattccttaattcatcatataattacagatataaatatcccctttaaagagtggtcatgtcttaaaagctgcccggggatgtgagaggtccccagggaaacaccctttctctgacagagcacggccatgcctctgccatgcaggagggctgagaggagggcctctggacatcaaaggtccttccgagtggcagggcagcccggcccgggctgctggcgatgactcaggcctggccctgacgtcacccacgcccggccactggcctccctctgaagcc

SEQ ID NO: 6089 - DNA, 506 bp, Homo sapiens
  source 1..506: mol_type = other DNA
cggcaggatctggaggaaattttgctagcaagctgttttgcagcaaaaccgtatttgcttattaggcatttcttaaaaatcctgaataagcagctctttcaacagtttttgttccacatgttaaacatttcattaagaattcttgaatgttttttatttaaaaaattaattcctcaccattacatattgaactatctgcagaaggtgaagatgagatttaattttcggaaaacatttcactagtgtcagcactgacctcctgatgtcaatgtcatcatgcgggagaagataaatcattttgcattttctgtgttctgaacgcatacagtatgctgctgtaagtcttagtattatttaggtcagtatcctaaggatagcatgatccagaggaattcagcatcaatttatttttctgtgcttccaagttttaaaaaatccattcacattttaataaaattctgaggcggtatactgcagatacatttagcaggatacatttacactgc

SEQ ID NO: 6090 - DNA, 364 bp, Homo sapiens
  source 1..364: mol_type = other DNA
aaaggattgtttgattctcagaagcagaaggacacattcattgtggagcagctaaacagtgttgatatgcaatgtcacttacaacattaatcagatgcgagcctaagatggcaggcaggattagccgtatgccatatcatctggtagcgaagacttgtttttgttcatcacattcaaaatatgattttacctttttttttttaacaaaaccaaaacccaataatgtatgttgtattgttaattaatgtgaatatcaaattaaacacttgaaacttacatgtttattatgcaggtaaagcaacttgggttctcaaatttgtatgcagtggtcagctccgagctttgaactctcagaggaggaagg

SEQ ID NO: 6091 - DNA, 680 bp, Homo sapiens
  source 1..680: mol_type = other DNA
ttccttttatttttaaataacatgattatttaatttgacctggagtcaatatatttttccctcattatttaaaatgttttgttggctttatatttaatattggaatctattcatcaagtgatcacattcttaaaacatggtcaggaactgggatgcagaattgcaagtactgtagattcctggctgaaaacgtaaagaattgactttttaatccttttagccttgaattttttttttttttaagaaaatttaagaataagactctatagctccacatggccagcttgtggcaggcatactttttcaatgagcagcccctggatcttggaagaaagatgccagcggccagggcccttcatttaaagaagaggactgggtcttttgcgaaacaggagcccacggacccttctgcggcccgaggccaccaggctctgtggcccagctccctgaggaggctgaggccgctgcctccttggtggggggccccggctggccactgggtcgggcatggggccttacggggccctcacgggtcccgccgccgccctcctgaggcctggtccttggcgccgcagttaccccagccccgggcccgcggggctgcgggtcgggccgacctcctcccggacgggctgcgtcctctgccccgcgccgggggcgggccgggccggcagagccga

SEQ ID NO: 6092 - DNA, 766 bp, Homo sapiens
  source 1..766: mol_type = other DNA
ctgtggcccactccctgaggaggctgaggccgctgcctccttggtggggggccccggctggccactgggtcgggcatggggccttacggggccctcacgggtcccgccgccgccctcctgaggcctggtccttggcgccgcagttaccccagccccgggcccgcggggctgcgggtcgggccgacctcctcccggacgggctgcgtcctctgccccgcgccgggggcgggccgggccggcagagccgagccgccggcgtccattttctgggcggtgctgtgcagcgctgcggccggactcacgggtccggaagcaccatggacccccggggaaacgcgccggcggcgaaggagccgagccccgtaagtgcccctcgcagggtcttcgcggggccgggggcggggcggggcgaggcgcggcctgcgggcgcggcgcccgtggcgccgccagcccgatcgctcctcgcttctggagggagccgggaagccgggctggaaaccctcgcaagggttgagcaaccgagctgcccgcggggaggaagcgcccgcaggtgcccggactccggggcccgcgcccggagcggggcggggcggggtgggttcgagtgcgggcaggttgcgccgcatcccgtggcccaactgcgcggctgtgctagagggcgcccggggctggggacgtggtgggctcgagtccagcgggctcggcaacaccaagcccctggaattgaaagggacgtgcaaaggcagggacctgcccccaggggttc

SEQ ID NO: 6093 - DNA, 462 bp, Homo sapiens
  source 1..462: mol_type = other DNA
ctcaaaaaatatttgttaaagaattaccgcagtttactcactgtaaagagttcccttgaaataaagctaacaattagtcaaagatttacacatttcctaggctttttatgctttttctgttcctgaaatacaaaagtgatggtaaatgcttcagaatttctctatgaagaattggtcccaaatgcatctcttgcccttttgaatagggagtttccctgaagcccaattcccgggaggatttagggatcacgggcctggtggggattttaaggccgctcagagccacgactgggagctacccttagccagcgccccaagccgggagtacggttctctgcagggtagcccggctcgggcccggggggggcgggggcggggccgcggcgggcggggcggggcggggcgagtcgggccgaggcccgggggcggggccaggcgcgcggctggcctgggcctaggccg

SEQ ID NO: 6094 - DNA, 713 bp, Homo sapiens
  source 1..713: mol_type = other DNA
ggttgtgtcgccacacaccgggactcctgggatcccgacctcttttagcggtcaaaagagggcaaactagttgcctaacaatatttagagctattgtgtataatgataacctgtaatgaggttactactgtgatttttaatgaatacattttaaaatgttttaatttcttcaaaagcaaacattaatctctacatatgtgtgtatacatatacaggaaatgtatgtatatatgaatatacatatattcattgtatatgtgtatatatattcatacataatatgtgtgtgtgtatatatatatatatttacacatttcctacataaataaaagttctttaaggtcctaataatttttaagtgaaaaggagtcctgggaccaaaaagttttgagaatcactgaaccagatttctagatctttaagatcatttattcactcaacaaataattgtgatagcaacatgtttcctgcgctcacgcagcgcagcaggcagattcagcggcgtcgccccataagggcccgagccctctcagttggcctaggacggcgagggcggggcctgcccgcccccctggcgctggcgtcaggtgacgtcactgtgccgcgccagccaatcgtgggcagccggggtctaggcaccacggtggctggcggcctgcgggcggcgctgtggcccgtcgggcggctccacagagccgccctagccttccgcc

SEQ ID NO: 6095 - DNA, 160 bp, Homo sapiens
  source 1..160: mol_type = other DNA
cagacgggagtgcagtggcgtcccgagtagctgggactccgatcctcagagctaagacagctgcaggatttctgcaagctattcagggtgcctggagtccttagggcctctgggctgggaggggggaggtggccccggcaggtgtcccagcagctttcag

SEQ ID NO: 6096 - DNA, 544 bp, Homo sapiens
  source 1..544: mol_type = other DNA
ggccggctgggagctttcagtatttagatttcattgataaattcaactgaatcccgagaaaaattatactccattcaggctcccggttgaacccttcaagggagccaagcgaggatgcaccgtgtacattgtgggagccccgcgcgatcccccgcagagcgtcctgtaggcccagagagcgtcctgtaggaacgtcacagagcccagagagcgtcctgtaggaacgtcacagagcccagagagcgtcctgtaggaacgtgctctccgcacccgcccgccgcgggtagcatcttctcagcgccccggcgcccaggaacgcgggacgcccgcctttctattattataaacgtgcgacacgcttcctctgacccaggctgagggagcccccgaggctactgcggggcggggccggggcggggtggggcgccctcgccgcctcaggcagcgccccggccgctggcgggaggcggcagcggcgcgggccgagcggcgcggggattggctgcggcgggcggagacgtcaggctcccgcggcccaagcggc

SEQ ID NO: 6097 - DNA, 452 bp, Homo sapiens
  source 1..452: mol_type = other DNA
ggtgtggctccagtaggcccaagtatagtggctgctcctctagagggcagagtgtacaagctgcggggtatgataacgccttagcaaccctcaccagggcaaagcttggtggagctgaggtgcgttgctccctgaggccctagtctagtagagcttccagcatgcaactccagcctgggagagccacatgatgggctgcccccaataaagtcatgggggtgggggcccctggtaccctgggggcccaactcctgctccttctgaagccttaaaagttaatgttcctgtcccatcattgcggaatttgcctcaggatgaattgcacctttgagtcttacccatatctgattttgggaaggatattttgcctgtgaaatagacatgaattttgttgaaacatgaagtcatgagggcttcacccttatgagtggaattagtgcccttataaaaga

SEQ ID NO: 6098 - DNA, 374 bp, Homo sapiens
  source 1..374: mol_type = other DNA
aaggacatctgatatttaagaaacagaaaaaaattatactttgaaaaagttgagaaaggaaacaatattagatggtattttctttattctcatggggtttgtttaatgaatctgaaaactgagatgtcagcaattataataataataactaaatatatattgagtaccagattctatattaaagccttcatgaattagctaattaaatctaagtaaatggttattcccaagaacacggaggtaaagaggttaaattacttccctaagattgtatactaataagaaggaggtctcagatttgatcccaaatacactttataaggatgatttcacaggatcttggatcatcctttgtactactgcactccagcctg

SEQ ID NO: 6099 - DNA, 559 bp, Homo sapiens
  source 1..559: mol_type = other DNA
ttattaatattgacagtcatatggttatctgatattgaaaagaaacctaagaggtcatcttttgttcagcttcctgcctaggaaaactaagtaagatgattaggtatgtatatttaattagtcatttaaaaaaaaaccagaaattttagaacttcaaaaagcacaactaagctgctctttgttgatatcagaaatagagctggacagttattacaggttcaaagcagatactctgatatgtataattcaaattatgcaggtttcacgagtaagtttaatcttattttttaagttagttaaaaggcaagtgatatttagaaaaatgttaacttgtagttatttcagtgtactttaagcattttttaaaataaaaatatccttttaatttaataagaaaacaaggttctacatagaaaagccccttcatctaagacgagatgtctttgttgtaaacagtattcatatgtcttttgaaagccagttaactaaacagttttcttgagcatctttttagttttactgagaagtattttaaattctgacacagtctcaagtttcc

SEQ ID NO: 6100 - DNA, 511 bp, Homo sapiens
  source 1..511: mol_type = other DNA
ctgtagtcccagctactcgggaggctgtggtggtaggatcacctgagactgggaagtcagggctccaatgagccgtgatccagatctataagatttgactggagtaaaatgagaaagatctaatcgtttctgaacgaatgaacaaaatcttttcatttgatgctcccccagggcgaccccgcaaaggcctggggaccgaatggaactgccccagtccccctccttccaagagagctggggtggtcagttggaaaagagattcccacccaagtcgcagcctcaggcccgcagctgtccctggaggcggcggggaaggtcctgcggagggctcccagggaggccacagggggaaccaaggggcggtggctgagtgcacgagtcccgcccctccatctgttggccttactccgtgcacgcactgccggcccggccaatccgtggggagcggcgccaggcgtcgcacattctgagggccaatcggcgcgcactgtgctgctccgccgccaaagct

SEQ ID NO: 6101 - DNA, 558 bp, Homo sapiens
  source 1..558: mol_type = other DNA
gttaataaatattaatacttttggccaaattttgaattttttattttatttcatttttgaaaaacagcactttatttcatttaactctagcatattcaatggctgtgcatttaataatactgaaataatatatggtagtgacctctacaaatgttttaagcttgaaaaattctgcctagtcataatcatagttgagaaatgaataaatgtgccttatggcacctccaaactttttgagatttttatataaactagcctatactttttctttaacagagattcttcaacctgcaatcgcgagcggatcacgagatcaggagatcgagaccagcctgatcaaatcccagctactcgggaggctgaggcaagagaatcgcttgaaccggaggttgcagtgagccgagatcgcgccaccgcactccagccgggggacagagtgagactccgccaaccgcggccggcgactggaggctgagcatggctggcgatctggggctgcagacctccacccctcccgcgcggccgccggcgcgcgcccgtggcgtcacggcgtcgggg

SEQ ID NO: 6102 - DNA, 541 bp, Homo sapiens
  source 1..541: mol_type = other DNA
agtctagtaagagagatatataaatataaatagcatatcattaagttcacttaataaaactttgttttaaagtgtgataaaataaacattctgtaatttgtgtgatgctgccatactgcagtcccagaatgcagaatacttaacatttcctgagatcttaaaatccaaaaagtattaaatgtttaaggtttttctgtaagttttcatccagaagacttaaatacaaagtaacaaataagtggaaaactcttacatttaaaactgataatttcacttaagttgatagaacgtcaaaactaaacattaaatgatttcgtatccggaaatttttttgaacaatttggaaaagaacgtttttaaacgtatgtattaagaaacgtaagtttaaattcctcagagaaaattcgaaatctgcattttcgcccctaagttgcatggacagtaccgcggccccggccgcgcgaggcccggagggctaagccccgcccctcggacggcctcggatcctgccgctctaggcccgccgggcgctctctatggt

SEQ ID NO: 6103 - DNA, 386 bp, Homo sapiens
  source 1..386: mol_type = other DNA
ttaattgagtgattaactacataactttgacatgtcaacaatctcttatggtggtcatctttccaataaattgagttgagctagaaaatgtgtattgccaaaatccattgatttactttaaaaattaaatcaattccaaccccattttcaaatattaaaagttggtagggtcctcacagggagagcccaccttttggcctgtatctctcagaaagagggacacatttgtgaagcgagtctgggctggcggccctcaagccctatccccgggtcctatgcagaaaagacgctgggcctggcaagcggggccagtagcggcttccgggaggagttttggcctccacacggctccgtcgggcgccgcgctcttccgggacgccgggaac

SEQ ID NO: 6104 - DNA, 290 bp, Homo sapiens
  source 1..290: mol_type = other DNA
ttaattgagtgattaactacataactttgacatgtcaacaatctcttatggtggtcatctttccaataaattgagttgagctagaaaatgtgtattgccaaaatccattgatttactttaaaaattaaatcaattccaaccccattttcaaatattaaaagttggtagggtcctcacagggagagcccaccttttggcctgtatctctcagaaagagggacacatttgtgaagcgagtctgggctggcggccctcaagccctatccccgggtcctatgcagaaaagacgc

SEQ ID NO: 6105 - DNA, 597 bp, Homo sapiens
  source 1..597: mol_type = other DNA
ttctagaatttccataaatgggatcatacagtactgtatgtacttaaaaaaaaaactggcttataaaagtccttaactttttctttcactttatgaagcagttttataacatctattcttacctttatggagccatcataaaagatgttttagactttcccttcagataattaaccagacagtgaaaatgcattatacattttataagtgaaactgttctggttttaacgctgtataatactataacatgttttcagttactattcaaagataattttggatatttgcttgaaattagtccagtgactctaattgaaattcagtaagatcctaattatttctgggaattaattcttcatgattttttacatgatgaaaacaatattgccgttttcttttcttttttaagctcaggtctcaacattgccattttaaaattaaagtggcaaaggaacatttataccacaatgtattttaagctccccagctataatcaaatagaatgatgatgacatccacatttttgcctcttgattttttccatgttgcagattggcctttctactgagagtaagttccatcaagattaatatctgt

SEQ ID NO: 6106 - DNA, 405 bp, Homo sapiens
  source 1..405: mol_type = other DNA
ttcacttcaaagaaaaaaactgccttttccagcaagtgatgtcacttgcagaaaatgagaagcggtgattttcttattttcggactcttcctccagctgcaggtggtaaaccagggccggcagacgcctctctcccccacggacctgtggccacggagcatctccacaagggccgcagcgggggctgggggatgcaggacccaggctgggcctagccctacctgcccagctcccgcagggcggggatcatggaagccagctccaggccatccacgccaacgcgggttcccggcgtcccggaagagcgcggcgcccgacggagccgtgtggaggccaaaactcctcccggaagccgctactggccccgcttgccaggcccagcgtcttttctgcataggacccggg

SEQ ID NO: 6107 - DNA, 544 bp, Homo sapiens
  source 1..544: mol_type = other DNA
tttttaaaatagcccaggatttggcaaatccaggctgttggcaatcaaattaattacttttttttgttgatagagtctcactccgtcacccaggctggagtgcagtggtgcaatctcatgtgcctccaggctggtcttgctgggccaatttttaagaaaagttttctatcatagctgtcccttgtgaatgaatgaaaaagttgagctctgaaggatgctcaggaaatctttgaattatattgcaccattttcatatattttatgtccaaaggaggagactaatatttaacaaaataaatgatatcccaattcatacttatattcaacagtaggttgatatggaatatgaatacttactttttccaaaatgaatgatacagctccctgttgtgaaatgttgttgaataaggagattgctagacatatagatgaaaatattttccaggttttcctttaaactagaaggaaaattcttcaactatttcatagctgttttttttcacatggtaccagtagaacttctactcaccagagatactgaaat

SEQ ID NO: 6108 - DNA, 705 bp, Homo sapiens
  source 1..705: mol_type = other DNA
aaataatatggaaataaaaatttatatatttgtataaattatttaaacataatataattatatatctatatatcctttataaatgagagttcatttccagctggctctccattgtgctttaaagcatagtgcaccaacattaagtcgtcggactcaattaacatactgctccatatttgcttaattgagcgaagtcttcctcagactgcggttcacctcacgaaggaagctgcagcgggctccaggagcccagtgcgtccaggctcctccctagtgtcgtcgctacagaggagcagaggatgaggcgcgaacatctcctcggagcgcagctgggccagcggttcccacagccctggagcccaacgtgcgcagaagcgcctcttggagctcctcttcctgggctaggccgccccaggcgcggcccctgcgactcctggcacggccccgtgctcggctgccgccctggcgcgcgccacactgtcgtccccggacgggcgcggaccggctcggccggggcgccggcggctggggaggggtcgctggccccggggccgcgcatgcgccgccaccaacttggggctgtcagtggaggggggaggcgacgcccttcggggccaacgggcctcgagccgaggcccagccctggggcgtggctggggtcggggtcggggtcggggccggtgggggccccgcccccgtctcctg

SEQ ID NO: 6109 - DNA, 447 bp, Homo sapiens
  source 1..447: mol_type = other DNA
ccatgcatatttatagcagcacaattcgcaattgcaaaaggataaagaaactgtgatatatatatatatatatatatatgtggtatatatatatgtgatatatatataatgatggaatactactcagccataaaaattctacatcgtatgttctcactcacaagtgagagctaagctttgaggtggaaataatatggaaataaaaatttatatatttgtataaattatttaaacataatataattatatatctatatatcctttataaatgagagttcatttccagctggctctccattgtgctttaaagcatagtgcaccaacattaagtcgtcggactcaattaacatactgctccatatttgcttaattgagcgaagtcttcctcagactgcggttcacctcacgaaggaagctgcagcgggctccaggagcccagtgcgtcca

SEQ ID NO: 6110 - DNA, 621 bp, Homo sapiens
  source 1..621: mol_type = other DNA
gattcttaacagctcattattagaaataaagtctcgataagaactactttaatacttaattttcttgcttagaaaggtgaaaacaatttagaggtgattattaaaaatctctatgttattgggaagctcttaacaaaataaatgtttaaaattatatttctgtaattaagtaaaagagagtattgatagaattgttcgtctaagaaaaacgaattctccgtaaattttaatcagaacatgacatgggtcattatctgacatttaatgacagttcacccgtgtttaaatcccggagactgtcttccttgtcattgtcataccagtaaaaaaaagagaagttaaaatacaataaaatcccttttccctttctttccttggatctgggttttgaaggagaagcgctattactttttatttaaaagcaactgggacctgagaatcgtctctgggcgtcggggcccgggccgctggggtgccactccgcaaggggttcctcttctccccggggtccctgagggctggacgagagaggacccgtcggtcccggggtgccgggaggagacgttcgcccgccccacgagagggggcggctctggcctcggagccgcccctcctgccgcc

SEQ ID NO: 6111 - DNA, 565 bp, Homo sapiens
  source 1..565: mol_type = other DNA
ggtgattattaaaaatctctatgttattgggaagctcttaacaaaataaatgtttaaaattatatttctgtaattaagtaaaagagagtattgatagaattgttcgtctaagaaaaacgaattctccgtaaattttaatcagaacatgacatgggtcattatctgacatttaatgacagttcacccgtgtttaaatcccggagactgtcttccttgtcattgtcataccagtaaaaaaaagagaagttaaaatacaataaaatcccttttccctttctttccttggatctgggttttgaaggagaagcgctattactttttatttaaaagcaactgggacctgagaatcgtctctgggcgtcggggcccgggccgctggggtgccactccgcaaggggttcctcttctccccggggtccctgagggctggacgagagaggacccgtcggtcccggggtgccgggaggagacgttcgcccgccccacgagagggggcggctctggcctcggagccgcccctcctgccgccggaggtggctgccagagcagctcctcagcctttaaa

SEQ ID NO: 6112 - DNA, 370 bp, Homo sapiens
  source 1..370: mol_type = other DNA
gcctgattcgggcatggcctttctaggccctgattaagaactttttaaaaaagtactaagttcagaaaagtttaatatggtgttcccccatttatgtgattaaaaatgaaaacaatactaaagtgtaaaatgtaatctttaaaatgtcacacaactttacatgcatgctagatttagaataccatcgactaaagagtgtctataccatcttaagatgagcagactgcaagtttgcctctcccaccagtatgggagctgccgaagcggctctttaaaaagcgtcctttgacaccggaagtcacgtgagcggctgcccctaaggtcgctatctcgacagtcgactattcagccttgcaggcgcctctggcgg

SEQ ID NO: 6113 - DNA, 326 bp, Homo sapiens
  source 1..326: mol_type = other DNA
agataagctgaactgtactcgacattatgggtttttctggaaaacaaggataaataagttttttgaacatttttctcccctgaaacgtaagagagttaaaaacccgtggaaagcgagttaagtcacttttcaagtaacagcaatattttaatgttagaacaaagataattgtgcagtaacctccggatcagcgagagctctgtttatccgagggtgctgagcctcaggcccagtctccggaggctaacctaaagcaactgaaaaatgattttctttcaacaacggtgttgggtcaagttctttgatctcatctacaaaaccaagaa

SEQ ID NO: 6114 - DNA, 398 bp, Homo sapiens
  source 1..398: mol_type = other DNA
taaataagttttttgaacatttttctcccctgtaagagagttaaaaacccgtggaaagcgagttaagtcacttttcaagtaacagcaatattttaatgttagaacaaagataattgtgcagtaacctccggatcagcgagagctctgtttatccgagggtgctgagcctcaggcccagtctccggaggctaacctaaagcaactgaaaaatgattttctttcaacaacggtgttgggtcaagttctttgatctcatctacaaaaccaagaagcgagcggaaatgcggagagcatcggggctccgcatgtgggccccaaggtcagaaagatttattacttccttccggaagccagagaacggcgctccgcgtcctcccaccgctccagggcgcagaggt

SEQ ID NO: 6115 - DNA, 482 bp, Homo sapiens
  source 1..482: mol_type = other DNA
aacctaaagcaactgaaaaatgattttctttcaacaacggtgttgggtcaagttctttgatctcatctacaaaaccaagaagcgagcggaaatgcggagagcatcggggctccgcatgtgggccccaaggtcagaaagatttattacttccttccggaagccagagaacggcgctccgcgtcctcccaccgctccagggcgcagaggtgtcctcagtgcccggagaggttgggtgtcggccccgagggcgagtccggcagctgcacgcagaatccgacgagctccagatcccgcgttcgcatcccggcgctttgcgcgcagagctaagccttcggacccgtggactgcagcccccgcgcgtcgcggtaaagcgggtcgcgtctccagcccccgaggcgcagcgacggtgggagccggctcggcgttggggggcggcggaggggaggagccgcggcgacagacggcggcgcgcaccaaccggg

SEQ ID NO: 6116 - DNA, 518 bp, Homo sapiens
  source 1..518: mol_type = other DNA
atttctcagtgagcaacattgttttgccataggacagagtgtgggtcctggatgccgagaccaggaaccctacaaaatccatgcatgtggcgttgtatccaaacagtactgctttcattgttttctcttgttaaaagaaaaacaattgatttagagtttaaaggctgctctgcaactatcaattatataataaatcctttcttgcttctcaactaaaaaaaaaaaaaaaaaatcctgtgaaatcactttaggtttgcttaaccaatgtaattgagatacttgaggctgattgataactgtgctatcaatcccttagaaaaaccttttttattattaatctacagttcatatttatgcagcttaagaagacttatttggaataataagaccgtgattcaagatcttagcatcattgcttgcagatttgtccagtatgaaagatattttcatgagatgaatcacttaaagacattaagagtcagtgatgaaaccacacactctcgagtttgaaaagagac

SEQ ID NO: 6117 - DNA, 592 bp, Homo sapiens
  source 1..592: mol_type = other DNA
cgtgaccgtgcggagcaccaagcagccccgggtccccatggctaccgccagggcaacgcttcgcggcccgctcctcagggaccctcaggggcggcaccgggacgcagggctccggggacgggctagggcagccggcgggcagcagaggcaagcctggcaaactcttcccggcttcttcgcggcgcttggggcagacgtcctggcgacaccaggccgcgtcgactttattttgtgctcactcaagaaaattttaaatgattttacagataccccaccccctaccgcgaggagcacgagctgaggggaaccaagcccccgtcgggcactccccggcctcgccccgcgcgcacccaaccataaggcgaggggaggcaatcgcgccagctctgcctccgcctcgcgcgccgtccagagggaaggatttgcaatagacttcctcagtcttaaagggccgtttccacaatagtgaaaataatcataaaagatgactgtaattaagactctttcccgcgagctcccgcttacgctttccgggcggcgcgcgacgcgctcgctccgcccctctggccccgcccccggctccccttcttgg

SEQ ID NO: 6118 - DNA, 619 bp, Homo sapiens
  source 1..619: mol_type = other DNA
ggcagccggcgggcagcagaggcaagcctggcaaactcttcccggcttcttcgcggcgcttggggcagacgtcctggcgacaccaggccgcgtcgactttattttgtgctcactcaagaaaattttaaatgattttacagataccccaccccctaccgcgaggagcacgagctgaggggaaccaagcccccgtcgggcactccccggcctcgccccgcgcgcacccaaccataaggcgaggggaggcaatcgcgccagctctgcctccgcctcgcgcgccgtccagagggaaggatttgcaatagacttcctcagtcttaaagggccgtttccacaatagtgaaaataatcataaaagatgactgtaattaagactctttcccgcgagctcccgcttacgctttccgggcggcgcgcgacgcgctcgctccgcccctctggccccgcccccggctccccttcttggtctcaggagagccagcgcgcacaagcaagggtgtgcggtggctggctgccgccgcagctcttgtgcgaagccagcagtgcgcgtgcgcgcgggcacgggcgcgcgaccgtcgggtccccgcgctccctccccctcccgctcctctataacttg

SEQ ID NO: 6119 - DNA, 552 bp, Homo sapiens
  source 1..552: mol_type = other DNA
agcagtgggggccaaggctcagagatctcgacctctccgaccaactggaaagagtctaaggctctcttatgttcactggacaataaaactttcggtttacggtccttttacagggtgatgaacctgcccctgaattaatgagggaagattgccgcagatttgcagtcacttcagactgggtggagtattctcacccttcgaggctgctgtggaagctaccggggctgccgagcgctgcgtgagcctccacacgtagccgcaggcagctcgggcccaggagggcgagctgaggcgaccgcaccgggcgcgcagcggcggcgggtcagccggcggccaatagccagggcgcggcccgccccgtcgcctcccctcggggagcctataaggcctccgcagcgccccgggcgcctgctgctccgtggctgcgttacgcgccgctccggctgccggccgcgcgccttgcccgccggctcccgcccgcaatcggcggctcagggcggacccgggtctctgcgttctcgcgagaagcgcggcgctgcggggccgtgggcg

SEQ ID NO: 6120 - DNA, 449 bp, Homo sapiens
  source 1..449: mol_type = other DNA
tctcctataaaatagcttatgtcattaaatgtatgaggcaaaactgtcaagcttttttcagcagtgggggccaaggctcagagatctcgacctctccgaccaactggaaagagtctaaggctctcttatgttcactggacaataaaactttcggtttacggtccttttacagggtgatgaacctgcccctgaattaatgagggaagattgccgcagatttgcagtcacttcagactgggtggagtattctcacccttcgaggctgctgtggaagctaccggggctgccgagcgctgcgtgagcctccacacgtagccgcaggcagctcgggcccaggagggcgagctgaggcgaccgcaccgggcgcgcagcggcggcgggtcagccggcggccaatagccagggcgcggcccgccccgtcgcctcccctcggggagcctataaggcct

SEQ ID NO: 6121 - DNA, 571 bp, Homo sapiens
  source 1..571: mol_type = other DNA
ggaatattttttgaatgaatcaatgaataaacaaatgtgctactatggtacttactctttgatgatgaaaaataattgaatagacacactgtctaataataattctaagaaaagaccctgtcacaaatgagagttgcttcagctaaacccatcctgaggtagggtaagttaccccagttgggcttcctaggttttgtcatcctttttttttttagatatagggataacatgaacaaaggcctgacttcttatgatcaagagttacagtgtccctcagcccttaagtcaatgactgataggtgttgggaatatatatcccagttctctgaccggatatttttgagtgatatatagtacatcaattttgtgggattaattgggctcatgcttgggcttcagaggaacccaaatgattcctacctaaactttagagaattaaagtgacaaagtatttggtctgctttaggagataataaagcaaactacgttggttgggtattgtttccaaatctgttatgaaatctgtttggggatgaagcaatcaaaaggatatctgagtatgattaatcta

SEQ ID NO: 6122 - DNA, 360 bp, Homo sapiens
  source 1..360: mol_type = other DNA
gggaccatgttggccaggctggtcttgaactcctgacctcaggtggtctgcccacttcaatctcaagtgctgcataatatatttttgtcccatttaatgacatatgtccagcggaacttcctgttcctgcctgaaaatgtcagtctttctaatttcatcaagcaaagcagggatcgattgcttattatggtaactcaataaatattggtgaatgaatgaaaaaaattcaaatataaataattgtagcacaaagctaagtaattattacataaaatagtgtttttttttttaaatgtgtataacatcaaatttttctcctagagctagaggagctactcggtggaacttagttagaatttc

SEQ ID NO: 6123 - DNA, 335 bp, Homo sapiens
  source 1..335: mol_type = other DNA
gtctgaaagaaatatttgtgcctaacagtaataagcaaatggcatttttctcccaatgtcagaaaacatgggcaacctgggaaaagaaaacagaatttctgggccctatttgccaccaagccaaggacctggtcccagctgctaggataaaaaaggctcttgagaaagaggggtttcttcattttctcaggccctgcaacctgcccctctgattggagagtagtgatcttccaggaagacgctcccccgggctggcggctctcccagcgcggggcggggtccgagacggggaagccgcgcgcggggaaggagggtccaggcgtgccggacccgcc

SEQ ID NO: 6124 - DNA, 410 bp, Homo sapiens
  source 1..410: mol_type = other DNA
tgggaagtaacttcattgttgtccatagctaagcttggcaaatcctgtaattgaaatgtgtatccaggttgtttcatctctcatactctgttctgagataccaaagagatacaacataatgttctaattttaacagtgtgctcttgcacaaagtgcaaagtaatgctctgaaaccattttatgcaccatcatgtaattatttgattgttccattttattgtttaacatgtagtggtaaagccttaggtatcagaaacttcatggccccacttgatcaattattggaatataggaggtcacactgcttgcaggaggcatgactgggagaattacaagctttatatcctggtatgcgtacaattattcatagaactagtcagcttcaaagttctaaatgctagcaataatga

SEQ ID NO: 6125 - DNA, 471 bp, Homo sapiens
  source 1..471: mol_type = other DNA
attattttattatatattacaatgtaataataatagaagtaaagtgcgcaatacacgtaatgtgcttaaggttggggaccactggtttatccagggtcatccagcaacatgtattcaggatttatgctaaataagtagattatagctgctcttgccccaaggggggaaattattgatggatatgtcatacaaataacttaaatacacagaataaaaactattttagtttaaaaaggaacaatatttataaaaaaataaagaaataactgcttaaaaattaaaaagtaatatcacataatttaatagccctcgccttgaaaagccacgggcttccgagggtcccgggggaggccactccccagctgatgactggggaggggcctcacaccagggggtgggcgcagtccctcctccagctccttcaccctccagtagtctcgtgggtccccgagcgccagcgcgggaaccggg

SEQ ID NO: 6126 - DNA, 427 bp, Homo sapiens
  source 1..427: mol_type = other DNA
gtatggtgagttgtataattattttattatatattacaatgtaataataatagaagtaaagtgcgcaatacacgtaatgtgcttaaggttggggaccactggtttatccagggtcatccagcaacatgtattcaggatttatgctaaataagtagattatagctgctcttgccccaaggggggaaattattgatggatatgtcatacaaataacttaaatacacagaataaaaactattttagtttaaaaaggaacaatatttataaaaaaataaagaaataactgcttaaaaattaaaaagtaatatcacataatttaatagccctcgccttgaaaagccacgggcttccgagggtcccgggggaggccactccccagctgatgactggggaggggcctcacaccagggggtgggcgcagtccctc

SEQ ID NO: 6127 - DNA, 654 bp, Homo sapiens
  source 1..654: mol_type = other DNA
caacttaaataatggtagcttttttcaacgaaaactcaaacttttggcagtctgcaaactgtgaggttgactttataatttttcatcacaaggtataccttattttcagaaaaagacagtgttgctgataatgcaatatatcctgcatgttcaaccgaaggttacagcacttgttttctttccttagaattcaatgcagttaaatatcatctgtaaattttgattagctttgcaaggctattgaaggtttgtatattccaatgcctctgattaatcaaattcaattaaaaatgaaaataaagatttatttatataatagtagggaatatatcctcttcttatttattttgagttgaagagatggagataaatccaatagaaaaataacaataataatgttcaaacattttcaacatgtaaagaattgtatttagaactatcaaaaatttatacaataggatgttttatcacagaatctggaaaggagacttctagaaattgagaaatacaggatatttctgatataagactgaatgcaaatgtgtatattctaagaaatacaaaaaaaaaaaaagacacttaaaatgagtgctgtgtgctttcctttctaaagttatatgatggtttggactcccttcctctgttatatgtaag

SEQ ID NO: 6128 - DNA, 572 bp, Homo sapiens
  source 1..572: mol_type = other DNA
gtgcactcgcagttccagctactcagaaggctgagctaagtgacagagtgagaccctgtctcaaaatatatatatatatatgaatatatatgtatataaatatatatatgaatatatatgtatataaatatatatatatacacacacacatatatatacacacatatatatatatttgtatcagaattgttaatgagcatttcaggaaagcagataatgggccaggacctgcattagcagcttctcaaactttaacctttcattcagggaggcaaggtagccactgcttagcaaagcatgctttcaaatgcaggaacattttctcagtgatttagcctattaaacatacactattaagcataaattaactctaatgtgttttgcctatatatttaatgtatatttaacataataattatctcaatttctagaaaactttgctcttgggggacccaacctcagagaagcttattttcattgctggaaatgcaaagaaaatgtgctgcagaaacaatttatacacccttgctggcactgaattgcagctgcactggccgtgcatgatggctgct

SEQ ID NO: 6129 - DNA, 343 bp, Homo sapiens
  source 1..343: mol_type = other DNA
tttttacctacaaggggaagtggatcctgcttcccctggagtttagaaaacctcatctgtatggagaagttttctctagaggctgtattcctctcactaaattcttcaaaaaagaaaagtcagtcttctccaaacacatccaaatactgcaggaaacgcgaaagcttcctgaaaggtcccctctaccctcaaggggaccactggcacccaaaccccagtgggggaagaggcccagccagtctttctgccccggccccaccccactgacactaaggggaggagggggcccttccgcaaaggggcagagtccatcccttcttcccaggaggagggaaaaggggta

SEQ ID NO: 6130 - DNA, 512 bp, Homo sapiens
  source 1..512: mol_type = other DNA
aaaacccagcagtcctggccgaggctttagctgaagcgtctgcatattcattaggtctaattattttctagtaaggaaaacacaaaaagccaagcttctttgcagctgaatcaaaggcccggttaagcgagaggaaaatgaaaatgaatatattttttgccctgacgccagcgctgactgcacgggctggaggaaggcagggtcagcgtccgccgctcccttggggctggccggcgggactgccctttccatgccgggatgatttcccggtgccaaatataaattcggaaaaaaaattaattgttctgttccccatttcccaccaactttgagtggaatggaatgatctttaaaaattattgtacaaaaaaaaagatatatcggaggcactaagtctttttacctacaaggggaagtggatcctgcttcccctggagtttagaaaacctcatctgtatggagaagttttctctagaggctgtattcctctcactaaattcttcaaaaaagaa

SEQ ID NO: 6131 - DNA, 652 bp, Homo sapiens
  source 1..652: mol_type = other DNA
gccgtcggcgaacgggttgatgcccaggcccacgtctcgttcggccacgtcgcccgcggagtggtggcgggacgcgccaaaggtggtcacgccgatcgctgggtactgggggccggcgtccaggagcatcgtggctgctcggggcgagccccggcctcccccgccccccccaccctcgccagccgaggagggaaaatcgggagagggagggggagtcgacccacctcgcgaagtcctagcctgcaggcaatggcgcggcgcgcccgggcgctggccgggccaaacgcaaagtagccggacggctgcgggccgcgagtaacgcaggctccagcgcccgccaggcagattctgccggcccggctcgcactttctcgccgctcagtctctgccgagagggccgcgcgtcaaggctgcccgggtttttccctctctgctttttgaaaaaaaaaaaaaaaaaagtgggcaaatcatgcacaatattgtcttttgcggtttatcttcctggggagaaactttcacctcctcagccgggcggtgagcgcgagactgatagcagcaatcattcctgcagataaatggacgacaccgtcccccccttgatgaatgggagcaggggggaggtgtcacgtgctgccgacgctggcgcccattg

SEQ ID NO: 6132 - DNA, 414 bp, Homo sapiens
  source 1..414: mol_type = other DNA
ggcaacaacgtttcaaatttgccattaaaaaattcaaacctccttaagcgctttcatccacctgtgtgtctgagaaattacatttttttgtaaagagagcccgtgtgctcccaagatcttaagcaaataacaaaagcctcttttgctgctctcctgctgcacccggagacgtctgaagtctctaatcgctcagcaaaatttttgctactcctggcagccctggtttgtcaaaaggggatgtcaagcgctttacaatacctgggaatgaggcgggcgggccaatgagctgcgcgcggcgcctcggcgcgccctccgttggcgcggcggctgagggcggggggaatgcgggcgcaccaatgggcgccagcgtcggcagcacgtgacacctcccccctgctcccattcatcaagggg

SEQ ID NO: 6133 - DNA, 637 bp, Homo sapiens
  source 1..637: mol_type = other DNA
gaaaaagtgttgaattttgtccaatagtttttaaaaatttttttagacaatcatgtatttttacttctttaaatttatttttattgatacacaatagatgtacactttttaggtacatgcaataatttaatgcccctcaacagccattaggtacatgcaataatttaatgcattcatataaagatcaaatcagtgcaatactagaaacattcaagttattttctcctagctactctgaaatatacaatagattactgtaaactacagtcactcacctatctaacattaattgatttttggtaaactaatctaatcttgcggattcaatttgcctacattttgttgagaatttttatctatactcttaagaaatattgatctgtagtcttatcagggtgatactctcatagcatgagttcatccttactcttctattttttggaagagtttgtgaagaattgatattatttcttctttaaatatttattgggtttttaaaatacatttttaaaatgcaacttgggtaatttcatccctggaattaatccatggttcgagttactcataggaaagagaaagaagttctctaattcgtccttaaaagttttccaagttcagaaaaaaaaaatgttgaaga

SEQ ID NO: 6134 - DNA, 568 bp, Homo sapiens
  source 1..568: mol_type = other DNA
ttaggtacatgcaataatttaatgcattcatataaagatcaaatcagtgcaatactagaaacattcaagttattttctcctagctactctgaaatatacaatagattactgtaaactacagtcactcacctatctaacattaattgatttttggtaaactaatctaatcttgcggattcaatttgcctacattttgttgagaatttttatctatactcttaagaaatattgatctgtagtcttatcagggtgatactctcatagcatgagttcatccttactcttctattttttggaagagtttgtgaagaattgatattatttcttctttaaatatttattgggtttttaaaatacatttttaaaatgcaacttgggtaatttcatccctggaattaatccatggttcgagttactcataggaaagagaaagaagttctctaattcgtccttaaaagttttccaagttcagaaaaaaaaaatgttgaagatccctcacgacccctcgctaggcggggttcgggaccaggatctgatagttgacacgggacgactgtggcatcatcct

SEQ ID NO: 6135 - DNA, 521 bp, Homo sapiens
  source 1..521: mol_type = other DNA
cacttgtgacatcatgtcaatgctcaaagtttcagattttggagcatttcacatttcagattttttgatgagagatgctcaacctttagcacactatgttcagaaaggttaaagactgatacgtgtacatatatgaaaaacaagagttaataatcaattgcaggtgatttgggtaaatgtgaaaataccctgagatcacatagtctttatcacatcaccggaactcatcattgctcagtagtcaccaatctcagtttacttcttaggacaaaggccctggaggccggccagctgtgaatcccataatcagactgccttctgcacatggaagggggagtattctcacttagaaagtaatagtgtacagatcagatctctagtctttgtttattttcagtacattgtggttcaagaacacatcgatcataaaaacgtggcagctttaatgagctaatgttaggccaagaatgaccctttgattcctgtcttcagcagcaaaccaaagacttttggttgataga

SEQ ID NO: 6136 - DNA, 549 bp, Homo sapiens
  source 1..549: mol_type = other DNA
atgacatatccatacaatggaatatcacttattaataaaaaggaataatcccagcactctgggaggccaaggcagggttcaaggccagcctgggctactcaggagtctgaggcacaagaatcacttagaggttgcagtgagctgagatcacacgccactgtactcctgacagagcgagactctgtctcaaaaataatatcaatagtaataatggtaatacaaacaaaaatactgataaacaaaggaatatatattgtataatctcatttacattaagtttaatacaggcaaaattaatgtataaatgtttattacatgggtttacacatttgtcaaaactcatcaaactttacactaaaatctgtagaacttattgtatgtaattctcaattcaaaacagaaaaaaatacaaaatagattttatttaaatctaatttactctcagactattcaagttctgatccaaattaaataagttgaatttgagagtatttactctatttccacaggtgttgagagagataccctcatgatagttcctgtttgcaa

SEQ ID NO: 6137 - DNA, 397 bp, Homo sapiens
  source 1..397: mol_type = other DNA
caattaataaacattacagcattgatattttcttgctgtcatttagtgtttatttctttacccagagaagtacaggaaaaatataacaaaaatgttatcattgtaaaatctaaatggtgaacatttcaatgttcgccatagtacttacagcatttttagtacatttatattttgtaatttaaattctggtctttcaatttaaatgtttttaatttcacaacttacattctagcttcaaaaatatattttacattattataaacttttcttccatcattcaattcaagcagaatggtagagtagtattttagaaagaattaccttggccaagttatttgctaaagatttcctattgcaaaaagtgtttttccctctccagctggaaaaaaaaaacctg

SEQ ID NO: 6138 - DNA, 646 bp, Homo sapiens
  source 1..646: mol_type = other DNA
cttcctagaaaaatgacaaattgaccatttcaagatttgtgaaacaggttagcattggctaaccacagttacaataatttactaacctttttggagcccctgtgaggcaccaaatcctactttctccatttatattatatgactatagaaaagttatccagaccaggctggccaagaaaaaaaagaaaagaaaagttaatttaacttttctgagctcagtttcctacacctcactgagttcgtacaaggattaaatgaagcacttaaatgcctaattgatgcagatgtccaagaatttaacatttacgaaatattcactatattttttaggttaagaaaaaaagcgtaaattttacgtttcattcaagcggggagtttgatgccgcactcagccccaaagtcccccttaactcccagcggcgacagggggcgcgcggttgacaagggcaggcgccccggggaagtaggagcaggggcgccggtgagccgcagccgcagcggcagcctagccccgagggagaggaggagccgagggagacgcgggacccggagccccgcgggccaccgcccctgccggccgcgcagctgggaggatgcggacggcagcgagagcgtgcgcggccacgtgacggccgctataagagcg

SEQ ID NO: 6139 - DNA, 466 bp, Homo sapiens
  source 1..466: mol_type = other DNA
tctggcagttacatggtgccgcctgtgcagctgggcgccaccaccagcccagccctgccaggcgtcggctgcagctactctggaaagagagccatggagggcctcagagcgcccctctgcagttccttgaggaaaacaagggcctccccctcttggctggagcagccaagtgcccacggggaaaatggtcccgtccaccatatagctgtaataaacatgtgatgggtttcctgcaccaagaaaggaaaattttccttatacgctgaggcttaacatgaaaatttgaccctattatgtgccacattagtcgtttccctccgtttgaggcacaggcaccgcagtcgcactcctggggcctcgtggctttcccgcgcgcccgccttgggggcggggaagaacccggatggaaccacccttgcagcccggaccccccgccgtctttgaatggcagcggggcggagttgcc

SEQ ID NO: 6140 - DNA, 449 bp, Homo sapiens
  source 1..449: mol_type = other DNA
caagtttaacttcaatccaattgcatctaatttacaaattctgaactggaaactgactgaagaaaatgttgcactttcatttatgaacacatatattttctaggtgaactggacaaagttatactacttgttttatctaaatctgatttttttagaaaagggtggactgaaagccaggggatttcccttgtcaaatgcctacaagatgaagtccatggattctttctttcaacaaatatctttctattctagaatttccattattttaaagcaactgacccagcggtccccaccggccactgagcatagagcagtggcactgcagcgccagagcgcgggctgaccaggctggcgtgaccgctttcccgacgcctgccacgccccgcggcggcctctttaagtagcggagccgcgggcggggccggctggcgttcacgtgacccggcgtc

SEQ ID NO: 6141 - DNA, 779 bp, Homo sapiens
  source 1..779: mol_type = other DNA
tggtttgtttatttgatgattaaaacaaagttattagcccctgttaggctctgctagttatttgcatatagcaatacagaatgatctggtaaagtttttatgcagatttggtccaagctcataaaacagataaattcttccaaattaaattcttatttttgtttacttaaatttggcatgctagatatcatgtttcatatcataaagctgcaattaatcatttgttagacttttagaaatagtcatgcaccacataataatgtttgagtaaatgacaaactgcatatgtgatggtggtcccataagattataataacatatttttactgtacattttctatgtttgcatatgtatagatacagaaatatcattgtgttacaattgtctatagcattcagcatagttatagactgtacaggtttgtagcctaggagcaataggtataccatatagcctacctagatgtatagtaggctatatcatataagtctgtgtaagtacactctgtgatagtcacacaatgacaaatgactgtagtaaaaagctacatgttttgattcattttacataattcttatcctgatttactaaaagtgcactgtttgcaggacactgtgctgtgacatattgtcagttctctgccctcctggaatttacacaatgcaaccaagaactgttttattggaaaatatttgctttaatgaaacaatttactcttgtgcaacactaaattgtgtcaatcaagcaaataaggaagaaagtcttatttataaaattg

SEQ ID NO: 6142 - DNA, 827 bp, Homo sapiens
  source 1..827: mol_type = other DNA
atacttttagacatatacttcctgactaaaaacagggttttaagaaaaagtcttccaccttaaaattcatatccacttcaaagagaaaaatttcagtctaatgataaactggggctttctatttactaagactaatctttgcctctgaagacaggtttagttatggtttgtttatttgatgattaaaacaaagttattagcccctgttaggctctgctagttatttgcatatagcaatacagaatgatctggtaaagtttttatgcagatttggtccaagctcataaaacagataaattcttccaaattaaattcttatttttgtttacttaaatttggcatgctagatatcatgtttcatatcataaagctgcaattaatcatttgttagacttttagaaatagtcatgcaccacataataatgtttgagtaaatgacaaactgcatatgtgatggtggtcccataagattataataacatatttttactgtacattttctatgtttgcatatgtatagatacagaaatatcattgtgttacaattgtctatagcattcagcatagttatagactgtacaggtttgtagcctaggagcaataggtataccatatagcctacctagatgtatagtaggctatatcatataagtctgtgtaagtacactctgtgatagtcacacaatgacaaatgactgtagtaaaaagctacatgttttgattcattttacataattcttatcctgatttactaaaagtgcactgtttgcaggacactgtgctgtgacatattgtcagttctctgccctcctggaatttacacaatg

SEQ ID NO: 6143 - DNA, 315 bp, Homo sapiens
  source 1..315: mol_type = other DNA
attttttgatgcacttggtgccaagaaacctctttggaacctggagtgcagtgctgggaaggctggtcttgaactcctgacctttgttttcttaatagtaggaaaaatatgcctttatttctgttatgatttttcagagagatctaaccaagatattttttggtgaatagtgtgcacacaaacaaacctatcaagctctaaatataagcaggtcagggttaagccttcggtgctttaatccagaggaaaattacttattttaaaaagcagtgaaatgaagaccagctcagctcttcagttgttgatcattgtcta

SEQ ID NO: 6144 - DNA, 143 bp, Homo sapiens
  source 1..143: mol_type = other DNA
gacacgctgaacactgaaatccatcctagctgtaggcagagtaaagaagtttgctctgtacaaatccatgggagacgtctcagacaccttgtatttaactctcagattggaagctgtccagacagctgcatggagcagctgga

SEQ ID NO: 6145 - DNA, 433 bp, Homo sapiens
  source 1..433: mol_type = other DNA
ctctagattctcaatgaagaactagtaagacttccagttccacctcttaatccttcagctgttatgtaataccagtaccaggcagggccatcataatgttgaatgaatcatgcccctggcagttggcatttattcctatatggaagacattaggaaaactgtttttgctaattccatcacatcgtgtagggaaaagatagaacttaattacttaattgcgtaacaaaacagtagctttttgccttaaacaattcttttaagtctgagctcaatactagaccatcaaattattttgatattgaggaaaacagaagctcttttggataaccctgaattccaggctttcgacatgattttaaccaggatgtaactcaattatattagtgatttataaagagtctggagaaaatatttcttgaatgtataaatgtcc

SEQ ID NO: 6146 - DNA, 342 bp, Homo sapiens
  source 1..342: mol_type = other DNA
cggccgggaggagtgggtggggggcacccgtctcctcttacctccgggagctgctgcggccgcgctggagccgaagcccttagactgccaggcacagagtcgggtcgggatttgtcagccaagcctcggctcctctcgggactcacccgagcgacccaggcccgacggcaagttcgggcgggacggcggccgccgcgcgctcaggctcagcttcgctgcccgcccaggtagtgcccgctggagctcgcgcgctcatccggcaccactccagggctccaggctcctcgggcttccggagtcgagacttctttgcttcaagaaagttgactttaaataaaaggc

SEQ ID NO: 6147 - DNA, 351 bp, Homo sapiens
  source 1..351: mol_type = other DNA
ccatccctcgcccagatctagttggtgggaagttccatcccggctccaggctccccggagggcggcagggacattccaatcctcccacaaccctcacggatgttgcgggggaggggggtgcaattgctctgtgctctagcagagccaggcagccaagcccttgttggtgtctccccgcgccggggcgcacccgggccggccttcgggcagaatcgcgggtcagtgcggcgctccgggtgctgcaggcctcggcgcctggctgcaggggagggcgcggtgtccaggaccggcccttcctaggcctgagcccggccgggaggagtgggtggggggcacccgtctcctcttacc

SEQ ID NO: 6148 - DNA, 474 bp, Homo sapiens
  source 1..474: mol_type = other DNA
taatcccagcactttgggaggccaagttggctggatgacttgaggtcaggagttcaagaccagcctgaggagaatcgcttgaattatcctaatttataatcactcataaaacttgtcagaagctttcagctttcaggctaccctcactctgtcacaggctttgtcacataatctctggagctttgtgtcttatctgtaaaaacaaagccatgtttgttgaggatattaactgagatacatttaagataacatagaagctctggaaactattagctttataaaagtgtcagttgtcagtttccttatctctaatggaaattataatggaacctacctcatagggttcttctgaactccaaatgtatttaataaatgtaagaacacttcctgattagtgcttaacaaatgtgaactattgatattattaatgtcaaagctccggacgctgcgacgccggagcctctaggcgccggg

SEQ ID NO: 6149 - DNA, 474 bp, Homo sapiens; identical to SEQ ID NO: 6148
  source 1..474: mol_type = other DNA

SEQ ID NO: 6150 - DNA, 432 bp, Homo sapiens
  source 1..432: mol_type = other DNA
tctcctgacattaagtttcgactggtttaccccggggatggcgcgtgtcaggcccagaggccagcgtggatccgagccaggcctcaggggactggcgttcagacctcgggccgctcaaggtgtggccacggtccccacccactctgatctcagactgggcacggtacggaaggcgggcggatgaggcctcgccctcgcctctgacgcgtcagcgccagggccaggcccgcccgggggcagcccggcagccgaatcttgggctactctgtcccaacagccggagcagatcagaccgaccggccctgcccgctcggtcccgcgccctccagaccctacggtagcggcaggcgcccacagccaacccttccagggaagggcatttctccgagccgggctagagcaagttaacaggcaaccatgttgcccagtggg

SEQ ID NO: 6151 - DNA, 583 bp, Homo sapiens
  source 1..583: mol_type = other DNA
aaaatgcttatagagatattataaatgtgtttatactaattagtcttcttagtaatattcccaatgctgacttttatttatgactttcttaaaggcagaattgtgatttaagtattgaatgtctttgcaaccaatgaaaagttaagactacatagaagtacctttgatagcttttatttaattttttaaaatttgatcttaaatttcttgtatttgaattttatttgagtaggtaatatttgcaaggttcaaaattcaaaataaggaaagagtcttttccccattgctatccaatggtattctactaatgccaccatttttaaaagatgatgttgaaggagttgaagcctgtaaaggccttattaagggaagcagaagtagtgcctgattctatgtctcctgacatttcttaagtttcgactggtttaccccggggatggcgcgtgtcaggcccagaggccagcgtggatccgagccaggcctcaggggactggcgttcagacctcgggccgctcaaggtgtggccacggtccccacccactctgatctcagactgggcacggtacggaaggcgggcggatga

SEQ ID NO: 6152 - DNA, 315 bp, Homo sapiens
  source 1..315: mol_type = other DNA
atgtactcagaatttttttgccctaaaatagaagacaaatggtcacttttttttttttctgtagctaaaagatagttgtttagtatattactagtttgaaagtaaactaacttaatgttaacttattaataggggaaaattgctcttaaactttcctagctataagcttaagtcttaattctggaaattagaaagcatatgaactcgctttatacctgaggaggtcggtcacaatgctaccaaactgtagatggtagctaattttccaacccttatctggcaacataattgcagcacaataatgatttgcatgat

SEQ ID NO: 6153 - DNA, 632 bp, Homo sapiens
  source 1..632: mol_type = other DNA
tacgaggttcctgagcgccacggacgcctgctctgatttcaggttgccggcgcgcgcccgcgggtctgccgaggctcaagattccgcatcccgggcagcgcatcgcggcccggccgcggggctccaaggcgtccgtgccgccgctgttcctggggtgccgagagcgacgcggggtccaccctctccgccggcccgaggtccgaagctcggcccgccaccgctcccggccggcgcctcccgcacgtggcggccgtgattgtcccggggcggtatccctccgcgcccccgcctcccccgcccttcccgggaccctccgtgcccgggcgccgcggaaggatcgcacgcacgcgcgcgcgcacgcccagccgtgtccgcggaaaacggagggcgctgcggtaaggagcagccgccacaggcacagccgcttcgcagcctcccgccgctggtttgtcagccccgcggctgcgggcggccgggcggccgagcgcgctctgaggttcgtccctcatcgctgaacccgcgtcctcccgccgcagctcctcggggaggggggcggtcggtgcctgcgcagagccgcctcctccccgcccccgccccgcctccccccgcgccgccgccgcccgctaccgccg

SEQ ID NO: 6154 - DNA, 461 bp, Homo sapiens
  source 1..461: mol_type = other DNA
gatacgaatagacctgggtcccgaaattattttagttaccaagaaacagtgtaacacaggtcgctatttgttttgttcggaatttacgaggttcctgagcgccacggacgcctgctctgatttcaggttgccggcgcgcgcccgcgggtctgccgaggctcaagattccgcatcccgggcagcgcatcgcggcccggccgcggggctccaaggcgtccgtgccgccgctgttcctggggtgccgagagcgacgcggggtccaccctctccgccggcccgaggtccgaagctcggcccgccaccgctcccggccggcgcctcccgcacgtggcggccgtgattgtcccggggcggtatccctccgcgcccccgcctcccccgcccttcccgggaccctccgtgcccgggcgccgcggaaggatcgcacgcacgcgcgcgcgcacgcccagccgtgtccgcgg

SEQ ID NO: 6155 - DNA, 566 bp, Homo sapiens
  source 1..566: mol_type = other DNA
ttttttttaactgcttaaaagaatggccttaccattttcaggaactaactacaagatgataaatttgccagtactttctttcactcgttacggttgatataatacgctggctgctactaacagttttagaataaacaaaatataatgcagtaggttctacatttataaagcccatgagctgatttcgtgccgaaactcaagagtttaaatgaatcctggaatcacagcaaattcaggaaatttaggaatatgttggtaacccttaagctttttaaaaaagacagaatttctggcaggaagataattttctgacacaatggtcaacatttattttcagaagttttaaagtgaagattttgctaaacattagacacttccattgtaatgaatttaaaatggtctttagctcgtcaatgcttaaagaacctacaacacaaaatttaaattttaaaaattttaaataaagaaaccgctcccttttttaacctaggttccacggggcggagcggtgacgtcacgacgccggtgcgtcacggaacggcggcggctgcggcgctggcggtggc

SEQ ID NO: 6156 - DNA, 598 bp, Homo sapiens
  source 1..598: mol_type = other DNA
gctttttaaaaagacagaatttctggcaggaagataattttctgacacaatggtcaacatttattttcagaagttttaaagtgaagattttgctaaacattagacacttccattgtaatgaatttaaaatggtctttagctcgtcaatgcttaaagaacctacaacacaaaatttaaattttaaaaattttaaataaagaaaccgctcccttttttaacctaggttccacggggcggagcggtgacgtcacgacgccggtgcgtcacggaacggcggcggctgcggcgctggcggtggctgcggcagcggcggcattttagtcggcagcggcggcggcagcggggctgctgctcctcccagcatccctggcgcggccatttcagccccatcttggcccagcggagggagctgcagccgccgcttcagcagtttgaagccggagaagccaccaccgctacctcacacagccggggcgcctccggtcccgtgccagcggtctgccgccgccgcccctctctgagagaagccgcgaggggaggccgagaccgccgtcgccgcccgcccgcaggggtggttccccctgtaaggggaggaccg

SEQ ID NO: 6157 - DNA, 763 bp, Homo sapiens
  source 1..763: mol_type = other DNA
gctgtgtcacagctaggcccagccgcagttgggcagccacagccgccgccgccacccgtaggtggggctgtggctcaaagctcggctccgctgccgccgttcccgggagccgcgaccgggccgcagccaatgatggcagccgcgcagcccagccagccccagggagcggggcccgggggacagactctgccgccgacgaatgtaaccctggcgcagccggctatgtccctgcctccgcagccgggccctgcagtgggcgcccccgcggcgcagcagccccagcctgcccgtgccctccggccagagtgagtacctgcagcagcacgtggccggcctgcagccgccaagccccgcgcagccctcgtccaccggcgccgcagcgagccccgccacggcggccacccttcccgtgggcaccggccagaatgcttcctcggtgggcgcgcagctcatgggcgcgtcttcccagcccagcgaagccatggccccccggacgggaccagcgcaaggcgggcaggtcgcgccttgtcagccgactggagtgcccccggctactgtgggaggcgtggtgcagccgtgcctcggtcctgccggggctgggcagccccagtccgtgcctccgccgcagatgggtggcagtggtccgctgtcagccgtacctggtggccctcacgccgtggtgcgccgtgcccgctccatgtacccgcgcctctggcccagtcgcaacagctgcaggagcagcagcataatccagcatgttggg

SEQ ID NO: 6158 - DNA, 387 bp, Homo sapiens
  source 1..387: mol_type = other DNA
ctaatatgctcataaccatttcaaaatcaaatgttgctcattaaggcaggaaggccagaatctggaattacttaagtacttcacaagggcccgtgtaacaccagtattgcagacccatgtgtcacaaattcaactagtcccccttcttctatttctgtagaagatgaatcacagtctggcctttccgcaagccacagaaggcgaaagagagtccctcgcttcttcagaactcaaagagcggcgagagttcaccagggcacccggccccctcatgcgtggagacagcgagggcgacgctgacagagcttgggagggtgcgcctgctttcgccctccttctccagcgggaggggcgcgcacttccgcggggcggagtccgtcggcagcc

SEQ ID NO: 6159 - DNA, 521 bp, Homo sapiens
  source 1..521: mol_type = other DNA
tgacgccggtagcccccacagtctggcggttcgcagactcgggcaccagcccacggtcggccggatccgggagaaaacgcgacgcggccccagggacccggactcagctccggctgcggaacgcagaggggcgcccgctctttcctttcctctggagccgctgcgaggctcggctcgtggtgcccgcgccgccggagcgccgaggttctcaggccagacgctagctacggccgctgggcctgggcgccgcaagcgcgaggtctgagcacaagccgggcgccggccgccgactgactgaccgagcggggcagaagagaactggccgccgggtcgttctcgcgccgccgtcgccgccgctttggccgccgccgtgagcgcggagtggctgccgacggactccgccccgcggaagtgcgcgcccctcccgctggagaaggagggcgaaagcaggcgcaccctcccaagctctgtcagcgtcgccctcgctgtctccacgcatgagggggccgggtgccctggtg

SEQ ID NO: 6160 - DNA, 457 bp, Homo sapiens
  source 1..457: mol_type = other DNA
agaagaacaacgtgctccttttctgacactttgggcccggcgttggcgctcctccgccgacgcggcgcctactcatccccatctccgcaggcagccggggtggctatggcgtgacgccgcggcctgaccgcgctaaggggccgcgccggcacagttctacccagcgaagatgcggccatttaggccgcgaagccggggcctcgcgtagccaatggcgccgagcagaggcgcggcggggtggccggggcccagtgcacgccgcccagattggccgaggcctcgctccggaccatcgcacagcagaagcctcatcttattcggccgccctcagacagactgcagccagcccaaagcccaggagcgagctgctccccactgcgcaggcgcgatcagccaaggtcgggggaggggagcagtaatgcgcctgcgcggcccggcgcccgcgcacactcctgga

SEQ ID NO: 6161 - DNA, 486 bp, Homo sapiens
  source 1..486: mol_type = other DNA
gaaataaacagctgtgttgctcacacaaagcctgtttcaattttttttctttttaataataattcttttttagaaatatgtgcttaaataattgtaagccaggcatagttgcctgtgcatccagcctgggtgacagtgagaccgtgtttaaaaatatatatatacagatgaaatgatatgatgtctgagatatagacaaatcaagattgtcaaaatgtatagtaactgttaaagcttgctaaggtagttattctatttttggatatgtttggaattgtccaaaggtttcctaaaacttatgtttaatattctttcaggagaaagcaatattgtaagagagggtcaggtgcagaactcacatctgagtcttgcacactaccaagatggtgtccaggagtgtgcgcgggcgccgggccgcgcaggcgcattactgctcccctcccccgaccttggctgatcgcgcctgcgcagtggggagcagctcgc

SEQ ID NO: 6162 - DNA, 588 bp, Homo sapiens
  source 1..588: mol_type = other DNA
gttgcagggagtgccactgcactccagcctgggtgacagagcgagactccgtctcaaaataaatataatataatataatataatataatataatataatataatataatataatatataaaattggccatgccacttgggagaccgaggtgggaggatcactggagcccaagagttcagggctgaagtgaaccatgatgccgccactgcactccagcctgggtgacagagtgacatcctgtctctcaaaaataaaaaatgtatatattttacaaaaatgtaagtaaatacattttaaaaatgtcgccaatcaagattaattaatattaatctaacaatatttaagataactaacatttaaggcaattttaatacgcttattaatatttaaagctattttaaaaatatccgcaaacgagggcccaagggctggcgcctgattttgtaaataatgtgatcgtttctccgcaggctgccaggggtttcagagacgctgcggtggcccccaccggccctcggcacccacatgctaaccagctcctgccgctttaaatccgggaggctcggtggcgcagggcaagcagttgcc

SEQ ID NO: 6163 - DNA, 480 bp, Homo sapiens
  source 1..480: mol_type = other DNA
cgggcaaccgtgccctctagcgcttctgctgggcgcgcagggtggccctacgcctcgcaacaaagctccctcacgagccaggggcgctgcttccgggaaaggaataaagggagagaacgctcttctcctgcgtgctggtgactcagccctgagaagagaaaactagtgcaggggcgcccgcgccccgcccctgcccgcccgcgtccggtccggacgcgtcagccaggcaccccggggtgtggccagaggacttcggcgacgcttccccgagagccgcggggctgcagcgagccaggcatgctcactggcgcaggcccggcccgcagcccgagcaggaagcgccggcgctaggcggccccctgcgctgccagctggagccgggcggagccagcgccccggcgcagggtggctctgccagtccccgcgcgcctgggcggccgcacacgtgtccaggcgtcacgtccgcgcgcgcccccgggg

SEQ ID NO: 6164 - DNA, 420 bp, Homo sapiens
  source 1..420: mol_type = other DNA
ggacaaattgtattcattcattttaaacatccactaatatttttaaaagataagagctaatgtttaaacagtgcttatgaggttgttttaaaagcttgaaatatattaaactcatttactccacttttacagttggagggaaccatttttcactcagtcctaactacctaaggtaaccctttccccaattccggaatcgttggctcaagcgggcaaccgtgccctctagcgcttctgctgggcgcgcagggtggccctacgcctcgcaacaaagctccctcacgagccaggggcgctgcttccgggaaaggaataaagggagagaacgctcttctcctgcgtgctggtgactcagccctgagaagagaaaactagtgcaggggcgcccgcgccccgcccctgcccgcccgcgtccggtcc

SEQ ID NO: 6165 - DNA, 360 bp, Homo sapiens
  source 1..360: mol_type = other DNA
agatcctggtattccagctaagcctgttaaaggaaagcatttagaaatctagatatctgctcctgcattttcatatttctgtatgccaagaaaaatttgaatcaaattctctattgatacattaggtataaaccaatggttgatccactgtttaatatttttatcctgctgtaattaaaaatttttgacatcaactatcaatacagacatcgataagtgaacttctcaagttgctgatgtttctgaaagtttcaactcacacctttgttaccaagtgacacagaggagatagtttgaaagacttgttttacagattcttagtccaaagatttccaacagctgggagctgtccgttcagct

SEQ ID NO: 6166 - DNA, 487 bp, Homo sapiens
  source 1..487: mol_type = other DNA
ttcattactttatatgctaattatgagaattacatatgataatttaggtagaatacttcacaagttgccagacataagttcttactaaacattaactttgtaggtcagagctcaggaacacacacacacacagtcctgtgtctgtagaaggaggaatcttggaaatgcaaagttaaaaagctgttactgaattctgaactttagtttccaggtcttgaccgtttaaagatcctggtattccagctaagcctgttaaaggaaagcatttagaaatctagatatctgctcctgcattttcatatttctgtatgccaagaaaaatttgaatcaaattctctattgatacattaggtataaaccaatggttgatccactgtttaatatttttatcctgctgtaattaaaaatttttgacatcaactatcaatacagacatcgataagtgaacttctcaagttgctgatgtttctgaaagtttcaactcaca

SEQ ID NO: 6167 - DNA, 619 bp, Homo sapiens
  source 1..619: mol_type = other DNA
tcagcctcaaactgggtttggaggtgctcacaggtcaggatcaggagtgcttaaatgtcaacgaacatcaaagttgatgttcagattcaaccagcatttaggaacccgaaacttagaatcagtcgtgggttcaaggaccagagattctgactatcaagatcctggcacggctccataaatggcagccatcattcttggccaagtgcgggcgcattctcccgggcacgcctcccgcggggtccctcaggacaggccgagcccgcctccgcggctccggtctcgcagagctcgcgccaggtggcccagcatcttggtgcccgcgccccgaagcgaggagcgagggcgggggaccaaggtctgccctggaggatcaccccccccgccccttccacgctcccggcgcaggtgaggttttcggcccaggccacggggaccgcgacctctggggaggtcgaggggggcttggagcagggctccagagggcgctccctccctcgcccaggttcaccccagggccagcctcggcgccggggcccgcgggctgcgcgctctgcggctgcgaaaacccggagaggcggattggagcgcgctcaccgcgctctcagccaactcctccgcg

SEQ ID NO: 6168 - DNA, 541 bp, Homo sapiens
  source 1..541: mol_type = other DNA
cagcaaccttgggtaagataagaagttaaataagtacatgtaaagtatttggcatagtgccagatacaaaccaactgcttaattattttcatcgagtttggtaaagaatgacattattcaagctttgtgtacaccttattcatctgtttgcatacattgtttcattacaaatgcacacaaaggatcattaattaattggggaaattaaaatttagaaagatgtcagaagttttattctcttattaaaaggcacttacagagtagctgatctggccttcaatgttggtcactataacttatatttgcttcttttaaaaaggttgtattataatataaaatgtttccttgctaaaatacaaaaataatcttcaggtctttaaaacaaaagaacactgtagaccaggtcaaagggagccctatcagtttaactttatcagtggtgatcatgggcttttaactgcttcaaaacccacaatcagatgttttgatactaatataaataaatctttctccaaggattttgtaaccaatgaacatacat

SEQ ID NO: 6169 - DNA, 726 bp, Homo sapiens
  source 1..726: mol_type = other DNA
gcccgctagccgcggaccaacaggtaaagtgttggggcggcgggctggaggagcccgagacgcctgcgggctggctgcccccgtcggcgctcacagcccccttccccagcccctggagggactgtaaagggttaagtcggccccacgccaccgtgagcacggccccctccagccgccgcgaccgccagcagcgcgcctcggcgcctgcccggagccgccgaggggaccgtagctgcggatgcgccactggaacctggcgggcgtctaggaggcaccggccgcttcccaccggccgcatctgcctctgcctgcactggcccggtccgtgtccaggtggctggcggcgggggaagggtccctgccggggaagagaggcgggggcggtccgctccacagcttcttcccgggaggggagggccaccctcgccttgggcgagcaaggccaagaaaagttttttttcacccccacccccatcctgcgcccagctggggtgggtttgggtcagctgctcctccccctggagacaaggtaggggggagcagaggaggcaggcgccgcggaggaccctggccgacctctagtccctccgccgccgccaccggagcggtgcgtcccggggctcgagcgcagccgagtacccgccgaaggcagtgcgtgtctgctgccgggcagcggcagcatccaacctgctttattcctcctgcctgcagcgccacagcgagcgc

SEQ ID NO: 6170 - DNA, 724 bp, Homo sapiens
  source 1..724: mol_type = other DNA
caatggctttgaattcagaactcttgaaaatatgtttgttaggagcatgcatctattaattactaaatactattccaattcatcaggctgtttgagtcaaacagacaaatacttattacaagtctaatctcataaattgaatatataatatattcttcaatgaaaaattataaactataaaatagtatgaataacatctaagtggaaatacataagcatagaaaaaatttaaaacttatgtaccaaaaatattaacagtaattatctctctgcataatgatgttccttttttatttctatttccagatttttctataatgaacataaaataagataaataaaatgtatacattagctgactctgtaaaacacatctttttgtttacttctttttttaataataggtgtctcagcaggaataaaaactgcaactattttttaaattttaactttgaaatgctgtgttactatatatactgaaaaaatatttgcttaaacaccttatatctttaattattaatccccatcaaggcatgaagagtgatattctttgaaatcattatgacacaaaacataccttggatactttaaaaaaaaaaaaaggctaggtactaaatgaagatcttttctctaaaaaatatgacaaataaattgcttaagaaagcatacatgaaattgtatacattaaaaaaacttctttaggagactttcataaagttaaact

SEQ ID NO: 6171 - DNA, 276 bp, Homo sapiens
  source 1..276: mol_type = other DNA
tcataagccagttataattattataactaaatgtatagctatgtttttaaggcaagcttaagtaaatacaaagaagaggaatcttctgaaaaccacgaggagtttatctgaagtcctacttgtgatctatttatcagtaatgttcaaatatgggaaaatttatgtcgacattcaaaatgaagctgctgacaattttctgagggtgcttcagaccacatgttgaatttgacaatggcaaaggttagaagtttttgcaattttcatccgtagttgaag

SEQ ID NO: 6172 - DNA, 297 bp, Homo sapiens
  source 1..297: mol_type = other DNA
gctctgtgtctcacaggtctttgccaactcctacgtagcaatcataagccagttataattattataactaaatgtatagctatgtttttaaggcaagcttaagtaaatacaaagaagaggaatcttctgaaaaccacgaggagtttatctgaagtcctacttgtgatctatttatcagtaatgttcaaatatgggaaaatttatgtcgacattcaaaatgaagctgctgacaattttctgagggtgcttcagaccacatgttgaatttgacaatggcaaaggttagaagtttttgca

SEQ ID NO: 6173 - DNA, 502 bp, Homo sapiens
  source 1..502: mol_type = other DNA
tatcagaatctttgagattctcatctgaaagcaagaaaattatttacaaaaatcctacctactcaggaggctgaggcaggaaccaaaaaaaaaaaaaaaaaaaagtgatatgattatataaatttgtcattgttggatgcttttttaaagcaataaaataaattgttttatgttaaaggtcagcattcaaaggagtcagtgaacccagcccctgaataatttaacatattttgaatacttatcattgtgtatgtgtaaaaatatgtctattgtgtatgtgtaaaaatatgtctacagatttcattagtttcataagactacaagtttccaaagttatcaattacaacaatactctttaaataatatgtagaataatattttcaaagaattcatctgtcataaagcatattcttatttcttttaatccaaaatttaattggcaggaaggctgcaaatacatgttttctagatatcacctactcttagttatgagtcatttaca

SEQ ID NO: 6174 - DNA, 482 bp, Homo sapiens
  source 1..482: mol_type = other DNA
cctggcaagtagatttctgccatggacaacaacttacatctttcaaacttgaagagaattaaagcaaaaaaaatgcacagatattggcccaatgttgattgatgaaattctaagtgaaagagtataatatctctatctggatttgcaattcattcccatggcaatgggactaaaagccactaaaagtggctaacattttttagtgcctcctatatgtccattcttaataacacagtgtgttagatactattttcaaacccattgttgaatcatttatctataatctaatcccaattaattggtggaactgggattctaactccaattactggaaaatccagtttacaaggatacagaagattattctgtctgattttaggtaataaacttcaagaaagttatgaagaaatttaaagataattgcaaataagcttctttattcaagtcacagattaacagtatgaaagtttgaactaaaatag

SEQ ID NO: 6175 - DNA, 530 bp, Homo sapiens
  source 1..530: mol_type = other DNA
tatcatggcacatgtatacatatgtaactaacctgcacattgtgcacatgtaccctaaaacttaacgtataataataataaaattaaaaaaatttcaaagttaaacaactgtaaataattgtgatacaaggatgccttaatttaatgttatattttcccaaaaactcaaagttaggtaaagaaacaaaaaaaaattgtttatatttaaattctattcaagaaaagcatggatacaatcacttctctaatgtaattttggaatctgctaatttataatagaaggaagctgtttcacctacaaggagttaatcaaacacaggtttaaaataatgacattattaacattttgagttaacataattacttgttagaagaaaatcttcaggaagcagacttcgaaggcttgatctcaacttggatttatcatttgcatagaaaataaccataactcgaagttatacagtaaaaagccgcaagattttaaattgctttttaaaagatgacttctcagggacagatagaaattcagt

SEQ ID NO: 6176 - DNA, 580 bp, Homo sapiens
  source 1..580: mol_type = other DNA
cacaggcatgagcctagcacattgcagcctggcttcacttacaagaaatttttcattgataaatatattctgcttctaaatctgaagtataatcagaacttatttatgcaattttttttttacactaatacttagttcttggtaggtttccaaaaatttacttaaattcagggaaacattttaagtcctttaaacatataaaacgtagatcttcaaagatatgacctctttatatgatatcaacagcaaaattaatatattttatatatcctatggtaagacaaaaaaaagtatttcatcttttgtaaataaatttatatataagaaaaaacattcactcttgcctgttttttatctatagatttgtttccttttgtgtcaatcaaggaacccataggttcacaagtgatgacatcacatgtctaaaggtagtaactgtcgaactttgtctcctagctctttctaaagaaaaaagagagagagaaaggaagttcccctatgaaacatttccctttttataacatgatagagcaatgagtgtttcatttcttctatttaagtagaaaatagaacacataca

SEQ ID NO: 6177 - DNA, 578 bp, Homo sapiens
  source 1..578: mol_type = other DNA
ttttatagctggctttctatataaattatatcttcaaaaatcaataattatagcttatgaggtttttttttggacaaaaaatgaggatgagaatttccatcttatatatctgtttattcattaatagaaaacatccatgcaaaaaaattacacatagtaaatgtgaatttgtactcatgcttaggagttgaagattttcttctaatgatgaatacagctaataaatttaacttgtgatctttagttcaaaagtaaatgttaattctcaagtttttcaaatgtcatcaaaaatcacctaaattaaattgaaatttgtttagatttagaatttttaaatgctgagttatgaaatgagatgcctctgcattaatctttattaagaattctgttctgggaaaccttctattttcaaaagtaaattatctctctcaaaaatattagtttataaaaagaaacatcaatagttctgtctgttatatgtcctgattttgttttaataagcaatctgttcttaaaatgctaaaatttgacacttgtgttcaaacttaattatttatgttagtcattgagaacccaga

SEQ ID NO: 6178 - DNA, 411 bp, Homo sapiens
  source 1..411: mol_type = other DNA
ccacccagccaggacctgccaacttgctaggagaaagctccttgtgctgctgagccccggccgcgtccccagacacagaagttccggaccagctccgcacgaccccagcagctgagcccgggaccgagcccgggacctagcccgggcagctcgagcccgggggccaatccttccccggaaagggctggaaccccacgccggctggggcttggcacatctgtgacagatttgtccaaaaagattagtagtagttaatattcaagtgataactttaaggagtattaagtacactttaaatcacttagccttttgtttctgcaacagcaagcatcataataaaagaacgcttctgggttaatgtgtaagctgtggaagagcattactcctggctgtaagccaaaaagaataagg

SEQ ID NO: 6179 - DNA, 425 bp, Homo sapiens
  source 1..425: mol_type = other DNA
atacatttatatagatctaatgtgcaagaggactatagttaataaaattgtatggtattttgattttagctgctcgtgtcacaatgatggatatgttgtttcactatagtaaccattttactatctgtatatagcccataacatgttgtataccttaaatatacgcaatataatttacttatttttaaaagaggggtttaaataaaacattgccacccagccaggacctgccaacttgctaggagaaagctccttgtgctgctgagccccggccgcgtccccagacacagaagttccggaccagctccgcacgaccccagcagctgagcccgggaccgagcccgggacctagcccgggcagctcgagcccgggggccaatccttccccggaaagggctggaaccccacgccggctggggcttggc

SEQ ID NO: 6180 - DNA, 491 bp, Homo sapiens
  source 1..491: mol_type = other DNA
tacacatgttcaatttttgaaaattaactgagctgtacacttatgatatatacgcttttctgtgtttatttcatacttctattaaaaaatttaaattatgttatttggttgtgattaaaaaaacttatttaggttacttagcttgtttcttagatgaatggatggatgagatagatagatagatagatagatagatagatagatagatagatagatagatacagcctaagaataatcatcaaggatcactcttcactatctattgagagaacaaccatgatacaatgagtttcaagtttctgcatctccatttcttaactgtaaaaagagggaaaatatgtactctgcttgccatcctaagatgaatatgtaaacatattttaagccaagatgtgttaaaagacccttaactcaggtggagtgaattcgcctatttgatgaatttaaaagaaggaagagggcagtcatagctagctcctctcttccccttc

SEQ ID NO: 6181 - DNA, 486 bp, Homo sapiens
  source 1..486: mol_type = other DNA
agaaatagtagtatttaaatccggttctgtgataatgatttaaaagaattcctctgagacatctatatacgatgtaatattgtttggcagttaaaaaacaaaagggaaatattgccatttgtcacacatggatggtatgatctcacttatatatgtgaaatctttttctaaaaggtcgattatacagagagcatacatttatatagatctaatgtgcaagaggactatagttaataaaattgtatggtattttgattttagctgctcgtgtcacaatgatggatatgttgtttcactatagtaaccattttactatctgtatatagcccataacatgttgtataccttaaatatacgcaatataatttacttatttttaaaagaggggtttaaataaaacattgccacccagccaggacctgccaacttgctaggagaaagctccttgtgctgctgagccccggccgcgtccccagacacagaagt

SEQ ID NO: 6182 - DNA, 482 bp, Homo sapiens
  source 1..482: mol_type = other DNA
cacatctatgttgaaacagaaactgggtggagactgtctcaaaatatgtggcagcaccatcaatggattggggaaggtgattttctttttttccagaaacactctcaaagacatacctagaaatacttttttacaagctatttactgtctatgtaatcctctaagataattgcactgagaggcttaattctagttgcttaatagaactcggacaagttccttgttttttaatccaaaacttgtttcaccacaagaaagttttgttaacatgtttaataatccatgataatggcattagcctggattttgacttaatatcagcaagctaaaaaaaaaaaacctgttcttaaaatatgtttacttcatgacttattcaggtgaagaaacactgtaagagtattacattgcatgataataatgcatgcacgccctcatgaataagttactactgacactgtaacatttgaattgaaaattagctt

SEQ ID NO: 6183 - DNA, 387 bp, Homo sapiens
  source 1..387: mol_type = other DNA
ttttgctttccaaaggagtgcccctaggcacccgttcttatggactcagcctgggtgacagaggaagattctgtatcaaaaaatatatatatatacacacacacatatatatgtatatatatgtgtgtgtgtatatatataatttgttttttccatgataagctattttaaaacaaagattctgaattctgtatgttttctatggataattttgttagagttaaagaatttgttcccgagttattactcaatacatgctgtttattggaatacagataacagcatgatcattgacaaactttggaagttgcacttaacatgactgtatctggataacagataaaattttggccttattatgccaacccttaaaccttattaaagtac

SEQ ID NO: 6184 - DNA, 597 bp, Homo sapiens
  source 1..597: mol_type = other DNA
atgcctgtaacagagctactcaatattcaacttacatagcatttaaattgaattactataatccctatgcttcacatcaagaagactgagtgtttacttgaatctaaacgggatatataaattgccatctattaaggttatcttttatgtgtttcttgattttaagcacagaaaataaaatggaaaataacttgaagctctagtatctttttgctagtacaccaacatagaaaatttcagttttatagttattgaaaacagaggtttcgttattatattctcaatacagaattcactaagaaaattaattttaaaaaagtcccaatataagcagtatttaccacttcttattgtgtaaatatgcaaataaaatgaaaataaggaatgaaaataagttcaacagtgtttttctaaaaatctatttggtaaatgtgtttccgaaatgagttacttgttttttgtcattcaattgcaaaactgcatgtgaaaataaaataaaaatgaacatctctgactgggaggtttggaataaattattcttattaatcttgcaggatatgcaaataggatatgcaaataggacactgtaataaccat

SEQ ID NO: 6185 - DNA, 600 bp, Homo sapiens
  source 1..600: mol_type = other DNA
acccagtgaattatgatccgtggaatatcccggtatttcagaagtaacatattatttttaaagagggagctttgctttctctaaatcacatggtgcaaagttgggaatacagtggcctgtaaattacaaatattatttacaaactgcctgtgtgacagtttcactaaggaattccccctccaggttcaaaaactgtaggcggcagtctcagatcgcaggattctagtctaattggcttctaaccttcaatctgccggcttccttgcaaagcccggtgcaagggcctctttcaagcgggagggcgtccggtctgcacgcccgccgcgaggttcgggaggccgaggggatccacggcgcccgcgcgggctccggcttcctcctgctctcggcgccgctgggcgaccgcccatgacccgctcttgcgggctctgtccggttgacaggcgaccctgtggcccggggaagcgcggcgccggcggaaagttgaagagcgtttttctcgccgccgcgtgcataggagctcgacgagtccgccctgggcttcctggtggggctgggcgggcgggggaggggccgcgcagcagcagcggaagccagacc

SEQ ID NO: 6186 - DNA, 446 bp, Homo sapiens
  source 1..446: mol_type = other DNA
agttttttaaacgaaatttagtgttaaaatggcaatattaatcttaaacaatttaagttctagatgttcgtgttttatgtatttatatcctatactctagtttccaaaaattataaatataccatatgccaatagagcaattttggaagtatcatcaaatactagttatcatactgtgtcattgcctctttaaaatgtgaaaattttactttttaaagccttgttttcctcattggcaacattcaaacaaaagctgagttaactgatcatcaggcaacaggggatccctcatccttctgaagtgcataaatgtacgaataaaggatgcttttgttcaaggagcaggctgttcagtgcccgtccctgcgcagagccggagggaaagagcttggaagtcagctgcaatttttaaaccttgctttttattctccactaactgcatgttg

SEQ ID NO: 6187 - DNA, 218 bp, Homo sapiens
  source 1..218: mol_type = other DNA
ttttaaaactttaaaccaatactttttttgtagtgtaaattgagcttatttttcacagattttcctacggaaagactcttatattatactgcgttagaactctgcgctcctaagctgcaattcagcagggctcccttgcttagctcagaacccagctcaggtgcgcggaagacagcttctgtagtcaggcgtgggggcgggccggcgccggcgccgcg

SEQ ID NO: 6188 - DNA, 502 bp, Homo sapiens
  source 1..502: mol_type = other DNA
cccagggaagacaggtagatttcagaaactcaaatgtctttgctcaaaataatttttaggccacaatggtgtattgtagacattcactgcacaaagatagcctttgtctttcccttaagactgtaggcattaactgtaacatgagctggatatctcctggtggcccaattacttgattattcaagaacagcttgtacaaaacactcagtgtgctggttaataaacagtatgtggcttcatatgaacacatgaatcttcaaagtagtttttaaacgtactaaatagtgacaacactttttttaaattacacaagactagaagaactcattttttagagacttttcttagaacaagggttcttttgtttcaatcaacgtttactaccctaggacttggctcacttgctgggcctagggaaagaaaatctacgagcctttggctggctgttgctcggggtcgtcctcccgtgacgtcaccagaaacccggaagtgggcgcacagt

SEQ ID NO: 6189 - DNA, 491 bp, Homo sapiens
  source 1..491: mol_type = other DNA
tattactacttccagttattaaatcattatcaatatcctgctggaccagaagtacttctgttagatacttctttgctaaatcacgcatcttgcaaaattgaccattaagagatacaactattgtatgtcccaggatcttccttttaggccatataatttattaccattgacagaaaatagttataaataaatgtctaaagctagtgtgactctatccaaagattctgtataatcccgtttagagtaatgaggactataacgacaatcttaagtacactatttttttaaaagaaatctgatacatctgactcttatgcatgggattgatgatattcttcctccaatggattatgaacagtcccttagttactggagtagcttagacagttcacatcaagcctgagcaagtatttggactaattttacaccgtttcttgctttgaaagagtcagtctaagatatacgagctgactcctccttcctgcagctcc

SEQ ID NO: 6190 - DNA, 287 bp, Homo sapiens
  source 1..287: mol_type = other DNA
taaaggtacttgtacggaagtttagttcctctgagctccttggcaattatagctgctaaaggtagcttttacaaagaaactgcctttgtgcctaaagtatttagatcttaagcaattctaaaaatgtttagcaaagcccttttggggggtggggaggatgggacattttcattgccaccgcccgcccccccctcacatgaagtgactggatttgggagacctagcggaaaccttcaggtcacccctctctctggtcctgcagcggcgaggcgggggcgccgagacgc

SEQ ID NO: 6191 - DNA, 369 bp, Homo sapiens
  source 1..369: mol_type = other DNA
tagatcttaagcaattctaaaaatgtttagcaaagcccttttggggggtggggaggatgggacattttcattgccaccgcccgcccccccctcacatgaagtgactggatttgggagacctagcggaaaccttcaggtcacccctctctctggtcctgcagcggcgaggcgggggcgccgagacgcgcggggcgcggagagcaggctggagcagccgcccaactcctggcgcgggatccgggtcggagggatgcccaggtgcctcgtcgccccacggcccgggcggaggcgggtccggaacctcccccaagtccggcctcagcctggagcccgcgcgccttgggcggatgcacggactgagaggcgctt

SEQ ID NO: 6192 - DNA, 505 bp, Homo sapiens
  source 1..505: mol_type = other DNA
taagcaattctaaaaatgtttagcaaagcccttttggggggtggggaggatgggacattttcattgccaccgcccgcccccccctcacatgaagtgactggatttgggagacctagcggaaaccttcaggtcacccctctctctggtcctgcagcggcgaggcgggggcgccgagacgcgcggggcgcggagagcaggctggagcagccgcccaactcctggcgcgggatccgggtcggagggatgcccaggtgcctcgtcgccccacggcccgggcggaggcgggtccggaacctcccccaagtccggcctcagcctggagcccgcgcgccttgggcggatgcacggactgagaggcgcttggctgggctctcagcccgccactgccacccggccccgtgcgctcattggtcgggatgtgtcggctcattctcccgaatcccactggtgagtcccaggagagcgagtccaaagggcgcgagcgcccagggcgctgggagcccgt

SEQ ID NO: 6193 - DNA, 630 bp, Homo sapiens
  source 1..630: mol_type = other DNA
taagcaattctaaaaatgtttagcaaagcccttttggggggtggggaggatgggacattttcattgccaccgcccgcccccccctcacatgaagtgactggatttgggagacctagcggaaaccttcaggtcacccctctctctggtcctgcagcggcgaggcgggggcgccgagacgcgcggggcgcggagagcaggctggagcagccgcccaactcctggcgcgggatccgggtcggagggatgcccaggtgcctcgtcgccccacggcccgggcggaggcgggtccggaacctcccccaagtccggcctcagcctggagcccgcgcgccttgggcggatgcacggactgagaggcgcttggctgggctctcagcccgccactgccacccggccccgtgcgctcattggtcgggatgtgtcggctcattctcccgaatcccactggtgagtcccaggagagcgagtccaaagggcgcgagcgcccagggcgctgggagcccgtgggacgggcacgggccagccgaggggagcggctgccgggaggtgcgctgagcagggtccgcagctaaggtccagcgcgatccgagcgcccaggaccctgcggccgtggaggaggcgtgccctggg

SEQ ID NO: 6194 - DNA, 655 bp, Homo sapiens
  source 1..655: mol_type = other DNA
atggaacatggtcatgataaatttgatcaggccagacctgcctttacaggtctttttgggaagatgctcacagggtcactctgcaaaacttttccagcctagttattccatatagagaatagtctaggtcagttacataaaccagtttggactttgaaaaatgaaatgtcctatttttatacattgctaataaaaacaacaactagtacatttatattaacactttttgttttagaatagttcaaagaaaggggcaccatttcattttatgttttccacctgtaaagtaataaagaactgtctacatttcatacagactttcattttattattatcctcattttaaaactaaagaagctgattcccaggttaagcaacttggctttcattacagaaagagctggaatttgaacccaagtccacttgtataggtggaatgcaccttctttatagaacattttcttcatgttacctaaaggcatggtgcaaattaaaaacctgcgaatatctgcattaggataattcagcttacctaattgtttaggtccccctcgtttcctccataataatagaataaagagccagagacttacatcactctgcagacaattggcagccaggagacgggcagctgccgtttctctctatttaaagt

SEQ ID NO: 6195 - DNA, 226 bp, Homo sapiens
  source 1..226: mol_type = other DNA
gtataattatcaacttaagtaaatttaacattcataagtccctttaatgttggagaaaaatatttttgtaaatcctaccaagttcttagggtagagccaagcctctgtatcctgcttgaaccaggatttgaattgaagagttaaattattaggccatttggaaaattttaataagttgataattttcatccaagggaattggaaaactatccagaatctgagtttg

SEQ ID NO: 6196 - DNA, 523 bp, Homo sapiens
  source 1..523: mol_type = other DNA
tggaatccagaagccggatcacaccgcggccgtctaggccagcggcggttccagcatccgccccaagctggaggttgcccgcttgagtcaaccagccaaagtggcctgttaatgccaaggagtagaaataaaagcaaagtgttaccatttacacgctctcaattttagttgcacttcactcagagtagatctcttatattcttagaaattttttttttttaaaggaaacactttttactttggtgcaagttgcacgatattcttagaaattttttttttttaaaagaacacttttcactttggtgcaagttgcacgcagtaggccctctggctacagccccgaggggttaccctgggtttcgaaacttttgaaacttgcgggggtaagccaagggttccaggtgcagccttggggttccacgtgcagccctagggttccgtatcccgcccgggccagaggaggcagcaggcgctccagtccgctctccgcaactccagttcctgatttcctcggaagctgcgg

SEQ ID NO: 6197 - DNA, 574 bp, Homo sapiens
  source 1..574: mol_type = other DNA
tcactgaaaaatgtttagaggtggtgtatagtatttagtatggctggagtgtagtggcacgatcttggctcactgcaaaagcgattctctcagcctcttgagtagctgggattataggcgcatacaatatatatttttattacataaatgttaccatattatttggtatctaatttttgttttatttaaaatgtattaactactgttttctaacagctcaaagatttagagcatgtgatattaggctttcagagcagctcttaaaactttaaagcacaatttgaatataagaaatatgcataggtttcaagtatttggttaaaaaatatgcataggtggaaggaatgaattacttcaatttccttcctgaattgaagtcaccagctgacaatcatcctactagcttgatagggaatgctgctcagagatctcctctgcataattggggcactgttaagacgtctgatatctggggcccgcccactggcgactgcaggtcgcggggccaccccggtccgcggggaaggggaccccgccgccttcccgaggtgagcggcgccccctgccgccagcc

SEQ ID NO: 6198 - DNA, 570 bp, Homo sapiens
  source 1..570: mol_type = other DNA
tcaatataataagaacctgtctttatgacttctttttaagtcccagctacttgggaagcttgggttacttgaacccaggaggtcaaggcttcagtaagccctgtctgggtgacagagtgagaccctgtctcaacaactatgcccagctaataaaaaataataattttttatagaggtgggcgtccagccttgacctcttacaggtgtagcccatgataaatattttaattttgcctgataagtcataaaaagtttattcaacaccttaaatagatttctcaattttttaaaaatattaaacctttgaaatcgaaagtaatttttggatttcacccctttattgcagaaaaaaattttttttctttttctgaacagagtaaaatcttggatgggccatgatccaaaaatcatggttttgaaagtagaccgtactataagccataatcacaaatctgaggtaatagttgtgaaagtgtttaaaacatcctgaaaacaatgttgaaatctatgataaaaactataaaatctctgcatatgttatactgtattgaacttgaaactttgaaggaa

SEQ ID NO: 6199 - DNA, 360 bp, Homo sapiens
  source 1..360: mol_type = other DNA
ctctcaaaagaaaaaaaaataataatctttctgccagaggtgagagaaaaaaaattaatcagattctgatcaagacgttttattgcaacataaaaaaatgtaattagagttggtttttccccacgcgtcttccaccatgagggagggggcacaaggcgaccttgccgcctagagttcgggcactaccagcgctggcctggaggaacccgctgtcacgtgaccgccgccacagtcgctgtcacagggcctgagtttgggcggcgccccgccccggccgcacggtgcgccggcgttaatcctccccgaaggttccggcagccaagattgcaggttcccaccaagagcgtgtccctgattcct

SEQ ID NO: 6200 - DNA, 493 bp, Homo sapiens
  source 1..493: mol_type = other DNA
gggctgccagaagagaaccgcctggcgcaggagagccccgtctgtggggggccgaggctgagcgttttggatccgtccagtcccaggtccaaggctgtcgcgctggaccagggagagcgataagggcacttcttactgcagcccggagtgctgaagccgggagccagtcctctggctagaggcccagaggatgcctgagacccccgggcagcagcgccgggctcgaggctggaggtgtgtgccgtggtgccaggatggaaaccagctcctacctgcggcgggatcgaacggctggtctagagcactttctctacaggactaggaatcagggacacgctcttggtgggaacctgcaatcttggctgccggaaccttcggggaggattaacgccggcgcaccgtgcggccggggcggggcgccgcccaaactcaggccctgtgacagcgactgtggcggcggtcacgtgacagcgggttcctccaggccagcgct

SEQ ID NO: 6201 - DNA, 589 bp, Homo sapiens
  source 1..589: mol_type = other DNA
gattggttaaagttagcttttaccctagctacagtctgacacaagaatgactgcagcaaaatgttggctgtattataataaaaatatttgtggaaagattatttttataccccaatctcgatttaggcctctaggtaacccacctcatcatcatgatggttgccaaggggtaggtggagggactgcagccccttccccacaaagtatctaagtgatcagttgccacggaactttccaaagcagccttggcctccttggctaagagttccgccaggggcccagctctcaggaggcctcttcggtgccgccccggcgccacaggcccctcctccggggcgggctcctcggtgcgagggcaggaggggcggagccggtggatgccgcgggctcctcctcccaagggcgggccgcgggagacccggccggctttgccggcggggaccgggctgggggcggggccgggcgccgcgagcccctcctctcgagggccggccggtttggcggcggctgcggagggtatctgaggctcggctgccaagccgaacgggctctggctcctcccagtggccggccggggcggaagcaggag

SEQ ID NO: 6202 - DNA, 365 bp, Homo sapiens
  source 1..365: mol_type = other DNA
actgacatcattatgggtgtgtgtgggtcaaccccatgcatcttaacttttgtacaggattaccattctcacattaggaatgaaagagtgcctgacatacgttatgtggttcactgacattcaaagaaatataaaataaatttaaaatgttcaggtttgcacaagagaaataatctttcccttgcattgatactgttgaacttatttgaggaaattcacattaaaacttttaaaactccaaagggactctagcctgaaatcttttataactctaacatgattatcgaatgttcactattaaataaagtattacaattggccagcttacctcttcactaggaaaggttagagatcaattcagatta

SEQ ID NO: 6203 - DNA, 510 bp, Homo sapiens
  source 1..510: mol_type = other DNA
tagatataagtcttttgtcagatattggtttgcaaatatttgctttttaaaatccccttcacgtggtatttcatagagcagaagttgttaatgttgatgaaatctaatttatgagcttacctacaagtttatagttttacattttacatttaaatccatgatcaattttgcgttgatttttgtataaatccagttgctccagcaccatttgatggaaaagctattcttcctccacagatttgctcttcatatttgtcaaaaataattagccatatttgtgttgttgatatttgtctatcatttgacagcaacatctgaaagaggttaatggacctttcacccaaatgaatcatgcctctagtataaaaaattatttgattacaaaatatttaataatttagagaagtctcattacatactcatgaatcatccctaaggctttatggtccaatatttccttttacctaaatagaaagacatgggaaaaagttcccatattttttttcccca

SEQ ID NO: 6204 - DNA, 461 bp, Homo sapiens
  source 1..461: mol_type = other DNA
tcaaaatgaacaactttctccagtgtacttgtcataatatgccttccaacattgttagtcagacccccagatggcctgctccttgaggaggggggatcttcattgactaatacagtgatggtattcagaaatattgaattttattgtaagtaaatctgaggggtttggtttccatacatttcaaatggaaagtaaattaccagccaactgatgcttagtttggttcagtcacatttattgagcaattgctttgcacctgacatcaaatattcctgcctcatgtgggttcagagtccccagggatgtcacaggtggccacagatgatcaatggacctgctgcacacctagtgcatcccggtgctggaataaattttgcagtaagttagcagagttgattccaaaaagtctgcactgtggcatctcagtcacagagtattcacgtgttaattcactggcgtgt

SEQ ID NO: 6205 - DNA, 444 bp, Homo sapiens
  source 1..444: mol_type = other DNA
ggttcagtcacatttattgagcaattgctttgcacctgacatcaaatattcctgcctcatgtgggttcagagtccccagggatgtcacaggtggccacagatgatcaatggacctgctgcacacctagtgcatcccggtgctggaataaattttgcagtaagttagcagagttgattccaaaaagtctgcactgtggcatctcagtcacagagtattcacgtgttaattcactggcgtgtccaactgttgtgctgcagcagatttggtcttgttacagcaagagccaggcaaagagctccttaaagggacctgcctgctcctccgtgcagctgcaaacccgtgtcggtgcaggctagcaacccaggcttttgagtggggaggggtcttgaggagcccccacgtcctcccggagcggaggcgggagggagctgagcatcctgcct

SEQ ID NO: 6206 - DNA, 331 bp, Homo sapiens
  source 1..331: mol_type = other DNA
cagtcacagagtattcacgtgttaattcactggcgtgtccaactgttgtgctgcagcagatttggtcttgttacagcaagagccaggcaaagagctccttaaagggacctgcctgctcctccgtgcagctgcaaacccgtgtcggtgcaggctagcaacccaggcttttgagtggggaggggtcttgaggagcccccacgtcctcccggagcggaggcgggagggagctgagcatcctgcctcgagcccgcattcagacaccgcggaccggctccgcgaagggctgcgtgcagtgatttggctgtttaatcagccgagattacccccgggg

SEQ ID NO: 6207 - DNA, 582 bp, Homo sapiens
  source 1..582: mol_type = other DNA
tcaaaagtagcatttgcgtggttgaatttttttttgaagaaaaaatgataatgtgttgagttaaaaatggaatctagctgttttaatagacatacttatgttttatttagcatggctttctataggtctagttgaaataaaataaaatagtagtaacttgtatcagacatatattaaatattgccttcatcaatgagatcatgagtttcttaaaagcaagagtcccattggacacaccgcaggtctacgaccctcaggctcttcagcgtcataagattcttcaaggtatttaatgaaataaagatgagttagctataccttctcagtcctgggtacgcacagagggcactaatgcttaattttggaattctgaagaactgagaactcgtgagtctgtcagcagctctgaagtggaatatcaataaagttttgttaattttttttaaagcaccggcgccaagctggccaatcctggggacgcttcgccaaaccgggtcccgcctccgcgcgccgcgctgacgggtcgttagcggatacggcggccgcaggggcggagtcaagggcctttgcccgccttggcgg

SEQ ID NO: 6208 - DNA, 623 bp, Homo sapiens
  source 1..623: mol_type = other DNA
ctatgattttcgtacatatggattatatgaactaaatgtattgtttcttccctcactactgaaaatctattcaatatatggagttacaattcaaagtattttacaacccagaaaatatggccattccgtatgtggtgtgtatttcagaggtgctctgcatgcctggtagtgacagacatttgctgaatgaataagttagtcactattgtgggctttaaaacacaagtaaatgcgcttctcggccgccgcaggtgcgcagcctgtccagcctgtccggctcggggcaggcgacctcgtctggtggcagtgggggaggcagccgtttgcttcctcacaggggccaaccgcaccgaaacgggtcgttccgtttcacagtgaccctccatctgtccgcaggcaggtggagcccgtcccacgcggcacgcgccttccttcccgcgtgtagacgcggaccctcagggacactgcggacgcgagccccctcgcgggagcctcgcgcgcctcccctcgaacgaacgcgcacgcgcgcgcagggggcgggtcttcttcccgacacccctggcgctccggccgcccaggctccgcctccgcgacgggccgtcgggaggaggcgaccggaagcc

SEQ ID NO: 6209 - DNA, 610 bp, Homo sapiens
  source 1..610: mol_type = other DNA
gacatttgctgaatgaataagttagtcactattgtgggctttaaaacacaagtaaatgcgcttctcggccgccgcaggtgcgcagcctgtccagcctgtccggctcggggcaggcgacctcgtctggtggcagtgggggaggcagccgtttgcttcctcacaggggccaaccgcaccgaaacgggtcgttccgtttcacagtgaccctccatctgtccgcaggcaggtggagcccgtcccacgcggcacgcgccttccttcccgcgtgtagacgcggaccctcagggacactgcggacgcgagccccctcgcgggagcctcgcgcgcctcccctcgaacgaacgcgcacgcgcgcgcagggggcgggtcttcttcccgacacccctggcgctccggccgcccaggctccgcctccgcgacgggccgtcgggaggaggcgaccggaagcccgctggactgcgcctgcgttcgcggcggcggaatggcccgtgcgcggctcgccgcgtcgcggctctgtggtccctagacgtcggctcccgccctcggcgctgatctccggcgcgggaaagggctccgggagaccctagcggggagtgcgagcgccggcctc

SEQ ID NO: 6210 - DNA, 368 bp, Homo sapiens
  source 1..368: mol_type = other DNA
aattctaaatctataggttcaattaattttctttgtatttacttaatcttattttattcaatagcaaaccagtctctttctacagagagtataaatacttgttttatgaatgaatgtatgaacaatgtctcaaaatactttttgaacccaattaatttgtcctggctgtaatgactgaaaccagaacttccctgctcaagaacagtaactgctcactgctgtgtctaccacataggccccagagcaaggggggctgggacccacttccgcccggcgcgtgagaccctgggcggtgcaggggacgacagacgtgggccgtgacgtcgccgcgccctgacgtccagccgactggcggcgcggtcgcccgg

SEQ ID NO: 6211 - DNA, 306 bp, Homo sapiens
  source 1..306: mol_type = other DNA
acggaacctagattctagtagtttagatcagtatctatttttggaaactagggattttccagattactgaaggccgacgcggaacgcaagccgcgggctatcacaaacaaggtggtttcgaccggccttggctagagaaggcctcctcagcctctgaggatcccaagcctcgcaggcccagatgccgagggcggaggcgcggcctggagggactagttggcgcgcggctgcccggcgtggtgacgtcagggcggaagcgcacgcggcgtgaagcggcccagaacccggcggtcacgggaatatccg

SEQ ID NO: 6212 - DNA, 282 bp, Homo sapiens
  source 1..282: mol_type = other DNA
taattaatgaaaagaaacatacctaaataactaaataagtatattccttttttcgtaattccagctacttgggttgcagtgagccgagatcacaccattgcactccagttatctataaaagtatagtattaaagacactcggattggacttgactttcagagccagaccattttcagtttcaacctgtaaaacagtgtacaaaggaaacatggaaagttttctatatataaagggttgtgaaatgtaaacctttgcggtttaatatgggaactcccgttacc

SEQ ID NO: 6213 - DNA, 313 bp, Homo sapiens
  source 1..313: mol_type = other DNA
acatgcagcatgattgccactgaatggaaatatttttatttccactttttgggcaccaccaattaatttatgcattagaggttttaaagtgcattctccttaaaagaatctctagtgctacgtaagcaataccaatagtataattagacttttgcttggcttaaataccacttgatttcttaaagtgagttattcattaacagaacctaaattactggttgttaggcaaatctaattctttcaaactacagatctgctcagagaaataaaagttactcatttgcctgattccgcacggtgagtgggagacgcg

SEQ ID NO: 6214 - DNA, 339 bp, Homo sapiens
  source 1..339: mol_type = other DNA
acaggaatgcaattactctaatttgggtaagaccaattaaggcccatcctgtttatgggcatcagctgtacccaaaggacattgagatgagtagtccttttaattggactagtaatttttttacatgcagcatgattgccactgaatggaaatatttttatttccactttttgggcaccaccaattaatttatgcattagaggttttaaagtgcattctccttaaaagaatctctagtgctacgtaagcaataccaatagtataattagacttttgcttggcttaaataccacttgatttcttaaagtgagttattcattaacagaacctaaattactg

SEQ ID NO: 6215 - DNA, 299 bp, Homo sapiens
  source 1..299: mol_type = other DNA
aaataaaattggactatttaattagtctgactactatttaatttaattggactattcacatttttatccatctctgttatgaatagtgatttaataaatgagtaagcaactaaattaacaaaataattattggctgctgacctagctaggatggcctgctctgggtcccacagaaggcacaggataaataatagtcaaatctatattttaagaagactaatctggagaagcttctgctgtggtccaggccagagaagatctattttagttttctgaaataggaaatcaattgcttcaat

SEQ ID NO: 6216 - DNA, 400 bp, Homo sapiens
  source 1..400: mol_type = other DNA
cctagaatataaggtaactcttcacaggttccaggcatagtacctggatatcgaaagcctagttttttattgtattgtgtgtgtgtgtgtgtgtgcgcgcgcgcgcgcgcgcgcgcgcgggcacatgtgattgtgtgagcttgtgcaggcggggccggtcctaggccaagttaccagtcacctgccgcatctgtgggccgcgcggtaagcgcgaagaagccggctgctgcgtggcacacgggcatggcgggctttggccttgggcgcggcccgcagatgcgtgcagcatgcggggcaggaccttaaatcctgctccaggcggaggcagctgttggccaaagtctctccacccccatccccagtcggctggggaaaaagcttcctgtggcagctgactggg

SEQ ID NO: 6217 - DNA, 600 bp, Homo sapiens
  source 1..600: mol_type = other DNA
taagttaatgcaaatattccaaaaaattttttaaaaatctgaactccaaaacatttctggtcccaagcatttctgataagagattctcaacctgtacatggattcagcctttctacatctatgtatttatctgagagaaatgaaaacacacgtctatgcaaatgcatgtgaatgtctatagtttatttaaattagggtatatccatacaatggaatactactcagtaatacaaaggactgaaatatttagatctaacatgaatctcaaaatcattgtaaaaaaaaggctgctactgtatgactctatttaaataaatttgtgagaaatataaagtaatctctcgattgggataatttcacaagtatacatatgtcaaaacctataagagagtacactttatatatgtacaattatgtctattatacctcaacaaagctgaagacacattcttatactgttggtgtaaatgtaaatcactatgacttttctgaaggtcaacttggcttgtcaaaatctataaaaatgtgtatctttggatccagatattcaacttctaggacttggttataaagacattcatcacagtgctgtgaatgtct

SEQ ID NO: 6218 - DNA, 447 bp, Homo sapiens
  source 1..447: mol_type = other DNA
gccaaatcaattttattgttgaactcctttgaattggtatagaactttttgctctaagagaaccgagtactgggtggagaagcagcgtagccgaagttttggcccctaagatccaaagattcaggggctctgcggagttcgaggggtcttggcggccccaaacacctaggcgaccggagggttaagcttcgcgaacttccacgtccgcctgcgggccatccgggctgcgggcccatcctcccgctggacaaagctggggtccagggccctctcctccccgctgggcctcggagtcctctcccgcccgagaggagtccggaaggcgggaaggggaaccgctgccgggggtcagtcaggtcgttaccctccgtcagtcgcgggctgcccggctcccgtctcggcggcgcccatgtccagctcccggacgggagagcgccctcctccagc

SEQ ID NO: 6219 - DNA, 280 bp, Homo sapiens
  source 1..280: mol_type = other DNA
gggaagctcctaagagaagctgcgcgggtcggagaagctgggcaggatggctgggaagctgagcattgcgaggcaccctgactcgaagcatctaagagctgcgcacttccccgcggggtccacgcctaattaaattaattagggattcttgtcaatcctggattaatggcgagcggccggggaccggccttctctccccgcccccacccccggtagaggcgcgactgctacccgggaagggggctcactcccagcgtcgctatcagatctgaactatctt

SEQ ID NO: 6220 - DNA, 349 bp, Homo sapiens
  source 1..349: mol_type = other DNA
aacgtcgatttttttggataatctcttgtttttcaaattagtaaataaactcggatgtttcccaacactttaaaatgagatctgtcagctaacagctgctggttaaatcgactggtcccttcggactcagcctgcctgcgagccgggaagctcctaagagaagctgcgcgggtcggagaagctgggcaggatggctgggaagctgagcattgcgaggcaccctgactcgaagcatctaagagctgcgcacttccccgcggggtccacgcctaattaaattaattagggattcttgtcaatcctggattaatggcgagcggccggggaccggccttctctccccgccccc

SEQ ID NO: 6221 - DNA, 595 bp, Homo sapiens
  source 1..595: mol_type = other DNA
ctgacagtctgtggacagattccccagctcttgaattatttaaaatatacacgtagtgttgtagtagttaagttttaaaacggtgcctcaaaactggctagttaaggtacattatttacgaaaaatatattgtggaggtgatttttcaccatctcaaatgaatgagttgattctcatagtcgaccaaaacccaggccaacaatttatttatctttttagctttgcttaagagtaaatgaggaaaaaatttccatgtagtatgaattacagaaaatgctgagtctctttaatttctattggtttaaataaaaaaactccacacacctataaatttgagttctcttagttactttaatctgagaaactaatttgcactcaacttgtgagtgccttcaccttcagggcagcttttaatgcatttttgcaaataaatcattacaatttaatcatttattatcgttgggcgagttgtttcgggtaggtgtcataaacaaaacttcctacgatgcagatttgtttatttattgcttttggtaacaataaaatcaaaatattcccagcgcctggcagcgtccatcgatgcactcgatatctc

SEQ ID NO: 6222 - DNA, 478 bp, Homo sapiens
  source 1..478: mol_type = other DNA
ttttctaaaacttagtaatttgagtacttgatagcttactttttcacttaaaaatgcaaaatctagctcttgatgtatatcactgatttaaatttaaaatcagtttccttgccataaatagaaagctccctgataaatgtaatgcaaataaaaacatatagtagtggaattttagttggatatggctgcttgctgcaggcctgtgcctgaaacctgctgttaggagaagtgttaaaaacatatcaggtaaataagtttgttgaaatctgataggcttcatcccatttatttgctaactgtactaaaaaacgttttgcacattttttcttatatctggtccaatcgttttggttcctgcagcccagagaggcgaaaagctccccggccggcgcaaggccagacttctcgcgttgccagggcagcggcgcattgctccccgcctcgtcctggtgacgtcacagaacctcctatcccggcg

SEQ ID NO: 6223 - DNA, 315 bp, Homo sapiens
  source 1..315: mol_type = other DNA
aatttaccaggctggaatttcccaatcctacagatactcccagagcaccgtctataggcctacccccaggaatgcattcctttcccagggtttcattgttccttgctgggaaaagaattcatagaagaaaaatatggttctagttttacaattaatttgtcctgaggtgacatcctcagcttacgacgttaagaaattataaaagtattaattttgggaactgatacatgtccatgaaatcttcagtctctttcaaaatctctgctaatattcgaaacatgttaaaaatcccagtgttagaatgaagtgacagac

SEQ ID NO: 6224 - DNA, 367 bp, Homo sapiens
  source 1..367: mol_type = other DNA
tagctgggactacaggcgcccgccacactaatatttttggttttggacctgttaggttcaacatgcctcttaacacatccaagcagaatggtcaaggatgcaaacaaataacattttgacatgaggaaaagtatttgtaattgtaattgatagttcattcactataatttgtgtcatatatatacctattaatatttgtaatagacaattttgctcttttctacttaaattataggcctaacaaccatgtttaaattctgtatcttcatacagaggtaatatttaaattctttagctccgcaaagcgattgcactttctcttccaagtcggcagacggcgcgcgagcagcgtaggcactgctccgcc

SEQ ID NO: 6225 - DNA, 511 bp, Homo sapiens
  source 1..511: mol_type = other DNA
ttgcactccagccttggccaaactttggtagaatctccaagttatcctagcccaattatcaggtttataggcccattgcaatgaggtagaccacatataagttcagtttttaagtttattttaatccttgaagtaaaatattcaaaatgactcaagttggaagcatggcgttacatcaaaacttatcattttaagattagtaaaggagagggcaggtgcatttttttatttctcctgatccaaattacataatctcccaatttaatactatagtttgcagattctcatactttgatttgggcagaactggtccaaacccacaaaaacctcttcctggactctggaaatgaaggaatcgaatcaccccctgccagggacgctgcaccagacttttttcccatggacaggaaactagagtcttcctggtgcctgacaagcatgctggcctctcctccagtaggaaccagcaggcggagtcgctgcagagcagtcagcccagggctctcggatg

SEQ ID NO: 6226 - DNA, 429 bp, Homo sapiens
  source 1..429: mol_type = other DNA
ggttgcagtgagccaagatcgtgccactgcactccagcaatgtatcaatgacctttgcttctgagacaaatgggcctcttctgggcaggaccggcaggtgttcaggcccgtccccagcccctggctccggcgtcccgggctccctgcccacagtggctgtgccaagccaatgcttggagaatccaagcagttaccccagggttgcgaaaccgtagcacgggcgggccgcgattcctcggggaggcgtccccattgtccccccaaccccgaccctctcccgccgcggcctgggccagaagcacccggccctgcgctgcggaggcgatgccgcatcctagcactaagcccgggcagcgtggccccatggggacccgggctcgctacagaccttcgccctgggggcggaggggaggggcccaccacgggcga

SEQ ID NO: 6227 - DNA, 340 bp, Homo sapiens
  source 1..340: mol_type = other DNA
tccacgtttggtgcaggggtagacgggagtgcctagcagtaccagttctcctctctttaaaaacaatggcaaagagttgccgccgggtaccgcctgtgggaggcccaggcgggcggctcacgaggtcagggttgcagtgagccaagatcgtgccactgcactccagcaatgtatcaatgacctttgcttctgagacaaatgggcctcttctgggcaggaccggcaggtgttcaggcccgtccccagcccctggctccggcgtcccgggctccctgcccacagtggctgtgccaagccaatgcttggagaatccaagcagttaccccagggttgcgaaacc

SEQ ID NO: 6228 - DNA, 236 bp, Homo sapiens
  source 1..236: mol_type = other DNA
ctagaaatctgggagacactctcaagtctttcctctagctttgacgccctcaaaattctgttacctgaggcagaccgaatgttttttaaaacacaaagcttgcagtcctgacctttccagatatttctatggaattcagtgccatttctgaaatctttgaggtcagcagaaattggcagcgcgcgtcttggcgaccccagcgcagttcgaactactccggagtctggtgtggagcc

SEQ ID NO: 6229 - DNA, 340 bp, Homo sapiens
  source 1..340: mol_type = other DNA
cgaatgttttttaaaacacaaagcttgcagtcctgacctttccagatatttctatggaattcagtgccatttctgaaatctttgaggtcagcagaaattggcagcgcgcgtcttggcgaccccagcgcagttcgaactactccggagtctggtgtggagccgagagggagccccgcacttttctccccgcggagctgcgctgagtcacctcgagggcctcagcgccaggccctgtcatcgaccgctgggtccgtcctcccagcgctcgcggccgctcacatgggcgtggccctgcgtgacctgccggggcgtcacgtgagctcccggagtcatgtgaccg

SEQ ID NO: 6230 - DNA, 224 bp, Homo sapiens
  source 1..224: mol_type = other DNA
ctctagcaagattaggaaaattttcttgaattatttccttaaatatgtttaatcccatatttcttaaagactttgttgatttttaaagattcttttttgattcaaaagaaaagctttcagttgtattttgaaattccataagtgagatcttcaattccagatgaacagtttaacctacaagccaataggtgatgcttatgagtaatagccagctgtggctactt

SEQ ID NO: 6231 - DNA, 426 bp, Homo sapiens
  source 1..426: mol_type = other DNA
aacctaaacaaaataacagctattgtctctaataacttaatttgccatatgcttaattatgtataaatttatagacttaagccaatataatgtaaactgtacatttaaatatcagtactcagctcagcttctgagtattaaacatttttttttctccacttccttgaaaagctgtgaacaagccttttagattttatctggaccaaacagtagtggttttacatgagaaacgagaatcataaatctatgtgtttatatgtctaaagtgcattataaaaagaagcaataaatctagttttctacataaaaggaattagattttctggaatgatccatttatcattttttcaaaagcaggatgcctcttaattttttgattcattctcaactgttttaaaatgagctgagaggctgttacctgcctgt

SEQ ID NO: 6232 - DNA, 759 bp, Homo sapiens
  source 1..759: mol_type = other DNA
aatacatttaataagcactaattagattagtttcaagttattctgattagataatttattaactggcataaatgacaattatggctgaaaatcataaattatggcatatggaatgatcatggacattgctcatttaaacattctttaaaagaatatgtgtactatgaattaccagttaggtgtgcagattagtaataatatagctaattttctatttttactttattcagaactgaaaaacatctaaaaatagtgagttaaagaacgtttttctttaaccaacacttgaaaatatactccaatcgtttcagagatagtaagatgtttttatgtttatataactttttaattttgttacataaactgttgttagaagttgaagatgtttccttaatttttattttgcaatctttatggattgaattaaaaaataatttttggacatgctaaatatttagaagtagattctatatccttagagagcctctagttcccacagcagcttctccagggaaaagcacaaattaatggcagttattcattttttaaagcagtaccagaagctgatcttagcttaaaggggaggcttcatctcacatatgagcagcaaataagtattttgatagaagaccatgctatttaatataagtagattttcaagaaaatcactatgctaaatacttcactagaaggactttatctatatacagcagcaactgtgagagattttcagcctcagaaagagataatctgtgacag

SEQ ID NO: 6233 - DNA, 399 bp, Homo sapiens
  source 1..399: mol_type = other DNA
aactcttttgtcttggagtcaggaggaagggggcaaactgccctcctctttgaggcgagcaccatttttgtaagagaataagtcccacataaagggttttctggcctttaaaattagcccaccaaatatctttcttgctggagtgcaatggcacaacctgagtagctgggaggccgccaccaggctgtgaactcaggtgatccacctgccttggaagtgctggaattacagggccccttatttaggaattattaaattgcctactatgtgcagaaacttgtgaattgtcaggctccaaatttcctcaaaaggctgaagcctggaagtgaaattgtcttccttatatggtgaaaagtgccctgtccctttaaggccaagagatttggctgcagacagtcc

SEQ ID NO: 6234 - DNA, 564 bp, Homo sapiens
  source 1..564: mol_type = other DNA
caggttccacccacagcctgaacttggaaggggatgcggcggcggtcactcgggctcccacatgggcttgtgtatgtgcgtgtgtgaggggaccttccgcgtggaataggaggcgccaggctcgtggcgccggctccagcctgccgccgcgaaaaccgggactgcggactgcgccgcgcccggcagcctctgggcatgctcggtggcgggaccggctccaccgccaggagggcgcgtcctccctcccctagggcggtgacggcgcctgcagcgacttgccgccgcgccccggccaggcacaccttttggggaggcgggggaccaccctgcccggcgtgggccgagagcgccccccaccccgagccttccggcgggtgggaggaggggccggcccgcggaggcgggagtgagacctccgactgccagcggttccaagctcagctcgcgcgcggacccgggctcccagccgcgggcggggaaggggcggggcggggcggggccgggccgggccgggccggggcggggggtggtctcccttctcagtcccagggaattataatttcc

SEQ ID NO: 6235 - DNA, 536 bp, Homo sapiens
  source 1..536: mol_type = other DNA
gtcactcgggctcccacatgggcttgtgtatgtgcgtgtgtgaggggaccttccgcgtggaataggaggcgccaggctcgtggcgccggctccagcctgccgccgcgaaaaccgggactgcggactgcgccgcgcccggcagcctctgggcatgctcggtggcgggaccggctccaccgccaggagggcgcgtcctccctcccctagggcggtgacggcgcctgcagcgacttgccgccgcgccccggccaggcacaccttttggggaggcgggggaccaccctgcccggcgtgggccgagagcgccccccaccccgagccttccggcgggtgggaggaggggccggcccgcggaggcgggagtgagacctccgactgccagcggttccaagctcagctcgcgcgcggacccgggctcccagccgcgggcggggaaggggcggggcggggcggggccgggccgggccgggccggggcggggggtggtctcccttctcagtcccagggaattataatttcctgggaaacaaagtctg

SEQ ID NO: 6236 - DNA, 654 bp, Homo sapiens
  source 1..654: mol_type = other DNA
gctccagcctgccgccgcgaaaaccgggactgcggactgcgccgcgcccggcagcctctgggcatgctcggtggcgggaccggctccaccgccaggagggcgcgtcctccctcccctagggcggtgacggcgcctgcagcgacttgccgccgcgccccggccaggcacaccttttggggaggcgggggaccaccctgcccggcgtgggccgagagcgccccccaccccgagccttccggcgggtgggaggaggggccggcccgcggaggcgggagtgagacctccgactgccagcggttccaagctcagctcgcgcgcggacccgggctcccagccgcgggcggggaaggggcggggcggggcggggccgggccgggccgggccggggcggggggtggtctcccttctcagtcccagggaattataatttcctgggaaacaaagtctgcgcgcgccgcggggccccttgtatgaaaagtggcgcgctgggcaggagggaagcctcaggctggtgctggctcccgcccccaggcctccttgggggacgcacctctgacccagcgggcgcagggtgcggggcactgagccggggaggctggagcaggcttggcccagcagctcactctctacctcctccccctaggattaccgaga

SEQ ID NO: 6237 - DNA, 473 bp, Homo sapiens
  source 1..473: mol_type = other DNA
gcttgcagtgagctcagatctcgccactcgctgaggaatataaataagaaaattttatttaacttttcccccttaattttctcatttcaagtcctgaagtggccctgaagccactcagaaactggcccagttcgttgggtaataatatatgtacaaataaaaaaaaaaaaaccttccaattaagagtttagttttcatgaagtaaattatagtgactttaatattttaataagctctctccctaaaaaaacttataacagcaattattctatcttatttctatttgacttaaaaagaagctaggtttaaagaattacaaaataatccttttaaagagtaaagaccttttagttataaagttgacaaacaaaaactcaacatagaaaaacatcctttcattgttggtattcagaatggattgttctctctttagcatgttaaaagttctaaaattatctttaaggtctttttct

SEQ ID NO: 6238 - DNA, 493 bp, Homo sapiens
  source 1..493: mol_type = other DNA
ggaatataaataagaaaattttatttaacttttcccccttaattttctcatttcaagtcctgaagtggccctgaagccactcagaaactggcccagttcgttgggtaataatatatgtacaaataaaaaaaaaaaaaccttccaattaagagtttagttttcatgaagtaaattatagtgactttaatattttaataagctctctccctaaaaaaacttataacagcaattattctatcttatttctatttgacttaaaaagaagctaggtttaaagaattacaaaataatccttttaaagagtaaagaccttttagttataaagttgacaaacaaaaactcaacatagaaaaacatcctttcattgttggtattcagaatggattgttctctctttagcatgttaaaagttctaaaattatctttaaggtctttttctgaaatgttcaactgcaacggctgattgtgcgggtgatgagcgccccctccccca

SEQ ID NO: 6239 - DNA, 342 bp, Homo sapiens
  source 1..342: mol_type = other DNA
ctgcaaacagtagctttattttttggaaataaacactgggcataatttttagtttatgacagttttagtaaagccgtttgcttttgtgaaaaagcccgccactgcttgaattttaaagaaaagttgatggatctttttctgttgcctatattaatagaacaaagcactgctcccagggcagaagggtccttctctgtgttggaagtgaatttcagtctcgacttttacatgagattttaagaaatgatcagttatgttacaggtcagcctttaactgaacgcggagttgaatcactcttttcctttcttgggaacaggaaaggtgctgtgtctgtgggacag

SEQ ID NO: 6240 - DNA, 375 bp, Homo sapiens
  source 1..375: mol_type = other DNA
accaaggaaatcatttttaatcttctcccctgttgtttaaagggtttaaaagttcagcacagtagcaacaagactgtaagctgcatggaggcatctgccagctcccagaggctgcatgttggtgaagtaagaagaagaaagattacgtgacaaataatctagttctatcctcgtgaaaatcatttagcaccacgatggtgatctgaaattgactggtaaaatttcagcttttaataattcaaatactcttatgccgcagctatttatttgtttttcatctaatgttacagttctaagaaacttagcaagtttttttattttcttgaaattttaggcacagaaaaatgagagagagtctatcaagcaaaagtggga

SEQ ID NO: 6241 - DNA, 376 bp, Homo sapiens
  source 1..376: mol_type = other DNA
cttctttaaaaatgctttatcaccaaacagtattgaaatgtgttcaacttcaaacagcctggcctgcgagtggcagctacacccctggagcttcaaggctgcagagaaaaggagagtctttgattgtccccctgggacgggttctctagatgaacacatttttattgtgcaccaaatttttcacttaccatgagaaaatcctctactaagagttatttatatgtggagagtaatattggttgctcatttctccatgtgaagaacacataagactactttctgttagcaaaatcagacagttctattggctgaagccaaataattgtcaacgacagtggcagtgataaggacagtgatgctgatgacagtaagactg

SEQ ID NO: 6242 - DNA, 387 bp, Homo sapiens
  source 1..387: mol_type = other DNA
gaataaggacttggccacaccttgggatccatccttcatgctgtggctgaagggatccccccatcaagtatggtggttggggcccctgcctgctcccgggagcccctatcgttaaactggattctctacaagagtaataattgcagagtcatcccttttcaggtttcagaaaagctccctgggtgtcctgcacctggtgcaacgtcggcctggcgtggttagggcccatccctacgcaggacatgcaaagtgggaggcactcctctctctacgtcggcagggggcgctgcacagctgcggggcggggtagcttagacacggggcgtccggctaaggccggggacccagggtggtgggcggggtgtcccgcccgcctgtggaccccgc

SEQ ID NO: 6243 - DNA, 642 bp, Homo sapiens
  source 1..642: mol_type = other DNA
aataacaaactgaaatgccttttaggtacacaattatctcagcttacatagaaattcttctgataaattagagctgaaaatttgagggatcatatctcatgcatcttataagtgaagtaaattataattgaattatttcctaattttaatgtaggaaagtttggtattgtcaattaaaaataagtgaagaaataaaatgaaaaatttaaaaaaagtttggtaagattttagtttcagctgttaaaccataagttctttcctaggtgaattgttatgataatatgtgattgaaaaggatagcctactgacttgattattttttccttagcaaaagaatacatgcttattttaataacttacatgatacagacatatataaagaaaaaagtatagtttttggctttgtgtatagaatattgtataacacaagttttaaattttcatgtacaattcttttaatagatgcttattttcttttatatagaaaaaaataccagtcataaaatggaaaatacatttagaatcttgaaaccatttgaccctatttttataccttataatctgcatctgtgaattattcattaagattaaagacttttgtatgttttatgtctctttaacatggtgacacatctgtattca

SEQ ID NO: 6244 - DNA, 366 bp, Homo sapiens
  source 1..366: mol_type = other DNA
gagtgatcatgtaaattcattcaaaagggagatttaatggtgatttaacatcaatgtcaagtacttaagagttgttgcatactattctgattataaagttgtaggaaaactaacttcccagaaaaatgcacatagaattatgtatacaatggtatctaattatgccttacccaatgtatacaaacactacttagggaatatttgctgatcgataatttcctcataaaaataaccattttccactaaagagccttttagtcaaattattttaaaagtcctaaacctttcacaaatcattattgcagaggtgaagggatttacctcaagttccaggaaagcggtggcgattgcgtgggcccgagaccc

SEQ ID NO: 6245 - DNA, 418 bp, Homo sapiens
  source 1..418: mol_type = other DNA
tgattttttaaagaaaagatctgcgaggctcagggcctcccctggcgcccgggagctgcgcgcgggagcccgggccgccggggagcggccgaggggggaggcggcagcttcaagcccggacttcgccgctcgggctcaaggcctctactgaccaggaagagaagtactttaccagacggttgtgtagtacccaccaattcgttacaaatgcgcgcaatgatttaaagtgcggcgattatcaccgccatcttatggtagaagtttctactaagtgaaaaggaagagcgagctattattaaaaatatttggaaagacaacctggcaagttttgaaaaagatttttttaaaaacggtagggttcgagaaacgcctcttcagaagagggcgggctcgccgagaggcggggtctcgggcccac

SEQ ID NO: 6246 - DNA, 467 bp, Homo sapiens
  source 1..467: mol_type = other DNA
gtataatattccacgctttcgatgccgagttcgtgtccgggtcaggatcccgtggctagcaactctctccagagcggtgaagactaactggcgactcgccgcccgctttcgtcttagctcctggcgccgttgacggcccggggcataacggtctccctcctctcagcggtcggaccgcgaagggcgaaggcgcaacttcaagtcggacgctggcagcgcttgtgattttttaaagaaaagatctgcgaggctcagggcctcccctggcgcccgggagctgcgcgcgggagcccgggccgccggggagcggccgaggggggaggcggcagcttcaagcccggacttcgccgctcgggctcaaggcctctactgaccaggaagagaagtactttaccagacggttgtgtagtacccaccaattcgttacaaatgcgcgcaatgatttaaagtgcggcgattatcaccgc

SEQ ID NO: 6247 - DNA, 421 bp, Homo sapiens
  source 1..421: mol_type = other DNA
atctaattatgccttacccaatgtatacaaacactacttagggaatatttgctgatcgataatttcctcataaaaataaccattttccactaaagagccttttagtcaaattattttaaaagtcctaaacctttcacaaatcattattgcagaggtgaagggatttacctcaagttccaggaaagcggtggcgattgcgtgggcccgagaccccgcctctcggcgagcccgccctcttctgaagaggcgtttctcgaaccctaccgtttttaaaaaaatctttttcaaaacttgccaggttgtctttccaaatatttttaataatagctcgctcttccttttcacttagtagaaacttctaccataagatggcggtgataatcgccgcactttaaatcattgcgcgcatttgtaacgaatt

SEQ ID NO: 6248 - DNA, 522 bp, Homo sapiens
  source 1..522: mol_type = other DNA
tttagcgggaatacaataaagatattgaatttttgtttgtgacctgtaccattccacaggtcactgttcctgccgacaccggaaccccagccagcctcgggctgggcgcgtttgcctgccagtcccacagcgcgcgttcccgccgagtcgcggcgggtcactcacctgcggcggtggctgggctctccgtgcggccggacggcggctcaggctccgcgtcgctgctggcgccgtcaggggacggcggcggcggcccttcctctctgcgccgggcagtggagggcctggggccgggggacagccgggagcaagtcagcccgcgggccgctacaccgcgcccgccccccggggaaatctcggtccaccggcttccgagaggcaggactggtttcttaacaatcaatcaacgattgagcaactgcttagtttgtttagtataagcgtataatattcgctaaccacgctttcgatgccgagttcgtgtccgggtcaggatcccgtggctagcaactctctccagag

SEQ ID NO: 6249 - DNA, 476 bp, Homo sapiens
  source 1..476: mol_type = other DNA
tttgagatagatttaagagccctaaatgcttatcaccattcactccaaataaaactattgcttttggataactgttagagtaaagtggctttttaaaagaaatttttgagactgggtccctcccgcctctgcctctggagcagctgggctaattaaaaaaattgttttttgtagaaacgaggttttgccataacaatacttgtcatattctatagtttgtgcaaatttaagaaatcagttcttggattaaaaactcattcttattagaacagaatcatgttggtagttttgatggcatcatgcatcttaactcatttaaattttctaccacattcccttaagctaatgcaaaagtaccaacaacttaatcttttttttttttttttttttttctggagtgcagtggcgtgatctcggctcattgcaaggtagctgggaccccaaaatgctgggattataggcgtgagctaatcttt

SEQ ID NO: 6250 - DNA, 465 bp, Homo sapiens
  source 1..465: mol_type = other DNA
ctcagcccagtgctccggtgggtcaggtctccggaatgcaggaggccccgccccgtgtggcgccgtcggccaccggcgcttcgcctcgtcccgcgccaggcccagcctctcccccagaccaccggtgccatgcggattccccaggcgggaccccagctcacgaggcccactggccgaagctccccacaggatagagagccgctcctgcgaggccaagcttccgagaggcggcctgcgcctagcacgcaggcgcggaaagctgggcgccagccttaaactgacctgcgcctgcgctgcgaggctccgcgaggccccgcccggtctgggcacctgaagcccttcggggcagaggagggcggggactcggggcggctctcagcatccgcctggagccactcattccctctttcccatactggagtttggggagccgtccctccactgtggagctgcgttcctgtgagg

SEQ ID NO: 6251 - DNA, 461 bp, Homo sapiens
  source 1..461: mol_type = other DNA
ataaagctgaataaagtttctcactgtacgttgttttctaactctcccaaccgagttgagtacaaagagcgtcctgtgctcagcccagtgctccggtgggtcaggtctccggaatgcaggaggccccgccccgtgtggcgccgtcggccaccggcgcttcgcctcgtcccgcgccaggcccagcctctcccccagaccaccggtgccatgcggattccccaggcgggaccccagctcacgaggcccactggccgaagctccccacaggatagagagccgctcctgcgaggccaagcttccgagaggcggcctgcgcctagcacgcaggcgcggaaagctgggcgccagccttaaactgacctgcgcctgcgctgcgaggctccgcgaggccccgcccggtctgggcacctgaagcccttcggggcagaggagggcggggactcggggcggctctcagcatc

SEQ ID NO: 6252 - DNA, 342 bp, Homo sapiens
  source 1..342: mol_type = other DNA
tgcttagtcacagaagatgaatcagattcgtctaatgggccagcaggtcctggcccccagacccggccctggacggcacggagccccagcccgggaacgcagctgcgctcagatctctctgcaaagcgcgcccggggaaacgttactttaccccatctagggcttcctggacgggagcaaaaccgccccgcctgcccccgccgcacccctccgggcccggagccggctcctcccagcctggttagcgcgagccgggctggaggcgatgggcgtggccgcagcgccggggccctcagatcgaggctgcctccccctctcagccggcagccgccgcccggcccc

SEQ ID NO: 6253 - DNA, 360 bp, Homo sapiens
  source 1..360: mol_type = other DNA
ataaagctgaataaagtttctcactgtacgttgttttctaactctcccaaccgagttgagtacaaagagcgtcctgtgctcagcccagtgctccggtgggtcaggtctccggaatgcaggaggccccgccccgtgtggcgccgtcggccaccggcgcttcgcctcgtcccgcgccaggcccagcctctcccccagaccaccggtgccatgcggattccccaggcgggaccccagctcacgaggcccactggccgaagctccccacaggatagagagccgctcctgcgaggccaagcttccgagaggcggcctgcgcctagcacgcaggcgcggaaagctgggcgccagccttaaactgac

SEQ ID NO: 6254 - DNA, 338 bp, Homo sapiens
  source 1..338: mol_type = other DNA
gtgttattcgttgatatttcaatatattttaaaataattttccatttctgttttgttaaatttttgcttagtcacagaagatgaatcagattcgtctaatgggccagcaggtcctggcccccagacccggccctggacggcacggagccccagcccgggaacgcagctgcgctcagatctctctgcaaagcgcgcccggggaaacgttactttaccccatctagggcttcctggacgggagcaaaaccgccccgcctgcccccgccgcacccctccgggcccggagccggctcctcccagcctggttagcgcgagccgggctggaggcgatgggcgtg

SEQ ID NO: 6255 - DNA, 698 bp, Homo sapiens
  source 1..698: mol_type = other DNA
gcaagccgggagaagtgcgtcccttctcgcttgccttatggctggcgaagcggggaccgcactatagtgcaccggctgtcctggaccgcatggggctgcgagcccgcaccggcggccgcggaacttgctcagcctctgacagctgggtgggaacacctcggggtgtcgagtcccgactcaaggggcgggacggggcggggcgagcgcgcggggggcggagcgcgcgcgagccgggacgcgaggagggagcgctccgagccgggaggtgcctgggagaggcaggcagagcccagccggccgcctgcggctcagtaccgaccgtgccgcgtcgccgggctctgcgtacaggctcccgcaaaacttttattctctggggcccccggggtgtgtgaaggaattggtccgccatctccgcgctccccttcggcggcgaccgaggggacctgcgtccctcgtccgccgggctctggagccctgcgcctcactcgctctccggagtctcgagggggcacccccggagggaccgcgcgggcgccggcgcccctgaactctcccgctcaccgcggcagacccgcccaaccggggcaccagcggctgctgctgcggcggctgctgctaccgccgccgccgcggtctcacaaaggggggaagggaggcggcgcgggcggcagggacgggcctccgggccgccgaggcgg

SEQ ID NO: 6256 - DNA, 649 bp, Homo sapiens
  source 1..649: mol_type = other DNA
atatatagcttacttcttaaaagggaacttcccaggttgaatatgcaatgcttattaagacccattcacccggctgtgttctcacagataggactcaatgagcacaatggttaaatctttatagattatagagtaatatggttttatagacattcatgttactttctttgtttctagaataaggaaaaggaatgcagagctacatttcttaatatgaaatggtgattgccagtacagcccaactgtatattttcagtttgtaatgacaacattaggaggaaaattgattagtacttttaaaacagtaggaaaattatttctgcccaaacattgattagcctttgaatggattttctccacagactgcagggtgcaggccgctattaaacttgggtgcaaataactacacataaggacttctttgtttattttgattaaagagactaaagatacttttgtcttatgtgaaatgtgaatacagtgaaatattgaaattttttgatgacatatatttgtcagagtgctttaaaatttattagctgaagctcaggtaatattaatttgttcctggttaaatgttatataaaatataggaataaagaaaacttaccctcaggtaacttatatatttgaggagttaagacataga

SEQ ID NO: 6257 - DNA, 517 bp, Homo sapiens
  source 1..517: mol_type = other DNA
gccacgttctcaggtgtaccctgggactccggaagaagaactggcatttcttctgagacagcaaagaactcctcctaagatttcctctttcctaattagttctgtatgaagaaaatccctccagggccgcctcgaggccattctagctcgacgtagttgtctaattttggccacgtgctcggaatgcaaggtgaccgcgaggacccagagggcgcgccatgcgagctcacagggctgggggccgcctgggcccgcgcgtgcagccaggggcttccggccgcggccctggcgcgtggtctgcgcgcgcccggccgtgcgtgcggatgcggggaggctgcgtgtgtgcgcagggagagaacgccggccaccttcccgcttccgagctgggtgcgcgccgagcacaggaggtgagagggcggccctgcagggtctccgaggcggttgagtcctgccactgggtggagggtatagccaccggacccgcctttcccggaacgcgccgtcctcggaaacgcgg

SEQ ID NO: 6258 - DNA, 429 bp, Homo sapiens
  source 1..429: mol_type = other DNA
acaatctcaaccataatttagatctgattattataatttagatctgattatttatgcgtgtcaactaagcaaactatcctaagtaattttgcagaaagccacgttctcaggtgtaccctgggactccggaagaagaactggcatttcttctgagacagcaaagaactcctcctaagatttcctctttcctaattagttctgtatgaagaaaatccctccagggccgcctcgaggccattctagctcgacgtagttgtctaattttggccacgtgctcggaatgcaaggtgaccgcgaggacccagagggcgcgccatgcgagctcacagggctgggggccgcctgggcccgcgcgtgcagccaggggcttccggccgcggccctggcgcgtggtctgcgcgcgcccggccgtgcgtgcggatgcgggga

SEQ ID NO: 6259 - DNA, 301 bp, Homo sapiens
  source 1..301: mol_type = other DNA
gacctgccagtggagatcagatcctgaaattgcatttagaaaaaaaggttgtactcttcaaatatttgaaaggctgtcaaactatccgacacataattaataatttgtctaaaaatcgcatagacttcttcacagataattatgctttacatttcattctttcaacaaataatcatttgagggcatgccctggatggagtttctttgcataaggtaccgtttacagataacttttatataaaataatcatttaatcaagaagaagcagtcactgacggcaaatgagcccctgggacttctc

SEQ ID NO: 6260 - DNA, 421 bp, Homo sapiens
  source 1..421: mol_type = other DNA
cctagctaccgcgggctgcttggccgcccgctgccccagcccgagccctgggctcacttagcagcctgatgccgagtttcagacgcagtcctgctgcgcctgagcgctttaacgcagcttaggctaaagcccccttcagtagagtcggggatcccagccccagagcgggggagggcgcctccctatcccctcctccccgtccccgcctcggctcggggttttactgcagcagccggaggtgacagcgacgcctcagccgcctctgttgctctcggagccccggcttcccctgcaccgggaaagcgccccctctcgagaggctggtccctggaaccagattttaaaatgtagaagtcgtcagcaggcattctcttcttccttttgtcaataattaatcaccggaatgaacacctaactccgg

SEQ ID NO: 6261 - DNA, 343 bp, Homo sapiens
  source 1..343: mol_type = other DNA
cctctccgctccaacctgggcgacagagtgagaccaaaaataaaaataaaagtgttgacctatagtttgtgatctagttaagtttcgagaatgttctatagttgtatggaaaacatgttaatatgtattctgatattcataagtatgttatttaagattatttttaatgggttggagatttctatatttccacaaatgtgcaaagatttaccaacatggccttggtagtcctaccctgccaatattgcaaggagaaataaataacactagcagtggttgctgctatttcccgctgaaagcgcgttgtgcagtgtctcctccttcggcagtgggggctgatggg

SEQ ID NO: 6262 - DNA, 899 bp, Homo sapiens
  source 1..899: mol_type = other DNA
tttttaaattttctttttagactcatatttagtttgcttcaaaaactaattgctctactttatgcaaacacattattttaatatatattttgttgaaaagatagtatccagatggtatgcaaggcttagactctgacaatttcagagtcaaattggggtcaataataattaagcaatattagctcatataattcttttagtgattttataggtagtattttgcccacaatttttatatccaaatttattatatcaaatccattgcttttaaacattatgctagcttaaaccagtagtgtaattaattttatacattttactacatgaaatgagaaggtttacaatatgattttttataattcaatgagtgctatctgtggtaaataaatagataaaaatgttgattttatctctaaattactgatttatacttaaggatttggtcactttttcaaccttaagatcaaagacaagatacagggaataatttttatttaatcattactttttataaaatattatcttctaattgttatatcctgaaaatttttcacagattctgtctttcaaatatgtttctactctccagtgaggatctaaattgcacacagacaaaatagttattataacaaaatccaaatataaaataaatataattttgaaaagagaaaaaatagaaagaactacttttatgttcttaagatattaatagttcacagctttgagaaatcaaagagtatctgacagtacaattactaattaacttagattcccagagagaaacatttatgtaaactactttcagggttaaggcttttaacaattgtaagcagaagattattaaacactgataggctggtaagggtgcaataaaactttatgagtaggtcaatatatac

SEQ ID NO: 6263 - DNA, 348 bp, Homo sapiens
  source 1..348: mol_type = other DNA
gagagagagagagagagatcacttgcttccttgcttcctggacgcgctggcggagctccggcgatgggctgatctgggggctcccgagcgccgctcccttggtgcgcgatttggggttatacacgacctggcgctccagtttaggattaaagtggcacttttaaagcaggtcagtcttaaaagatgccgccgccgccgccgccgcgagcgtctccttgaccttctcccgctcgagaagtgagggtgcgatctcccaaatccaagtggaatttggtgtgcacaggactgagctcaggctctcgggaacaacgaagctctccactgatccagagcaccgagattttaaat

SEQ ID NO: 6264 - DNA, 431 bp, Homo sapiens
  source 1..431: mol_type = other DNA
attaaaagagagtactgtttctttgcaaagagagttctttgaatgcttttgaaaataggttcaagatcattctacctacaattataatagctaaataactttgccttccttggacaatgtattgcattctcttcaggaagaaattaccttctattcactttgggagttagtggaagactgccctctttccaacacagtctctgatgaaagggatcaaacgaatgactgcattagtatgactgcagtgggggtaattgtaatgttgtaataatactttcacatacgtgttattacacgtattaattttatcgcgaaatcagatgaggaaatatgtgtactttcaaatcgtcacccatggaaaccgctccccggaggcgtttagcgatctctctcatttgcaaataaaagttacaaatggtgtctcttgaaga

SEQ ID NO: 6265 - DNA, 744 bp, Homo sapiens
  source 1..744: mol_type = other DNA
aataatattaactctcatatttgctgaaataatataaaatatttaatataaattgtcaattataatgactggcataaggtagaattacaacaaatgctaattatatttgcttgtttgaaaatttaacactctattaaaaggcaaaaaagtgctcacctgcaaatattaatacatgccttctgtttagtccatagaaagcccacaagtaagagattcaaaagtgaaagctatcacttacaattaaggagtttatcaaaggttttttaaaaaattattttcctgaacatcatttcaagaaagatttgacaaatgtgtctctttcttgaccagaataccaatgctgaaatttgtatgacttaaataagttcagagacatccattcagttaatagaactaagtttttgatttgcatagcttatatctagagcttctatattactatcttctctaactatataattagcacagattgaagctataatggatttcaataatagcactactttagaatgatgtatacgtctttaaatcttaagacaagcataggaaatatgtatattcttaaaaaaaggaaaatttttttaaagtttagagttaaaagaaacatgcattttctgttacatttcagattattttagttaaagaatcttctatgctttttttcttcattcttagaagactacctgcaattgtaaagcatgaatcctgtaatacttctgtaaatgaatcactattgcatttata

SEQ ID NO: 6266 - DNA, 358 bp, Homo sapiens
  source 1..358: mol_type = other DNA
cagatgaggaaatatgtgtactttcaaatcgtcacccatggaaaccgctccccggaggcgtttagcgatctctctcatttgcaaataaaagttacaaatggtgtctcttgaagagagagagagagagagagatcacttgcttccttgcttcctggacgcgctggcggagctccggcgatgggctgatctgggggctcccgagcgccgctcccttggtgcgcgatttggggttatacacgacctggcgctccagtttaggattaaagtggcacttttaaagcaggtcagtcttaaaagatgccgccgccgccgccgccgcgagcgtctccttgaccttctcccgctcgagaagtgaggg

SEQ ID NO: 6267 - DNA, 510 bp, Homo sapiens
  source 1..510: mol_type = other DNA
gaagactaccattgtcttctcttatccatagtggttgtaatcttatataattgaatatgccaagtgaaatcattatttttttttaaatgggtattgtagtaatgtcaaaagtaatggtgtaaagattagtacattaactgtaatagttaggattgttatttaaaaatctggacttttgaagagacctggaatctctattgactttgcctatggtagccattgataaatcatttaaacatagcataaatgtgtctgagactaaactccttgaattaatttgattttggattaagatagtcaaattttttgtgccttaatttttttagatttaagaagaatcaaatatgacatataagtctctcacttgtgcttggaatatgacacatgctcagtctccaagatcctctctggcggaaagcttccagagctttcgccctctgccggcggacagtggcagaacccagctttctggttgctatgggtaccgaggtaacgcggtaaccaaggaga

SEQ ID NO: 6268 - DNA, 790 bp, Homo sapiens
  source 1..790: mol_type = other DNA
ggaaagatgttaacagggtcctctgacaagtttttaaaaatgaattccatttaaagctatctatattcactttatttcttttacatgagtttatcagaaatagtattaaatttggggatcaacagatatttaattaaaagtgaactaaattttttttctcttctcaaaggctatagataaataatacaatgtgcttaatatctgattgccattgaggtgattgatttgaactacaaaaatgagatgaaacccattaaattatgcaattttttattaatgacctttttgcaaagaaaatcatgtagagttaaaggtaacagcaatttttatcatccaattacctatggctaatagtattgtcctgatatattttggcaaatccattatctttttgctggcctttctgctcagaataaagaacatatttcttcaatatccactctttttcttaaggattcaaatggaccttatatccacaggaaactcctctgactattgtataatttgatgaatgttgagaactctgtcaatgcagcagttcataggcattctgaaatatttatgacaaagtgctgtagcgcatcctttcaaattctgtgcaacttttaaaagaagcaaaataatggataaaataataatataaatttaatacttttaaaaaattctataattgtttttttctcaattcttgcacatttcatcagttgatcattaacccgattgtgttagttcttaatacaaatgtagtgaacacctgcttttgttctagaggaattaatcaagcaatgga

SEQ ID NO: 6269 - DNA, 697 bp, Homo sapiens
  source 1..697: mol_type = other DNA
ccaggctggagtgcagtggcacaatcttggctcactgcaacctctgccccccaggttcaagggatccttctaactcagcctcccgagtagctgggatcacaggtgtgagatacaactttttgcttctttatcagtaaaatggggataatgatcactgccttgttgtgaagcttaaacaagacaatgaacataaagttttagtgcctggcacatggttaatactcaaaaaatgttaatttttcttctttttctcctccttttcattattattagctgaaccagtaatgacactgcaagcaattttatcattagatttatcatattatgttatgctacattttcaacaagttggaagcttttttgaaccatctctattttatatacatagaaactaagacaaaaagaatataagaaacagattccttttatataaaaataaaacattttctgtgtataaaacataaaattccagaatttcatgcttttctctttgactaatcatatagtttcataatatatatcctatataatggtaaaagttgtctttaaataatacaagatgtcgtttaataaaaaatgagtggaatgaactgtccttttatttcaaaaaaaaccatttcaacatttacattatatatttaaactttcagttggagaggggaattggctttgtgttggttgccaggaaacatacaaa

SEQ ID NO: 6270 - DNA, 486 bp, Homo sapiens
  source 1..486: mol_type = other DNA
agaaaatgatttaaaaattacagtgttgttaatttaacaatggaaactactttctcaaaagataggattaattgaaagccaacatttactgtgacatgtgtctctgagcaatggtgggcatagagatgtatctcattcaacacatatttgtacattacacagaaattgtatgaagaaaatgcattttttcaaaaagcacttgataattttaagtggcttgaagatactgtctcaaatttcatttctgtcactcttgcttgataactcaaggttataggtgaatgtctcctttacccaccttgtttacaaatgagcatacattgctgtagtgtcgagaagtttatgcagaacacgctgagtgctgtgtttaaagtctgaaaaaaatgctgtgttagtaattaattctgccaagggcagggccagagctttccccaggctttgaagaagatgatgggaaaaacatcctttctttctcttcctgtagca

SEQ ID NO: 6271 - DNA, 326 bp, Homo sapiens
  source 1..326: mol_type = other DNA
agtccccctgctgtttctgcagctgcccggaccggaggcagcggaaagcagctgccctggtacctttccgtggagcggcctcctgccccacccaggcgtctctgctgggagccccggctcagggcttagctgctctcagggaagctgcccctctgcccagtgcgcccgccccctcaatgggtgaggcgcctgcggggcctactccgcaccctgattggcgcaggtgagggcttgccccgcccttccgcagggaattctcctactattccgcatggcctgccgggaagtgtagattgcaggaattgcgccggctgggcaggattccg

SEQ ID NO: 6272 - DNA, 372 bp, Homo sapiens
  source 1..372: mol_type = other DNA
cctcccttttctcttacttacaaagcagggggaaaatcccggggcaccaggggccccgcccccacctagaggagacttcctggaggcgttcgggcccaagccggcaggcggcatttacaaacccgctttacgccactcgcgtagggtaacctcgcttacgcccgtaggcctcagccatggccctcttctgctcggtgcagagctacggggactgggccggcgacgccggaagggcgttgtccggaatcctgcccagccggcgcaattcctgcaatctacacttcccggcaggccatgcggaatagtaggagaattccctgcggaagggcggggcaagccctcacctgcgccaatcagggtgcggagtaggcc

SEQ ID NO: 6273 - DNA, 382 bp, Homo sapiens
  source 1..382: mol_type = other DNA
tcttctgctcggtgcagagctacggggactgggccggcgacgccggaagggcgttgtccggaatcctgcccagccggcgcaattcctgcaatctacacttcccggcaggccatgcggaatagtaggagaattccctgcggaagggcggggcaagccctcacctgcgccaatcagggtgcggagtaggccccgcaggcgcctcacccattgagggggcgggcgcactgggcagaggggcagcttccctgagagcagctaagccctgagccggggctcccagcagagacgcctgggtggggcaggaggccgctccacggaaaggtaccagggcagctgctttccgctgcctccggtccgggcagctgcagaaacagcaggggga

SEQ ID NO: 6274 - DNA, 496 bp, Homo sapiens
  source 1..496: mol_type = other DNA
gcagagtgcacgtgggcgcaccccggcgccaggcggccgcgctgcccacagagcccctagccggccccggcactgggagggaaggtgcggccctggggtcggacggacagccggcatccaatcgagcccggcactgcctccccgaagggagggagcgtctgctcggacgggcccaatgagcaaggaggccgagtgggacttcctcccggaatcccgttggtggcggggcggcagaggcaccagccgacccgtcagtgacaccgctgtgcccccacccttccacccattgggcaggccgcacgggggcgcggcccggagtcctggtccctttgttgggcgcgcacccccccgagggcagccggctctgaagtatgcggagggcctcctcccggccccgggcattcgcggagaacgctgcagctgcccgggcggcgtcgatggctgcgcgccccgcgccgcgcgggggctgagcgggcgccacttcccctccgggccg

SEQ ID NO: 6275 - DNA, 545 bp, Homo sapiens
  source 1..545: mol_type = other DNA
acaaaaattatcatttgtgcataaccttaattattcccctcaagtacacagaaaaaataaatgcagtatacatttcttcgaagagacatagggaacctttgttgccctttaaaatgtaatttagaaatgtaactgatgtgttttgccaccaataaaacaaatacatatgacaaaatgaatggatactcatttcagtctgtacgatttgtttttaaattatgcagctagaggagaaatgtgagaccatttctttcctctctgccgccatctgtgggcacacacacatctaggctagtacccatgtgtctgccgcatcagtaaagaaagtgtactcagcagagtgcacacaacgtgggcgcaccccggcgccaggcggccgcgctgcccacagagcccctagccggccccggcactgggagggaaggtgcggccctggggtcggacggacagccggcatccaatcgagcccggcactgcctccccgaagggagggagcgtctgctcggacgggcccaatgagcaaggaggccgagtgggacttcctc

SEQ ID NO: 6276 - DNA, 425 bp, Homo sapiens
  source 1..425: mol_type = other DNA
gccatctgtgggcacacacacatctaggctagtacccatgtgtctgccgcatcagtaaagaaagtgtactcagcagagtgcacacaacgtgggcgcaccccggcgccaggcggccgcgctgcccacagagcccctagccggccccggcactgggagggaaggtgcggccctggggtcggacggacagccggcatccaatcgagcccggcactgcctccccgaagggagggagcgtctgctcggacgggcccaatgagcaaggaggccgagtgggacttcctcccggaatcccgttggtggcggggcggcagaggcaccagccgacccgtcagtgacaccgctgtgcccccacccttccacccattgggcaggccgcacgggggcgcggcccggagtcctggtccctttgttgggcgcgcaccccc

SEQ ID NO: 6277 - DNA, 398 bp, Homo sapiens
  source 1..398: mol_type = other DNA
ctgctgtcactttaaaaatttaaaagaggagcccgtgggcggcgggagatagctccctttctccctcgagcagatcctctttaaagagacagtttccaggacccgcgaagcggaggatctgaaagggggatagagctcccctcgcctcttgttttcccccattggaactgggaaggagaagtagaagacttcatttcttgtattaaaaatacactgttgcatttggaaatcgagacgcgaggcttttaaaaaattattattattatttttaaacatctctaaatgttgctctcctcactttaaaaggaaaaaaagtctgggcgatgtgaaagtttgtcacttcggacagtttcctgccggggcaccgtttctacgggcgcccccgcttatctacgttg

SEQ ID NO: 6278 - DNA, 315 bp, Homo sapiens
  source 1..315: mol_type = other DNA
tatacctagttgggattgattcataccttaggaattcccatttctgagtggcacttcattggtaaatcctgtaattaaaggaaatttcaacaatgtatttttttaagagtggatgtcaaatgccagcgccggcccggacccgggaagaaaaaaccagttatttattctgcttgcggaagctgcaatagcttcagtagcagtagcagcggcagcagtagcaggaaacaggagaagggtttttaaaaaatgtttttaaagtttttttccccctcatgatacaagcttgttgtcgctccaaactttttttggcggcgc

SEQ ID NO: 6279 - DNA, 703 bp, Homo sapiens
  source 1..703: mol_type = other DNA
tttatatatttatatttatgatatataaatataaatttttatatatttatatttatgatatataaatataaatttttatatatttatatttatgatatataaatataaatttttatatatttatatttatacatataataaatataaatataaatttttatatatttatatttatacatataataaatataaatatatatatttcgatttatatccttgcttaaatatataaatatatattttataaatatataaatatatttatataatataacatatatttatataaattatataaatttatatattttttaatattttatatttaaatttatatatatttatataaatatatataaatttatatttatttacatatttaagctaggaactactattttgttttaattgcgtacattttgcttggaaatcacagaacgtacttaaaactcatttaaattccagcatttttctccttattttagaagtttaacatttcagaagcagacagaattgaacaaagtcgggttttcctgatactgggattccgggattccaggtgttggggtggcccaattgcgtccagcgagtccttccgcctggggccctgccgaccccctgcctgcgcccccaggactctggcctcacccggccgtgccggggcctctgtgacgcggcgttccaggcactcggccccggccga

SEQ ID NO: 6280 - DNA, 471 bp, Homo sapiens
  source 1..471: mol_type = other DNA
attcaaaagtaattttacacgtccttccacgtgaaaggatggctttttcgcggctgactctgagcagctcaacctgcggaaaggatgtgtaataaaactactcgggagtgcctggtttctactgcggtacccgggcactttggaagaaagtgcgtgcagattcaagcttttgaaatggtttcagctctgttcaatacattatattcattcctctcaatttgataataatcacttgagaattgcgaattgacacttacatatcaaggactttacaaaaccctctccaaagtggggtttccgtagcggaaacacactaaaaaatccctttttttttttttttttttttccttcgcttggaagaaagcgtgagatcacaagccttagcttaatgtatgccggtccttcaaaagaccacgtggaacatgtgtcccgggttttaaaattctggtccagacgcaggaaaaccttttc

SEQ ID NO: 6281 - DNA, 343 bp, Homo sapiens
  source 1..343: mol_type = other DNA
gccggtccttcaccacgtggaacatgtgtcccgggttttaaaattctggtccagacgcaggaaaaccttttccaccaggtaagggcatcttggaagctgatccaccggtggggccccgagcacgcagtgcgcagctggcttcaggagagaggcccgcggtgctgtgctgccgggcctcggcgcagagccccggcagagcgccagacgctgactgccggcacgcggagcgctgcgagctagcgagccctcagctctcgtacgcttcgggggacccctggcatgctgggacatcctgtaccgccctggccggcgccggacccccatgggaaggaagggaggggcg

SEQ ID NO: 6282 - DNA, 260 bp, Homo sapiens
  source 1..260: mol_type = other DNA
tgtccaggttcttggcgtcttgaacaaaccccgttacaaattttttgggagtttaaatatcccttagtacttcatcgcatgccctgcaagggggataaggaaactattaccatttcagtatcaaggaaatgaaacttaccagcaagtagttccggctgcagcttgccgatctgagtacattcaagtacctgcgcatgcccagaacgcaccaagcattctgtcctctggcagcccctccttcaggaagccctccctggtgg

SEQ ID NO: 6283 - DNA, 813 bp, Homo sapiens
  source 1..813: mol_type = other DNA
tatctaaatataaatttttatttatgatatctaaatataaatttttatatatgatatctaaatataaatttttatatatgatatctaaatataaatttttatatatgatatctaaatataaatttttatatatgatatctaaatataaatttttatatatgatatctaaatataaatttttatatatgatatataaatataaatttttatatatgatatataaatataaatttttatatatttatgatatataaatataaatttttatatatttatgatatataaatataaatttttatatatttatatttatgatatataaatataaatttttatatatttatatttatgatatataaatataaatttttatatatttatatttatgatatataaatataaatttttatatatttatatttatacatataataaatataaatataaatttttatatatttatatttatacatataataaatataaatatatatatttcgatttatatccttgcttaaatatataaatatatattttataaatatataaatatatttatataatataacatatatttatataaattatataaatttatatattttttaatattttatatttaaatttatatatatttatataaatatatataaatttatatttatttacatatttaagctaggaactactattttgttttaattgcgtacattttgcttggaaatcacagaacgtacttaaaactcatttaaattccagcatttttctccttattttagaagtttaacatttcagaagcagacagaattgaac

SEQ ID NO: 6284 - DNA, 933 bp, Homo sapiens
  source 1..933: mol_type = other DNA
taaatttttatatatttatgatatataaatataaatttttatatatttatgatatataaatataaatttttatttatgatatctaaatataaatttttatttatgatatctaaatataaatttttatttatgatatctaaatataaatttttatttatgatatctaaatataaatttttatttatgatatctaaatataaatttttatatatgatatctaaatataaatttttatatatgatatctaaatataaatttttatatatgatatctaaatataaatttttatatatgatatctaaatataaatttttatatatgatatctaaatataaatttttatatatgatatataaatataaatttttatatatgatatataaatataaatttttatatatttatgatatataaatataaatttttatatatttatgatatataaatataaatttttatatatttatatttatgatatataaatataaatttttatatatttatatttatgatatataaatataaatttttatatatttatatttatgatatataaatataaatttttatatatttatatttatacatataataaatataaatataaatttttatatatttatatttatacatataataaatataaatatatatatttcgatttatatccttgcttaaatatataaatatatattttataaatatataaatatatttatataatataacatatatttatataaattatataaatttatatattttttaatattttatatttaaatttatatatatttatataaatatatataaatttatatttatttacatatttaagctaggaactactattttgttttaattgcgtacattttgcttggaaatcacagaacgtacttaaaactcatttaaattccagcatttttctcctta

SEQ ID NO: 6285 - DNA, 372 bp, Homo sapiens
  source 1..372: mol_type = other DNA
acaaaacacttctgtgtatccctttagtttcctcccataaaatataagcaaatttcaggagagataatagcaaagacaagaactgtctcttgttcgtcattgaatatttagaacattaactggcccacagtagattctttaaaactatttatggaatgaatgaattctttactgccaacgctgaaggcaaactcctctggacagctttgcaaatggccagtcccttttaaaggcatattaagtcttcaggtaacttgacagctgtaatttaagatgacttgtatctcacacaatgaaatagggcaaagttaaaaactcaaattgcttttcattcttattttcatgttaaacattaacagcaataaaaaaaca

SEQ ID NO: 6286 - DNA, 472 bp, Homo sapiens
  source 1..472: mol_type = other DNA
agcatcaaaaaaaaaagaacatctttctattctgaattttcccaattttctacaattaaaaacgctttaaagatctctataaagtcagtcaagggaatttctatctaggctctaaaataacaataaaggctacagtgattgaaattacttctggattctaacagtgagttgtgagaagcactccagcttgttttaaacgagctgtattaccccgcagatcttttacatggaatgtcatgaaatatacagtacattgcaggaactgccaccctaaatgcacagactctgactctaaggggatggtctgcatttagtagcttctcaggtgattcagatgctcagtcaggattgagaaaccagctccagttcccgcacagcaggagcggagggggaccgctggccccgccaggcggccgacctccccattccaggggcgccagccggcggaggcggggccgccccctcctcgctc

SEQ ID NO: 6287 - DNA, 470 bp, Homo sapiens
  source 1..470: mol_type = other DNA
gagccactgcgctggcctaattgttcgatattttaaatgtttaaatgaccggcaagtcgtaggtgctcaacaaatatttgttgaatgacaacaaattagcactgttgacacaaaaaaggcaatgcaatatatgggctatttaatatttgcagatttttatttaaaaatctgaattcacagtacacctgggaacatggggaccaacgtggaccatgttggccaggctggacaactgccaagtttacatttgcagaggtaagggaaggagaggccctgacccagtggcccccgctcgcccgcctgctggggagatggggagctcctgcggaagggggtctcactgagcccccaagcggctcccgcactgcgcacccctagccggcggggggtgaccgtcccgccggcaggcggcgccctccggcccttgtttcgttgggcccggacgggacgtgcgcgctcaaaggttgccc

SEQ ID NO: 6288 - DNA, 517 bp, Homo sapiens
  source 1..517: mol_type = other DNA
tgcagatttttatttaaaaatctgaattcacagtacactgggaacatggggaccaacgtggaccatgttggccaggctggacaactgccaagtttacatttgcagaggtaagggaaggagaggccctgacccagtggcccccgctcgcccgcctgctggggagatggggagctcctgcggaagggggtctcactgagcccccaagcggctcccgcactgcgcacccctagccggcggggggtgaccgtcccgccggcaggcggcgccctccggcccttgtttcgttgggcccggacgggacgtgcgcgctcaaaggttgcccgtctctgacgcccgcatttcctggtctggagccggctgagccacagcagggtcgccgcggggtcccggggccgtgctcccctgcccctcccgggagcgcgcggggcggggcggggcggggcgggaccaggcgggcgagctgggccctcgcccctccctcgggcggtcacctgggcacgggcgctgcaggtgtcgg

SEQ ID NO: 6289 - DNA, 482 bp, Homo sapiens
  source 1..482: mol_type = other DNA
atatctacataatgcagccataaaaacaatttttaaaaaattaaaaaggagatagctattaacaaagatgaaatgctttctaggatgttttaaggggcaataaagagtcacaaaaagtatatctaatgtgctaccttgtatttaagtttttatatagttttgattttgagccatgtaaatattttacatattcaattatataaaattaaaatgaactaaaaataatgaaaatcattgcactatatcaaattgattacataaatacaagaattcagataactttataacagagtactcagactgtataagcttagtggaatgaatggaaaaaattaggctttatttacctggttaaaactctgaaactgcttaatatgtattgtagtttgaacaaatgaatcaatatactaatgtcattgggttcattgaaattctgtattcaatcacagtttgctgtacagattatcccatcacctaggcat

SEQ ID NO: 6290 - DNA, 358 bp, Homo sapiens
  source 1..358: mol_type = other DNA
ttcagaacacattatattgtatgcaaatgtcatctttattatttcatatttatatttaaatgtgttattttacttatctttatatgtttgagcacttgctgctggttgggaccctcaagccccaaagctactctgcagtttgcataggctttggtatattttagatattcttcaaaattattattattattattattattgttgggctttccatattctttaaattttaaatttaacaatctaagataactttttatatctttattacagatatctccccaagaggaagatcctgacgccacgtgacctctggctccgggggctgagccgaccccgcctctccgcccgccgccggggg

SEQ ID NO: 6291 - DNA, 386 bp, Homo sapiens
  source 1..386: mol_type = other DNA
agccagtttttacagaatccatgcaagggcagtctacaagggcctagatatgggggcccccaaagaagaaaaatcggtttttcatcatattttattatatttgttacatatgttattaaattatttccataaaagaggttatgctgagcaggtaaccatatatttcatcagttaataaagtctagaacgtgaggaagcccagtcatttccaggaccttcagatgctccaccccgacagctccagggagcacgctggagagacagacttcagcgggaaggcgcggcaccctacgcgcaaggaacgccaagtcggccgaccgcagataccattgtccctgcagggaagagactttagtgaaagcacccctctcggcgtgtttgatgcc

SEQ ID NO: 6292 - DNA, 321 bp, Homo sapiens
  source 1..321: mol_type = other DNA
agtaattattcttatggctggtaaaatgactgctaaacatttattaataattgcagttttggaattacttttttattaaccagtcatgttggtttctaaaaattgttacttctggctagacacaggagccaggtgctgagacctggtgccaagtttcaggactgtccagtcttcacatcagatcttcagctaggccttctgaatattctcacagttagaaaatgaacattatcaataagccgactgcaaatgtgggcccccaaagctcgagtctcctgaattttgtgggagcagctctgcagagttcaatattcagagggt

SEQ ID NO: 6293 - DNA, 828 bp, Homo sapiens
  source 1..828: mol_type = other DNA
tggccacccctcccgcccggcccgatggcggatggaggtcagccaggggaaggcgtctgggtggaggccgcccgggcgaggccggggccgccggggcggggcggagcgccggcagctggctgggcggccctcgggcaggaggccccgcgggggcgaggggcagcccaggagggaggtcccgcgggggcggggagcagagccggccccgggggccctgcagggcggccgccgcccggctgcctccggggcggggcggcccagctgcggccccgcagggggagggtcgcccgtgcctgacctcgggcggcggcactctgccgggcgggcactgcctccgccctgccggctgctggggtcgcgcacagtgcaccgcgcggctgccctgccccctcttccccgctgcgcggcgtccgagcggccagggcgcccccgcgtctggcccatcaccacagagcggcgggtggggcgggggcggggcggtggccccagacagccggctgggcctgtctgcgccgggtgcaccgcagacagcgccgcgcgccagcttcccagacggcgcgcggggccagaagcgccgggcgcgcgcctggggggaggggcacgcgcgcgagacgacggggccaggggggcgcgacggcacgcgcgtccacgagggggccgggagccgcgaagtggcggcggcggcgacgacgccggcgggcccgcgcgcgcggcgccgccgctggctccgttcctccccgccgccctcgctctcccccgggcggccggagacggcggcggcgtctgcgggaagagtgacgtgggcgggccgaggactcggtgacgtca

SEQ ID NO: 6294 - DNA, 417 bp, Homo sapiens
  source 1..417: mol_type = other DNA
gtgcagtggcacgatcttggcgcactgcagcagctggggttacaggcatgcgatccgcccaccttggcctcccaaagttctgggattacaggtgtgaagtatgtgtcattgacaattgttcctacctcaaaggctgttatgaggattaaatgagctaatgcatgtaaaatgcatctgcataatatataacacagctcgataaatgttgatgatgttcaaccactgaaaagcatcgttttggcgtcgggggactgtaccgagcgcccttggagtgctcgctgcggacggggtggggcggcccaatggcccccctggggttactctgccctcccggccccgccccgcgattggccggcgcgccccggggctgccgccgattggtgctcgccggccggagccgcggggcttaaagagggg

SEQ ID NO: 6295 - DNA, 666 bp, Homo sapiens
  source 1..666: mol_type = other DNA
tccccgccgccctcgctctcccccgggcggccggagacggcggcggcgtctgcgggaagagtgacgtgggcgggccgaggactcggtgacgtcattcggagccgcgccggcacagccgaagggagcgggcgagcggcgacggcggcggcggcgggcacaggtgcggctccggcttacggcggcgacgcggcggaggcggcgggaggccagaggcgctcaccctcctaggagcccgacggcggcgacaggggcggtggggaattcacaaagctcgtcgagcttacccgggcaccgaggcccgagtagggggtgcggctgatcacgcttcgttggccccaggcggtgggcgccggcagggcagggcgctgtagttgacgggagccgcggggaccccggagacccggacgcccgtcaccgcccccctcccccagtccagcagcgctccgcggggatgccctggtctcgacccggtccgtcagcccccggcggcgcagggatccgcgcccggcgcctaaactggcccggggctggcgcgggcacccgagaggtgcgcgggggggtggatttccacagtccttcccgcggcccccgcgggggggcggtgttgggagggcgggttatcccaggctcgccggtgggggtggggggactcctccctttacttcc

SEQ ID NO: 6296 - DNA, 577 bp, Homo sapiens
  source 1..577: mol_type = other DNA
gtaaaatgcatctgcataatatataacacagctcgataaatgttgatgatgttcaaccactgaaaagcatcgttttggcgtcgggggactgtaccgagcgcccttggagtgctcgctgcggacggggtggggcggcccaatggcccccctggggttactctgccctcccggccccgccccgcgattggccggcgcgccccggggctgccgccgattggtgctcgccggccggagccgcggggcttaaagagggggcgggggcgcgctgcccagcagcgctgctgtccccgccgtgcgcccttcgccgctgagctcgcagcctccggcgctccagtgtcccgcctcgggccgtcgccctccagcggctcgcgagcgtgggagacgtacctgggcaggcactgtccagcccaggcccaggcacagccgtgaggggcgaggcacggggacatcctggcggccaccatggtggccacgtgcctgcaggtggtgtgggctggatcggggtcatcgtgaccacctccaccaatgcccacctgccgcaagctggatgagctgggctccaaggggctgtgggccg

SEQ ID NO: 6297 - DNA, 477 bp, Homo sapiens
  source 1..477: mol_type = other DNA
cggctcgcgagcgtgggagacgtacctgggcaggcactgtccagcccaggcccaggcacagccgtgaggggcgaggcacggggacatcctggcggccaccatggtggccacgtgcctgcaggtggtgtgggctggatcggggtcatcgtgaccacctccaccaatgcccacctgccgcaagctggatgagctgggctccaaggggctgtgggccgactgcgtcatggccacggggctgtaccactgcaagcccctggtggacatggtaaggacccgagcttggccccatagtggcaatgtggccggtggtaacactggctaataggaactgagtccgtgttaattactgcggtcccgctcccgcccggcctcccccggggcgccgagccttcgcgttaggttccgcccggctgagtttctgggcgaagcgcccccggccaggttagagcccgcgccagggctccccccgctaccccc

SEQ ID NO: 6298 - DNA, 425 bp, Homo sapiens
  source 1..425: mol_type = other DNA
cggtttcctcaagatggggagaaaacaatagctgcgggcagtgcttgcctggtttgtccttcattttgaactttcagaaggccagagtctagactcagctttggctaatgctggtgttggcagacccgggccagcctccggcatccaggactcaccacggttgtcttcttttaaaagttaaaatcagatcaaccgattatttgaggattaaatgagataagaaatgtaatctcctttgagatagtagatgcttcatgaatggtacctatagtattttgaagcataaaattaactttgttttcttctcctgaaattaactttactgagcattcagtagagaacaaaggctgtcctccagaggggagtgcatgtggggggggggtggggggcggcgctagtccttcctgccttccccctccctcata

SEQ ID NO: 6299 - DNA, 434 bp, Homo sapiens
  source 1..434: mol_type = other DNA
taatacaattaagtaagaatactaattttagaattataactgtagatatgaagtgttgatatacaagtaaatacaaataaatattttttggacttaaatggtttatttctgttacctgctgaaaaaaataaggacccagcagtctacttcttctacaggttccctgtgtgcgcccaccgtgagaccaccatcgtatcctctgctgcgctggagatgcccaggcgcgggcgctccccgactcatccacgtataagagggctgctgggcccagggccctaggtttgctcgtcacagtgtggggaagcccattcgaaatctctagctcagataatgtgctgtttattaaaaatatattatatatattttgtttctttaaatttcaaatgttttgcaaacatcacggggaagagaaatacaagatacttttttttttt

SEQ ID NO: 6300 - DNA, 424 bp, Homo sapiens
  source 1..424: mol_type = other DNA
cagcaaacattcattgaattttaactgggagcattttttatgtaaaacaacaagaagcaagcactacgtgtttttccctttgagacagtctcactgttacccaggctggagtgcagtggctcgatctcgactcactgcaagtcctgcctcagcctcccgagtggctgggagtacagactttttaaaaccaagggggtctcgaactcctgggctcaagagattctccggtgggcgtgtaagcatatatatacatgatttttttttcccgaggacctggtttttcggcctttgtagaggccactgcaattcgggttcaaccacagccacccgcgtgtgcccgcggaaagccgatggcctactctcgtccggcagcgcaaatctgacgctctcagcgcgtgacgcagcacgctttgatataaatgca

SEQ ID NO: 6301 - DNA, 302 bp, Homo sapiens
  source 1..302: mol_type = other DNA
atcctctgctgcgctggagatgcccaggcgcgggcgctccccgactcatccacgtataagagggctgctgggcccagggccctaggtttgctcgtcacagtgtggggaagcccattcgaaatctctagctcagataatgtgctgtttattaaaaatatattatatatattttgtttctttaaatttcaaatgttttgcaaacatcacggggaagagaaatacaagatactttttttttttttttttttttttttctgggtgtttcttcccttcaaggtcatttacttgtacgagacagaaaa

SEQ ID NO: 6302 - DNA, 275 bp, Homo sapiens
  source 1..275: mol_type = other DNA
ctctcgggagttcccaccccagggagcagtgctgactctacaggggcgggtcctcaggacctgcggtgccgatactgcacctgaattctggcactcgctgaatctgcgcgcctcgcgaggccacgcacctgatggcaggggccattgctttgcttggttcccattaaagtcgactgcgacccgaacgtgcgagcctcgggaatccccgaggtgacgctccggggcctatcccggaggaaagtgtggcggccccgccccgtctcttggaactgccg

SEQ ID NO: 6303 - DNA, 399 bp, Homo sapiens
  source 1..399: mol_type = other DNA
aactggttccatttgagcctcagtgcaatctgtggccccagttgccacatcgtgcttcttgacatatatgaagcaataataataacaaccgctatttgctaagtacttattatatgttgagatatgccaaacactttcacatattatctcatttaatccactcaacaaaacaaaatgtgtgttatttctattttatcaggcaaaaataaaaaactaatcagagagccacttgcttaaggttatactccccagtaaaatgttgagttatctgtggagcagagtgcagtgtgcctcccatgctccacagcacagcacacatgccttgaaatgtggcaaagcacttattgattagattttggactctcaggcctgcaatgcataactaggcctaggcagagc

SEQ ID NO: 6304 - DNA, 424 bp, Homo sapiens
  source 1..424: mol_type = other DNA
ccctttgatttctatgaaattagaaagaaatgagtgtttcctttcctagtgtgaaagaaacaatgttttgttgtattctcaaaataaaattataatttaactatacacatttatcacagcttttgatatggatgcatacatttctggattgaccacatgggtcactaatatagggagaaatggtaagactgatgtcaaattgctttttccccattaaaatgcttttgcagaactgcttccctggatattcagcacactgcctgcagtatgcctggtgattaaaggctaaaggtttcatcatactcatggaaaactcaaaattatctcttcctgccagatgaaaatgaaacacctatcattttggaaaatttcagtggcactagaatgtggtacctccattctccagggaatgatgacacaccaa

SEQ ID NO: 6305 - DNA, 427 bp, Homo sapiens
  source 1..427: mol_type = other DNA
aagtgagtgaagtgaaatcgctctcacgtacacgcagcctgaaagaaatgctgagtcctgaggcggcgtgtgttgccctcggaattgcggcacgagcaagtcctgggtgtggcgatgccaagagagcgctcagacccgggatcagccgtccggcattccggggaccgcgggtggacccgaccccgccgcagctgcaaactgccgaagcgcccagctgggtgcactgtgcactccggccccacaaataattaatgggggagggacattttgctgcagtgcaccccttcgggttcggcccgaggagcccgcaaaagcctgggcggaaagggtgcgcgcccctcccccctccacgctggtgcagagggaccgggtcaggaagcgcggcctctccccagtcgtccacccccaccctccccctgctgagtgg

SEQ ID NO: 6306 - DNA, 430 bp, Homo sapiens
  source 1..430: mol_type = other DNA
ctattcagaatacctggacagcagtctgttaacctcttagagcctgtacaacagaaatacattacatttgacttaatatgaactcaacagttatttaatgagtccactgtgctatattttacggatataaagataaaagtaagaaacagtctttgtccctgagaaatctcaacactttgggaggccaaggattttaacttaagtataataaaaattgctcatactatgttagttgtatgaataaagctcacaaggttgctgtgggtaaatgaaaaaaagtcagttttaggcttaattatcactgagtaaacattgccttttaagcctcaggtttctttagtctggctgaaccaaaaggagtttctgcttagctaggggtaatgggcgggccccaaatccccatgtggtcccgacatcattgacatggcgg

SEQ ID NO: 6307 - DNA, 371 bp, Homo sapiens
  source 1..371: mol_type = other DNA
atatttttcatttcatgcaatgccatgtgtgcagtaagacattgcttatgacaactggttctctttttcttaagactttattctaagtggactgaaaacagcaaaattgccgtgtttgaacggttccatttatgctaagatttctgaattataacaggaggtgcaagaaggcttataaagactccagctccagtctcttaattatgctactatcgaggcccagtcgcgagacctgccccgctggggcctccagccggcaccgcgacgccccgggacctggcaccgcctcgctccacccctgcgaatccggggcgaatccgggcggagagttcctgccggccgcgcagcgcagagccccctccggcccgccc

SEQ ID NO: 6308 - DNA, 698 bp, Homo sapiens
  source 1..698: mol_type = other DNA
gggccccaaatccccatgtggtcccgacatcattgacatggcggcggcggcggcggcggctggaggagcggcggcggcgggagcagcgaagggggcggcagggatcctccaggctgccggctgggaaggcgtgggcgacccggtgtgtggcgcgcccagagccccgcgtttcagcggagaccgggaccccgagcgcgatcgccgggtcccggtgcactggaaagccccggcctgacgccgagtccgccaaagtgcgtccctgtcccgggagcgccctgggcttcccggcaaaaacttggcgccggagtgctggggcgccccgtgctcgcctgggcaccccgggaacacgggacccgggagggggcggcccccgccttgctgggctggggtcccccgcctgtgccccctgcctcagggggcagtggctcgcggcctccccccacgctccccctcccggaatctccgcggcaggaacgctgcccaggagggggggctggaagttggggccgcctctccgcgccggcgggggcggtcgggggcctcgaacccggggatgctcgcggggagggtcccgagcccgcgccggcctggcccccccgtccccggctgggcctctccgggacactccccgccccgctgctggccacctccgagcaccctccccgtcctgccccccgggctccccccgggctgggggc

SEQ ID NO: 6309 - DNA, 632 bp, Homo sapiens
  source 1..632: mol_type = other DNA
ttatgcttataattggatgtaaaacgcaagaacgtttttaaggttaagaactttttcagacaactgtgattttacttcactaatgaacacatatcagaactgtttgtgctcaaccaagcagggtactgctcatgtctcaagaggtttttctgcatgaacacaagccatggcaagagtctttcttgcacagctgtatagaactcagctgtaaaattagattttattggcataaaaacacagtgattatcagcactgtgtgctcaatacattttacttagattcttccttttatgcagaaggctcaaaaatgaaggaaacaggtttttagaagtttttttatgtgtctttttttaagctttagtttaatcaatattatactcccttaagatcagaaaggaaccttaagggctaatctataatattgtcattttataagaggaaattaattactgaagttcagagctaattattttattgacaaatcccagattagaactcatgttttccaatactagttttttttagcataggggatgtgaaaaattctaataacagttcttagtcccgctacttaatttgattttttaaaaagcaaagcatgggcagagccaatgccaaggcattggtgtagt

SEQ ID NO: 6310 - DNA, 263 bp, Homo sapiens
  source 1..263: mol_type = other DNA
cagaagtcccaaccgggtgggagatccgacactggtccccgagtccccagctcgctgtgtgaccttggacaagtcggtatgaatacaaacacaaggtccttcttttcgccagctgccccgggtgtgacctgtccttccggggcacactagtccagcgtcgcccagggcttcggagagagcgcctcacgctcccgcttcgcggcgcctggtccctgcggtccccactcgctgcgagaaagcagtgggtcactctctcacccact

SEQ ID NO: 6311 - DNA, 281 bp, Homo sapiens
  source 1..281: mol_type = other DNA
tctgagggtaattaactccctgtaacttcttttcctaatctgtaaaaggatagtgacatggggttaatattttggaaaacatccacatgtttctgtccagcctaacacacaggcatgttgtcttggtagggaatatttagattctgacattcaagatggaattatgtagcaagaccattgctatgagacagtatttcgtttcaggtcataaaaattatcttataatttagaaaacaggcctgggcaaggagaggagcttctttcagtttccctcctttcca

SEQ ID NO: 6312 - DNA, 498 bp, Homo sapiens
  source 1..498: mol_type = other DNA
aactatggaaaacccacctggtgggggtgtatttttcttaagagattgtgttatatggtatcatatttagaaaataaagaaattattttcataatagcaacgctaatcctagacttgcaatttggctccaaaaattctagaatctcgtggcatatttttatcaaattcaagcttatctttaaaaaaatccgagaatttttctaatttctaagaattgattctaagagcgcagtgctttaaataatagcatttaaataagcggctgctgatttgaagtcctggggagtccgagttctaggaccggtccttggccctgccacaaacatttatctctggcggcactgatttaagcttaaaagatttggtatcgtttaaaaaaaaaaaaaaactttcctcaggaagtaggatgtttactgagtaaatatgcgacgcccgagtcgttgggcttagcacaagcggcgcctgccgggacttggagagcgtcgaccaatcaccgcc

SEQ ID NO: 6313 - DNA, 457 bp, Homo sapiens
  source 1..457: mol_type = other DNA
caagctgattgcatttatgttgagtaattgtttttacaaattgtgttaaggattttgaagaaatataagcaagttgtacaattatcacttctccaaaaaagactgatttttctgaaggttctggtaataagatgctgtatgtcaacaaagaataagataaattatttactcccatattgttaagctttccattttgaagccaagttgtaaaaagctaacttacatttaggtgattgcctaattttcagcttttgtaaagtgatgcaacaacaacaacaaaaagatacttttgaatgtttcattaattgtgtaataagataccatcatcaatttttccagtcaacaaatatttactgtgttttgagcacattctgagtatatagcagtgaactaagtatacaaagtagagaaggcttatttgcgaacaaatatttaagctatgatctgaataacataa

SEQ ID NO: 6314 - DNA, 690 bp, Homo sapiens
  source 1..690: mol_type = other DNA
ataatttattcaacacactgcagttcattcatttttctggatatatgtcatatttcaataaaaagtgatgcatgtatgatttgttaagctagtcatacaagtcaggtaaagtgcgtttatgtttaaatatacataattacatatataacataacatgttatataatattatcatataacatgttagtataatacatgatacatttgatatataatatacatttatatattctatataatatacatattttactctaaaacatacataggtaggagcttatgagatctcataaatggttttagagtaaaatgtttaaaataattttctttaaaagagaacaaatacaaaactttataaaatgtatgtataaagtctatattgtatctgtgtagttaaagagacagaatggtatgatttttttttaatctattcatagtaaagagactgcaaagatatacatgaaaatgttttcagtgcttctctttagaatacagataatttttattttatgtacatctttctgtatcttccagattattttattgatcatattgcttttagaatctgaacggaaaaatataaataaccttgtttttattattggaaacatcaccagtgacccgcgccacttgtgggcgcgatgggcctcgtggcacgggacgtttcaagtcctggcgtccccgcgagcaa

SEQ ID NO: 6315 - DNA, 416 bp, Homo sapiens
  source 1..416: mol_type = other DNA
atatagcctaaaatttacttttaaaaaaagaaaaacatgacaagattctaaaacgacatcaagacaatgtggtactgaattttgtcatatttaagactgtttttttaaaaatcagagcggaaatcttggtttcttacttactgttattaattaatgagtgagtgatagggaaatgttaaagttcctttcttttacttgaattgtggagattaaagcatacatgagattgagataacttagtgttccaacttacttaaatgattagctgtgatttttttaaaatcaaggccaaaggcagtggcgttgcgttcaagagattactctgcctctagctagaggaagcagctcagagcgtccgacgcctcgcgtctgggcggtcgtgcccgttcactcacacgccgctctgagtggtttgg

SEQ ID NO: 6316 - DNA, 296 bp, Homo sapiens
  source 1..296: mol_type = other DNA
taacttagtgttccaacttacttaaatgattagctgtgatttttttaaaatcaaggccaaaggcagtggcgttgcgttcaagagattactctgcctctagctagaggaagcagctcagagcgtccgacgcctcgcgtctgggcggtcgtgcccgttcactcacacgccgctctgagtggtttggccttcacccctcctgccgccgcgggcgctgcggaagctgcgggcggaggacgctcggctgccgcgggccaccaagatcgcgcctccgaccggcgggaggggcgcgcagggga

SEQ ID NO: 6317 - DNA, 351 bp, Homo sapiens
  source 1..351: mol_type = other DNA
ctccccgcctccccgcggagggttgacccttagtcccggcctgtgggcgggcgggggagcgccgcggctgtaagccgaggatcaggcggcggcgcggagagcgcgcccgggcggccagcgccgagcgcgcggagctggcgtggggacgtccgcgagcgactgtgcggcgctcacgctgccagagcccgggcggagtgcagtcgcctcctagagcggcgccccacctagagctgtgccctgggaccacagagccctcggcggagcgcagaggagctgctttcagccttctgctctccccaggccctaatatattatgcattattgggcaataaactctcctgggaagagaag

SEQ ID NO: 6318 - DNA, 505 bp, Homo sapiens
  source 1..505: mol_type = other DNA
ccaaacaaggcttctctgagcattgtgtcttctgtcagctggctacttctaggtaactgagtgacattttacagtcgatataatttttccacatgctaaatgttaataaagtaaccaggataatactgtgatatttttccttttgatgatattttacttagaaaataaatgggcagaatggaaacatatagcgcttcataacatttttctctattgaataaagcaatagactttgctattgatacttaccaattatttagtaatcatgtgagagatgtcaaaggaaataaaaatgcagctctattgtttcaatatttctttctaatgcttgtatttagaaagataacacatgctagtgaatgcagtaggtaaaataatggattctgcttggattctatcataggaaataattctgacttacaaagatatattaacattgctatggacgaccaatgatctaatgcaaatttttgctcaactttgtatagaatatagaaatataaaa

SEQ ID NO: 6319 - DNA, 486 bp, Homo sapiens
  source 1..486: mol_type = other DNA
atcttgaggtcattgaatttaaaagcattcaggtaagcaacattgaggcctatgaagagattatctaacacacacaatcatattcctttaaaggaaataaaattttaaatgtttttctaaaagcagcatatctgcttcttttaggtcgatagttattaaagaaacaaatacaattgctttgaaatcaccgaattgcctcaaattggcattttagctactaactgccattggggaaatttttgtagacaaaagattcagtctttaaaaacaaagaaacatcagatgctgtattcattaactactgcagtactgcaatatcgcctgagaaattttttttttttttgcgaggagtgcacccagaatccaaaaaagattttttaaaaaagagaaagaaagaaaccagagttttttttcagtcacccgaatgaaattgtgaattcatttttgaggtcaatttccaatcgagataaatctattggattagta

SEQ ID NO: 6320 - DNA, 387 bp, Homo sapiens
  source 1..387: mol_type = other DNA
caattgctttgaaatcaccgaattgcctcaaattggcattttagctactaactgccattggggaaatttttgtagacaaaagattcagtctttaaaaacaaagaaacatcagatgctgtattcattaactactgcagtactgcaatatcgcctgagaaattttttttttttttgcgaggagtgcacccagaatccaaaaaagattttttaaaaaagagaaagaaagaaaccagagttttttttcagtcacccgaatgaaattgtgaattcatttttgaggtcaatttccaatcgagataaatctattggattagtatggaacaagaattaccgggtgctcgagatttcttggaccatttcagcttgaatttgacggcgaagtgttgt

SEQ ID NO: 6321 - DNA, 377 bp, Homo sapiens
  source 1..377: mol_type = other DNA
ggtaatttgtctaatttactccacttgaaaaaagaaaaatcttgatttatattcgtatcttcttccaattttaaaataacaattaacatttagcgagtgctattattatcctgtttcatggatgaaaaacaacttgcgtatgggctttaaaaattcttttaaaagttttattagattcaaagactatgtataaaatatatgcaaattataaacgaaacatatcttttgatggggggggcaagtttccagttttgcccattaaaatccttcccacttgccaagcggctgacgctcgcggcggaggcgccggggccgccgctcgggggcgagggttcgcgccgcggctcgcgcccgcttctcccgctttacggctgctg

SEQ ID NO: 6322 - DNA, 600 bp, Homo sapiens
  source 1..600: mol_type = other DNA
atctttgctttctcacatacaaatgaatatttaaagatacgtctcaattatttttgttgagtcacaacagttaatctaagttaatattcaccatattcaaaaggcaatgcaaatatcatgactctccttttacaaactcagttaataagttgcataactgatgtcagtacatgatctgggacatcaatgctgcagttcagaaaaggaagaggaaaattagaaattgttttttgtttattgtccattattcacagtgtttagcactcgtactaatcatacatacttcatacatactagatattattctattttatagtttaggaaactgagtctcaaagaagttatattctttgcttacagtcacacagcaagtattagagataaggtttaaaaaataaatgtcgtgtaatacactttaaatttgatttctgtaggaaaagcttttaggggaaaatataaatatgtttctggactaaagtgaaagtagagaattaaaagtttatatcaaaactgaaacaaagcaatgttttgtgaagtacactttaatagccatacagtggataagatatgatctcttctcctgcaggtagtatactgtta

SEQ ID NO: 6323 - DNA, 585 bp, Homo sapiens
  source 1..585: mol_type = other DNA
ccccgcgcgccgcctccccccgccgccggccgcgtgcgcccccgcccctccccccgcggcgggagcacctccgctcgccacctggggacccgcgccgcgctccccgcccccgcccgcccggcgcccatcccccgcgccctccgctcgctggggttataattgcctctcaccccccggaggggtcctccattcccgggaggggggagcggcgttggaggccaccgtttccaggtaagcgctgggggccggaccctggagtgggggcggccgggggcctgggcggggggcgcgggccagaggcggccgggggcgctgggccgcggggggatgggcgcactgggaaggcagggagggcacttggggcgcccccatccccccgttttcaaaggatttgcagcaaattgaatcaaggagccatcatgaggccgactcctttataaatctcccctccccgggcgcgtccccggcccgggcgcggcgaccccggccggcgtgctgggggctgcgggcggctgttggggccgcgcgtccggggcgggggcgccggccgggggaggggcgcgcggcagccgggccttgctccgg

SEQ ID NO: 6324 - DNA, 720 bp, Homo sapiens
  source 1..720: mol_type = other DNA
agcaccttaaccatatgtatttacgcacacaaaggtgatgcccgccgcgtgtgcgcccagcccccaacgccgccgggccgccccccggacacgcgggagcccgcggcgtccttggggaaacttcgccggcggctccaccccggccaccgcgcgggcctccccgcccccacccgtctcgggcccagcggcccacacccgagcacacccaggccggcccgcggcggtgggggcggggcgggcggcccggggccccgaggcgccttcgagtgcccgcggggctcgcctgatttttaaaagaatgcgccgcacagcccagcccccagtgccgccagagcgggccgggaaggagaggagcgcggccgctggagcccccccgccgcgccgccgccgcctcccggcgtccgcggcgcccctcccccgccggcccctcccccgcgcgcccgcccgcccgctcgcccgcccgcccggcgcaggccgctcgggtttgttttgctgcgcggccgccgccgccgccgccgccgcgggcctcgcgagctcattggctgctccgaaccgtccccgcgcgccgcctccccccgccgccggccgcgtgcgcccccgcccctccccccgcggcgggagcacctccgctcgccacctggggacccgcgccgcgctccccgcccccgcccgcccggcgcccatcccccgcgccctccgctcgctggggttataattgcc

SEQ ID NO: 6325 - DNA, 388 bp, Homo sapiens
  source 1..388: mol_type = other DNA
gcagaaatacttaattttaatgaagtccagattatcaattctttctttagaagatgtaaggtctgtatctagaactatttgttgaaaagactgtctctattctgaaaatattactttttcatcttattgcacatggatatgctcatgttctcctgactggttacaggacttttagccagaaattgctataaaaatgggcttttaaaacaactctgttctattacttgatttgaaaacaaactaaaccattttaaacagttactaaaataatatatcagagatgtcaagaagtacattatctttgcacactatatgctatattgatatgcaagcttatgacatgccttgtttaagcaggggaaaaactagttagaggaggagcccttcc

SEQ ID NO: 6326 - DNA, 688 bp, Homo sapiens
  source 1..688: mol_type = other DNA
cttctactgtggatgccacgcaggtatatatttagtaaacatttagttacattattttatttttgtgaaataagaactgatcgtgcttatttgggcataaatacttcaattacagctttgtgtttagtatcaaactgagcaccttaaccatatgtatttacgcacacaaaggtgatgcccgccgcgtgtgcgcccagcccccaacgccgccgggccgccccccggacacgcgggagcccgcggcgtccttggggaaacttcgccggcggctccaccccggccaccgcgcgggcctccccgcccccacccgtctcgggcccagcggcccacacccgagcacacccaggccggcccgcggcggtgggggcggggcgggcggcccggggccccgaggcgccttcgagtgcccgcggggctcgcctgatttttaaaagaatgcgccgcacagcccagcccccagtgccgccagagcgggccgggaaggagaggagcgcggccgctggagcccccccgccgcgccgccgccgcctcccggcgtccgcggcgcccctcccccgccggcccctcccccgcgcgcccgcccgcccgctcgcccgcccgcccggcgcaggccgctcgggtttgttttgctgcgcggccgccgccgccgccgccgccgcgggcctcgcgagctcattggctgctccga

SEQ ID NO: 6327 - DNA, 517 bp, Homo sapiens
  source 1..517: mol_type = other DNA
ttatcagacatctgagcaattcagatattcagttattacatataataaaataatggatgctatgacccgatcattagagcatttctagattacaaaactaccaataattaagtagtggtgatttataatcattctctctataggccagtataatacatgtccatctagtaactactacaatactattgctcctggagtagcaggaagaaaaatgaataaattgtgtagttctattaagaattgcaaaggtacttaacttttcagagtaatcttccatgatcatgactgtccaaagtggagcgcttcagcctgaaacacaaagctttgaagtcagcataaaataaacactttatgcactgaatgatccattcagtctagttgatctataatttgagattttgtgtacatgtgtaccttaagtcatatctcagtaataatgagaacttttcctatttggattgattttcatacctaactccagaggaaaattgttttccatatagaaaatatctatttg

SEQ ID NO: 6328 - DNA, 502 bp, Homo sapiens
  source 1..502: mol_type = other DNA
tataggccagtataatacatgtccatctagtaactactacaatactattgctcctggagtagcaggaagaaaaatgaataaattgtgtagttctattaagaattgcaaaggtacttaacttttcagagtaatcttccatgatcatgactgtccaaagtggagcgcttcagcctgaaacacaaagctttgaagtcagcataaaataaacactttatgcactgaatgatccattcagtctagttgatctataatttgagattttgtgtacatgtgtaccttaagtcatatctcagtaataatgagaacttttcctatttggattgattttcatacctaactccagaggaaaattgttttccatatagaaaatatctatttgtctgggaaggaagactgtgagccctctctccctttttaatatgagaattcgaagcattgctaacagacagcctattacagtatttaataaaaaagcatgcctatcataggctaataaatccta

SEQ ID NO: 6329 - DNA, 399 bp, Homo sapiens
  source 1..399: mol_type = other DNA
cactctgtctgtggctgcgttactctagatttagcattaatttttgaatccaaagggtgtttcatttaattgctcaataaaattctgagcttcattctgtaccaaataacttctcaaatttccgattcctgaatgtatgtgtcactgtcataaaaatgtcacagatttttaagattggatttttttcttatgcaagaatactctgtgcataattctaccatctctgaaaggttaaggactaggtcatcgtcatcacagtacaatgctcaataagtgtttcttgaaagaacaaatcaatcatatctatagtatatttcttagtgtccagtttgacctaaaaagacacctcagaaatacagtgctgcagggaattattttataataattaagccctggatc

SEQ ID NO: 6330 - DNA, 389 bp, Homo sapiens
  source 1..389: mol_type = other DNA
gtaaattggttttagctctttgcaagagagaaaaaaaaactatgtgcaatttcttctttattgctgttattaagatacatttccaagtcaattttaaattgcccataatacacagataactgactgtaataattcagttgccacactcaatacattgtttgaaatccaatgtacagaatcagcaggatagatcctgcaagctgtcacaggacttattttaagtaattaaaaaggagcctggggttttttaaatctgtaaaacaagatgaataagctagaacacttctttcagaattaagttctaaaatagaacaaactataaagaatatttcatcatagttccaggtttttttaaaatcataaataaatttatggctcaatttcaggtt

SEQ ID NO: 6331 - DNA, 453 bp, Homo sapiens
  source 1..453: mol_type = other DNA
ggatggtctcgatctatcccctgttgggattacatatttgttatcgtttgccacacacaaaaataataccgctataagtttagagccggaatttctcactcagtgttaacattgaagataaggatgtgcaggtgagcctctgggggtcaggagaaagtctcctctatctcctgctcaccacgctcttcttcctccatcctggggcggaagtggggagagcagcagtttaaaggttctgttgcagcagtttaaaggatccactcagccgtagattggcggcgggaccctcccgcctccccgcgcccctgcgctcgcggccagggcacctgacccacgcgccgcccgccggggatgcgggagccgccactgctaccgctgccaccgctgccgggcctgctccgccaagcacatgcgcagtggcgacgccgagccggcgccctcagtctcctcctc

SEQ ID NO: 6332 - DNA, 385 bp, Homo sapiens
  source 1..385: mol_type = other DNA
taatagggcacatcttactatacttagatttggcattttaattcgtgttttaaaaaataaccacacaataatgcaaagtctcgctctgtcacccaggctggagtgcagcggcgcgatctcggctcactgcaagcctcccgagtagctgggggatggtctcgatctatcccctgttgggattacatatttgttatcgtttgccacacacaaaaataataccgctataagtttagagccggaatttctcactcagtgttaacattgaagataaggatgtgcaggtgagcctctgggggtcaggagaaagtctcctctatctcctgctcaccacgctcttcttcctccatcctggggcggaagtggggagagcagcagtttaaaggtt

SEQ ID NO: 6333 - DNA, 275 bp, Homo sapiens
  source 1..275: mol_type = other DNA
ttttccaatgctcagttagacaatgaaaacacaaacttcatttaccaagttgacaccctgaaagatatgttccacagtatactgcagtttcagtttgctgaagtctcctaaattcagaaatagttaccaatggagagacttccgaccaagtcttcactgctggtgagaataccgaggaagcaggtgttgagccatccaactgttggagtgacttagatggtgggcagtggcctcatgtcctttagggcatagtgatgacacagtttatcatgatg

SEQ ID NO: 6334 - DNA, 470 bp, Homo sapiens
  source 1..470: mol_type = other DNA
acgatacttttccattttgtaaaatgtgactaacacttgcacagagatcatttatggaaccatgttcacaaatttatttatgctcgtgtaatttaatcatttctacagctgctcaaaaggacttaaatcgtcgagtccagtccctatttctcgagccaaggagtttcaccctcttgccctgagggcagcatcctagccctaggtggttctcgaggtcctcggcctctctgtcccaacaggcggctgtcggggtctgagatgccatctgccttgcctaacctgggcaagaccactcgcgtcctttcccttgaggagcagcgtgggaaaggtgccgctgcgcgccacgtttctcccagttccccagggcttgaaggggcggtggaggcgggcgggacgctggccgcctggctagagggtgggatcgccctcggggctcgggaggggctcttccccgcccagaaggagactgc

SEQ ID NO: 6335 - DNA, 595 bp, Homo sapiens
  source 1..595: mol_type = other DNA
gatacttttccattttgtaaaatgtgactaacacttgcacagagatcatttatggaaccatgttcacaaatttatttatgctcgtgtaatttaatcatttctacagctgctcaaaaggacttaaatcgtcgagtccagtccctatttctcgagccaaggagtttcaccctcttgccctgagggcagcatcctagccctaggtggttctcgaggtcctcggcctctctgtcccaacaggcggctgtcggggtctgagatgccatctgccttgcctaacctgggcaagaccactcgcgtcctttcccttgaggagcagcgtgggaaaggtgccgctgcgcgccacgtttctcccagttccccagggcttgaaggggcggtggaggcgggcgggacgctggccgcctggctagagggtgggatcgccctcggggctcgggaggggctcttccccgcccagaaggagactgcggcggcgcaaggcctccggcagggggcgcgggccgctgggcctcccccggggctgcgggccggtggtccctcccaggccgcgtgtgcggtgcgttcgcgcagcccgctccctgcccccacacctccc

SEQ ID NO: 6336 - DNA, 423 bp, Homo sapiens
  source 1..423: mol_type = other DNA
atatacattgcatgaaaggccttttgaaacgtttatctggtttctaggtgatataaaaaatttttaaacatttttctgatttttctgcagtgacacgtgttacatatgtctgtgattcagaatcttcctgctaagaagattttttcaaggctgttatgtaaaaaaaggatggttagctccgatagacatttggttatcgttcggccctaagtaggagtcagacccttcctgatcttgcaacgttgattttaataccacgctcttcaagttgcaaagaacttgagatgcattctgaaataacaagagactacttaacatgttcgttacttttaggtatttagaaccctgttacccaggctggaggacaatgatgtgatctcgggtcaccacagcgattctcatgcctcagcctcccgagtagct

SEQ ID NO: 6337 - DNA, 318 bp, Homo sapiens
  source 1..318: mol_type = other DNA
ctctgtgcccaggctggagtgcagttgcctcaggctcctgagtagctggaactacaggcgccccgcccggcctggaaagctttttaagttcggaaagtaatacgatctggatttcttttcttttatttatttatttatttatttgaaaaaatgtctcgctggagtgcagtggctaagtttttaaaatttttttaatttttcattttttaatgggggggggggcgcctccctatgttgcccagcccccttcggtctcccaaagtgctgggaaagcctagcttaaggaaccgggcaagaggccggaagtgaccgcccttt

SEQ ID NO: 6338 - DNA, 359 bp, Homo sapiens
  source 1..359: mol_type = other DNA
acctctcacaggataaaagaaattgattttttttttttttgagacagagtcttgctctgtcgcccaggctggagtgcagtggcgcatcctgcgtagctgggactacaggccgaaatttttttttttttttaaagaaatgagtaagttttttaatagtttttaaagcgctacctaggtttatcttcttttacttattaataaccattttaaaaactgcaagatcctatcaatttgtaaaatttttactttttcaacataaaagttagtttaaaatactttttctgaagaaaaaaagaaagaatggagacacccgttcaattcctgctgggccgcggcggggatgcggcgcagccgcattc

SEQ ID NO: 6339 - DNA, 606 bp, Homo sapiens
  source 1..606: mol_type = other DNA
tgtttgacgtcagagaaggaatgctatagcaacagtctgtcaaattggatagatgcatttattttatgacattttaaacataaaacacccagataaatgtgaaaaaaaaaactcgattgagatgcatgtggtgtttggatatctggaaggccttccagtttgaacaataacttccaagtattggccatttatttggaggcaggcttcgtgaaacttacggtcctacaactagtgatggaagagcggggttggaaagtttactttctgacatttagaattccagaatgggaaacctaaatggggcctttggggtcttcgcgcctgtcagcgggcgctacttagcagcgtgccccggcaagaaaacgctgcccgggaatgaatgtttttcttctccttctggcaggaaacgagagagaaaataggaagcagaagctgcgcgcggcgcccgctcccttcgccccccgcccgggctgcgcgcgctccgagggtctgcgcgtccccggcacgtccccgccgggcccgcgcgcctcgtgcctcgcgcctcgcgcctccagccacgtccccgccccggctccggcgcgccgcggagttggctgctgggaggtg

SEQ ID NO: 6340 - DNA, 184 bp, Homo sapiens
  source 1..184: mol_type = other DNA
taaaatcatgggttcttccagcctcagagtgagactctgtggcacggtacttactgtgcctaaagaataagttggccctgagccagatctcagctctaaacgttttagaaatgctaataactcatggccgccatggctactacgggcaggaggaccgccggcttgagacgccggaagtgacgct

SEQ ID NO: 6341 - DNA, 399 bp, Homo sapiens
  source 1..399: mol_type = other DNA
gatttgaaactaaataatgaagtttatcacaaaaaatatttagcctaaatcttataatgatccaaatgaataagattcttaaaaagctaatctcatcaaaatgtcaacaacattggatcaaataaataaaagaagttactaagttaccagttactttcattgtaacacatcctgtaaatacaaatatctcttcggtaaagtttttgatgcttctgtacttatagatgtatttacttcaacaaatgggaggtgagcgacttctccaaggtcactcaatctcggcatctcggcaaccaaacaagatccaaagttggagacaaaccggccgcagccatgttttcgcataactggcaaaacgcgtttccgccagcgtcacttccggcgtctcaagccggcggt

SEQ ID NO: 6342 - DNA, 275 bp, Homo sapiens
  source 1..275: mol_type = other DNA
cccaatgaggaagatgacagagaggactatctgatctgagagaggcttacaaaatttcattaactggcagggatgctgggagacatgctctgcttgcaatcatcatttattttgaggaactgatgatcaagacaggaatatgtatgcctgcctacaaaaactttgaatctaagaaaacctgtattattattacacatggcgcaaatttagatttaagcctcacgttagatttcaccggggacgtcaccgccctagtcttcggctgttttaaaagc

SEQ ID NO: 6343 - DNA, 467 bp, Homo sapiens
  source 1..467: mol_type = other DNA
atttcattaactggcagggatgctgggagacatgctctgcttgcaatcatcatttattttgaggaactgatgatcaagacaggaatatgtatgcctgcctacaaaaactttgaatctaagaaaacctgtattattattacacatggcgcaaatttagatttaagcctcacgttagatttcaccggggacgtcaccgccctagtcttcggctgttttaaaagcaagcggtttttaaaacccccaacggagttgccaacctccgtggtgttttcccggggccctcccgcgccgcgttcggccgccagcccgctcgagctcccgcgccaacgcctcaggggttcgccctccgccccccgccgccgcgcccggcccacgcgcagggcccctctccagcgccccctccccggcacgctgcggctggcgctccccagccccgcctgacgctgcagctgggccggagactcgcc

SEQ ID NO: 6344 - DNA, 529 bp, Homo sapiens
  source 1..529: mol_type = other DNA
gtatacaccaccccgtggtgtgtgtgtatatatgaacatttattgtgtagacacatcaaactacccagtctcaacttgagacatatttaaatgcactcttcatatatgtgtgtatgtgttctattcattcagcaaatatttattgtgtgcctgccatgtcaggaagtactaaattcacggacgtaactttcgagagctaggctcagccgcggtggatggcccccggagagacgatgcatgtggcccgccgacgccgcacctgaacgccgcgctgctgcgggcgttgtacaccagcgcgaccaccgcctgccggcacctcgccttgccgccgcgcgcgcgcagccccgaggacgcgctcggggagcgcgcaccgcccggggccgccctcgggccgctcccaggcccctgggaacgcgcgcgcgtgcccggtcccgcggcctctcggcaggcacgcggctgggagaacggcgcgcgccccgctcggcagctgcggcggcggctggtgtaggcgctcacgtcagggctggga

SEQ ID NO: 6345 - DNA, 526 bp, Homo sapiens
  source 1..526: mol_type = other DNA
aactttataaaaagcatattatgctatatgcaatattttggggatatcatgctgtacataatatacaggtaatcacagtatacaccaccccgtggtgtgtgtgtatatatgaacatttattgtgtagacacatcaaactacccagtctcaacttgagacatatttaaatgcactcttcatatatgtgtgtatgtgttctattcattcagcaaatatttattgtgtgcctgccatgtcaggaagtactaaattcacggacgtaactttcgagagctaggctcagccgcggtggatggcccccggagagacgatgcatgtggcccgccgacgccgcacctgaacgccgcgctgctgcgggcgttgtacaccagcgcgaccaccgcctgccggcacctcgccttgccgccgcgcgcgcgcagccccgaggacgcgctcggggagcgcgcaccgcccggggccgccctcgggccgctcccaggcccctgggaacgcgcgcgcgtgcccggtcccgcggcctctcggcagg

SEQ ID NO: 6346 - DNA, 427 bp, Homo sapiens
  source 1..427: mol_type = other DNA
gaccaattaagagcaatttactttcctcgttttctaaaatgaaaaagtacaatagctaccatagtggttttgaaattccctttgaaaatcacttgaattgtccataagaacagtatattgacttttgcgtatcactatacataaactaaataagaaatgcatgtgttcattagttattgtaaaacttgaatggcattggttttagaattcacaatcactaacagtaaatgtacgaaaaggaattattatttaccctaggttacagctcgagctatttcgacgtaataaccaagcaatgctgagcccaatccttcggccttccgtagtctcgctcggtttcgcgagatcgaggctgagctccgccgcgccgccgtgggggcgaccccagaacacttccgggccttccggcagcagaagtttcttccgc

SEQ ID NO: 6347 - DNA, 576 bp, Homo sapiens
  source 1..576: mol_type = other DNA
tagaatgttagcaaagtatcctttcttaagtttttctgcgaaaacggtaataatgtaagtataacaaggagcacttatagtattattttccaaagcccttgcttagggaaggagcttcagtattaagttgttaaaatccatacccaaagtatttgttatgcttacagaaatttgcatgcatttaacagaggaaaacgtggtctcctgctctattaagtttgtctgactacttttaataaggcgaattcaaaatactcagtttgacttttaaaggagaaggcccaactttttttaaaaaaagagcggggcgagtaggcatccctcttccccagggcaactggagcccgccagcacttccagaagtttaaggtcaggatgccggagctcaggggaatgccgatgcgccgggcaggctgtgcctgggcagttcagcactactcggccgccgcggtgcgaactgcgggcactgtgccgacgtagacggcggcaggcgccacctggagagtcggggcggcacgttgagaccccaggggtgaagggcgggggatcccaatcccagccctgttttcccctttc

SEQ ID NO: 6348 - DNA, 407 bp, Homo sapiens
  source 1..407: mol_type = other DNA
caccttaaatcatgtgttgacaataaattacatcacaaatagcgctagaagagctcttggattatcaaatgcaaactgcttttacagatgaggaaaacaaacccaaaaattttgcatatttgtttaataactaacaaactcatcaaagcagaattgcattgcaatgtaaacggatatttaacactgtaaattctgagtgggaagtaactccaaacttattttgatcatgcaaacgttgcattgtaaaattccattattgtctccagatcttgacattccatgttcagaatatgaactgtctttcaagtcacatccttaaatgaagttcttttacattaaaaaatgcctgaaacacagtgtggttggtctacattcattacccttgacaattattaacataaaataaa

SEQ ID NO: 6349 - DNA, 439 bp, Homo sapiens
  source 1..439: mol_type = other DNA
tttttttttaaccacaaacgtctgtcggtgaagtgtgctttaattcagcaaaaatacagcattcaatacatatacataacacaatatgtatacggggctgcttttaaacaacgccaaacctttaagtcaaagccttgaagtttggcacaggctgtaccaggctcatcagccatttgctaaagaagaggcctgacttgatacgttcaggactgtgcgtatgcgtgtcgggagacaccgaggaatcggccccaagctgcagactccggagaccactcccagaacggggaggagggtgggcgttcgagaacccggcacctctcggaacggcggcggggcgcgccaggcccccctcggtccgcgcaccccctttcgtcacgtccgggggcgggccggggcgccgggggcggtcccgggtggagccggggggccgggcggggcg

SEQ ID NO: 6350 - DNA, 693 bp, Homo sapiens
  source 1..693: mol_type = other DNA
gcaacagcaataaagcagtccctaatgactacattattctaactaaaaatagtctgctgataatgatatctaaaagatcattgtctataataataacacatgtaaataatgctttatgctgttcttctcatacttttaactttatgagtatagtcaccagtttcaaatgtacctgacttaaataattcaagggatttttagtagagaattaaatgactttttacctgacatttaacattatgttaacacgtaatgtaatagtgtattctacagtcatggttattacagtcacagtaaaggtaaattagaaatgtggacacattttgcaactgtttacatagttagttaactttcttcaataacgattaatttcactggttactattttaatagttaaatttttgtcaaaaaattatttttaaagtttattattttgggaagcctcagctgatatttatgatcacatttttaaaaatctctaaaaattttgcttcttagagtaatcacatgaaatttgaatgctgtttcctcaaagaagaaaaacattataaacttgaaattatttcattttatactaggactcttatgtttattcttgagtttcatctgaaaggttaaggtaaagctttatttgtttatatttctaaggatataaaaacttttttttagatggctctggaaactcatttttgg

SEQ ID NO: 6351 - DNA, 257 bp, Homo sapiens
  source 1..257: mol_type = other DNA
taaattgtatttcatccagagttttaagttcacttgaagttaagcaaaattagcatcttacaaatctataatttgtttaatcatgtcaaatgtgcatttttctctatttctgattagataactagaagcatctacatgtagtgtttacagtttctttaaatacctgttttaagctcaggtggtttaaagattttggttcttctcccagaaggtgacgaagcacgtggccagactgcccaactccgacggtggccggc

SEQ ID NO: 6352 - DNA, 649 bp, Homo sapiens
  source 1..649: mol_type = other DNA
caaggaccacttactccacaggagtcttctgtcctgcacgacgctcagaatccgcccagggcaggtcacacctggactgtccgccctgcgtgactagaccctagcagtaggcaggcaacctggactcccgcagcccggccttgggagggttaccccaactgtctcccagtagacaggtctggggagagcctggtcctcactaatggagtgacagccaccgcaggggggggactaaggtctcccctgggatgcccacgcgagggaacggggcagggggaggtgtttccactatcttctcccttgggatggatgaagctcctcaaccatccgtttcagccagcctgcgtagacccggccgtggtcgtccggggaggtggggtgtcccccggcgcccccaccagagaccgcccggcgcggcaggaggatgtcggcgcgcggagggcttgcgtcgcccgcccctcccccgccgcgccccccgcccccgcccactccccgggggacccccgcgcccgggggaagccccgcgcggggcgccctccgcctgcctccgtccctccgcctccccgaggtccggggctgcctcctcgggccgcgccgggccgccccgcactgcgcatgagcgggagccgggcaagcccgtgagaggagc

SEQ ID NO: 6353 - DNA, 347 bp, Homo sapiens
  source 1..347: mol_type = other DNA
ttggtatcaaagttatgtttactttttaaaaagagtttggaagacttccatcttttttgtgctctgggacagaattaatagcatttgagtcaattactcatttgtgtggaatttttaaattgtatttcatccagagttttaagttcacttgaagttaagcaaaattagcatcttacaaatctataatttgtttaatcatgtcaaatgtgcatttttctctatttctgattagataactagaagcatctacatgtagtgtttacagtttctttaaatacctgttttaagctcaggtggtttaaagattttggttcttctcccagaaggtgacgaagcacgtggccaga

SEQ ID NO: 6354 - DNA, 465 bp, Homo sapiens
  source 1..465: mol_type = other DNA
gagatcaaggctgcagtgagcagtaatctcaccactgcactccagcctggccctggtggggaaatccgggatcctgaaccatagctcaggggcactgagatggatgactctgcaaaagcccagagcctctgggatttcagatgtttctggaagatgctactgaagccacaaggcaagaggtgacccctcaggagttgcctcacctcttctcctccgccaggcgccagtgcgcacgggcaggggaacagtaggtgcagccagtccgcacgggcaggggaacagcaggcgcagtcagtgcgcacgggcacgccagtccgccaggcgcagccagtccgcacgggcagcaggtgcagccagtcctcacgggcaggcaggtgcagccagtgcgcacgggggggaacagcaggtgcagccagtctgcaccggcaggggaacagcgggtgcagtcagtgcgcatgggcaggg

SEQ ID NO: 6355 - DNA, 428 bp, Homo sapiens
  source 1..428: mol_type = other DNA
tgagaagcgtctctgggttcccagaaaggctgggccgggctcacgcctgtaatcccaacactttgggaggccgaggcgggcggatgtggcgggcgcctgtaaccccagctactcgggaggctgcggcaggagaatcgcttgaaccagggcagtgagccgagatcccgccactccctggccgggctcggggtcaggagctcgagaccagcctggcccagctactcaatcgcttgaggttgtagtgagccgagatcgcgccactggcggaggaggccggcgctgccgggaccacgcgcgtgcggtaaacggtcccagaggcccgggccccggcggctgcgccgagtccccgcccctccctgctccgtaggggtaggagggggccggcggagtttccctccccgcccagcggccctgggcgggcttttcgg

SEQ ID NO: 6356 - DNA, 396 bp, Homo sapiens
  source 1..396: mol_type = other DNA
ttttctcctatttcagagttgaacaaatgtacaatcggaggagacagtggccttcctctacagaccctttatgggtgttgccatatttcagactgtcacatgggcagggctccctgcagctttccgcagtaccaagtatactgcttgtaaacattttgttaacaaggcaaaaccttgattttatacaacacatgtttttgtgagtccacaaagcaattgtttgaagtacaggtctttttcaaaatggagttacatcaattagtttaacctaattaacatttataggtcacacagaacatttaacaggacagtccactattatgagttaaattaaaattcatatggtcttgatatggtttggctgtagtgaataagtctcatgagatctgatggatt

SEQ ID NO: 6357 - DNA, 486 bp, Homo sapiens
  source 1..486: mol_type = other DNA
taacaatgaatcagcttatttgtgggtcactgtcaatgactcctttgcaaatcacacatgtaaatatttctgtcaactgcatgatttaaaagatgctgaccagcttaaggaaagcaatttaaaaacttcctaaaaatctagtttgaatgaacaacagttttctgttttaaaccacaaactcaaagcttttattttactaaagtatttgggttaatcttttgcttttctgtcatgttctgaaatatgtacaataacagaatcgctcaaaatattatctccgttaaatgttttgtggagcgcatccaggattcatttatggaaaatagctcaaagaggacattcatgtgcactctggcttccagttgcaattatgcccatcaccttcacctacgcgccgggagggtggcggctggcgggcggggccgggctcgggccgtgacgccgagagtgcggggcgcgcggctgggagcctcgcgcccccgcccg

SEQ ID NO: 6358 - DNA, 451 bp, Homo sapiens
  source 1..451: mol_type = other DNA
tgttttaaaccacaaactcaaagcttttattttactaaagtatttgggttaatcttttgcttttctgtcatgttctgaaatatgtacaataacagaatcgctcaaaatattatctccgttaaatgttttgtggagcgcatccaggattcatttatggaaaatagctcaaagaggacattcatgtgcactctggcttccagttgcaattatgcccatcaccttcacctacgcgccgggagggtggcggctggcgggcggggccgggctcgggccgtgacgccgagagtgcggggcgcgcggctgggagcctcgcgcccccgcccgggcccgcccccatcccgcccgcatacagcccgcatcccgccggggaagcgagcccagtccagcgctgcccgtccgcccaagatttaaagctaaagagctgggcttaaactgcccttttttagaaacg

SEQ ID NO: 6359 - DNA, 373 bp, Homo sapiens
  source 1..373: mol_type = other DNA
aaatgctttgagattggaaacccgcagagtaaatactcatatacttgtaggattaattgaaacaactttgtacttagaagtgtggacctccccatcttgattaaaacttcaaaacggatagcaggtttcacatatctaactagttttttcccaaaaagtttaaagagctctcttgtgaaagaatattcttatgagtttattcttctgactacctctattagaaaagataatactaagaatacctgtcccttcttctcagtccaaatagaagcaaacccaggttgtatctgagatatcatggatattcatccctgatttgcagattaagggtaacccttggtctgttgattggccactgacccgtaaaggaagc

SEQ ID NO: 6360 - DNA, 472 bp, Homo sapiens
  source 1..472: mol_type = other DNA
cacaagctgcaatgattattgttgatgttagtcaattgatttttcttacatattttggaataacaatttccctggttataatacacaatgtgtgaaacactaattgcatttattggtcctaaattcattcccaagtctaggatttggggatttagtgcacaaatccaccagaaatgactgttaacatacactgttgtgggagaagtaacatggacttgtgcttgtttaacagtacccatactgtttggtgagttaaccaaaagttgggtgactaggtctatgtttctcttttacaacaacaacaaaaaaatagcacttgtttactgttcacaattattgaaataaatcactctaatttggattcctttatatgagaacccgtagcatttttatagtgtacaggtcataaacaggaagtgagttcacatcacggcgtgtatgagctcaggggccaaatctgagctgtgatcat

SEQ ID NO: 6361 - DNA, 387 bp, Homo sapiens
  source 1..387: mol_type = other DNA
caaagccaccgaaatgtatagtttcatatttgtacattaaattaagttaaaaacctttaaaaaaattttttttttaaaaaagtcttccagtttctttaaattttatgtgtaaaaacatttattacttttctttaactatggaaacacattattaataaataccgcctcctctgagtatatcatcaactcactttccccaagtggtagtgagtaggctcttgatcacatcatgacaggcaaagaatatccttgtttgagaatcagactatactgtcagatagtgaatcttactttttttaaatcatcctttacaaagtttatgatgatgtgatacttctaaaaaaaaaaaattctgattctcatgaaatgacctcgagtgaacttcag

SEQ ID NO: 6362 - DNA, 775 bp, Homo sapiens
  source 1..775: mol_type = other DNA
gcatggaggatgtgccacagcccctccacatagggggtgagcgcgcccacgcgtgctcagccttgtcggagcgcagcccgggcgccgggctcccagtgcaggtgtggccagcggaggaactgcgtcgccagccgcccccggggtcaggaggtggggcaagcagcggcgcctcacccagcctcccgctccgggtcctgccggatggcggcagctctccgggccagcccccttctctccgcggctcctccgcagacacccggcgcggaagaaggaggggcggagacctggccggcgcgcgtctgatgatccggaccccggtgcgactggagcgcctcagtcactgtctccccgccccacggttccgagtaaggaccggagctccactccgggggtggagcgcgggctccccgcagggaaaggtgcgcagcgttcccgaccccaaaacgagcggcgcttgggagcgtgcgtgcctccccgagagccccgggcgccacccgtgggctggacgaggtgggcgctggggcgtggggccggcggcgcagagaagccacggccacctgccgcctcccctgcacctggaggcggcgccggaaacctggcggccgggaccgcgattctggaagccccggagctcgcccggccggaggagccggggcgcggttccggcgagattggcagaacggccgctcctctctcggtccagctgcgacgctgggaaagcgccagacttggtctgtcacgggagcccccgcggggcgtggcgagggagagctgg

SEQ ID NO: 6363 - DNA, 246 bp, Homo sapiens
  source 1..246: mol_type = other DNA
gaaaagaaaaagaaaatccttgctctgttttgcaggcagagtgcaggtgaaaaggtgatcactcccagctactcgggaggcttgcagtgagctgagatcgcgccattgcactccagcctgggcagagccagagggtggctactccctgggtggtcccgcaccgaattcgcatttgctcaggcgtttcccgctgccagtcagaaagtgtgcatggaggatgtgccacagcccctccacatagggggt

SEQ ID NO: 6364 - DNA, 352 bp, Homo sapiens
  source 1..352: mol_type = other DNA
aaaaatacctagcaaaactgatacgctcctataacttccccaggatatcatgggattttaataatgacagttattactacttaactgagacatgcagaggtaatgaatggcaattcggtgtagacccacatttcttctgtgcccccaaagcatattcgaaacaatagacattttttttggtggaggaggaagtgggaggatcatagactgtctcctgtccattctcctgtccatcccctcattgacgacttgggttattgatagcattacacagcactcacagtggactctgagaggacactcctcttccagaagtaatttctaaccctgtgattactcacagaaaggtgga

SEQ ID NO: 6365 - DNA, 382 bp, Homo sapiens
  source 1..382: mol_type = other DNA
gcctggccggaggtcgcagtgagctgagatcgcaccactgtactctagagacaaacaaacctaaactccaaattttcttgtaatttttattagagtaaaataaacctataaatgtattcggaaagaattggtccttttaataatatttagtctttccataaaggaacttggtatatttatttaagttttctttcgaaactcttagtaaagttttaccatcctgaccttgtgatccccctgccttggtctcccaaagtgctgggatataatcttttgggaccacaattgtatattcagtccatcatcgattgaaatgtcacttgtgaccgttaattttagatgtcaagtttactgggctaagaaactagcaacctgttaaagc

SEQ ID NO: 6366 - DNA, 421 bp, Homo sapiens
  source 1..421: mol_type = other DNA
aaactagttaaatggttgcaatcatcctttaaaagaatacctgcagggaccagcctggcctgtagtctcagctactcgggaggctaaggcgggagaatcgccattgcgccactgcactccaccctgagtggcagagcgaaactctttaaaataaaaaggacttagctttatcaaaaaaaaagaggtaggccctcaggcctctctaagcttcgacccaagctttaaagtcgaagggctgaaaagaggcatttttttaactgtctctgcttaaaacaaggtgtttttgagtcaggggtctcgtcctcttgggcacccgacacccaccccacggcgggagccccaggtggccccggaggccaccgggaagcgtgaactacatctcccagggttccccggggcggaggacgcccacccggattgg

SEQ ID NO: 6367 - DNA, 364 bp, Homo sapiens
  source 1..364: mol_type = other DNA
ctgcagtgagccaagatcatgccactgccaaacaaaacaccacttatatttattatgcgttgataaaaacattaaatacattaaaaatttggtaacatgtatgtaaagtataaagtgtgactgagataagtctcaaggggctagaaataactactgttattttgtatacccagcaaacatcatagtcactattgtgattaatagggaagctcatacacgccggcagaatgaatattctgtcaaacttcgcccacactgcccaggaagtgccctcgcgggccggggtcccagcccggaccagccccgccccgccccgccccgccctcatccctgggagctccgccccgaggccgcgcgcgccgcc

SEQ ID NO: 6368 - DNA, 464 bp, Homo sapiens
  source 1..464: mol_type = other DNA
tgctgcagtcccctcccaggccaaaaccttgaagtgttattagtaattggtctgcagtgatgcatgcacaggaggaaaggttatcaaactaaagcttttgcaaatggccatgctttaaaattaggaatttcagaatggattggtttaggcggcgctggaagcaggtgcccgcggagtccatgcggtgcagcctggcacaaatgcagcaaacctcccggctggcggactgctcccagctgcgaccatcgggcccttggcctctgcgaagccggggccagaggcattatggacacttgaaatgccggtgccccctgtccagctccagccgtgcgcagccggccccggccaagtggggctgccgccgagtgcgccccctcccgggacgcccaccctcgtgccggggggcggtgctgcggcggcgcggggcgggccgcgggggcggggacgctgggcgcaggaggcgc

SEQ ID NO: 6369 - DNA, 584 bp, Homo sapiens
  source 1..584: mol_type = other DNA
tatgcgttgataaaaacattaaatacattaaaaatttggtaacatgtatgtaaagtataaagtgtgactgagataagtctcaaggggctagaaataactactgttattttgtatacccagcaaacatcatagtcactattgtgattaatagggaagctcatacacgccggcagaatgaatattctgtcaaacttcgcccacactgcccaggaagtgccctcgcgggccggggtcccagcccggaccagccccgccccgccccgccccgccctcatccctgggagctccgccccgaggccgcgcgcgccgccgcgcgcgccccgacgcgcccagctgctgacgtgcggggcggaacgcgccgggcgggctccaccgcgccgtgtgcttccgcaggttgcgggggtcgctggggccttgtggcggggcagctccgcggggcttcgcccgctccctcgccgtgctctctcgcggcggccggcggggcccgcgctgcagccggagacccgggggcgcaggaagggaccggccgggagcgcgccccgctctccggggcattgtttgggcgggggcggcgcgggcacgtg

SEQ ID NO: 6370 - DNA, 425 bp, Homo sapiens
  source 1..425: mol_type = other DNA
ttatttggttacctagataggattaatctgtgggacaacaaaccattctaatttaagtacaagtattgttggatctagctccttgctattccaagtggttcatgaactagcagtttgggtatcatctaggacggtttggcaaacttagtttgtaaaaggtcagatagaaaatatggccgcatgtggtctttgtcgttttaaacaactctttaaacgtgtgaaaaccctaatttaggcgcttgtttagtactaaattacaatgtttttaatgagatttccaggtgatttgtatgtaaactaaagtttccccaaacctgtggttaagctagtatagccagaattgagaattactgctctagactaggaagtctagtgtggtagataaaacaccatggccacaatattttgagtcggcctcagaagac

SEQ ID NO: 6371 - DNA, 536 bp, Homo sapiens
  source 1..536: mol_type = other DNA
tggcgatagacccaggttcagatcctatttctactaccagctgagtgatgttgcaaaaaagtgttcatcgaatacttatgtgtatctagtccttcaaaaaaagaagctgagcattgtgtttggcttgtaagtatagttctttcccaagggaggtttttaaaaatgagccacgttgactcatcatccagtctgttgtcccaccccagatattctgatttcgtgtgtctggagtacagccagagaatatactcttgggaccgtgtcgctcagtcagacttttcatcccctgtaaagtcgctgaaatgataggcaggagaagtgacactgtttatctgtgtagaaatcagaaatgaaaaccattttcatggctggatgtggtgccacgcctgtaatcccagctactcaggaggctgggggacaagcaggttgcagtattgtaccactgcacttcaagagtagaaaaaaaaaagtaaaccatttttatacctcacttaaattattgtaatgtgattacgtgggtaaagttgccacaggaa

SEQ ID NO: 6372 - DNA, 259 bp, Homo sapiens
  source 1..259: mol_type = other DNA
ctcgagtagctgggataggctggagtgcagtggtccaatctcggctcactgcaagcaatactcctgcctcagccagtagctgggcctcaggtgacttggcttgccacgttggttcctctagggaccagccctgaggcatgccgggaggccgggccactctcgcaggtcgctcccggagccagctgagcagggcgccagccagtcgtccgggcaccgtggctggttcggctgccgctcagccgcgcgggggcgctctaga

SEQ ID NO: 6373 - DNA, 214 bp, Homo sapiens
  source 1..214: mol_type = other DNA
aaagtgaaagcccgcttttcatttcctcgagtagctgggataggctggagtgcagtggtccaatctcggctcactgcaagcaatactcctgcctcagccagtagctgggcctcaggtgacttggcttgccacgttggttcctctagggaccagccctgaggcatgccgggaggccgggccactctcgcaggtcgctcccggagccagctgagca

SEQ ID NO: 6374 - DNA, 313 bp, Homo sapiens
  source 1..313: mol_type = other DNA
tgcagtgagccgagatcgcgccattgcactccagcttttatttggagcttcagtttcatttataaaaagaagaagatgagttagcataacatttctaaggctcttgtattatctagagaccaggcagggtgggactgctctgcctacgaacagcactgtgtgcgaacacagggccacggttaagcctcccggctgcctcccccagggctcggtgggaagaggggcagcccgcaccgcccccgggatgtcaccggcgcttccgcgtccgcagccctgggcactcggaaggagggcggccgatgccgctataaag

SEQ ID NO: 6375 - DNA, 439 bp, Homo sapiens
  source 1..439: mol_type = other DNA
ggtgacataagacataatattaacacatgccaatgatattgatgttagctgagattactagtttacaataatgctatatattaacactattgacagcacaaagtgttactatcttaattttatgagttctattatcatgtaatcagtgcatagcctaaaaattatacggaaggtatgaaccaagctttataatttggcatttggaataattccaatgtcaacaaaagctgagccaagatcgtgccactgcactccagcctgggtgacagagagagactctgtctcaaaaaaaaaaaaaaagatactttggtattcataaccaaatcactaagtattcctgcctgcctggagcccggaaggtgcatctgggcagagccaatgcattggctgggacctctctggtcacaggctgtcacagggagtggtcacttgccatgag

SEQ ID NO: 6376 - DNA, 228 bp, Homo sapiens
  source 1..228: mol_type = other DNA
ttaatggaaaacttttcctcggtccccctaggcgggcgccggagcacgacgggtcgcgaactccaaatcccgacgtgcaacgcggggcacctggacaggtcccgtgcagaaagggcgctaccgcttctttccccaaagagaaaaaggtgctgctgcgcagatgacataaaatagtcattgttatccctccttctgagagttcaagaaacgtttgctgaacgaatgaat

SEQ ID NO: 6377 - DNA, 220 bp, Homo sapiens
  source 1..220: mol_type = other DNA
ccgcttctttccccaaagagaaaaaggtgctgctgcgcagatgacataaaatagtcattgttatccctccttctgagagttcaagaaacgtttgctgaacgaatgaatgaagcgcctcaggggccgggacaaccgtgacccgtaccgtcctcgcgcctccgggatcaacctcagacccctgtgggctcccggggaagacgcatgcgcactgctccttcct

SEQ ID NO: 6378 - DNA, 156 bp, Homo sapiens
  source 1..156: mol_type = other DNA
ttccctccagctgagggaagcgctatatctcatgcgatatgccttatacacagtaggccttcagtatttattaaatgaattaaaagttaacctagttcgggcgatccgcccgccttggggttgtgctgtccttctctcgagtctcaagaaacactg

SEQ ID NO: 6379 - DNA, 360 bp, Homo sapiens
  source 1..360: mol_type = other DNA
ccttcagtatttattaaatgaattaaaagttaacctagttcgggcgatccgcccgccttggggttgtgctgtccttctctcgagtctcaagaaacactggattcccttcctggactgcagaggagtcgccgatcccacttgggtccggagtcagggccttcaggggtccgggaacgccgccatcccggtttccgtttctagggacccgggaccggagcgccgcggcccggccagtgggcgggaaaccctgccatctgccgcgacgccggcgcctctccgcggcggccgggggcggggcgcgccggggcggggccgcgccgggccggaggaggggagcgggcccggacgaagccctgggcc

SEQ ID NO: 6380 - DNA, 298 bp, Homo sapiens
  source 1..298: mol_type = other DNA
gacaggcgtagtcctgcccaaggaaggcagcagtttatctctgcctacagaaagagaagatggtaaagattctgtttatcaaagaggggatttcaaatcccaacatatatgcctgtcactagaaggcatgcacaaacacttctactgcccagttgtatttatttgtgtgtcctgggagggactacaattcccagaaaggccacgcctaccccttcctgaggcgggggcggttaaaccggccgcgaggcctgacgggatttgtagtcggcgctagacgccggcgcgcacgcgcagccgg

SEQ ID NO: 6381 - DNA, 173 bp, Homo sapiens
  source 1..173: mol_type = other DNA
ccagacgagttcccatctcagcagctgcttcagagcctgggggagaacctcttggggtactgttaggctcaagcaatcctccagccttagcctattacagctggccttgatttctctatttgaaaaaaatcaaacatttgaattgttttcctgtaaagcacaaacagaataaa

SEQ ID NO: 6382 - DNA, 291 bp, Homo sapiens
  source 1..291: mol_type = other DNA
caaattttaaaaattgatgttggaagaaaccagagttctgtagtttaccacatcagaattgtaaaatggttcaatatattgatgcctcatgaaaaatagccttttattggcatttaggcgggtggcgctggccaccaggctgagaagcccggaccacgcaccagacgcgcctcgccgcctgcctcttgggaggctcccacccgccagaccacgggtgcctcgcggccccgatgtcgcgcacgcgcagagagcgcggctccggcgcagactcggcgcctctcctcaaggccc

SEQ ID NO: 6383 - DNA, 297 bp, Homo sapiens
  source 1..297: mol_type = other DNA
ttgatgcctcatgaaaaatagccttttattggcatttaggcgggtggcgctggccaccaggctgagaagcccggaccacgcaccagacgcgcctcgccgcctgcctcttgggaggctcccacccgccagaccacgggtgcctcgcggccccgatgtcgcgcacgcgcagagagcgcggctccggcgcagactcggcgcctctcctcaaggccccgctcgccccgcccaccgggctctgcgcgccttgcaaggaacgggggcagggcggggggcgggcctaggccggggtctcacagc

SEQ ID NO: 6384 - DNA, 480 bp, Homo sapiens
  source 1..480: mol_type = other DNA
tctcagactcttccttgggggacctgggagtttgacagcataacactgtcaagcaggggccctcctgacaagcagagatgttttctcttcagggctgctcttcaggctagaaggcttcagtattgtgcacaccctcccaccccagcagaagtggttggcactgcagcgatgccaaggccggcatgaggaatccctgcttggagtgagtggtcactgaagtgctaatacctgaggatgaagagcactttgcaaaggaaaggggccagccccaggcctcggtcctgcagtgacggggatccgtgcggcggcggggacgcggtccctgcactgcggtgcccagtctggctcgggctgccgcggctggcgcggaggcggtaccgcgcccgaaggaggggggagcgccagccccgccgcagcagcagcaggcgtggccagggcaggctggaggggcggcctctcggaacgggggcgggaccaccg

SEQ ID NO: 6385 - DNA, 748 bp, Homo sapiens
  source 1..748: mol_type = other DNA
acgcggtccctgcactgcggtgcccagtctggctcgggctgccgcggctggcgcggaggcggtaccgcgcccgaaggaggggggagcgccagccccgccgcagcagcagcaggcgtggccagggcaggctggaggggcggcctctcggaacgggggcgggaccaccgccggcagggcccgcgcccctgccgggactcagagccgctgcagccacagtcacgaactggcggccggcaggtgccgggaccgagggccacccggagcgcagaggcggcaccacccacacggatcccgtgggcacctagaactccgcggagggcgcgacggtgaggctgagactgccacagggagcggggcgatccccagagccagcccgcggcatcccctgcgcgggccgcggccactgcaggtgccccctcctcccacatcagctctgccggggtagggagcggtaacctggcggctcccacggactcatccaccctgcccccgcgatccctcgcagggccgggggcctccggggggattcgggccctttaaacctccgcccacccgcgccgcttccgacagctggcggccgcggggggccccggggggccggcaggtacgggtgggcggtggaacagctgtgaccgcccccacccccgggggagccgcggcgggactgctgggcgccgaagcgcgcgttaatcattaaccctccgcggcccggctgcccaggtaacgcgtgaggatgccctcctcgcca

SEQ ID NO: 6386 - DNA, 403 bp, Homo sapiens
  source 1..403: mol_type = other DNA
cccatgcggcgccggtcctgccagctctacctggcggggccgcgccgggattacacggtcctcgggccgcagctccggctctcccagtactcgacttcgcggtacccgcagttccgctccggtaactccggaggcgccctacctgcccctggagaggccatgctctcaaccgccgggcagccagagccgccggcccttcagccaatgcagaaggcggggcgctggtgtctccgcccaccacctgcagttgcgctcttcgaagaatcctctattttcaatatgaatgacttttatcaggaaatctgaaaattagtgaaaggttcatttttctcattgccctcctttctaaattagcgcctgtgtacccagggcccctgctcctatggagcgtgcttagcctggt

SEQ ID NO: 6387 - DNA, 463 bp, Homo sapiens
  source 1..463: mol_type = other DNA
ctaggtgactctggctcccagtgcccaggggcaaaaagaaaagcgctgggcattattatttctagaactgaatctaaagctcagaacgggttcatgacttgtcctaagtccccaaggctgcctgcctcccgagggtccggacagggtcttgggtacccccaacagggactggagggccccgggaccaggccaagcccatgcggcgccggtcctgccagctctacctggcggggccgcgccgggattacacggtcctcgggccgcagctccggctctcccagtactcgacttcgcggtacccgcagttccgctccggtaactccggaggcgccctacctgcccctggagaggccatgctctcaaccgccgggcagccagagccgccggcccttcagccaatgcagaaggcggggcgctggtgtctccgcccaccacctgcagttgcgctcttcgaagaatcctc

SEQ ID NO: 6388 - DNA, 430 bp, Homo sapiens
  source 1..430: mol_type = other DNA
cctgtgaatgacccagaaggtgatgcccacctccgccaggcagaggcaggcggccaccagcagcgtgtagcgcggctcccgcagcagcaggcgccgctcttgccaggcgcgctgcagccattgcttgcagagtccctctgcctgggccgcggaaccggaccggccgcgtttccgcagcccagccgccatcttaacggtgcgccgcttgtgtgggcccaccacccccggaaaaccaggctaagcacgctccataggagcaggggccctgggtacacaggcgctaatttagaaaggagggcaatgagaaaaatgaacctttcactaattttcagatttcctgataaaagtcattcatattgaaaatagaggattcttcgaagagcgcaactgcaggtggtgggcggagacaccagcgccccgccttctgcat

SEQ ID NO: 6389 - DNA, 323 bp, Homo sapiens
  source 1..323: mol_type = other DNA
cgcgcgagggcaccatcccactggcccgagctcttcccgccaacgcgggtcccgcccctccccgcgaggtcccggccgggttggctggtactccccgccacagtgcgggaacctcccactccagctgcctctgttcccggggtagctgggcgcgctcctgcccccggccccgcctctttcccctccaccgcgccccgcccgccgtgctctgccgcagtcgggcgcgccgccccgcccggtccccgccaccgccgccgccgccgcctgcccagcggcccgggaggcggaggcgcgggggaggaggccccgcttggctcctcagc

SEQ ID NO: 6390 - DNA, 352 bp, Homo sapiens
  source 1..352: mol_type = other DNA
cgctccgcgtcctcaggtgctccgagcttccccgcgtcacccgcagcccagggcgccccccgcgacgccgactccagagccgcggggggctacagccaccggactagggctgggggtgtctgccctggtgcgcgcgcgtcggcccagggcaccatcccactggcccgagctcttcccgccaacgcgggtcccgcccctccccgcgaggtcccggccgggttggctggtactccccgccacagtgcgggaacctcccactccagctgcctctgttcccggggtagctgggcgcgctcctgcccccggccccgcctctttcccctccaccgcgccccgcccgccgtgctctgcc

SEQ ID NO: 6391 - DNA, 306 bp, Homo sapiens
  source 1..306: mol_type = other DNA
taaaacatctgatgacagcagttatcttggagtgtatgctccccctgcacttggtgtgtgtacatacagaaacacagtgtgcgtgtgtgttggtacactgtgtgtgagtatgcagtgtgtgtactgcacataggtaggtaccacgtgcacaccctgcgttcctcagtgaatttcattacttttcctaggaaagtaaattattggagggcagctggagcctgcggagagcctcggcgcgctcctccctctcccccaccctccccccaccccgggcggggctccgcgtggggcggtggactcgggcgg

SEQ ID NO: 6392 - DNA, 586 bp, Homo sapiens
  source 1..586: mol_type = other DNA
ccaccccgggcggggctccgcgtggggcggtggactcgggcgggggggggggcggccgcggccgagcgggggtgctgcgcggcggccgtgatggctggtgacggcggggccgggcaggggaccggggccgcggcccgggagcgggccagctgccgggagccctgaatcgccgtcgcgctgcaggagctgggagctggcagcaacgtgagtgggggccccgggctccacggcggccgcggaggggcaggcggtgcccggctcgcggaggtaaggctgcctcccgggcctggtggaccctcttagcagggcggaggggtccgccaaatagccctctcgcaaccccgactgtctggcagatggtcgagacccccgtagagggcggggcctccccggacgccatggaggtgggcaagggggcttcccctttctcaccaggccccagccctggcatgacgcctggcacacccaggagctctgggctgttctggagggtcacctcattgcccccgggcccagagttaaccctgtggctctgcccctgtgttccccaggtgggattccagaaggggacaagacgctccagctg

SEQ ID NO: 6393 - DNA, 515 bp, Homo sapiens
  source 1..515: mol_type = other DNA
gaatacagtatgtaaacataaatggcctttaaatattgccaattatggtttactagatattagtagacagtacgaaatttctgaagattctttcttccaaaacatgttgaatttgtacaacttctctgccaaggttatggctgaccagctccgcaagcctcccagccgagaccaggtggcaagactggtcccagaccggcggccccatacccttgcaggaggtagggcagggcttgtcaggagagtcgggagcctcagcccctcactcttcctccgccaggtggagcatgacccccccccgctggcatcctgcaggcagggccctgaacttcggtggcatcggtgtggtcatgggccatgagttgacgcatgcctttgatgaccaaggtaggggcccatggagtcgtcccctattcccagtggctcctgcaaggccttgggacattgatgtagccccaagggccctgaagtctgtggaccagggctggtgggggcactgctgcccccaagagacg

SEQ ID NO: 6394 - DNA, 413 bp, Homo sapiens
  source 1..413: mol_type = other DNA
gggctgggaaggcccatgcccagagcctccggccagccagggcccacaaaggcagcctgaagaggcctgagcgggagcctcacgctgttcctgtccagggctgccccaggcagagcctccgctgggcagccacagcaggcagcttctgtccatgctgggcaacccgattgtggtgctcggtccgcacaccagagagctctcacgaggggctggtgaccgacccccacagcccggctcccccatgaacccagggcagctgtggccagctgtcaccagacctggggcagctctccggaggaagcaaatgcaagctgggctgggtctagtccctcccccccttgggggtgcccctgcctccagcagagcccccctttccgtgtcaccctgcctggaagaggtctggggaggccagt

SEQ ID NO: 6395 - DNA, 381 bp, Homo sapiens
  source 1..381: mol_type = other DNA
atctccacctgtaaaatagagtagcgggcgcctgtaatcccagctaagccgagatcgcgccactgcactccagcctgggcgagagagcgatacaggcgaagcgtcctggacgtcaagaaatctagtttgtctgtgtgggttctatttacaccgttatgagaaaaacctgttcccgcgggtttcaggaaactccgagcgggggaggctgggaattgtagtctccacctgcctccgagggcggggtccgagggcggggctctcaggccgagggggtgggtgggtcgccgagcgccccggctcgccccggcgtttccggtcgcaggcgggctctggaggaggaggggcgccgcgaccgacgcgcgcgagttcggtgcgagcggg

SEQ ID NO: 6396 - DNA, 390 bp, Homo sapiens
  source 1..390: mol_type = other DNA
ggccaggatggtctagatcccggccaaactacaaatctcatactacttgcctaattagaatgtttctattaatttctttgttattggcctttcaatgacctaatctaaattattttcaaagcctgcataattcgtattgtatcacgatgtctcgccctgtcgccaggctaggctagagtgcagtggcacaccaagtagctgggactacggggatggtctcgatactcccaaagtactgggattaaggtgtgagcatgcactcaataaatggttgcttaaaatcacgtgaccccatgtgctcggcggcgcagatcgcccggcgcggctccgccccctgcgccggtcacgtgggggcgccggctgcgcctgcggagaagcggtggccgccga

SEQ ID NO: 6397 - DNA, 649 bp, Homo sapiens
  source 1..649: mol_type = other DNA
tcccaaagtactgggattaaggtgtgagcatgcactcaataaatggttgcttaaaatcacgtgaccccatgtgctcggcggcgcagatcgcccggcgcggctccgccccctgcgccggtcacgtgggggcgccggctgcgcctgcggagaagcggtggccgccgagtgcggctgcgtggggctcggccgcgcggactgaaggccgccatgtccgggcccgacccggcccccccccgcatccgccgccatccgggccgggaccggccaccctgcgccgccgccccggcgccctggccccgcggcccgacccagggccccggcccgccagggtcccgatccccggcccacgtgtgcctggcccggccgggcctggctgctgggtgggggtggggagcgcagggccggactatgcgggccccgcgggctggtagggcgccgggttcgtcgccgcgaaatgccacctcggcctgacccgaggaggcccggcagcccacgggcgcaggcaccacggctcccggcccgccgccccctccccccttcgcggccaggccgccgggaagtgacacgttggcactggcccgcgctgcgcagggagggcgcaggggagggaggcggtggcggcgggcagggaggagcccccggccccgcc

SEQ ID NO: 6398 - DNA, 468 bp, Homo sapiens
  source 1..468: mol_type = other DNA
acagatggcccggctagccgcctggactgcaggggggcggcagcagcggcggtggcggatggcttggggctgcctgggcccccctccaggatgccgccaggtgtccctctcctccccctggggcacagagatatattatatataaagtcttgaggaggggcaccaacgcctgcccctgggggaaaagggggggcatatgccccagcccctgtaccacccctgctgttgcctgggcagggggaagggggggcaattaaacatgaattcaattaagctcactgcctttctgcagggatctgaggtttcctggaagacatccttgctaggctctgctctcctaccagaatcccctgccttcaggtggcagtcggctctgggaggagaggaccggccgaacccggtccaggccgcctctgcgtggctgtgacgtcgctgcgccccgcctactttgggtggtgacgcggcggt

SEQ ID NO: 6399 - DNA, 419 bp, Homo sapiens
  source 1..419: mol_type = other DNA
tcccctcttcagtcagtcggcgaagggggactgaggtcccgtttggggcacctgtgaacactgaatcacctctcacagttgctcagcaaaacaaggcagaggcaggccatcagggcttccttcccgtgggtggccatgcacaccgggcctggccgtagtcctgtgcatcagaggtcggccagccggtgtgagcaaggcttggagttcaggaagtcatcaccttctcaggggagtttggctgacctcaggactggcctcgagagccctggttaggtaccagttgggggccagggatggtacattgccgttggcactgtctagggaatgggcctcagctccccgagtcccagagagcttggctgagccctggtgttcccacctcctcagagccatatgtgactagcatccggagccagagc

SEQ ID NO: 6400 - DNA, 309 bp, Homo sapiens
  source 1..309: mol_type = other DNA
aggccaggccaaggtcagggcgggccccctcccgactcaccgagggggcagaggctgctgagcccacagctgaccccctatgaatcccggaacacagagatgctggctgccgcctgtgccgtgggggtgggctgctgcttgtaggcagggctcctaggtcagtccagccccacaaccctctgggtctgaggccttaggccaggcccaggcctcaagtgctgtgccaggtagggggcccacgaggctaggcctgcctcgcaggagctgccagcctggtttctagaaggctccttttccagaaaaccatca

SEQ ID NO: 6401 - DNA, 543 bp, Homo sapiens
  source 1..543: mol_type = other DNA
agggatggaagcagcgacttgggttcctccttgggcccagccagggagaagcgacccacgcccgcgtcccaggagtagacttcccggcacctggagccacccctgacggggcagaggggccttcccaggcctgtctgggccgctcgtctcttcggaggggcagaggggaggcggctcctaacgggctgacccggaggagtccgatgtagacagctccgcagcccccagccccaacccctacggagctcaggcgtctgcagcccctcctgcctgggcacggggaaccgcgaacccgggccggcccctccacgtgccagtagacccgcccctcccgggcgcccctctccgacccgggcatccgcagggagccggcgcgggcttgcgccttcccagcgccccttgccgcctctcgggaggccccgcgcggaccccagcctggctgggccgtcccctccggatgggccggcgggcggagcagcgcagagggcaccgccctcggcccgcccgccggggaggggacgcgagcgggaggctgcgccagcg

SEQ ID NO: 6402 - DNA, 259 bp, Homo sapiens
  source 1..259: mol_type = other DNA
caaggttgctcagaatttaaggctaattaagatatgtgtgtatacatatcatgtcctgctgctctcagcaggggtaggtgacaaaaaggagacaccatatgctttcttgctttctggagtgcaatggtgaagcgattccggcgaactcctgacctcaggtgatccacccgccttggactcccaaagtgctgggattacaggcctgccaggcagtctcttcctagaaacttggttaacctccatggccccaggaaggagg

SEQ ID NO: 6403 - DNA, 358 bp, Homo sapiens
  source 1..358: mol_type = other DNA
acagcggttattcctcttgtcacatgtggaacggagggccctgggcacagaggtctgtgtgtgtagccatctaagcctctaagctcaggcttaacccagtgcacgtgtgcgcacatacatgtgccccgggagatttctctcatgtgggcaatatccgtgttcccacttcgaaaggggccaggaaaagatggatccccctatccgggagtggaccctggtccaggcaggggctccagggaagagaaggcgtcacttccgggggccttcaccagtgtctggtggctcccttctctgagcacccagctgctgtggaggggctgtgccccaccgccacatggctccccagagggctgcctgc

SEQ ID NO: 6404 - DNA, 290 bp, Homo sapiens
  source 1..290: mol_type = other DNA
atgcccatcacagcggttattcctcttgtcacatgtggaacggagggccctgggcacagaggtctgtgtgtgtagccatctaagcctctaagctcaggcttaacccagtgcacgtgtgcgcacatacatgtgccccgggagatttctctcatgtgggcaatatccgtgttcccacttcgaaaggggccaggaaaagatggatccccctatccgggagtggaccctggtccaggcaggggctccagggaagagaaggcgtcacttccgggggccttcaccagtgtctggtg

SEQ ID NO: 6405 - DNA, 310 bp, Homo sapiens
  source 1..310: mol_type = other DNA
gatgggcatcctgaaagacaggcggaaccgggtcctcgctcacagagcggtccaggcctcaggcctagcctctgcccctccctagcctgaggctggctggacaccgacctcctggtccagccgccctgtggccgccagcagcggggggctccgggcccgcctctcctccccctccacccgcgatccgggccgctgctgctgggtcggaccccccgggctcagcccggcccctcgccgagctgccgccgccgccccgtttgctgaggaggaggcccccggccggggcgtcgggcgcggggcataaaacggg

SEQ ID NO: 6406 - DNA, 500 bp, Homo sapiens
  source 1..500: mol_type = other DNA
cctgaaagacaggcggaaccgggtcctcgctcacagagcggtccaggcctcaggcctagcctctgcccctccctagcctgaggctggctggacaccgacctcctggtccagccgccctgtggccgccagcagcggggggctccgggcccgcctctcctccccctccacccgcgatccgggccgctgctgctgggtcggaccccccgggctcagcccggcccctcgccgagctgccgccgccgccccgtttgctgaggaggaggcccccggccggggcgtcgggcgcggggcataaaacgggccggagccggcgcccggggcagtagagccgcgtacggcccgggtcagcgcccgcccgcccgcgctcctcccggccgctcctcccgccccgcccggcccggcgccgactctgcggccgcccgacgagcccctcgcggcactgccccggccccggccccggccccggccccctcccgccgcaccgcccccggcccggccct

SEQ ID NO: 6407 - DNA, 449 bp, Homo sapiens
  source 1..449: mol_type = other DNA
gaaggccttatcatgagaaagggccggacactggccgtcgccctcacgtacgttgcggtagcacccgcaggtactacagtctgacacattgtgggcggatacatcgcggtgggggtccccccaagtagcactaagctacagccacatgagggcgtcgcagggcagacgcgggccacatgggggcgcccccggtccgtcttagcccactcaggccaatgggcgccaggaggcggggttctccctctgatggacagcatcgccgcccactccggcccctgagaccccgagggtgggcctggcggagacaccgccaactgaactccagctgagtgctctcgaggccgaaccagcgggcctggcggtctgtgagtgggtggccagccgctaggggcggggcctcagcgttgacgggcaggcaggccgtcccacccctctcgcccagagcggcc

SEQ ID NO: 6408 - DNA, 433 bp, Homo sapiens
  source 1..433: mol_type = other DNA
ttactcaaaacagcctgccttgtattttgttatgtctgtacactgaattcttagaaaataaatacctccttcgggtcttctgaaggcccagaagtacagtgatgactctagaaaccagtctgttctgaaagctttcacctttcttcaggagcgataagagaaataagcatacgtttttgttcatttttaacactgatgatatattacaagataatagttggtattttagtattattgtacttatttgacacaataaataggcaattctgagttcatcttttaaaaaaaaaaaaaagttaaaaaaaatttactggttgcaaactaaggcagggaatcaacttcccttctgggctggctgcaagtaagttcactttcttaaaggaggagctttctccagatgtgaatcacccattagcgctgcccgcagtggcgc

SEQ ID NO: 6409 - DNA, 405 bp, Homo sapiens
  source 1..405: mol_type = other DNA
ttgttgctttccgggcgggcgcgggaaggcccgggcgcactggcctggggtttggggcgaggcgggcaggggttggcggtgctggcccctgacgcgccctgtggccgcgctggggcaggaggcccgccctgggtggggggagtgcgcgcgtgtgcacgagcgtgtgcgcgcctcccaggggctccatgcccatgcacccggcccgggccactaggaggttcgggtgggcgtgggccaggtgtgcgcagccctccgttcaccacggccctccgtcggggtctttctccgaggacctcgctgtgaccggcggggacgccgacggccaagctccccagcggcgtgtgtgtgagaaggccgggctcgctgaggaacgtcgcgcggggccgaccggcgcgcgcctgtgcg

SEQ ID NO: 6410 - DNA, 368 bp, Homo sapiens
  source 1..368: mol_type = other DNA
ggccacaggagctgttgactggtccaggtggagccatcagggtctatgtttacaccttagcagagagaattcacactcctttatcatttaaactataaaccaaatgtctcccaaagttaacttggcctaagctcaggaataattaagggagatctctttgactgccataattttctcactgttagaatttttgcaaagtagtaccctactcatttaggtgaaatgaacaatgtgtattttatgtgttccagatgtcccctatggttctggtgggagcgaagaggcgcggcgggaggcggcgccccggctcgcattggcccagccggcgtccctcctctggaggaggccgggcgcgcccggaaaagtgg

SEQ ID NO: 6411 - DNA, 271 bp, Homo sapiens
  source 1..271: mol_type = other DNA
aataactaagcaggttatttccagcagggttaaagttgttttctatataagagaaatctggttccagttgtccttaagcacaatggttaacactcatcgaatgctttatacaatcgtcctattttctaggtactagtattatgtttcacacttgaaagaaaaatcatagtaacaatcatgatttctccaagaggtgaatttggcgctcagcgggactgcgggtccggtggaattccggccggacgtggcgcacaggaagttacgcacggga

SEQ ID NO: 6412 - DNA, 340 bp, Homo sapiens
  source 1..340: mol_type = other DNA
gaagcagtatcatattttatcttgcaaagaatagaatttgggatccatgttctcactttacatcagatcagccggtggtttgaatgtcagaaaccaagaactttctttcactagtaaaaaattgttttttgaaatggagtttcaaaaaggagctttgtatttttaatagagacagacaagatatttgaagctcagaggactatccttttcttttttcttttttccaggaacatatgggaaagaaatctctttaaacacatttaagtcgacctttgagaagttgctgataagcagttatcaaaacaaaccctcccacctcgctgtgttggttggtagcctg

SEQ ID NO: 6413 - DNA, 302 bp, Homo sapiens
  source 1..302: mol_type = other DNA
gtgtctcatctacattttttctgcttgaagaaaagtgttgctcatccttgaaggtaaacttaaactcttctgaaactcagagttttcatctgttagagaaagacaatgaattaaaagcaattctgattattcccctggtgctacaccagctacattgccttgatctctagactgcaagcagccctggcaccaagccggcactgggggcgcgccatgcctgcatcccggagtggggcctggctcaggaggtggggcctggttcggaggcgggtctcggcgcggacccctccctggtccgtcag

SEQ ID NO: 6414 - DNA, 553 bp, Homo sapiens
  source 1..553: mol_type = other DNA
gttcagaaaaatcatgatcagtatttgtcaagtattagtctaaatatattcatctccaattttgtataactgaaaagtgtaaaaataaagaagaaagagatgcctcttgagtgaatttaatacagctgtttttgctgttaataataaaacatcttactgaaaccaaaatttgttcaaagtttcattaagtgcccttttggagctgtgtcttaatcgactgccagaagttgaataatacttaaaagtagcagtaaatttttcttccatatccacttttgatacatcatgaaggtcagcaagatgttactgctgtgcaaaacagctacattcgtgtaatattattttccatagggcatacatgtccactagtctattgctgactaatgaataaaagatgggatttcttctatatgcatttcagaaattctattttgattccttcattcaataacaataataatgtttttatgactatcacagcttgaaacacacacacaagctgccagtctgtcttaaggtgtgaccagattccttctaaaagaaggaaggccaa

SEQ ID NO: 6415 - DNA, 540 bp, Homo sapiens
  source 1..540: mol_type = other DNA
gttagcactctcgccagaaagggaattaaattaccttggagctatgaagcacaagtttagttacctctatccctgagatacatagagacagtcactctgtgacctggactcattgcaacaattcttgtgcctcagcctcctgaggtagctgggattacaggtgcgtgtcaccacacccggctaaggccaggctgggcctgtttttcttttttaaaaaagacctattagagctgtagaaatatacaaataaagatatataataccaaaaaaagtttcttttaatctgaagcatacatatattttggcaaatgtagatgtataattggacctaatgaaatgttcttaaaatctaaagacagtgtatgaattaacataaaaactggttttgtatatacaggccaacagatacaaactggatttgttattaagtacttggtatcgtcattctgcagatgcagattataatattaagatatgcacaaaattgtataaagtagacaatgagtgaccttttattggactgcctgcagtcagtcccta

SEQ ID NO: 6416 - DNA, 316 bp, Homo sapiens
  source 1..316: mol_type = other DNA
aggagtaacgagactcattacttactagccctgtattgtaatttgtaattatctatgtacatgtctccgcgagggactggcgctggtactcagaccccgggttcaagttccagctttgtgatcttagacaaataacttaatcgcctcttggtgttaattaacctgatctacctttaccccggcgcctcctccggagtggagcagcctcacatgtggcctgtgggccttgtcccacgggccggctccggattggctccgccgaagagaaaaccctgccgacagcccttccgatctcgtcagcgattgggccgggaat

SEQ ID NO: 6417 - DNA, 654 bp, Homo sapiens
  source 1..654: mol_type = other DNA
ttaaaaattgtgtgccacatttccagatatgttttattttaagtaagcaacagaataacttttgtttgcaaataatctctgtggcatatgagaaaattacttaaatcctgttttttttttaatttaaaaaaggtgagttatgactctattgggaaagatgtaacgtgtaaccaattggttttcaataaggtattctaaatttgtatacttttctttaaaataatattttttgcttgagaaatccaagttgaagctttctgatatattaactatttacaacaaatataaattactatctcacaacacttgaaaatttgcagaatgaatatattgaacagtgaaataactaccccaagtatttgatacagtatgtatacttttgggggttataattagtaaaaaaaaaaattactagaattttatcttagttggtgtctgtgaaatactggtttatctaaagttattaacagctcctaaaacttctcacaaatgtactactttttatcttttttaatgcagattaagagttcagaattagtttttagtataagttaaataaagagcaatctaggatttatacagccctattagttaaaatgcgctgtgtatgattcactacactgaaaatgtttaacattccaaatttaaatgcag

SEQ ID NO: 6418 - DNA, 744 bp, Homo sapiens
  source 1..744: mol_type = other DNA
cgcggggttccggacacgcggggtctgggcggagaggacgtgactccgcgctggccttccgccttccctccccggtcgggaaactgaggcccgggaccgggaaccacttccccgcgagcacggtccgcgagggcccggccaaccccggtcctaggcgtcccgactcccgcgcgcgatccttcgaccacacgcgccgctcggtcacctcagagagcgtggcggggagcgggtctcagagcgagcgcacggcccgggaacgcgcagggcgccagccccggccaagtcgccgtcgccccctcgcgcgctcccacccgcgcccggggcgcgccttccccgccccgccgctcgcccggcctcggcgccgcgcccgcccggggttccggcgcccggagccccagcccggggccgcgacccgcttccgcccgcctggcgcggggccggagcccgagcagccactgccgagcgcggtgggcgcgaggcgaggggcgcagcggcgcggggcggggagggggcgctcgctcgctccctctcggctgcgcacacgcggggtgcgctgccgccgcccgccgctgctcctcctcccgccaccgccttgagagggagagagagggaggcagagagagcgctttgtccgcgcgccgccgcccggcccgggactctgccccgaggaggcagccgcgccgagtccccgcctccgcctctgcccccgggcgggccgggccggccgcggtggggggagccagg

SEQ ID NO: 6419 - DNA, 318 bp, Homo sapiens
  source 1..318: mol_type = other DNA
ccgagtggctgggattacaggcatgtggccaggctggtctcccgcagtggcgcgatctctagctgggactcaggcgcccgccagcccgatctgaccttttttaaatgaagacgtattcaggaagacattcacgggggaaacagcatctccttcctccctgcacactcggcaggttccctggaaagttctagattcccgcctcatagaggctcgtgaatgggggtggggccctgcgaggggcggggtcacgtcacttcctgtgcgggacgcgctgcagctggagagcgtttctgggagggggcctggctaaggagcgcc

SEQ ID NO: 6420 - DNA, 299 bp, Homo sapiens
  source 1..299: mol_type = other DNA
ttgggtcttaggctttaaaacctctcttaaaggtaactaagctgcagctggggaagtaacggcggctcctcctggcctcggcctgactcagctgcgttttttatgaatgaaaaacgtccttacattcattatataaacaagcctgtgctgattggccaatggcccccggtgcataaattatgtaagaccccccgctggccaatggcctctggccaatgggaacaaggctgggctagggccgcgggccaatggcggcgggcggagcagcgagccgcggggggccgggccagcgctccagc

SEQ ID NO: 6421 - DNA, 233 bp, Homo sapiens
  source 1..233: mol_type = other DNA
caaatggaatacctatcccatacaataggccttcgagtatttgaaggtgctatcattcctggaatgtggcacagaacccaaaaagactgagtccaagttgcaatggattgttttttaacttaaataaaatacaattttttaaaatccctgctgggttagaacactgactcattggcagccaacagtaccaaaaggctcagtcatcaagtaaacatattcctcatgagtttcct

SEQ ID NO: 6422 - DNA, 466 bp, Homo sapiens
  source 1..466: mol_type = other DNA
gtgctcttctacattttaaaaaaagaagagatctatttattctgcaggaagctcaggcaggctgtgccagtctccaccaggctacgaggaaacaaagagaacttgttgattttgtatttttacggtatttatttgtcaaacaggggcaccaaagggggtcaggttcccatcgagcggatccacattcgtgtgtgcgcacgcgtgtgcatgtgtggaagcgcgacgcgcgcgcgccggtgtgtgtggcgggggcgggctctgcgcccgggggcagggctccgcagtgagagtggcagctggacttgccaggctgcgaggggcagggcacagagccgcagtgctgcctggcgctaccaaccacagcctggcagcctggtctccgcggcacccactggggctgcatccccctcccccgagagggctgcgcaggcgggaagacgcccagaggccagcttcggtccccctt

SEQ ID NO: 6423 - DNA, 342 bp, Homo sapiens
  source 1..342: mol_type = other DNA
cccctcacgtggacatgcacgtcatggagtgctcttctacattttaaaaaaagaagagatctatttattctgcaggaagctcaggcaggctgtgccagtctccaccaggctacgaggaaacaaagagaacttgttgattttgtatttttacggtatttatttgtcaaacaggggcaccaaagggggtcaggttcccatcgagcggatccacattcgtgtgtgcgcacgcgtgtgcatgtgtggaagcgcgacgcgcgcgcgccggtgtgtgtggcgggggcgggctctgcgcccgggggcagggctccgcagtgagagtggcagctggacttgccaggctgc

SEQ ID NO: 6424 - DNA, 628 bp, Homo sapiens
  source 1..628: mol_type = other DNA
aaaaaatgttctccgatcatgttccaatgttgtattgtgggcaaagaagaccacctagccagtagcttgttgtgtttagttagctaacccttacatacggtggcacccttcttatggattagagctctttttttaaaaaaaattgtgttttgaaaaaaattaaataatagttgcaagaataagtcagtgaactttaacataccctttagttgttaacatattgttttatttttgctcaacaatttgagaataggttgcagacatcttgaacctttcttctaaatggtagcatacatgtcctggatacctagtcatagtacaatgatcaaattcaagaagttaaactttggtacaatagtattatctaatttacagtccatattaaaatgttttctgcacaagatcatgcattgcatttagttgtcatgtacttctgactcttacctctcacaagctttgttgaagaaatttcaaagaggctgcttaaaaaaaaaaagagagactcttttgttcttaatttttacaactcagcaaagtctgtaatgcagccctgcttggtaagcattaaaggcggtactttgttttttctagaaaccatcaatagcgtctaaatgactgactcaatttt

SEQ ID NO: 6425 - DNA, 409 bp, Homo sapiens
  source 1..409: mol_type = other DNA
gatctcttgagcccagaagttcaaggctgcagtgagctatgattgcactgctgtattccagcctggggtaaataattttgtttaatcttcactgcttaacaattttttacattcatgtatgaatttctcttttattatgatctaacattacacctagcaaaaaggaatattattaactttaaactttgtgttctatcatttgaccttgataatttatgtgattttttaaacgtagagttttaaaattatttacatgaagcaatagaaaattaagtgattaatattattttttctttgatcttcagggccctggaaatacaaggctcgatttcctgacctcgtgatccgcccatctcggaattttcgctaaacttctgactttcatataaacatattgcttatagaacat

SEQ ID NO: 6426 - DNA, 420 bp, Homo sapiens
  source 1..420: mol_type = other DNA
aagaaagcaaggaccttgtctgttttgagtgcgtaccactgtgccagacacacagtcactgagctaataagtggagaggaactaaattgcattttacggtctaatttacctttgtatctattgccagtcttgcttcagacgccagttgctttacacagtgctgagaccatagtaagtgctctataaatgcaaactgccattagtattagtagcatttctgatgaaagcgtgctgatcttaccagcagctattagctgaccagcttcctacccccccgggttgaaaggcgcccagaaagcggtgggtctggctccaggtgccactgtagccgcaatctgccgctctagcaacggggtccgccaggtctcggtggtgcggggcctcgcgcttgcgcagtgggcacggcagcggcgcgcggag

SEQ ID NO: 6427 - DNA, 420 bp, Homo sapiens
  source 1..420: mol_type = other DNA
tcgagtgcttactatgtaccaggtatcatgctcatgattagcgaagttaagggatttccctaaggacacctacttagctgtagattaggattcaggtctgacttgagaactgcattactataaatgtactctaggaatccagttttgggagaatctcttaaaaattcagagactggagtcgttttgagtaaaacctggcgtgggtccaaggcggctgtcctggggcttcgccgccaccttggacgcgatccggggtgggactctgcgtgggccgccccagcgtcgcgaccgctcacgctgacagggtcggtagctgacccgcggtaagccgaaggcagcctcctcggcgcacccagtgcgcggttacctgctaatgcaggcgccgctccgccgcacttctccgcgcgccgccgcgcccgg

SEQ ID NO: 6428 - DNA, 254 bp, Homo sapiens
  source 1..254: mol_type = other DNA
ccctgttaaaattcacagaactgccaataagctttgcctcagttttgtcattcggagcagagaaaacttctctcccacaattgggagggatttcgtgtacctcaggtgcccactcgcggtagctcaggcagagcgggttcctgcagcggcgcgaccctctgacgtctagctgcgactgcagttctgaagcctaactggaggcgccggccgcgtgtgatgtcccgggcaacgattggctctcgcctaccgggggc

SEQ ID NO: 6429 - DNA, 357 bp, Homo sapiens
  source 1..357: mol_type = other DNA
aatctaatgattatagttttataacagtagcatttaataagacttaaacaactttatattctcgattaatactacacacaaaagtatgtctaagaaatgtttattgtttgaaagagtggtgttcacctttttccaagaattttctaacaactgtttgaacttaaagttggaaattaatgatttttaccttattctgatttgtacacaaatgtgacaatctcatgtcacaaggtaaacaaaccaatttactcgttaagtgccagaccagccttcagatgtaccgctcctgctgcagtatttcccgggaagggctctttgataatcacttttgatgtggattttccaaaagaacagtta

SEQ ID NO: 6430 - DNA, 277 bp, Homo sapiens
  source 1..277: mol_type = other DNA
cttcagatgtaccgctcctgctgcagtatttcccgggaagggctctttgataatcacttttgatgtggattttccaaaagaacagttacagtgacatgagacatcaatcattaatgctagtagaagccccactgggcctggacacacatgtgcatgtgtggggttacctacatgcaattacgtgattggtagttatttaattcacatccatgttcttttatgagctttttcttgaaatatgctctttaaacgctagaaaattctttcttcaggtatc

SEQ ID NO: 6431 - DNA, 338 bp, Homo sapiens
  source 1..338: mol_type = other DNA
aattgtcaagggtcacttaataggcagtgcctggagtcaacactggccctctgttctggccagaaagacacactgtaattctgctgagtgtagctgctcgtgcagcatctcagcctgcggtgtcagactcgaacccagagctgtgtcaaatgagtcaggactcccctctgctgcccttgtgcactggcaggggcactaggttactagtgctaggctctggtcagtggccctgaggggcagggaaccccacacgttttgctctcacattggagaattttatcaaattgctgagtatcatttttttttttcttttgaaccaaagcagaaatcatccttta

SEQ ID NO: 6432 - DNA, 514 bp, Homo sapiens
  source 1..514: mol_type = other DNA
ctttatagaatgcccttcatgataacctcttcatgacaaactactgctgatatgtgttttttgttgaaatacagtttttaaaagataattgtcttttgtatggtcccaataagtagaacctttctgtagcaagagtatggggctttagtctcttaatgagcttgcttccatacatatgcataaaaggaagaataggcttgaaatacaatgtgagaactttttatatctctttgactttttccccttaagtaaagtcattgtttaaaaataacttaaatgatgataagtagaacattttccatgctttttgcacacagagtgtcagccaggataatgggacagtcctccatattcctattcaggagggaatcagaatctaatcataagagccttgaacaaatgttatgatttcttaaattcatttgtatgtacactaaggttagaatcattgggaaatgctatccaaagtactgacttaggaaaatccaagttcagaattcaaggtgaacttggt

SEQ ID NO: 6433 - DNA, 342 bp, Homo sapiens
  source 1..342: mol_type = other DNA
attttttggaagagtacaagctagttgtatgttgtgtcccatcaggaaactaattataatttctccctttacagttattaagtaatctgtggggagatactcagagactatgtagataacctctctatattgattttgttactacaatgatgattgcagaatggtgatttttctaactatgggatgaaatgtacgtacctcacatttaggtgaagcagtccatctacagggttgctgcactctctctgggaagagcccaggtctgtgcacctgccttcaattcaggatttagggtgtatgcctggcactggaatccagctaaccacctgtattgttaccagg

SEQ ID NO: 6434 - DNA, 482 bp, Homo sapiens
  source 1..482: mol_type = other DNA
tgtgttttttgttgaaatacagtttttaaaagataattgtcttttgtatggtcccaataagtagaacctttctgtagcaagagtatggggctttagtctcttaatgagcttgcttccatacatatgcataaaaggaagaataggcttgaaatacaatgtgagaactttttatatctctttgactttttccccttaagtaaagtcattgtttaaaaataacttaaatgatgataagtagaacattttccatgctttttgcacacagagtgtcagccaggataatgggacagtcctccatattcctattcaggagggaatcagaatctaatcataagagccttgaacaaatgttatgatttcttaaattcatttgtatgtacactaaggttagaatcattgggaaatgctatccaaagtactgacttaggaaaatccaagttcagaattcaaggtgaacttggttcctgtgctgcggagcaatg

SEQ ID NO: 6435 - DNA, 364 bp, Homo sapiens
  source 1..364: mol_type = other DNA
ctggagtgcagtggcgcgatctcagctcactgcaatctccaccatgttggccaggctggtctcaatcctgggattacagccagcctgatttcttatttaattatcacacaagcctgttgttgcttacccagcattattcagatttgactcttttataatggtacctgtttaacatgttcccccgtgccatgatccatcagtccactgactgatgatggagacttatattcaaaatctgctatctactagaaaaatccagatttgtgcagatcacaacagcttgttgatggttatttgaacccagggtcaaggtgagttacacaacaaaaatgtatcaaggttttgtttaatcaattgcgtgtgt

SEQ ID NO: 6436 - DNA, 440 bp, Homo sapiens
  source 1..440: mol_type = other DNA
attatcaactgtagttttccaatgttggtctacaggtggggaccattctgtaatatagtttccccacgaaaataagaataataaagttttattgctgagagaaattcaaagcaagaaagagactttgcttttgcagcctttttaatgtctttcagccaaagagccatatttggggctatctttttcgaatccagggcttcactcaaatgtcctgcatgggactcctggaactcactggatgcccctgtggcagtctgcttctatgcaggtaggtatcctgcaaagaaactttgtatgaaatgtgtctgcacattgtactcataaaaatggctttgcaaaagtcacaggggaataaccgagttagtttgtataatcacctggaaatatgcactgtgctgccacgtgattttcaaatgcaaatgagcaggttaacaacccca

SEQ ID NO: 6437 - DNA, 381 bp, Homo sapiens
  source 1..381: mol_type = other DNA
tatcggcaaagtctacagcctttaaaatttaaattcgtgcgttccaaggaaaattattttggccactccagagacatctgcaaatgacactccatttttccttctcgcgctgcaaaatgtaccggtaaaccggacttcccgggactcgctggccgagttcccctcccgcacctgagtgccggcagcgagccgcgagccgggacctgtcacccgcgggaagccccggccgcccgacgaagcctccggtttccgcctccggctccggcgcggctcccccggcccgcctctgcgtcagggacgcggaaaccccgtaggagcagcccgggccctaggatttccagcgaccctgtaatatcgagaaattaccacatttttatccga

SEQ ID NO: 6438 - DNA, 554 bp, Homo sapiens
  source 1..554: mol_type = other DNA
tgctgtatctgcaggcatctaacacagtgcattctgtaagcatttgttgcaagataaatgaaaaaaacgtacaaagttaacaatggatatcatgctgagtttgtgccaaacaagttagtaattagtaaagaccagtagcagtgggccaccagcctagcccactgtgcatgaagcttggtggggctaaacatgattatcagtcttattgaacgccttcacttccagatttctaagtggggctcaggaattataatagatgtccatctgcgacgaagcaggacaaggggacctgcacctccggaggcccgcacctacgaagatagcgggctcgggaccttcggtggaccggcagggttccagaggcccgcgcgccgccgccccgccctcattgctgagcctgccaggtaagcagccccagcgccgtgcccgcgcgacctctactccttccgggagggtcgcgctcacgtctgaagtgggagcaatgcaccgggacagggacacctcctaggccatgcctggcgcgccccagcaccggaagtgacgcgttacgtgcc

SEQ ID NO: 6439 - DNA, 410 bp, Homo sapiens
  source 1..410: mol_type = other DNA
aggctgcttctaggtagctgtcaaaatgttatccgaaattttggaaccaaaaaatcttgaaagatggtattccaatatcacattttatgtaagttttctattatattagattcaaattacgatcctctgacagtgctcccttctgaagcactcactgtctgaacgtacacagtctcagacttaatcatgcacagtgagcaagactgtgttaattcatttacattaggaagtttctccgtcagatgcaggaaaaaaatcttgttttcctgcgctccacttggcttccgaagcccaagctgggtagggtgcaggctgtgggcaactgccagggacatgtgcctgcccaccggcctctggccctcactgagttggccaatggggactgcctgctaccaggctgttgaggctgg

SEQ ID NO: 6440 - DNA, 395 bp, Homo sapiens
  source 1..395: mol_type = other DNA
cagcacacagcctggtgcctagtgtgcactcagtagacaactgggatatgactattgcctgaggctggactggaggccttaaaggccccttccgccctgtccgggtgaaaagaacatccaggctgaggcttcagtctttcagcctgcagcttggggtggaagcctgttctttcctattctagataagacttcctcagggtctcgcagtcagccggtagcagagaccgggtgtacagcacccgattgacccctcgcggccaagcggggaagaggcatttaggggtccttgcgcagccgcgtggcccctccggcaggattccaagcccgctcgctagcgacctccaggccggtttggggccggagaccgacccagtcttcgcaactctacggaggcg

SEQ ID NO: 6441 - DNA, 231 bp, Homo sapiens
  source 1..231: mol_type = other DNA
ctctcacccaggctggactcctgagtagctgggattacaggagtctcgattcgtgctgggaatacaggcgtgagccatcatgcctggactatgtgcatgtgctacagtcttgctagaacaggccctaagaaacagtctctctcggcctgactgtgggcctacaaccctcccatgaggccaggcacccccagttgccctgggggaagaaatgctgacgtcaaggaagcttct

SEQ ID NO: 6442 - DNA, 214 bp, Homo sapiens
  source 1..214: mol_type = other DNA
agagtatatgtgtatatattttaacaaaaaagaaatgacttcattttttcaacaaatatatgccgtggaaaagttgtgatcatattgaattattatttatattcatatattctccaatggaggtcttaggacattaaggcttaatcaaagtctggcgtttgctttaaattactccaagagagacagttcctctttctgaggagatggcgggccc

SEQ ID NO: 6443 - DNA, 526 bp, Homo sapiens
  source 1..526: mol_type = other DNA
aggctggcctcctgagcagctgggattacaggcaaggctggtcgaagatatacttctaataacagcatttccaactacattacttggttgaaacagttgaaactgccattgcagttgcagtaaaggtaacaagaggtaaacttctaatatgtaacaggagatttgacttttctcatatgtaacaggagatttgacttttcatctagaattagaaccaaaatcgttaaatttgtatagatatttgcatttttgttcatgttgtttttaaataaagtgactcgtttaaaatttagttgcattttaaaaatcctccaatggcccggcggtggctcgatgggagggagagcgccccctggaggcattctcgtgtgctcgcgggaacccaaggagcctctggccccgcgggggaccccaaagtcaacttggtgaagtcggacccacggctccccgagccacagctcagtggggcgggaccgcccgggcctgggcggggccggggcggggcctgtcacgggggaaatcaccg

SEQ ID NO: 6444 - DNA, 321 bp, Homo sapiens
  source 1..321: mol_type = other DNA
atattttgtattttttctagaataaacccatatgattttttaaaaggaaaaataatttattaaaaatagcagacaaggccattgcagcatggatcctattgcatgtctgcaaaccctacccacatgctcggtactgcagcaatagtaatcataacttaagagacctccaattgtgttttgaaaatggctgcctaaggcatcatggttaccgtagcagccagatgcctcacctccccatactctttccaggccagggtgagatggtctgaagggggcaacctgcctggttgccgtggaaacaggttccactgcggacaaagg

SEQ ID NO: 6445 - DNA, 300 bp, Homo sapiens
  source 1..300: mol_type = other DNA
tcaacacagaaaaggtgcacagtcaaacttaactccatgggtatagacatatatacaggcccaggtctttctacacccctggggaggggaggcttcaggacttggtgcttccccagttccgggcccgctcacaggtgatcacgtgcttttctttcatgggtgtcctgaagaaaagcagaaaattatatggcaaaaaagactaaagagaaattagactttgtcccctttcactctctctctctctctctctctacacacacacacacacagcccctcagttattttctctcaagggctgaa

SEQ ID NO: 6446 - DNA, 441 bp, Homo sapiens
  source 1..441: mol_type = other DNA
tatacaacatataaagatgactgaaaagaattcatatattaagtgcttagagcagtgcctgacacgtagcactcaatagctgttagcttctagtgctaggtaaaatgagtataacagactttcaccagtttgcaaaagtaacttgagatgatgttaatgactagtactgtgtctaacacagaaaaggtgcacagtcaaacttaactccatgggtatagacatatatacaggcccaggtctttctacacccctggggaggggaggcttcaggacttggtgcttccccagttccgggcccgctcacaggtgatcacgtgcttttctttcatgggtgtcctgaagaaaagcagaaaattatatggcaaaaaagactaaagagaaattagactttgtcccctttcactctctctctctctctctctctacacacacacacacaca

SEQ ID NO: 6447 - DNA, 521 bp, Homo sapiens
  source 1..521: mol_type = other DNA
taagaaaaaagattacagctaaactctgagtctaatcttcttttcaaaatgactcagattgagtttctctatgatgtgcatttgaaattccatatgcattataaaatgttaatgagtagcagtgtaatacagtggctaacacttgggaaagttacttaacctctctgggcaatttcctctgaaaaatgagaatattgccagccatgtatacaacatataaagatgactgaaaagaattcatatattaagtgcttagagcagtgcctgacacgtagcactcaatagctgttagcttctagtgctaggtaaaatgagtataacagactttcaccagtttgcaaaagtaacttgagatgatgttaatgactagtactgtgtctaacacagaaaaggtgcacagtcaaacttaactccatgggtatagacatatatacaggcccaggtctttctacacccctggggaggggaggcttcaggacttggtgcttccccagttccgggcccgctcacaggtgatcacg

SEQ ID NO: 6448 - DNA, 534 bp, Homo sapiens
  source 1..534: mol_type = other DNA
ccaccacgtggaaggggacccgagccggttgtcagtgctggctggggcagcctgctctgcagattggtccattttacagagagccaattggtctgttttacagagagatccacaaaccctcccagctggcttcacccagtggatcccgccccgggggcagcaggtggagctgcctgccagtcctgcgtgtgtgtgggcggtcgatgggaccaggcaccatggatgcccagggtggggagactcaggcatggcgggctgcaggtcccgagccctgccccacagagaggcagctcagtgccggtgggccggcactgctgggggacctggcgcaccctccgcagctgctggcccaggtgctaagcacttcactgcccagggctgggggcctgccggccgctccgagtgcagggcccgccaagcccacgcccacccagaactctagctggcctgcaagccctgcatgcagccccggttcacatctcccagcaggctgagggagccggttctggctttggcctacccaggaaggggctc

SEQ ID NO: 6449 - DNA, 611 bp, Homo sapiens
  source 1..611: mol_type = other DNA
cccagctggcttcacccagtggatcccgccccgggggcagcaggtggagctgcctgccagtcctgcgtgtgtgtgggcggtcgatgggaccaggcaccatggatgcccagggtggggagactcaggcatggcgggctgcaggtcccgagccctgccccacagagaggcagctcagtgccggtgggccggcactgctgggggacctggcgcaccctccgcagctgctggcccaggtgctaagcacttcactgcccagggctgggggcctgccggccgctccgagtgcagggcccgccaagcccacgcccacccagaactctagctggcctgcaagccctgcatgcagccccggttcacatctcccagcaggctgagggagccggttctggctttggcctacccaggaaggggctcccacaggtggctggctgaagggctcctccagcgcggccagagtgggcaccgaggccgaggaggctccgagagcgagcgagggctgcgagggctaccagcatgctgtcacctctcactttgcctattataaaaaatgagagagagaaaatagctgtctgttttcagaacaaagacttgttctgtgtactcagacagtc

SEQ ID NO: 6450 - DNA, 274 bp, Homo sapiens
  source 1..274: mol_type = other DNA
taaatgcttaccggccaggaatctgttagaaaactcagagctcagtagaagctcaaagtgtgcagtatgtgaaggagaacaatttacaaattctgaggtttattgaataatttcttagattatacatatatatggggtgagccagaggtaccttctcccccatacatcttcaaggctttttatgagataatggaggaaataaagagggctcagtccttctactgtccatatttcattctcaaatctgttattagaggaatgattctcatagcac

SEQ ID NO: 6451 - DNA, 352 bp, Homo sapiens
  source 1..352: mol_type = other DNA
gagttcaatcagaattcaaggacaggttttcttaaacttttttccacatatagatatacaatagtggtcacatatgtttaaatgcttaccggccaggaatctgttagaaaactcagagctcagtagaagctcaaagtgtgcagtatgtgaaggagaacaatttacaaattctgaggtttattgaataatttcttagattatacatatatatggggtgagccagaggtaccttctcccccatacatcttcaaggctttttatgagataatggaggaaataaagagggctcagtccttctactgtccatatttcattctcaaatctgttattagaggaatgattctcatagcac

SEQ ID NO: 6452 - DNA, 288 bp, Homo sapiens
  source 1..288: mol_type = other DNA
aaagctcttttaaaggatctgtcttctcaaggagcctagttggctactctcccatgggggcagccagcagttgtaatctaggagacgcggcgtgtccagaacttgctttgggcaaggcctcctccctaataaagcagggctgttatagtggtgcttccacacctgcggcatttggggtgggggtggtgacaacattgcccacactcaacccacacactcaggagttggggggggctggtccaagagtgagtcattgccacttgtcatggtgaaatggcaaggttccag

SEQ ID NO: 6453 - DNA, 303 bp, Homo sapiens
  source 1..303: mol_type = other DNA
catatggccaaaaatttaagcttctttcaatagtattagtattgaaataatacatctttaaaacgcttgcttggcaaatatttttctcgtggttatatatataacatactttgctacagcgaaggcgccgacgtcacagaggatgatggcttgggcccggggagggagagccaccttcaggcccctcgagcctcgaaccggaacctccaaatccgagacgctctgcttatgaggacctcgaaatatgcgagggcttttggttggccaggggcagtaaaaatgtccgaagctcaaattccgaga

SEQ ID NO: 6454 - DNA, 498 bp, Homo sapiens
  source 1..498: mol_type = other DNA
tttatcatcaatacctaaatctatgatttataaatattcctcgaccaaagacttaagatcctatttgcatccattgaggtcagtagccatgcccatagcccccagatatcattggtaagtgctaatttgctgtggtaaatttcttcctataattgaacaaataaataagtccaaatttaaactcttcaacttctaaatgtgatcaaccatggtatgagccaccttggaagagatatggagtaatccaaaaattttatgattctttggttccatttagagtaatgagttttatttttggatatattaaaaaacaacaaaaacaacaagtacatgggctaattgagtcttttaatactaaagacactaatattccaggattctgagccatggggttctgcataatgcaatttaattaaatatagatggcatctatgactagtccagtccttctcttggcatgctgttaaaaggttgcacttccttaaaatgcagtatttt

SEQ ID NO: 6455 - DNA, 301 bp, Homo sapiens
  source 1..301: mol_type = other DNA
atacctgggattacaggcgctcgcggccaggctggctcgagctcctgacctcaggtgatttgcccgcctcggcgtcccaaagtgctggaattacatagtcttacccctgaaatgtctgaattcaaacacttattaaggcttaataaatccaataacatgtgtttttacattatttctcctcagaagaaccactttttgctatctaactcacctgaagatgcaatagcggtatggaatgctttcctggcgacaggcttgtctgtattcaaaccagttcatctcgcacagagcaagctttctg

SEQ ID NO: 6456 - DNA, 300 bp, Homo sapiens
  source 1..300: mol_type = other DNA
attctttacctaaattaaagttgttaaaagtcacagagaaaattgtgcaagcaattatcatcctttatatcactcttcactaaacagtagtcagtctatgagactgtattgaagaaatagaagtggacttagaatactacatgttcttttaaatatgtctcttatgttatagagtacattgataagctgtaggaggcttgcaaactttcaaatgtattgcaaaagtatgatttgattagacctcaggttacccttctgaatgagctcttcctcaatcctaggcctggccaggcatggtgc

SEQ ID NO: 6457 - DNA, 604 bp, Homo sapiens
  source 1..604: mol_type = other DNA
acttcccaaataaactccaacatctttgtaaatatttcttagagtcactgtatgccagtttgggcatatccaggactagaaattgagaggtgacagcgtgctggcagtcctcacagccctcgctcgctctgggcgcctcctctgcctgggctcccactttggtggcacttgaggagggactcttctgggctggccaaggccggagcccgctccctcagcttgactggggctgcgcgcggcgcttccgggccagctggagttccgggtgggcgtgggcttggcgggctctgcactcggaacagccggccggccccgccggccccaggcaatgaggggcttagcacccgggccagcagctgtggagggtgtactgggtcccccagcagtgccagcccaccagcgctgcgcgctgccttcccgtggggcagggctcgggacctgcagcccgccatgcctgagcctcccacccgctctgtgggctcctgtgtggccggagcctcctcgacaagcgcaggcgcatggcgcgggactggcaggcagctccatctgcagccccggtgggagatccactgggcgaagccagctggcctcctgagtctggtgc

SEQ ID NO: 6458 - DNA, 426 bp, Homo sapiens
  source 1..426: mol_type = other DNA
gaaattcaatcatacacataacagcattttgtttctttattttataccaactctgtatgtagaacacacttgcttaggtttcagaatgtgttatctgcatttctgaaggagaaatgatacttatgacttgctataggctgcaaagccattaaatgacagatcaggattcactaaatagatattaatggatcatcattaattcaatgtgtatttatttattacctaaggggccccccatctagggagggggctaatttcagagatacactgctctacatgtcttctacatttttgacaagagtggtagtgatgcttaaaatcacaaattcataaagaatattaatgataggagtgtaggcctcaggcttaagcttaattataactacttggaggcatacactcctgctccctcagctggatgtgtat

SEQ ID NO: 6459 - DNA, 509 bp, Homo sapiens
  source 1..509: mol_type = other DNA
tcacctatttacaggtgtgtctgaatcatatttcattcaatttcattcagaaaggaaataaattattttgtgtgtagactttcctgatattacactgatttgggaatatatgaacaattttatggtttcctttcgaagtagattaaaataaactagaatatttttattaacaggcaatttgaaataatttgtgcacttcagaatattctacaataatatattatttccaattttaatatctttaagaaaattactatattatatgtaagtacatgtgcatgtgttttatttaactcaataaaggttattttcttttgtgaaagggatatctctttctcttagctgagaggaagagtgagttctaagttaaatataatcaaggaatttccctgtcttccagatacaaggaatcagctcagttcagttacaaaagtccaggctgctgaaattaaactctgatgccattcatgccagcatccaatcacgacagagatcagaagttcagagat

SEQ ID NO: 6460 - DNA, 520 bp, Homo sapiens
  source 1..520: mol_type = other DNA
agaaaggaaataaattattttgtgtgtagactttcctgatattacactgatttgggaatatatgaacaattttatggtttcctttcgaagtagattaaaataaactagaatatttttattaacaggcaatttgaaataatttgtgcacttcagaatattctacaataatatattatttccaattttaatatctttaagaaaattactatattatatgtaagtacatgtgcatgtgttttatttaactcaataaaggttattttcttttgtgaaagggatatctctttctcttagctgagaggaagagtgagttctaagttaaatataatcaaggaatttccctgtcttccagatacaaggaatcagctcagttcagttacaaaagtccaggctgctgaaattaaactctgatgccattcatgccagcatccaatcacgacagagatcagaagttcagagatagttttagtcaattgatgaatctcattggctaaaccgcctctttgcaaatatgtatgaa

SEQ ID NO: 6461 - DNA, 540 bp, Homo sapiens
  source 1..540: mol_type = other DNA
tctacatgaatgttggtacgtatttatgtaaatgtatttttaaaacaaaagccaattgatatcttatgctttaatacttattccactaatcatttacatagatgcatcacgtgcagtaatcatttttattacctattcacaagcaaaaatattagtataaactgggtgcgttttgttaaaaaaaaaaaacatttatcaggattcctatttcccgttaacttgttattgaaacatgctcgaaaaaatcaggtagcttattttgtaattgcttgtataagttaaaaactctttagctatcaggcttttaatttttaaatcattcttgaaaccccaaatctagattttaaaaaagaagccttctaaaagttttcctgaagtttacttttcagttacaaagagtaaaataactttctgaaatgctgttttgtttttaaaagacagtgcactttcttatgaaagagacagggaaagttttacccttttaaagattggtgataaggaattctaactacttaatgagcctcactccattatatatta

SEQ ID NO: 6462 - DNA, 730 bp, Homo sapiens
  source 1..730: mol_type = other DNA
tgcgtaggtacacatggcatctacggtttgattcagtctgaaatggcgctccaggcttcatttagaaggtgaagcactctgcaagagattccagaatttggattttctttatttcccaaaaagaagactaatactatccacttgtacaacccccggccggcctcaagcggcgctagctctctggctggcgctggagtgtgccgcccctggcagccccgccgctgcagcggggagcctgggagagcggctctcggagtctcaggcagcacctttaagagcggctggccaggcacggcctccgcctctcagtacgcggagcgccggcggtcacctggggctcgcggagcggccagatcgcggcggagtcggcgcgcttccccgagggaaggtgggagaggggacccggacgcgaggtgccccgaagccctctcgagcgtaaccgtcccgcgcctctctgaggcggaggatgcgggagcgcatctgggcgccgccgctgctgctgctgctgccgctgctactgccgccgccactgtggggcggccccccggacagcccacgccgggagctggagctggagcccgggcctctgcagcccttcgacctgctctacgccagcggcgcggccgcctactacagccggtgcgcgacttggaagcggcgctgcgcagccaccggcgcctgcgggaaatccgcacgcgctgtgcccgccactgcgcggcgcgccacccgc

SEQ ID NO: 6463 - DNA, 433 bp, Homo sapiens
  source 1..433: mol_type = other DNA
atcccgggttcaagtgattctgttggccaagctggtctccaacagctcaggtgatccgggatcacaagtgtgaaccttgtattatagctgtatacattatatatatcaaatttgtttcctatacagtactgtgagcttcccaaaggtaagaatcctgacttatcttctctttcacctagaatatttactttaagagtaggcatcaaaaattgttaatttaattgaaatatattaaatgatgtagaaatgtcaccaaatggtatcctggcactttctttatctgaaaacagacaatctctagagaaaaagtctgggcagatgactgatgtgattcagctccaacaattacacagccagggctgttcggtgattccacataaaagccttcttcggaaaaatcatagcaactagatacacaggggctgaaagactg

SEQ ID NO: 6464 - DNA, 481 bp, Homo sapiens
  source 1..481: mol_type = other DNA
ggtccacccgccttggcctcccaaagtgctgggattacaggggtgaggcccacagcaagaatttttttctgaatagaaactgaggccctcagttgccaacctcctgcctccaaaggttctctgggccctgtaaaaccacgggctgcacaggaaaggcaggctatatattgttcttcccctggcccacatttaggcaaatcatgcgtaggtacacatggcatctacggtttgattcagtctgaaatggcgctccaggcttcatttagaaggtgaagcactctgcaagagattccagaatttggattttctttatttcccaaaaagaagactaatactatccacttgtacaacccccggccggcctcaagcggcgctagctctctggctggcgctggagtgtgccgcccctggcagccccgccgctgcagcggggagcctgggagagcggctctcggagtctcaggcagcacctttaagagcg

SEQ ID NO: 6465 - DNA, 376 bp, Homo sapiens
  source 1..376: mol_type = other DNA
taataaaaagggctctcagaatctccttgctattctttgattttgtaaagaataggaagaaaagcaaaattagaaatgtcaacattttatgttccaagtgcttttttcttttgctttttaaaaaagaatttacaaaactaccatctagcatatatgttttatattttgctatatcaaattaaagttaagggaattagatgagctgcttagactgaataattatttcttgcagataatgtgaaatgtcctctggggagtacactctcaattgagaaccactgctctaactgaagctgtgaatcttaacctttggttagtatctgcatcagattctagttcaaaaatcgaagttttagaaccattgttcctaagaatt

SEQ ID NO: 6466 - DNA, 297 bp, Homo sapiens
  source 1..297: mol_type = other DNA
ctggggaaacggggcactggccaggtccctctgtagagtgtaaaagtctctgaggctcatgccttttaataagatattgggaaaaaagtattaaacctaaaactgcagctcttgaaggatcatttttgcagggacgcagctctggtgcctggtcctgccgggtggtccccacgccgccagccgcgcgttccccaaccgggcgctcccggcgccctctcggtgagccgccctgaaaccgccagggggcgctccccggctgccggggctgaggcgggcggagctgctttaaatcgcggc

SEQ ID NO: 6467 - DNA, 614 bp, Homo sapiens
  source 1..614: mol_type = other DNA
aagcgtgcacacttgagaagttaccaggcttcaaactttttcagtcgaggtctaagagctcaagttcaagtttggccttcactccctcaactgagcacatgatcagaagacttgatcaactgaaggactggggcctctggacggccgctgtgaggtgggggtgcactcactgctcagattcagcaagctgcactggatctgcccggtgctctgcgacacgcaggacatccacagcccctcgtacatggcctgggcggtcacgatgttgtcgccggcataggagtaaatcctccactggggcagggcagtgctgaccccaacagctgcagccccgcgttggccatgactcgctcgggcgcccgcgctggctcaggggtggcagggcaacccggactcccgaaggtggctgggccccgcggattaaggcggggagccctgctcgctgcgccgccgctggagaagctctgggtcggggttggggtccgcgcccggggcggcgctggagaagctgcggttgctcccaggctcgggaactgagacgcagaaccgctgggcgccgcgatttaaagcagctccgcccgcctcagccccggcagccggggagcgccccctgg

SEQ ID NO: 6468 - DNA, 428 bp, Homo sapiens
  source 1..428: mol_type = other DNA
gaaaatgttgatatatgtgctttttaaagcatattaaagagtattggttatggaatttgtagacccattaaggatatacatattaaaaacttttttttacaaaaaagaaacacactttcttcctaatataacagtttttttttcttccgttttcaaacattggtccatgagggaaaagtaataatataggaaattcttagtcatgttaatattttccatttagctattactgacagaatatcttttattcctcatatgaagaacaagcattatataaagaaaatattaatacatgcattttcagaaactacactctcagacctaggagccttgtagtcggcgaatattaaaatagtcctctccagcatggggtgggacccttcctggtgaccacagcccagttgggtgacctccaggaccccactgtt

SEQ ID NO: 6469 - DNA, 562 bp, Homo sapiens
  source 1..562: mol_type = other DNA
tcatgaagggccttgccagtcaggaaagcctttataacgcttcccgggatatattaccaatgaatgaaggcaaatatttgttttgagattatttccttctggcactgtgctaggcaatgggtatattaccagtggacaatacagatttagtcttgcctgtcctgctcatatgaatggagatcgcatctacatcctgccgcgctctgtgccggcacaggagagcacgatcttgcaatgagcgcatgtgtgcgcctcggtgtgtagtgaggggcgtagcttcccacagcgcctggcagcgtgccgagctgcgctgcagcctttccccgcgcgctcaagcccgcacaggcggtggcagggagccgaaggggccgagcgcagccttgcatccgtccgcaggcgggcccggcgccgcgcctcctggcggcgggcgggaccgtccaggacgccgccccgcggccgcagctcctggaagcccagagcgccggtggatcgcgagccaaggcggcgggtggagcctgagccgtgaggccgtggccaatcgcgccgctccgggggaggagcc

SEQ ID NO: 6470 - DNA, 402 bp, Homo sapiens
  source 1..402: mol_type = other DNA
taggaagatctgcatttgaaatcctcataaagtcacttaatttattcagatggggaccctcttctaataacataacatgttacctttataacttaataattcatttaaaaaataatttgtgtatgtaaggatgcaaatatagaaatattttggttaaaaaatttatagctcacatgttatttctgtcattgtgtttcactgacacagcactgtgcacctgacggagctgagtactcattatttccatagctgatcatttaaaggtccaaaaattacaccattgaaattccctggtgactttttaacaaatcttagtgcattttatttcccaaatatgatttgtaataatcagagctaaatctatattcaaatgttatttaaatgccatgatcaaagcaatag

SEQ ID NO: 6471 - DNA, 541 bp, Homo sapiens
  source 1..541: mol_type = other DNA
ctctgaagtgcagaaagtgcaggatatattcatgaattagtagtctaataagcctaaatatcaaactaagtaatttagattttattcaggaactttattaaagcaacgggttagtaaaaagattagtcattcttgcagtgtatgcactggaacagagtcaattttagagttatactataacatcgggacatttgccagctttgaattaattaaattcagccttaatttttaaaagagctgcttgaaacaaaatgaagccatccttttctaatatagtgagacagtaatgtgatcccattatgattcatttcaaattttattcagttggttaagaacaaagtgatagttgcaaatgctttagtattaataagatttgaggttaattaatcctggaatctggaaattaaaccataaattgtgaaaatccaacagttttttatttcaagatgttgcttcatgcttgtgcatctatttgaatgtgtgggcatgcataggaatgcttccaagtagtgaatcatgttaactacttgattgcattgca

SEQ ID NO: 6472 - DNA, 285 bp, Homo sapiens
  source 1..285: mol_type = other DNA
ttgaaagtcttctaaatttttgctagcctaaaaggactctgagctgtgagtgacagaaaatcaactattactagcttaagcaaaactgaggataagttggttgtagatcccagaatccaggagttgctgaaatgccagctggatatcactgtggtaacaagacacaagaaacagaatatgtaactcttttctttggtcacccacaccctctattttagagagatagaaatgtcacaattacaatcagacacattcatgcgattttgatgaatgaatgactcagtt

SEQ ID NO: 6473 - DNA, 294 bp, Homo sapiens
  source 1..294: mol_type = other DNA
cacaagaaacagaatatgtaactcttttctttggtcacccacaccctctattttagagagatagaaatgtcacaattacaatcagacacattcatgcgattttgatgaatgaatgactcagttcctttttgttgaggcctttaggatacaaggcccccacctaaagacgcgaccctcccgtaggaggggggcagggcccgggggcgggagcacagcggggccccagcctcaggcggcgcgtcagaggcggcagcgggcgctgatcttcgctcgccaggccccggtccatttccg

SEQ ID NO: 6474 - DNA, 432 bp, Homo sapiens
  source 1..432: mol_type = other DNA
tattacgcaaaatgctaatttaaatgtattagactctagagtgtggaaatggaaaaatcttgcatttttatatggaaggtgttgagaaataatatgttagaatacatcattcatgtcttggtacgaaaggtaatataaatgtatatgaagagttttatgttttttcactcacatgaataggggattggataaaatcatagcaccatatgattaatactatacataccaggttttgtcagagtgaaaactgttttctacaggtgctaaaatctcacgcctaagctttaaaaatcagtgaccactagtcactagtctcctagtgcttgaaactctgagaaacaatcaagcagtcctttcctgagatttttgggctggcctgagcacacacaagattttgcaaagcccttggaactatgcttcctaggaccaaag

SEQ ID NO: 6475 - DNA, 735 bp, Homo sapiens
  source 1..735: mol_type = other DNA
cagctgagccagccggaggggcggcggcggctccgcgcgcccagagcctcagcccatgaatgggactccaccctgagcgccccctcccgggcctggggaggcggcggcgcggcggcggggggcgccccgcaagcccgcggctctgagcggccacccgcgcagcaagttgggcgagttggcagccgcctgcacctgcctcctggccccggcccctgattccgcctccggccccaagcgcccgggttgcgccctcggctgcctcgcgaggtagccccaggaggcctaggggccccgcctgcgcccctggcgccagaccatggtgggcagctccggccaggagcctcagccgccgcgagccagcagccagcccccgccccacccgagcggacgcgcgggtattcgcagcgcgcgggtcacttccttcctcggccgggatgggcggcgcgggactgagtgatcggccttgcgtccggcgggtaatccccatctgatctgctgcctgtgagctgctgactgccggggcgcgcgagcctagggggcacgggcagcagcgcggcgatgacctgatcccgagcccgccagggcgcccctctgagcctgtgcggagaccagctcggtgcggcggccccgggtggaccatggcggggagctcctgagtcattccagatttaggattccctaaatgatcgcctctcgctggtttctccccgaggggtgcttggccctcgaggatct

SEQ ID NO: 6476 - DNA, 423 bp, Homo sapiens
  source 1..423: mol_type = other DNA
aataagattattattctcaaggagagatgatcacctcaggaaaaaaaaaaaggtagtaaatacaacacaatttttcctgttaaacattttgcatataaacgaaatttagaaatattttgatatgaaagtagcacttcaagagatttgtggttttgcatcttcctctagagctctgtacaagaaaatgattaggtattgcttttggaagtacttattatcaataagacgccacctttggggacttcttgcaggttgttggaaaaaagctaaaaagagcacctcaaaatatcctcagtggcttttttgaagaactttagaactgagaatattaacctttgacagctaattcgtcctgaggaaaatccggtggaggggggacgccctgcgcatgcgtgccagcgcccatgcaaatctgctgtgcat

SEQ ID NO: 6477 - DNA, 571 bp, Homo sapiens
  source 1..571: mol_type = other DNA
atattagagtaggttgaatctcattaactcattatatgttaagataaataagctgttattcaggtcattaattaccttgtcctatcatcttggcaatccaagaggaaaagggtagaagacaggtttcatattccttaaggcagtttcctttactatttaaaggtattggacggaggaagactttcttctccttgaatgcgcttggcaaaccctgcccagaaatgcatccacacctcgcgcgtcttcccaagtacggattggcaagtggtatatgcgtgcaggagacgctggtgctggctccgtaacaccggagccggcagcttgttgatcagagctggtgaatttcacattgttcgcccgggggaggctccagttggctctacgaccgccgttgccgctgccagagagggccagggcagggcaggaaagggtgtcggggccacacacgcacctcccgaagctcgcacgcccagagcgcacggagcgggggactgcccgcccagacgcccgcccgccaacccgcccacgagccggggccaaagcctgggagcctgcgagggggggtgggtgc

SEQ ID NO: 6478 - DNA, 482 bp, Homo sapiens
  source 1..482: mol_type = other DNA
cctgatctaaatcagggacgataacctatgtttctcacagccaatgggcctcctaagtgtttgaatgatacactgtaagcctaactccacatctggcaaatggtgcgtactcaaattttatctgttgaatgagaaaattttcatcttgtcatccaacatgcaatacattgatattagagtaggttgaatctcattaactcattatatgttaagataaataagctgttattcaggtcattaattaccttgtcctatcatcttggcaatccaagaggaaaagggtagaagacaggtttcatattccttaaggcagtttcctttactatttaaaggtattggacggaggaagactttcttctccttgaatgcgcttggcaaaccctgcccagaaatgcatccacacctcgcgcgtcttcccaagtacggattggcaagtggtatatgcgtgcaggagacgctggtgctggctccgtaacaccgga

SEQ ID NO: 6479 - DNA, 442 bp, Homo sapiens
  source 1..442: mol_type = other DNA
atctgattcagcttataactctggatatatattaaggaacatgtaagaaaatattaatgcataaaaaaagctacaacttctcaagtgttctagtttccactttgtgtcttctgtggactgttaaaaaagttgcatatttaggtagttgttatcccattatgacaaaatacataaaattagcgagatattttttagccttcaaataagtgggaaaaaatccttttagctgagattccatttacatcagaataaaaatctaagttatgactttcaagggttccttacttagctaggttagtattcctggcctctttttttagcagtgagaaaaaggatactctcccttgcaggtaccatgattccttgggccctaagggaatttactcatgatgggtgtacccgaacattcctggtcaagcggcgcctagcacagcgcctggtg

SEQ ID NO: 6480 - DNA, 405 bp, Homo sapiens
  source 1..405: mol_type = other DNA
atccctattttctaatcaaaatatcaaattcagtggtgttgaaatttggttgctcatttgaaaacttttgtaaactctaaagagaaaatgaaaagaatcaagttattaatatagtttactttttaaagtagtgtaatgattatgatgatgattatttcctatcatcttaaatctttatattactgtatagttattattgacattttatgtactagaaactgaaattccagattttaagttagaactcagatttttctaattccaaaatgaaagtctgcaaagtgactattctcattccttggctgagacatttatggatcgcatacaaaatgagttcctgagattagtctaataggcaaggtgtgtactaagagattttaaaagcggggaagatcacaagttgtg

SEQ ID NO: 6481 - DNA, 478 bp, Homo sapiens
  source 1..478: mol_type = other DNA
aaaaaagttgcatatttaggtagttgttatcccattatgacaaaatacataaaattagcgagatattttttagccttcaaataagtgggaaaaaatccttttagctgagattccatttacatcagaataaaaatctaagttatgactttcaagggttccttacttagctaggttagtattcctggcctctttttttagcagtgagaaaaaggatactctcccttgcaggtaccatgattccttgggccctaagggaatttactcatgatgggtgtacccgaacattcctggtcaagcggcgcctagcacagcgcctggtgctaggcgctggagcgcgtgcgttgcgtgcgcgcgcggaggcggctgcgtcggggcgcgagaaggtgcagttccccggcgggcgggcgggcgggcgggcgaagctgggctcggggccaagcgaggtctagccggagcgactgtgccccgcctcctgggc

SEQ ID NO: 6482 - DNA, 303 bp, Homo sapiens
  source 1..303: mol_type = other DNA
tccctgggagatgaagcaccatccagtggtgacccagtgatgactccacttacctgggaagctgggaaccagggaactagagctatttcaggcctggctcggccaaagcattgattccttgggaggcagtgcactgctcatgactactctgggaagaaagttgccaaggcattgtggaggcagtgcacagcagcagctttaccatagtactctttttcttccactgcattaccagaggcagtgcacaggcagcttcccctcaggccatgcagggcagggtgcagtctctgccaaggcactcat

SEQ ID NO: 6483 - DNA, 508 bp, Homo sapiens
  source 1..508: mol_type = other DNA
agcagctggaatacaggtattataataacaatccactttctatcatatttgtttggatgtttgaatcctggcactgtttattgaataaatgtgtaaacaaattaaaaaagagtctggccatatagtcatttgaatattttatttctagacttccttaagtgttgaaccatcaatattttagtgaaaggagactacatagactagtttgatgatacctttgttctttttctacatgtgtttcaaaaaagtaaacttaatttcacatacactttaaatagaattttttttgcatatacaaggaaatgtgattacaaataccttttgaagaggattagtgataatctgtaccttttgtaagcaaatgagagtacgtggattgaagctttcattcatcaaagaaaatctgcacactgggcaggcaatgagttctttccctgtaatgggagcagcctcctttgagacagctgctctgagaggcaattcctcctagcagagggcgactcgtggg

SEQ ID NO: 6484 - DNA, 519 bp, Homo sapiens
  source 1..519: mol_type = other DNA
cctactgttcaaatgcacatttagtttaataatcctaacagcacttgatcagtgctgtacaatgtactttcacaatgatcagcagctggaatacaggtattataataacaatccactttctatcatatttgtttggatgtttgaatcctggcactgtttattgaataaatgtgtaaacaaattaaaaaagagtctggccatatagtcatttgaatattttatttctagacttccttaagtgttgaaccatcaatattttagtgaaaggagactacatagactagtttgatgatacctttgttctttttctacatgtgtttcaaaaaagtaaacttaatttcacatacactttaaatagaattttttttgcatatacaaggaaatgtgattacaaataccttttgaagaggattagtgataatctgtaccttttgtaagcaaatgagagtacgtggattgaagctttcattcatcaaagaaaatctgcacactgggcaggcaatgagttctttccctgta

SEQ ID NO: 6485 - DNA, 270 bp, Homo sapiens
  source 1..270: mol_type = other DNA
tggtgccacgtgctattgaaagggcatctcgaatcaccgtctctgacaccgacggacgcccctttcgccggctccgaacgggccaggccacagcggcccgacgtagtcgccacatcccgccggcggggaggtcacgcaggcgccgagacggccacgcgggagcccccgtgtgagccccagcccggctcccggtccaggaatgacccaggaagtggccctcagcagcaagggcacagagccgcggccgaggccctccacgaacggtccgcg

SEQ ID NO: 6486 - DNA, 283 bp, Homo sapiens
  source 1..283: mol_type = other DNA
tggtttccttacaaaacataaaaggtttgtgttggaacaagatggctgagatctgggcctgtccaacattgagaaatttggccttgacgaggaccatttcaagttgaacaaatcattttgataagatttaatcccatctgatcctcagagattctaagggacttagccaaattcatggctcccggtgagcattcatcaattcattccgaattccaaatcggaagtgctccagtccgttcccgacgcactgtgcgcatgcgctggtcctccgcggaccgttcgt

SEQ ID NO: 6487 - DNA, 499 bp, Homo sapiens
  source 1..499: mol_type = other DNA
aaactgcagctcaaagggcccgcgggcgccgggggccgaggccgcccgcggggcgaggagggagaggctgcttccttgcccgccacctcgcgagtccctgagtcattgccctgaaattattttcctccttgctccgaaaaacctgcatttgtgaggtagaaggcaatttttcctttttctgcatggaaacaggaaaatttttttggcccttttcctttatcaccctcctgaatgtaaagtctgagcgggagtttttttctttattgtttatacctttaaaaaaaatatgtttcaaatgaacttactacagtcaaagcagctctgttacatatgagagaggaagggttaaaatcctttttccggtgccctgggctcaggcgcgcgccattggccgccagaccttgtgcctggcggccaatgggggggcgcggtccacgagcggtgccgcgtgtctcctcctcccattggctgaaagttactgtgggaaatatatatagag

SEQ ID NO: 6488 - DNA, 281 bp, Homo sapiens
  source 1..281: mol_type = other DNA
agcacacacacactccgtgtgtcttgcagccctgcctccggagatgggattctaattcaggaagggtttagaaagttcattcattaaacatgcctccgggcgctgagagcccagcaggggcctgaggctgaaggcaggctcccagtccctctgcctctgctcacaggtatgggtgtgagcgtggaccccatcccaggcctgcgggaatctctagagctttctgcaacctccagaggccttgccaaggccctcctgtgaccctcagcgctggggctggattg

SEQ ID NO: 6489 - DNA, 367 bp, Homo sapiens
  source 1..367: mol_type = other DNA
ccaggcaaaggcagggtggcttcagcctggggcagctcaggccttgttgaggctccatctcggaggagaagccggggtttggaagccttcccgccctttggggataccacaaatttgtccccactgtcacgcccaaagatgtgtgtgcctgcacctctcagagcagatttttccttggaatctaaagtaaatgcttgttaacaacagatgaaacacattaattgtctgtaaatttaaagccaaataaaaagtttaaattgccaatacttctaggagtccttggccagggcagtcctgagttttttagtgtcagcccgggacatgcaggcactgcactgtggcccacagtcccccctcccagggcagt

SEQ ID NO: 6490 - DNA, 461 bp, Homo sapiens
  source 1..461: mol_type = other DNA
agagtgagactctgtcttatgcttatggcatataaataatatctaaataaagctgtagtttttgaaaattaaaaaagattttttttctttttttcaatccagaaatattgttttcaagtcatgtcttgctttaaacaaacctactaaaatcaataaggagatttaaaaattacaataatagtttactctcaagaaaaacagccctgtgtacttgaactgtgcggtgccgtgggctaggatgacatccaggagcaggggacgccgtgccttacagcgaccggcagggactcggccgtccgcgagcccagccgcccgccccgctccggccaggatgttggaggtgggtgaccgcgaaggtcggcggggggcgggggccgcagtctttgtgcgcgcgcagctcccggctcccgccgctggggggcggcctccgccctgccgacccccgacaatagcgcgagggg

SEQ ID NO: 6491 - DNA, 323 bp, Homo sapiens
  source 1..323: mol_type = other DNA
ccggtcttgagctcctgacttgtaccgtgcctggccagaattgtacattttaaaagtaccagcctggagagtgagactctgtcttatgcttatggcatataaataatatctaaataaagctgtagtttttgaaaattaaaaaagattttttttctttttttcaatccagaaatattgttttcaagtcatgtcttgctttaaacaaacctactaaaatcaataaggagatttaaaaattacaataatagtttactctcaagaaaaacagccctgtgtacttgaactgtgcggtgccgtgggctaggatgacatccaggagcagg

SEQ ID NO: 6492 - DNA, 376 bp, Homo sapiens
  source 1..376: mol_type = other DNA
gggtgtacaggctagtgacaagacttgggtttattcctctattattcccattatagggaaatctgttttcactttcattttaattatttttaaaaagggtaatgaaaatataattagaactgtttaaacattttttttttctttgaaataaagcgtaagtcagtgcgagtctccgcgtcctcctgacggaagcagcggaaggcggagctagtgccgcagtttctcgccggacgctaaagaccgagacattcgccaggaaatctatcgaaaatttcccagaaccattttttcacttatattctataatactggtaaaatcgagacgtaaaaggagaacttgagaacaagtcattctgctttcccggatcgaatcccg

SEQ ID NO: 6493 - DNA, 577 bp, Homo sapiens
  source 1..577: mol_type = other DNA
gttggataatcctttacctaatctctggtcagacttggccaaagaactgaagggttactgtacttactcaagttctttgtctatttagacacttgcacgtgtttacttaaaagtatagcctcaattcttagaagactgaagttagtacagttagcagtgtgcaactgcctagggtcaaaattgctacttgataaagtgttaaaagtctgtttataaaacgctggggctcggggagcagcctcgcaggttcgtgcgggcggcgggggccccctgctggccacatcctccagcctccctccgctcggcctccggcgcgacgtgcggcccgggccatttcctcccagggcgggggaaaagggaggagctgccaaaggtgcagagattaaagttttacctcttggtcctctggggctcgccgcgtagggcgccatttctcagccgggacagcgggccagccctcagcacgctggagtccggaatccccccctcccaacgccgggcgccggctaggacccagcggtttcggcacgcccggccccgcccctccgcgcaccggcgcccgcgattggctccaggc

SEQ ID NO: 6494 - DNA, 566 bp, Homo sapiens
  source 1..566: mol_type = other DNA
taagacatctttgtactttttacaatcaatggcatcttaaaatgaagatgataagtatcttaatgagcctggtcttcagaaccccaccgttttgagaggagttcctccatccttcaggaagttccaaagcttggaacaaatacatgaaagatggattttatcactaaagttctctaaactgaaaggaataggtggcttagcctatctcttctgctttgaaaagcaaatttccttcctcagacctgcaggagactgctcctctgggctggcagctcagcagggcggggctctcggagggaagcgcggccgcagccacgtgacttccttcccaaggaacctcagctgccggcctccagcaaccggtgcgtcccgcctagcgacgcccgcgcatcccggttggccctcgggggcggttgcgtcgctcagacccgttgcccgggcgcccgcaggcggtgctgccggatgccccgccccttggccgccaggttcgtggctggctggccgctgctgtcactccccggccgtttccctgcggccagcgctctacttggggcgggaggaagagg

SEQ ID NO: 6495 - DNA, 587 bp, Homo sapiens
  source 1..587: mol_type = other DNA
ctgaatagccaccttatgggcctgcttgacaaggtcccttccaggaccagtggtctgtgaatccgcaggggctggtccaccggaggggccagttcgcaggcttgaagtccacatcaacctgcggcagagttggttccctctgtggggggaacctgtcgcggcctctgcgggcccaggaggtccttggctgggagatgtcctcctgcgctctctgcctagacgggttgtgcgacggcgggggtcgctgcccgtctgtccgtcggcttctccagcggatgcagacattctatgatttcataataggcctctagttcggctgtttacacgggcgaaatggaaagaggagatacccgttttcttcaagtcagctaacctctctgcggagtgacgtcacctcgagtctcagtgacgcgcgggtccgggaagcagcaagcccgggcgctctcccgcaggttctcagagacagctcccgcctcccagcgccgcgcgggggcggggcgagcagcccgggcgggacggagggggcggggcgaggaggtcggctttgttctcgccccgccctctccccgcctcctccctagatatcg

SEQ ID NO: 6496 - DNA, 274 bp, Homo sapiens
  source 1..274: mol_type = other DNA
agaatgaatttcatttaggagtctaagtctagactgtcttgaacttctaagatgtcttagggggctgcccaggatcctggagaaccattagtggagtcaggaactccatgttgagcttgttgatttttcatttacacaaaaatgaaaaataaataccagatgtttgaaaacatgttgcaacacgtcctgctggaacttaaaagatagcaaaaaaaaaaatgttttggatgaaaatatactttatctttctcttttcttcttcagggagccgata

SEQ ID NO: 6497 - DNA, 323 bp, Homo sapiens
  source 1..323: mol_type = other DNA
aggtggaactggggtgagcagagcccccaggtctccaggagcagctccacctccgaaagaagaagtccaccatctggtgagggtctgccactgccacgcgtctggggtctgccacgcgtcacgcgtctggggtctgccacgcgtctggggtctgccacgcgtctggggtctgccacgcgcctgcacccaaagctctggtgggacaggggcagcccctccaggaacccggctaggagggtggcccacccattccactcagctcaggctgatgagaagcagagggtgattagcgtggggccccgccctcttttgtcctcttcttc

SEQ ID NO: 6498 - DNA, 344 bp, Homo sapiens
  source 1..344: mol_type = other DNA
ctgcagctgagggccccacgggggcttgatgaggccccctgtgtcagcgcaccctgggtccaccccaggggagggggtgaggatcctcaccccaccctaccctgccccactctggcaggctgccggccgcctatttccgtcgggcaccagggtaacagggccacatcagggtctgagccaggagacacccagccaaggctgggactcgggggtgggggagggtctctgaggagtcatcgcagggcccagcggagcctctggggtccaagcctcccactcaggctgtgtgttagttgcgggtggctgggaggaagagtcccccccattcctgccgcccctgtgac

SEQ ID NO: 6499 - DNA, 523 bp, Homo sapiens
  source 1..523: mol_type = other DNA
gaatggacagcagagctgggctggtttccagcctcttgtttcctttagctctgcagagtggagatagtttggatcagatcctttgatgccgaggagcttctgtacagcatagaagcagagggagcctcacctagtgaccttccagggtctggctcagccttgacgctgcgtggggaggagaggtcacagcatctgtctctcctctgccccaacccagggaaggtgccctgagctcagccctaaatacctggttcagtggctgcttcagatgccaccagagaagcggtgccttggggccccgggggagaggaagagcctctgccctgggacttcctgtgccggcgatggcctcgcgccagtgctgggcgcggcacccccgcgtgggcctgtgtgtcaccgctctgaagtcaaggaggtcagtgcgtgcccagcgcacagcgcgtgcggcgttgcgggagtggcgcgcggggaaccggccgcgggggcctcggggcgggggcgtggcctgcgcgggaggcgggcg

SEQ ID NO: 6500 - DNA, 644 bp, Homo sapiens
  source 1..644: mol_type = other DNA
ccctgagcccttgggctccacgcgcccgctgcccagggctgccggctgggaacagggcctgcaggctgccccgccgctgggaatccgagcgctgggttttcggctgtttctgcccaagtcctcatcaggaatcgtcaggcctgacctccttcaggagtgctccgttggccccggggaactagaaccccagcctcactggagtgacctcctcacttcaactgaggttggaacaactgagaccgggtggaagtgacttttacactcgcacagtgcaacggcgccaccgctcctcggcaccgcaggaaggcgcaggccgggcccggggggaggccgggccctttaagagggcgggccgactcccccccaccccccaccccggggcggcgcaggcgcaggcgcaggcgggctcggggcgctcggcaggagggacggcgggcgggcgctcacctgcgggggccggcgcggggcgggcgcccggcgggccgacgttgacgcccggaggcgagggcggggaggcgggcgcgggactcgggggcggcccggggcgggaggggagggccggggcgggcgggcggtgtgagcgggcgccgagggcagcaccagggagcgcgcggcctctggggggcaagcgagtgcgctgggcc

SEQ ID NO: 6501 - DNA, 432 bp, Homo sapiens
  source 1..432: mol_type = other DNA
tgcgctctggccaagtccctggggcccatgatgagggaacaagggctgagtggccctgagcccttgggctccacgcgcccgctgcccagggctgccggctgggaacagggcctgcaggctgccccgccgctgggaatccgagcgctgggttttcggctgtttctgcccaagtcctcatcaggaatcgtcaggcctgacctccttcaggagtgctccgttggccccggggaactagaaccccagcctcactggagtgacctcctcacttcaactgaggttggaacaactgagaccgggtggaagtgacttttacactcgcacagtgcaacggcgccaccgctcctcggcaccgcaggaaggcgcaggccgggcccggggggaggccgggccctttaagagggcgggccgactcccccccaccccccaccccgg

SEQ ID NO: 6502 - DNA, 455 bp, Homo sapiens
  source 1..455: mol_type = other DNA
aagtactttctctatcttagagcagaagaaatagtagctactacctccctggcctgctggttactgaccagagaagagtttaaacagtgacaagaattgaattttatttatttgttattcattgcacaatccaataacagcgatggcaatgaacattaaacattaaaagtgcagcttgtatacattctgaataaaaatttgcattttgctttaaaactgctgcaaggctgccaggctaccggcgccgaggcagaggccagtgcgcccatcgcgcggctcctcggggcacctgctgcgcctcgcccgcagcgccctccgcatagggccccgcccgctgcgcgcgcatccccgccccccgggcgatctgtcagagcacctcgcgagcgtacgtgcctcaggaagtgacgcacagcccccctgggggccgggggcggggccaggctataaaccgccgg

SEQ ID NO: 6503 - DNA, 281 bp, Homo sapiens
  source 1..281: mol_type = other DNA
atgcatatttatttttaaagaggccttttataaaggaagtcacctgtggtcaggagttcgagaccagcctacaaaccaacaaaaaaacccagcaactttctttctttttttttttttttttcacccaggttggagtgcaatggcgcgatcttggctcgctgcaacgtccaccgggggcaggaactcccggttccccagcacatgtcggggtgcctgtcaccggaggcagctagagcagggctgcagacagttctgctgaggtcccccagcctctgtgatgt

SEQ ID NO: 6504 - DNA, 399 bp, Homo sapiens
  source 1..399: mol_type = other DNA
tgtaaaatgggaataaggatactacttcccttgtaacggcatgtcctgcgggccctggcacaccagacatgctgacagacgctggctgctttcatcagctatgcatgtgtcaggctgcgtgccaggaacctagtctaaaatcgtttgcaagcctgtaattcagcaggttttcaagacctgagctgggaaaccccggccgaggcctcagccctgagtctccccgctgcagagtgcttcaggggccgctgaccagggaacactgcggtgaggagcgaggacttcgtccccaccccggcccagggcaggggcttcgtggtgagcccaccccaccccagaaggctcctggaaggtcctataggatgggccgggccagaggctgcacctgtccaagaggtgggc

SEQ ID NO: 6505 - DNA, 568 bp, Homo sapiens
  source 1..568: mol_type = other DNA
gaggctgcagtgagctgagatcgcgccactgcactccagcccgggcgacagagcgaggctccgtcttttaaaaaaataaaagaataagtaaataagtttaaaaggtcttttacttcagtccagttggtaactaaaaaataataatacattttttttacatccttcttccataaagggatccttcccaaggttcattctagcaaaggaaaacgtttctggctcccagtggatccctagggatttttttttttggagccaacgtgggtcagaaaaaggagctaacgctgcggcgaggcagccgcggtcggggcgtctccgctgaaggcgcccgggcctcctgcacgttggctgcccgggtgcgggggtgcgggctgcgaggcgcggaggtgcagcggtaggacctccgcgcacaggcccgcctgggcggacacagcccgagttggacacgggagcagccgggcagcgcgtcttgacggaccggcgagcccggttccgggtggaggctgaccctggcccgggggcctctgaggaggcggggaagtaggcggaacttccggctggctcttcc

SEQ ID NO: 6506 - DNA, 533 bp, Homo sapiens
  source 1..533: mol_type = other DNA
ctgtgatcccaagcgcatgcctgtaatcccagctactcgggatgagggaggctgcagtgagctgagatcgcgccactgcactccagcccgggcgacagagcgaggctccgtcttttaaaaaaataaaagaataagtaaataagtttaaaaggtcttttacttcagtccagttggtaactaaaaaataataatacattttttttacatccttcttccataaagggatccttcccaaggttcattctagcaaaggaaaacgtttctggctcccagtggatccctagggatttttttttttggagccaacgtgggtcagaaaaaggagctaacgctgcggcgaggcagccgcggtcggggcgtctccgctgaaggcgcccgggcctcctgcacgttggctgcccgggtgcgggggtgcgggctgcgaggcgcggaggtgcagcggtaggacctccgcgcacaggcccgcctgggcggacacagcccgagttggacacgggagcagccgggcagcgcgtcttgacggaccggcgagc

SEQ ID NO: 6507 - DNA, 394 bp, Homo sapiens
  source 1..394: mol_type = other DNA
tggtagcaggctcacgcctgtcatcccagcacttcgggagaccgaggtgggcgatcacctgaggtcgaccagcgcagtgagccgagatcgcgcctctgcactccagcctgttcgtttaaaaaaataaaaataaatatatatttttaaaagcggggaatcgccaggctggagtgcagtggcgcgatctcggcacatgtcggccaggatggtgcagtgctgggattgcaggcctgagccccgggagcctcaggccccgcgactgcggcgcggctgatactgcctgaggcgggtggaagctgtcgcgcgtccggacgcgaccagttcccgcccagcagccggtgcgcaggcgcgggcagggagggcggctgtgcggggcgctcgcgggcttcagcga

SEQ ID NO: 6508 - DNA, 280 bp, Homo sapiens
  source 1..280: mol_type = other DNA
agcaccccaggctctgttggaagggaatgtggggcccaggtgctgctctatccgaggagttgctgaagcactgggggcttccagaacacaggggtgcctcccgagctcgtaggaggcaggtccctccagggctgctggcctagcaggcctgccagggtggggatacaacatccaggaagcttgccagtagctgggattaactaatgaaaagtttaaagaatttatatctagttttggatgttaggcatgcacacacaagtgcatgcacactcctcagccc

SEQ ID NO: 6509 - DNA, 332 bp, Homo sapiens
  source 1..332: mol_type = other DNA
ggctctccggggagcggaagcgccttcaatgcaggcctgtgggcaggggcgtgggggcgcgcacacacacacgcctgggtgacctctacgtatatactcctggagtggaaagacaaccttcaggtccagccctggagctggaggagtggagccccactctgattcttgacaccagatgcagcctagcctcacagatgagagtgcacgcttccactccagtgagcctggcccttaagttggagtctgcagcaaactcaatccttgccttcttttattaaaaagtttttggcgcctgcctgccgcacaggcacttgggaggggccgcatgcgca

SEQ ID NO: 6510 - DNA, 345 bp, Homo sapiens
  source 1..345: mol_type = other DNA
agaaaagatttgtgcactttactgtatataatatctagatgtttaaaatgcagtaaagaaatcctggcagacttcactgggaatgtttcaaaatcctcagcaatttggtgagagtacctgaggtcattagccgggaggtgcctgtaatcccagctactcaggtcatgccactgcactccagcctgggtgacagagtgagaccctgtcttcatcaggacagcggagctcatgaggccatgtctcccgttggctctccggggagcggaagcgccttcaatgcaggcctgtgggcaggggcgtgggggcgcgcacacacacacgcctgggtgacctctacgtatatac

SEQ ID NO: 6511 - DNA, 350 bp, Homo sapiens
  source 1..350: mol_type = other DNA
agaaaagaaaagatttgtgcactttactgtatataatatctagatgtttaaaatgcagtaaagaaatcctggcagacttcactgggaatgtttcaaaatcctcagcaatttggtgagagtacctgaggtcattagccgggaggtgcctgtaatcccagctactcaggtcatgccactgcactccagcctgggtgacagagtgagaccctgtcttcatcaggacagcggagctcatgaggccatgtctcccgttggctctccggggagcggaagcgccttcaatgcaggcctgtgggcaggggcgtgggggcgcgcacacacacacgcctgggtgacctctacgtatatac

SEQ ID NO: 6512 - DNA, 280 bp, Homo sapiens
  source 1..280: mol_type = other DNA
cacgtgcctatcccagctactgccactgcactccagaaagaaaagaaaagatttgtgcactttactgtatataatatctagatgtttaaaatgcagtaaagaaatcctggcagacttcactgggaatgtttcaaaatcctcagcaatttggtgagagtacctgaggtcattagccgggaggtgcctgtaatcccagctactcaggtcatgccactgcactccagcctgggtgacagagtgagaccctgtcttcatcaggacagcggagctcatgaggcca

SEQ ID NO: 6513 - DNA, 301 bp, Homo sapiens
  source 1..301: mol_type = other DNA
aaagaaaagaaaagatttgtgcactttactgtatataatatctagatgtttaaaatgcagtaaagaaatcctggcagacttcactgggaatgtttcaaaatcctcagcaatttggtgagagtacctgaggtcattagccgggaggtgcctgtaatcccagctactcaggtcatgccactgcactccagcctgggtgacagagtgagaccctgtcttcatcaggacagcggagctcatgaggccatgtctcccgttggctctccggggagcggaagcgccttcaatgcaggcctgtgggcag

SEQ ID NO: 6514 - DNA, 335 bp, Homo sapiens
  source 1..335: mol_type = other DNA
aaaattattcaaggaacacacgaatatctttttttttttttttttttaataatgtttgtttaaaaataaaaagataacatatacagagtttctttttatacaaatgacgcctcttggggtctcattaagaccctaacgggttagctaagccattagtttattagaccgaagcttccttcggaatctaggaatcgacaccgcgcctgcgaggctagccttggaggagcagccaacccgagagctgggagcgcgcgggcccggtcggaaaatgcgcctgcgcagaccgctggaggggcggtcaatgcgcctgcgcacaccgcacggcgaagtggggg

SEQ ID NO: 6515 - DNA, 525 bp, Homo sapiens
  source 1..525: mol_type = other DNA
gcaaaacaacttaaaggctgcttaatgcaggtccggagctggctatggagttgcaagctctagacccagctactccagaggctgaggcgaaagaatccctggaaccctggagttgtagtccagcctggataaaacaggagaccccaattcttcaggctggagtgcagtggcacaatctcggctcactgcagccttctcctgtctcagcctcctgagtagctggaattgcaggagcttgtcacaatgcccagctggtcttgaactcctgacctcaggtgatccgcccgcctcggcctcccgaagtgctgggttctacccagaaaccaagaaaccaggggtgtctgaggcctcgcagaaatctcagggagctccacccaggctgcactaggcggggctgcgacgccagggcgggaccgtctccggctgggagggagggcgggcggcgcgcagaccccggaagtcccgccccgggaacgttcgcccttgggcagttttcggtggctgctgcgctgccgcaacgaatag

SEQ ID NO: 6516 - DNA, 602 bp, Homo sapiens
  source 1..602: mol_type = other DNA
atatacattttctatttaaggatatattctttcttcccaactagattttaaatctcatgaaaacagcagtcctattttatttccacatttatattcaattcctaatctaatatatatataattatataaaattatatatatattttatatacgatataaattatatattatatataattatatgtataattttatatataattatatatatatatatatatatatatatatatatatatatatatcctatcctcttgcccgggctggagtgcagtggcatgatcatagctcactgccagcctcttgagtagctgggactacaggcttggcttccccaagtgctgggattcataacaagtatttagtagtttctaatgatagttagattttttgctttgatatcatcatcataaaagttcaaacctaatttaggttgtaattgaataatgaagcagttaaaatatgacagtaatatttccatcaaacttaatcctatacgttacgttaatgtatctgtatatacatttaccataatgtacacagtcattaattatacatggttgtgacacctgtgtccacgagataagttcaaataaaagctt

SEQ ID NO: 6517 - DNA, 248 bp, Homo sapiens
  source 1..248: mol_type = other DNA
ttaaaggctgtcggaaaactttggggccacctgtgaggtaggggctcactctgtcgcccaggctggagcacagtcccgggctcagcctcccaagtagctgggaccagcactgcctcgcaatagctgggagacttcgctaagtgccggggcctgaccaggtaaagtccgctgcccggcgcctagtgataacccacccgccggcgcccaatcccgtcgagcgtcaggcgtgaggcggcgcgcgaacgagc

SEQ ID NO: 6518 - DNA, 339 bp, Homo sapiens
  source 1..339: mol_type = other DNA
ttcaacgttcttgtctgagcccccgactggctatatgatcaattattcttactcctttgaattcttggtttagactggctgagcggctgaccctgccagacgacaggctgtgaaggggcccctagctggccgcccccagccctgccaaggcaccaacgcaagaaagccgggggagcctcggtcgcattgctggaagatcgtctaaacatccccgctgctcggccgctaggccggcaggtgttcgggccccgctcccccggcccgccccacccccgcgcccgcgccgcgcttccctctaagaggccgggtctgagtgagcctggctcgccgagcagcccg

SEQ ID NO: 6519 - DNA, 677 bp, Homo sapiens
  source 1..677: mol_type = other DNA
ccaaagaaaagagaatctttatcttggggcttctgactcagcgggactgggggcagcggtgtggcccggggctctctgcacaggatgtccgtgcgcagagcctcttctgccaggctgcgggcgcacaggctccgtgcaggcagcggtaccagtgcttgcacagggcgcagctcgcacccggctgggcagccggcccccggcccccgcggccccagagcccgagcccgcgcccgcgcccgcgccgccgccgctacagccagcgccgcccgaggctgccccagcccccggggccggcgccgccatcgcctcaccagccggccctagggccgccgctgccgccgccgcttcccgccgtctctgctcggaaggccaagcctcgcccggagaccggagcggctcgctcaccgcccctgtcagtgccaccggcgccccaccactcccgcccctgcccgggggcgtccgccgcgcgccccgcctcactgagggcagacgcaccggctgcaggggcgtcctccgcccctcctccgcggctcagcgcgggcgccgaaaccgcccgactcgcccggcctctccgcggcgcgccagcggctccgccatgcgggttgagggcacgaagcaagggcgcacgcccagctcgttcgcgcgccgcctcacgcctgacgctcgacgggattggg

SEQ ID NO: 6520 - DNA, 688 bp, Homo sapiens
  source 1..688: mol_type = other DNA
aaacatcctcatttgaacttgttctcagtagtacaagcagtttgccaactactacttgcacgaacaactagcagttctcaggcctcacagggcgctaaggccttgcctggccccttcagaagcttcgtgcagctcaagagcatcccaaggggcggccagtccagcctgggaaccgcagggcccgagcccgactctcccggagacccgggatccgccgcatcccgcgccgggtccccacatccccgcaacccgccgagaggcccgggagccgggaccgctcccacgctctggccccccaagccccgccccccttaccggcgtcagagcgcgcggcggtgaaggccgcggcgggcccgcgcgtgagcccggtcgccgccccgaggagcagccaggcggccgcccgaaccgccgccacccgagccgccaggacgccggaagccggacgcccgagaggggcgcgcggggccaggtgcggacgcaggaaggggcctggccgcccgcagctcctaccgcgcgctgccccagtatcggctgggaccgagtgctgggtgcgcgcgcctagcgcccgcggttcccagctgcctgcagccccggcccccaagggttcccgcgcggcgtggggcggtcgtccccgcccagctgttccttgctccgcccacccgggggcgggcgaggagctgcgcacgcg

SEQ ID NO: 6521 - DNA, 484 bp, Homo sapiens
  source 1..484: mol_type = other DNA
agcgattctcgtgcctcagcctcccgagtagctggaattcgccatcttggccaggctggtctcgaactcctgacctcaggtgattcgcccaaagtgctggggctataggcgtgtcttcctggacacgaatactcctctccccagagatcagctccactagtgcaaggctggctttcttacccttagagcgggcggagcctggcgctgcaggaagaggcgacacccgaggggtgaactccccggcgggaggcccgaaccctcaaacaccgggaagcggaggtgggggccggctgggggaccggtccaccggctcccacctcggcgtacagggattccaggtcccggcgagcgctggcctagcggtttccacagcgacaggccgggcgcgcgtccccgcgcgtgcgcagctcctcgcccgcccccgggtgggcggagcaaggaacagctgggcggggacgaccgccccacgccgcgcgggaaccct

SEQ ID NO: 6522 - DNA, 571 bp, Homo sapiens
  source 1..571: mol_type = other DNA
tcttcctggacacgaatactcctctccccagagatcagctccactagtgcaaggctggctttcttacccttagagcgggcggagcctggcgctgcaggaagaggcgacacccgaggggtgaactccccggcgggaggcccgaaccctcaaacaccgggaagcggaggtgggggccggctgggggaccggtccaccggctcccacctcggcgtacagggattccaggtcccggcgagcgctggcctagcggtttccacagcgacaggccgggcgcgcgtccccgcgcgtgcgcagctcctcgcccgcccccgggtgggcggagcaaggaacagctgggcggggacgaccgccccacgccgcgcgggaacccttgggggccggggctgcaggcagctgggaaccgcgggcgctaggcgcgcgcacccagcactcggtcccagccgatactggggcagcgcgcggtaggagctgcgggcggccaggccccttcctgcgtccgcacctggccccgcgcgcccctctcgggcgtccggcttccggcgtcctggcggctcgggtggcggcggttcgg

SEQ ID NO: 6523 - DNA, 313 bp, Homo sapiens
  source 1..313: mol_type = other DNA
cagccattgcttagaactaagactaaacaaagcttttgtttggaaaggagtactttttcattaacattgtttagaattttctgacacatgatgataattaaaagcaaaccatcctgcagttggcttcggtattgttttaaaacttagcagctcctgaacgcggttcccatcccagcgcgttctgagggaggccggggcgcggtgacgggcgggggcggggcggccccgggtcgggaggcggggcgggagcgccggaagcgggcggtgccaggcccagcctcgcaggcgggaggtgacgcgataggccagcgcc

SEQ ID NO: 6524 - DNA, 482 bp, Homo sapiens
  source 1..482: mol_type = other DNA
agaagtatctgctataccagtcagattgagcagcatctgtcagtctgcaggccaacaatcccagtcgggattcgaagccgcgcgcagtgcccggaatgtgtttgcgccagggcccctctggctacctggtggtggccccgagcggcctcggaggccgcggcgtagctcctgggatcgctcagcgcggcggcacagggagcccacgggcccagccgcgaggtcctgcaggcggcgggccgcgtcctggccccgcagctgggcctgcagcagtgcgaaggccgtgagctgcgccgcacgtcggataggccgcgactctgacagacgttccaccagctgcgggctgtgcagcagggcggccagcagccgccgcagcaccatccgccctcgtcttccgccccgcggcgcccgacccggacgtccacgccgccctcggattgggtccaatgagagcgcgtttccgcttccgccatcgcggacgcagc

SEQ ID NO: 6525 - DNA, 871 bp, Homo sapiens
  source 1..871: mol_type = other DNA
gcgtcctccctgcagcccgctagggccgctcgcccgtcgccgcctgcggaacgcggaggggcagcacggccacgcccggccactcgaacctgctccccggcgccgcgtgaccgtgtcaggtccccgtcggcctcgccgtgccgaccccgggcgcctccacagtggctcggaggccgctgctgcccggatgcccgggttccacgaggctctcccagcccgacaagcccgccgatcccacgggcacgggcggaggagagggaaccgccgcgcccgccccgcgcgccgtcgccgaccccggtgggtcgcgcttccccgcgcacgccgcgctctggcgcggggagaggcccctcggggtccgcccgggtcagcgtcccgcgggggtggcggccgttcgctcagcctgtcagggctgctggggctgacaggctcccgggcaaccacgccggggaacccctcacgcccgccgatcgctgcggggctcagcagccgccccgtgcgctgagtctcgggccacgaagcaggaccgggggccgcactccgggtccccgccctgccctcgccgacctcccgcgcgtggaagggggacggcggcggcggagctccccgccacggagaaccccgaatggtttaacagccccccgcgccgaaaggctgttcgccgaggaggggccgccggggagggagcccgagcgcggcggggcgagaccggtccccgcccggcgttgcccggcccgagggacggcggcgcccccaggaccctccccagcgcggccccagctcgctccgggaccgcggggccaggccgggcgggagcgcggggacgtacacggcggccccgcccgcgcgctcctcctccctcccggcccgccct

SEQ ID NO: 6526 - DNA, 668 bp, Homo sapiens
  source 1..668: mol_type = other DNA
tccagcaagttccagggtgatgctcacgttgctggcctagggaccacacgatgcctgactcgggcaagtcacctcccgtctctaggcccgaggagaggcagtcggctaggccgagatgcccctgcccggctcccccctcgccagggcgctcggcctgggctcccccgtatcccagatcctctgtgcagctgtggccgagatgcccctgcccggctcccccctcgccagggcgctcggcctgggctcccccgtatcccagatcctctgtgcagctgtggccgagatgcccctgcccggctcccccctcgccagggcgctcggcctgggctcccccgtatcccagatcctctgtgcagctgtggccgagatgcccctgcccggctcccccctcgccagggcgctcggcctgggctcccccgtatcccagatcctctgtgcagctgtgctgggagggagctgctgcgtgaatgagatcatcagttagacacggtatctgggggtaggaggctgaggcgagagccccgagcagcggcgcccgggcccgagcgggaggcctccagcagggggcgcgccggggccgcccaggggcggggtccggggtcggcgggaggtgacctgcgccccaggggcgtggattccgcccgggaactcgcggccgcacttaagga

SEQ ID NO: 6527 - DNA, 455 bp, Homo sapiens
  source 1..455: mol_type = other DNA
ttgttttagtaattaatctaccttgagacccagttgttaatcattaaaaaccaatacattacataaaatgataaaggaaaatccatttgtaatgaaaatgacaaagattcttttagtgaaatcattttaacagtcagaactatttgcagagagaatcctcttatatgttttaattcagttcatatttataatttatataagcagtgaagactgtggttgaaacttggtaatccagggtttttccacgcagtgcattaaatcataacaaaagaacagcttttggttcctgcagaaagaaatccaccttatgtcgtcttttttgtctgcaaaaataaactcctttcggaagaaatcactgagaaaatgagcatcatttctcaaggtttttattcaagtgatgctgctgtaattgtagctgcagtttttaagcctgcttggcaacacctgagccatgg

SEQ ID NO: 6528 - DNA, 410 bp, Homo sapiens
  source 1..410: mol_type = other DNA
ctgcagcgctggccgagggcggctcagcttcggaggttaggcttggcaatgcagagttgccccgccctccccgccccctgggaggtgcagttggctcctccttaaggcggcttttccccggtggggatctacccccggggtcgccaggcgctgtctctgccgcggagttcctctcagacagcccgagccttcccggcctggcgcgtttagttcggaactgcgggaccgggctcctccagggccaccccgggccacctgtggagtccgattttaagcgaagaggttcccttaggatgctccccgggtaccgcctcccccttccaacccgaaggtagcagcgcggggagcccggggctcggcgcgagccgcctcctcacttcccattggctgagagcgccgggaaagcggtc

SEQ ID NO: 6529 - DNA, 333 bp, Homo sapiens
  source 1..333: mol_type = other DNA
ttacagtaagttaggattctaaggtgcaatccccctttggtagccaatggatacggcctcagtcagaggccgttccggttttgaaagacaggatctccgggtttccctcctaatagggaggtcctcgtcaccccgaggaagttcgaagacgtgggcagtgacggctcagaccgggagcggggtcccagccggccggtaattccgcccggaggtgctgcagcgctggccgagggcggctcagcttcggaggttaggcttggcaatgcagagttgccccgccctccccgccccctgggaggtgcagttggctcctccttaaggcggcttttcccc

SEQ ID NO: 6530 - DNA, 419 bp, Homo sapiens
  source 1..419: mol_type = other DNA
tattattaaaactttcttaatttatttttaaagaccctgagaagcaaatctttaatttttttgtttttgtgagacggagcactctgtcgcccaggctagagtgcaatggtgcaatctcggctcactggagtagctggcatgttggccaggctggtctcctttaaataaattcatctgatcaaaagaaatttcagcccgcgaggctgcaatctccctggccctcgcccccgcccagcggtcggggagcgagaaggcggcgggggatctggcgcccggcttaggggcgagacggccgcaccgggagcctagcgatcagggcaccttgggcgggaggagcgccagccgggcacccagcgcggaggaggcggctcggcggccccccgacagccacgccgccgtgagccccgcccagcgtagcc

SEQ ID NO: 6531 - DNA, 399 bp, Homo sapiens
  source 1..399: mol_type = other DNA
tgcttttgtacagacaagaaaaaaggacacgtcctctttcctccccttcctccttcacacaaattttgaattacttgctacaaggctgtgtatcctttctatccccgtttcctagcaagtgaacatatatgaacaataaatgttatcaagggagagggcaaatttccctccctgtttcttctgaattctgaagagattccattgttagaatggtttcttactgcaaccatcccatttcttgagagtatgatgccatcccaggatgcttgatccgggaaagcacagaggtctgctgccaacactctctgtaggagacctgagttctcttacagtaagttaggattctaaggtgcaatccccctttggtagccaatggatacggcctcagtcagaggccgt

SEQ ID NO: 6532 - DNA, 376 bp, Homo sapiens
  source 1..376: mol_type = other DNA
ttacttatttgagatcctgtaacttaaacactatgatgtaaagttagcaatattaaattctatgagataaagtaatgcatcttatgttacacgataatcatgacaattacagttctggtttttagtggccatggaggtgaggtgaccagaactccactgactttaatcacagggcatgggaatactgagagacgtcctatggtatctcctgtatttcagattgaatctgccttcagattcaaactgggaaatggccctatctaaaaaccacagggcagtctctgtctgcttgtcagaaggccaaactcacagacattaagcttaaaacaaacagttacaaagctgttgaactttgcctgtgcaaggacaaacactc

SEQ ID NO: 6533 - DNA, 361 bp, Homo sapiens
  source 1..361: mol_type = other DNA
catcagattcgatcaaatcacttctttgattgttttcaggataaaatccaaactccttaaaatggcatttcatgatctgctggctacccagcacctgcagttcccaagcctgctacatctcggactgagttcggcccccgccgcttgcaagccggcccagccaaccaccgggtgcgtagatccacgagcgcggcctgggattggagggcgcggcctgcgggagcggcctgggattggagggcgcggcttgcgggagcggcctgccgttggaggggcgcggtctgcgagcgcggcctgggattggaggacgcgtcctgcgggagcggcctagcctcggagtgctcgccgggggctgtagtcc

SEQ ID NO: 6534 - DNA, 523 bp, Homo sapiens
  source 1..523: mol_type = other DNA
tagatgtaaatatccgagatagttttaagctgtatgagggtgatataacctaaagttatcatgcaggaattcatcaaatattaaactgttttcctagggatgattaaaaagtcttctatccattcccaatgcaaatgaattagaagaaaatgcagctacatcaacagaggtacttacccctcccgagggttactgttaaggtgacgcaggaaccgtcactgcagcgtttgctttgcgttcagatgcggcagctcagcgcagctgtaggggagctgggatgcagctgcaatctacactcctgcctcccgaggctgcgttgcggtgggcgcgaaatttgggcggaaagtcgaactgctcacaacggcggtcctcgcgagcgcctagcacagcggctgcaatgcctcgtccgatcctgcgagggccgctaggagcgagtcacggcgcggggccgctctggtcgcccgcgagtgtcggtggccccgccccgcccgcagccgcgggtggagaccgaggacggcgccgg

SEQ ID NO: 6535 - DNA, 474 bp, Homo sapiens
  source 1..474: mol_type = other DNA
aattttggttccagaccaacattttagattttaatactactataatcttgctttatccaacaataaaatcttgccaaaagtacaagtactattgaagatatttgttgtattttcattaagaaaagctattttataaaagggatggatgatataaaataatacgtttttaatgagaaaccatagtaaaccttgatttagatcatctgggatccaagtttctgcagagattccttgccgggcccagctactcgggagcctgaggatcgcgccactgcactccagcctgggacagagcgagactctgtctcaaaaaaaaaaaattcttaatttaatgcttagtcgagatgtttttgtagaggcattttagaaatgggggcaagcgcctggctgcgccggggggcaccacggtgctgcccatcacgggaaccgtccggggtcggtccgtctccgcccacccagcggtccggccgcgca

SEQ ID NO: 6536 - DNA, 158 bp, Homo sapiens
  source 1..158: mol_type = other DNA
cccctaaagcaaattccttttggatgggagtttcataactgggataacccgggcagccgttctccgggtgtcaggaaatcaatggctggcagagactccgatacgcaccggcgactcgccaaggcacgacgaggccccgccgcgtggcctgtttactt

SEQ ID NO: 6537 - DNA, 248 bp, Homo sapiens
  source 1..248: mol_type = other DNA
gtagtcattcattaaactatgtgttaaataaatgaatgaatccataggataacccaaataaagtccggaggacctactaggtgcctgcaggcagtcctcctcaaaaaagaagaatggaggtaagaacttaagtcatttcattcattttttttcccagtctcatttcttgaaagagaaggaagaggtcctgctgccttcgtgctcctttccacctacggcgtccggggacgcaggaagtaaacaggcca

SEQ ID NO: 6538 - DNA, 611 bp, Homo sapiens
  source 1..611: mol_type = other DNA
gtcttcacgtggtcccacccacccttgagcctgaggagcagcagaaaagaggtgttcaggccctcacttccctaagggaagagagccctcatggctgcgctcaatgtggcagccacctgccatatgtagctactgggtatttagaagaattagatcagaaatatactttatttctaattatatatcaatcacatattaaaacaatattttgatacaatgagttaaaaattattacaaacaacttcactctttaaatattatttttgacgtggctaataaaaacgcaaaattcacaaattaatattttattttttaaaggattgcttccctcttaaaatctcagaagggttatgaaatctaaaatattaaaataattgtcattatatcacttccgtttgtgaaaaagtgtgtgtgcatgcatgtgtgcatgcgtgtgtgtgcgcgcgtgtgtgtgcgcgcgtgtgtgcacgtctgtgtgtaagtgtattttacaagtggacataaccttacgggctgcgtcaggccaagccgggaaagccccgcctgaaagggcctggaggccccagcctgtcactctctcaaggcccgagggcggggattggagtaaccca

SEQ ID NO: 6539 - DNA, 385 bp, Homo sapiens
  source 1..385: mol_type = other DNA
attcacaatagcaattaaatgtggtttggaatcccaccttccactagttgtgggatgatacacacatttagtgagtatttacttgtaaaatggtaatacttagccactgggatttgtcccaatttaggataagtaaatgaaagtattccactcaccttttcatacagaggactacactgaaagattttgcagagggttgtatgtacgtctaaacacctggcacctggccggcttcgcgccacgagacgcgatggacgtgatcgccgccctcatcttctgcggcgagcgggtgacgctgtccaatcggaaagcgcctttccgccggctgggccctccgtctacccccagcggcgaggggcggggccggcgcgggcgcagaggcgtc

SEQ ID NO: 6540 - DNA, 451 bp, Homo sapiens
  source 1..451: mol_type = other DNA
ccagacctactgagtcactaagtgggggactgagggcggcaatagcacaaccctccgcacagaagtgatactgttctgagcgcctaacagcaaagctgagagcgtcccactttaccctgagagggcccgctcccgcccatgtcgccctacctcagtgtcagaggggacgggcgctggcccggagcccgccccagacccgctccagcgccaccggctccggcccgggcctgagcccgagtaacccgccccattcggccgccatcttcgggccgagcgtcgttggagtgcgtgacgcctctgcgcccgcgccggccccgcccctcgccgctgggggtagacggagggcccagccggcggaaaggcgctttccgattggacagcgtcacccgctcgccgcagaagatgagggcggcgatcacgtccatcgcgtctcgtggcgcgaagccggcca

SEQ ID NO: 6541 - DNA, 543 bp, Homo sapiens
  source 1..543: mol_type = other DNA
ggggctgcgcagcgcggcctggggtgggggcggcggggcccccaggagctcctgggaaccgagggtcctggggcggtcccgccccgcacagctccgggtgagcttggggagggagacacactctcagcccacctcgccccgcgcggtcagggacccgccccccagacccccaggaccgcgcttccgggggaggagggtgtcctcagcaacggtgacccgcaccgccctcctcaccggggtcaccgccacagccggtgcgaggcccgcagggcgctggggatgcgcgaccgactcccgtgaacctgctcctcgcgcgtcagggaggacggactgaggtcggcctgcaggctgcggccccgaagcgtacgtgcgcgcgtctgtgtgtgcgcgcgcgcgtatatgtctgtgtgtgtgcgtgcgtgtataatttctaaatggactgggctgtgccaggccaagctgaaactgcctggaggccccccggctgtcactctcgccacattccgtggagttgtggagccgtatccaatcagcgcactggag

SEQ ID NO: 6542 - DNA, 538 bp, Homo sapiens
  source 1..538: mol_type = other DNA
ctgtcccacccacccttgagcctgagaagaaaagttggtagagaaagaggtgtccaggccctcaattccctgaggttagagccctcatggctgtggccacctgatatgtagctactgagtacctgaagtaatatgtgctgcaaacaaaaaatagaagaattagaccagaaatatactttatttctaattatatattgatcatgtattaaaacaataatattttggatacaataggttacaattatcataaacaatttcacttgtttatttttattagtttggatgtggccaatgaaaaattgtaaattcacaaatagccaacattttattttttagagacttgcttctctcttgaggaaaggttatgagatctaaaattttaaaataattgtgattatattgtttcctgtgcgtgcgcgtgcgtgcacaatttataaaagccctgcctgaaagtacctggagacacgagtctgtcagtcttgctcactcgaattctgtcactcaaagcttgagggcgtagagcgggcggcatccggga

SEQ ID NO: 6543 - DNA, 374 bp, Homo sapiens
  source 1..374: mol_type = other DNA
tcccgagtagctgggatggtctcgatctccggacctcgtgatccacccgccccggagacggagtctcactctgggctggagtgcagtggcgcgatctcagctcactgcaatcctgtctcagcttcatgagtagctgggatggccacccaaagctttgggattactggaaaacaccacaggccagaaaggttatgaaatgtaaaatattaaaataattgtcactatattgtttccatttgtgaacaagtgtgtctgtgtgtgtgcgcgcgcgcgtgcacaatttataaatttaacgtctgcgtaccagtgcattgtatggtcacaatttctgtcattcaaagcctgagggcgtgaagctgcccaatcaggcgcgc

SEQ ID NO: 6544 - DNA, 518 bp, Homo sapiens
  source 1..518: mol_type = other DNA
tttacaatcctcttgtaagacaggaaagttcaagtccagctggcttcacctctcaattatatattgatcacatattaaaacaataatattttggatatagtaggctaaaattatcacaaacaatctcacttgtttttattattttcgatgtggctaataaaaaattgaaaattcactaatagctaacattttattttttagaggattacttccttcttaaaatctcaggttataaaacattaaaataattgtcattatattgtttccgtttgtgaacaagtttgtgtatgcacgcgtgcatgtgtacgtgtgtgtgcatgtgcgtgcatgcatgcgtgtgtgtataatttatattataaatggacctaaccttaagagataacaccccagcctgggccgggcgtggtggctcacgccccgaatcgcttaaacccgggaggcagaggttgcagagagccgagttcgcgccactgcactcaggccagagaggcctgagggcgcgcagagggtgcggcatc

SEQ ID NO: 6545 - DNA, 320 bp, Homo sapiens
  source 1..320: mol_type = other DNA
cgtaagggtcctggaataaacgcagagctgcagctacgggatggcgaggcctaacgcagagaggccttagccccacagcttactaggggtccgtaccagccgagggttcgggcgctgggggctccgctccgtgttccgctctggcagaggaacgaacgggacctcgatcgctacgcaacaggtagcgacacgctaggctggatgcggaaccgaccccacctggagcctcgccctgctgcagccgcgcttccggctccaggtagaggccttatcgtcgcagcgacagtggcgtcacgtccgccggcgcgccacagcagcgc

SEQ ID NO: 6546 - DNA, 408 bp, Homo sapiens
  source 1..408: mol_type = other DNA
aatattagtaattttggggccccaagattttcctttcagaaaaaagaaaatgtggtatatatacacaatggcatgatctcactcatgtggcatctttaaaacgaagttaatcattaagatatttggcagaagtgcagtggcgcgatctcggctcacgcgattctcctgcctcggcctcccgagtagctgggacgacaggcgattaaaggcgtgagccactgcaccctgccttccaaattaaaaactttttaaaacctcgtacctcgccgtgggcggcgaccgtcgcggactcgccgggaagacggccccacggagccgggaacaccgcccgctgcgccccgctgtggcgggctggcggaagtgacgcgctgctgtggcgcgccggcggacgtgacgccactgtcgctg

SEQ ID NO: 6547 - DNA, 569 bp, Homo sapiens
  source 1..569: mol_type = other DNA
ccgtcacaggcggggcaggggctgacccgtggggtcagacggccccacctcagggggggcctcctggaaaggacttgaggccaggccttgggagggcctgggatgagggcctggaggcagaggccagagcccgtgcgaaggcgctgaggcgcagagggtggggccgggcctccacctgcggctctgggtgaaccagtcacgcgaggagaatgcagtctcctgagccgcaggcgccggggctgtggagagccgtctccattcagcaggcgccagggctatggggagccgtctccattcagcaggctctggagctatgaagagccgtctccattcagcaggcgccggggctatggggagccgtctccattcagcaggtgccggggctgtggagagtgctagggcggtcgccatctgcacctgctcactaactccagtgactgagctcacgggcatggggccaaagctcctgaccagtgcggagcttctgctgagggtggcaccagcagcagctccatgactgtgactgcggccagggtccacacccatcggttgcaggggggccgggcctc

SEQ ID NO: 6548 - DNA, 555 bp, Homo sapiens
  source 1..555: mol_type = other DNA
cccgcccgccaggccggcgcccatgccagacccagccaaggtgcttctggccacatcacccctgctggcctgcagggagctggcccaggagccgagaggcctttgttgccaggcagccccccggcgtcaccccgaagcttgtcccagccggggcctgacagcaggtaaaggctgactagcaactctgcatccctcagagtgtgggggaaggtggatgtggtcccacctccacatccagggtccccccctccctgcacaggggtgaactgcatctcctggaggcagggccagtgccccaccacctccccagcacacccgagcccaggtctgggctcccaggagggcctggggccacctgtgggaccaacccaaaccctcaggcagctccaccagcagaaagcgtcatgctgtgtgtgggataacctcctcaggggattagttctcagggcctggtccatgcctgtgcccgcctgcaacaggcagcctggaaggtgggaagtcccagggtgagtgagtcagctgacccgcccccggggaatctcactaagaaagact

SEQ ID NO: 6549 - DNA, 401 bp, Homo sapiens
  source 1..401: mol_type = other DNA
ggatgctgccagtgacgtgcatggactcagccgcgctgtgtggcggccaccactgccgttaaccacagtacaaagttttaaattaaaaataagaaaaatacaagaacagccgttttcatggccttgccttgcactgggtgctcatccgggacttgaacatcctcggattttgttatcagagcggcgtcctggaaccaatttccctgagattgtataccaaattgctagaaaatagacttgtaatgttctcaccacaaaaaaaacaagttggtgaggtgatggatatgttgattagcttaattgaatctttctgcaacaaatacttactgaagataactaaaatcagtaaacttggcaacaggagagcctggtcctgttcccaccatgagctgagtgccagg

SEQ ID NO: 6550 - DNA, 490 bp, Homo sapiens
  source 1..490: mol_type = other DNA
cagggcagtcccccgcccgggcctcagaagcctgagctttgggtccactcggggaggtggaggacacggtcctgcagcctcgcatgcgtcccccttccagagctggagttctccaaatagcacaggagctccaccgagcagaccccgccccggccccgcccgcggtcactcactgtagcgcgtggctccgtaggccacaccgaggaaggctcgcgggaccccatgggggcgggggccgggggtcgcagcccgcggggtcggagctgcggggcgggacacgggggggcccagagcactggcagcaaagccttggaggcaaaggcggagctgggcgcacgcatgcgccgtcagcggcgagagagcggggggccgcgccccctggcgaccgaagggtgactgcgcgcccccgcgcggcggtgacgtcacgtgaggcgcacgcgcagagtgcgcggaggatcatcggctgcgcctgcgcagttgctgcgtgacg

SEQ ID NO: 6551 - DNA, 801 bp, Homo sapiens
  source 1..801: mol_type = other DNA
ctggcggcggggaggctgcataggcaccgcaggccccatctctgggcagctgtgggagacacacagcaaagaccagtgtggggctcagtggtccccaggcctgggccggggcaggcccttggagccgtggagtcctgaggcctggagtcgggggacccagggagcagcctctgttgggggctggtcttcccaagaagatcccagcccctcttcgggacagaagtgggggcatcgaggaagctccagctccgggatgaagggcgccccgtgctcccgggcagagcagccgcaggaagaggggcctggaggccatgctcccgcgggccgcggaatccaacgcggcccggccggcgacagaagaaggacctgcccggggagccacctgcactccaggacccccaggtccctgcccaggccaccctcgggtgggcgcggtccgcggggctggacccgcccgagccgccctgacctcaggcctccgacgctccgcgcaagaagacagagtgcgccccggcccgcagtctggggtgtggacacacggccaggacgcggacggcggggcctcggcagcagcgcggggaaacagcggacccccagccctgcggggaggcgtcacgcagcaactgcgcaggcgcagccgatgatcctccgcgcactctgcgcgtgcgcctcacgtgacgtcaccgccgcgcgggggcgcgcagtcacccttcggtcgccagggggcgcggccccccgctctctcgccgctgacggcgcatgcgtgcgcccagctccgcctttgcctccaaggctttgctg

SEQ ID NO: 6552 - DNA, 756 bp, Homo sapiens
  source 1..756: mol_type = other DNA
tccccgcagggctgggggtccgctgtttccccgcgctgctgccgaggccccgccgtccgcgtcctggccgtgtgtccacaccccagactgcgggccggggcgcactctgtcttcttgcgcggagcgtcggaggcctgaggtcagggcggctcgggcgggtccagccccgcggaccgcgcccacccgagggtggcctgggcagggacctgggggtcctggagtgcaggtggctccccgggcaggtccttcttctgtcgccggccgggccgcgttggattccgcggcccgcgggagcatggcctccaggcccctcttcctgcggctgctctgcccgggagcacggggcgcccttcatcccggagctggagcttcctcgatgcccccacttctgtcccgaagaggggctgggatcttcttgggaagaccagcccccaacagaggctgctccctgggtcccccgactccaggcctcaggactccacggctccaagggcctgccccggcccaggcctggggaccactgagccccacactggtctttgctgtgtgtctcccacagctgcccagagatggggcctgcggtgcctatgcagcctccccgctgacccgccagccccatggacaccaggcttggagtctaggcaggagcctggcaccccctggcggcagccatgctgcccgtgctgggccaccctcgggccccctttggccccatgcagtagtgacgcaaggcctcctgtgtcccctcctggccac

SEQ ID NO: 6553 - DNA, 589 bp, Homo sapiens
  source 1..589: mol_type = other DNA
tctgaccaggccaacagggcctggagcctcttgggttcccccagggtgggccaggcacagttgtgggatcagcaggttcttgcagaaaagactaagcagccgtgtcctccattgtaaaatgcaggctgcctaccccagggtggggcccacaggcctttctggccttccctccagcctgccatgcctgcttcccgcaggggctgtagagggactggtctgatttgaggctctgcgcaaagccagcccagcctcttcttccaggctggcctctggcccctccctgtggctggcttgaacctcaggaacttggggtccacagcccccgtgcagagcttctgctgggcagagtgacttccaggccgcctttcctgctgagaagcacacaggctgtgaccggggcccttcccggaaggggacttccagcctgaggccgaaggaggagggtccaacttcacctttgcccgctgggacggggcgggaccctcctccgtagtccttggggcggaactggccccccgtggcccggcccggcccggccccacctccgcccgcaggcggtcccggcccacgcgggaaggtccttaagccc

SEQ ID NO: 6554 - DNA, 446 bp, Homo sapiens
  source 1..446: mol_type = other DNA
acacggtggcgcccccagggatcccacctgctgttgtggctgcatatagtcactcccaccactgcccctgcagcaccgaggggcaggtgccctgggtcctgttacctactgcgtcccacgcagacgcaggcctggggggctccaaaagcttgttccagcctgtggtggcctctgatgtctgacaccaccaacagaccctgggccaggtccctaccccagactctgtgcctgaggccatggtatagtggggaagaccaggctcagggccctagagtccccctccccatgtggtggtcccagggccaaggctaggggcgtggacacccctgacagacagggcgctgcagtcacccactgcagttccagggtgcccaggcccccagccaagagcgtgtacaggtggccctgtccccgggccaagggtgtgagtcactgccaggctgcca

SEQ ID NO: 6555 - DNA, 514 bp, Homo sapiens
  source 1..514: mol_type = other DNA
gaacccccttggggcccacccatctcaggacaccccgggtttttctctttgttactggatgagactctacaaaaaaaaaaaagtgaagctggggcctcatcattagcctgttcagactcctgaccaggccaacagggcctggagcctcttgggttcccccagggtgggccaggcacagttgtgggatcagcaggttcttgcagaaaagactaagcagccgtgtcctccattgtaaaatgcaggctgcctaccccagggtggggcccacaggcctttctggccttccctccagcctgccatgcctgcttcccgcaggggctgtagagggactggtctgatttgaggctctgcgcaaagccagcccagcctcttcttccaggctggcctctggcccctccctgtggctggcttgaacctcaggaacttggggtccacagcccccgtgcagagcttctgctgggcagagtgacttccaggccgcctttcctgctgagaagcacacaggctgtgaccg

SEQ ID NO: 6556 - DNA, 593 bp, Homo sapiens
  source 1..593: mol_type = other DNA
ctggggcctcatcattagcctgttcagactcctgaccaggccaacagggcctggagcctcttgggttcccccagggtgggccaggcacagttgtgggatcagcaggttcttgcagaaaagactaagcagccgtgtcctccattgtaaaatgcaggctgcctaccccagggtggggcccacaggcctttctggccttccctccagcctgccatgcctgcttcccgcaggggctgtagagggactggtctgatttgaggctctgcgcaaagccagcccagcctcttcttccaggctggcctctggcccctccctgtggctggcttgaacctcaggaacttggggtccacagcccccgtgcagagcttctgctgggcagagtgacttccaggccgcctttcctgctgagaagcacacaggctgtgaccggggcccttcccggaaggggacttccagcctgaggccgaaggaggagggtccaacttcacctttgcccgctgggacggggcgggaccctcctccgtagtccttggggcggaactggccccccgtggcccggcccggcccggccccacctccgcccgcaggcggtcccg

SEQ ID NO: 6557 - DNA, 373 bp, Homo sapiens
  source 1..373: mol_type = other DNA
tccaccctggcggagggcacccaggtcggagagtccgcacgtgggtgccctgtccgtaaccctgccgggagggcgctcagtcccggctcccaccgtactggacggcacccccggagggacccgggcctgaggactctgctgctccagcgccccagcccgcgtccaggacccgtcgggtccctcagcacagcgcggccctgtcgctcggccccgcccttgcctcgcccctggccctcgcgccccgcggctccctccgccgagtccaggcccgacgcgcctgcgccgcctggccccgcccacgccccttgccgcggggtgggagcccagacgcacaccgcgcatgctccgagcgcggcgcccccgacgcggcgct

SEQ ID NO: 6558 - DNA, 428 bp, Homo sapiens
  source 1..428: mol_type = other DNA
tgggctctggctcagggacctcccatctcctctgaaggctggactggggagggtccgcagccaggctgtgtcacgtgcctatagctccgagggagcccataccgagtgattctaccacttttgccaagagtcattcggcccctacacacttgaggggaacttaaagcctgcccagcacagcggtgctgtgagcctggcacctctcaggtgtcaccgtcatgattgagatatttgtgatacgtaaaaacttgcaatttggcataccccccacaaattaaattacaaggtgtgtgtcactgaattatcaaccgacttctgttaagttttcctaaaccattttaaatatatgggggaaatgtttttaccagttacattgaccggtgtgaggacttagctccagggtccaggcgagccagagcctctgcaca

SEQ ID NO: 6559 - DNA, 518 bp, Homo sapiens
  source 1..518: mol_type = other DNA
cggccttccgaagtgctgggatttcgcaatgaatgctgggtcagacctgagcttctccgggatccagctctcatctcaggtgacggggtctgaggcctcctgggaatggcactcctccccagtgttctaggggctgggaatactagtccctccctcctggaacggggcctctctgtcagagtgacgtgcacagacccggagggttcgagagccaggaggcagcgctgcctgggtgccaccagcgtggccctggccccatgcactggctgggcaccaccctgccgccggccggcctcctccccaggccaggaagccctgtcaggcagcagatccggccccctcagcagatcggtccagcagaaccgcccccagcggagccgctcgggcggggcctccgggcctggggaagggagcggggaccgggccgtggaaggaccgcgcccgcccctggccagcctgagccaatcagcgcatgctaggtgggccgacatgattggctcctagaggctcacgtgtgg

SEQ ID NO: 6560 - DNA, 409 bp, Homo sapiens
  source 1..409: mol_type = other DNA
ctcaggtcccaaagcactgggattacaggtgtaagccaccctggcatcagtctttaataaaaatgcattgtctgtgagccatttccttattatcctataaggaaaagtagaacgaatgccccaggccagaccctggccctctcctcggaagacagagcaatgcagcagcgtttcccctgcaaactgcctgcctggctgctgggagggggctgccaggagcctcgcgggaatcgcctcggcgactgttccgcgtcagcccggccgggagcttgacagccggaagttcatcgcaagcccggcgacgccgcgcacgcgctgtctccgtcagacctccgcgcctgcgcgcgcagccaggaagtgaggccgcggcggaggggacggggctaggccgggtcgccgcctgacgcga

SEQ ID NO: 6561 - DNA, 494 bp, Homo sapiens
  source 1..494: mol_type = other DNA
gggtcgcctggccctgacccacgccctcggcagagggctgacgctgcccccagcgtcccggagacaacactccgcggccgcacccgcgctgccgacccggggcctcaccttcggccaggacccgccgcacccgcagccgcagctcgcccagttccaccgtctgccccacgaagtcactctggtcgcggccggaagcaccgcccagggagcctggacccgcgcgccgactgcagcagcgacatggcggtggctgcgccgcaccccgcggcagccggagtggtcgggctcgggctcccgctccctcgccgtccgggtcagctcagcaaccgccggcccggaggtgcaccatcttccgcctcgacgccgtgacgtaggcgcccgtgaggacgcgtcgcgtcaggcggcgacccggcctagccccgtcccctccgccgcggcctcacttcctggctgcgcgcgcaggcgcggaggtctgacggagacagcgcgtgcgc

SEQ ID NO: 6562 - DNA, 868 bp, Homo sapiens
  source 1..868: mol_type = other DNA
ctagggtcgcggtgcgccccagcactgcacagcgcgaaccgcagggccgaccttgcggcgaccccgctctcccgcagtgccgcgtccgctgcagaggaaatcccgggggccaggggggggtctctggccttcgtcccggtaaaggaaacagcgactccgttacaccgaaagtgagcccgggccggcctgcgggtctctggctgcgagggtctgggggcccccttctcccgccctgcgatacggggaggtcggggcagagcggcgggcggcgctcagggacacggtcaccggagaatgggggcggcagcgactcccaacccctggcccctccgctcgggaggcagcgacttctccgcccgagggttttgcacccaccggccccgcgcggaccctgtagggagcaggcccgcaccgtcgggctgggggcgggggggcagagccgggggcgcccagatcaggggcgggcgggggtcgcaggcgcccgccgggggaaggtcgagcccgggccgggttggagggaggcgggggcgcgtcactcgggtccacccccgcccccgcccccgggtccacccccgcccccgccccgggtccccccgggtccacccccgcccccgccccgggtccaccccccgcccccgccccgggtccgccccccgcccccgccccccgcccccgcccccgggtccaccccccgcccccgccccgggtccaccccccgccccccgcccccgggtccgcctccgcccccgcccccgggtccacccccgcccccgcccggcgcccgcggccccgcccctcggcgctcccctccccgtgctcgtcacgctcggacgcgggcggggggcggggagcgcctgcgagtgacgcg

SEQ ID NO: 6563 - DNA, 811 bp, Homo sapiens
  source 1..811: mol_type = other DNA
ccgcggtgagggacggcgcccacataggcgaggttgagctgctggtcccagctgaggacgtcagcctggcaaggggcggctcagtcccgagcctcagcatggctggcagcgcggctgacacacacgttcaagcccaggactgcccgggcgcaggatccaggcgctgcccgtgcgttcagtgactgggcgaggggccaacgccagccctggccctggccctgccaggaaggcgggttgggacaggcaggccaggtcccgctgcagggccgtccactcccaggggagactcctggtttacctcaaagagcaggatcccgggcatcggcctgggctgcagggggcggcccaggctcacgccccggcgcccactcaggtggaggacccacccacaaacacggcggggggcgggcccgggagagccagggccccagaggagggagctccggtctctgaagctctcacagtgcgcagtcagggggcgcccgagctctccccgtgcggccagggggtcccggaggccgcggagcgctcaccagaagcctgtgctcctccagaagcgccgcaggggccacagcgcgcgggccgcgtccacatgcaccaggtgcggggcctcggccggggccaccgggggcgcggccaggagcgaggccaggagcgccagcagcgcggcgcgggggcgcaggggacgcatggccacgcgtgctcggggactgcggggcttcgggctgcactgccggttccgcctccgggtcggagtctgggcgcgcaccccatgtgaccgccgccgcggggcggggccttggtgaggggg

SEQ ID NO: 6564 - DNA, 753 bp, Homo sapiens
  source 1..753: mol_type = other DNA
tgtggtctgggtgccctcaccagcgatggccctggagccctgccctctgcaggtccccgctcggtggcccggggtggggtcccccgcttcgcacgggggcaaggacccagactgctgccagcggcggggaggggtgacccgcgtggacgcggctctcaaaggacaccagcgcacccgtggcgcgcacgaggcaggagagctgggcgctcggcgtgaggcccgggtgggggtcgcgagcggacagccccgggccgcaggcgggtcccccgttgcagtgaggacagcggtcgggcgccgggggtcctgggcctcgggcagggccaagtctgcgcgtgcgaagaccccacggacggagccaaccccgctttccgggacccactgtgggaggcccgcagcgctgcccctcgccgggggcgtcctgcgcggccgggggcctcggacagcatccgcgtctcgcgtgggaggcgcctgtctgcgcagccgcgggccgggaccccgcaggtacaacgccgcgcgtgcggcgtccggagaagtctggcccggctgcggtcaaaccgagcccacgtggaccagttccccacggctggttcgcgagcggcctccgcgcacaggccccgccccttagcaggccccgccccgcccgatcacagggcccgcccccagccccgctcatcgacggggcacggctgcgacccttagcaggccccgccccgcaccagcagcgccccgccccgccccgcggcccgcgcctgc

SEQ ID NO: 6565 - DNA, 547 bp, Homo sapiens
  source 1..547: mol_type = other DNA
tgttggcctgcaattccaaagtgctgggattgcaggtgtgatttttatacaatgtttgcttggattcacacatgcatacatggactacacatgtactacagttgtcccatggtatcctcggggtattggttccaggaccctcccagataccactcaagtacttgatataaaacacagtatttgcacattacctactactgtgtagtttaaatcaagattacttatagtccctaaaacaatgtaaatgctctgtaaatagctgttatactgtattgttttaaaatatgtattatttcgtattgctttggctttaaaacaatattttcagtctggttgaatccatggaaagcgcacgctttactcaggaggcagtgagctgagatcgcgccactgcacctcagtcgtcctcagagcagcccctgaggcccgcaaggaagcggggctccaagccctgccgtgctcccggctccccgaggctccccgaggccccccctcaccaaggccccgccccgcggcggcggtcacatggggtgcgcgcccagactcc

SEQ ID NO: 6566 - DNA, 431 bp, Homo sapiens
  source 1..431: mol_type = other DNA
tccagtgaggttttaaaaagcactaatttagttcacttaaaaaaatcatttatggcactgccggagaccaggactcctggccagtcacggagtcctcgccctgggcggtgagcaccacacacagggcttacgcgagccacacgcatatgcacgcacggcagccttgggctgagccggctgtcagcctctgccctgctccagcttggaccaggctggctccttgcaggaccaggagggtgtccggcgactggacacggagaccaagcctccctcagccccgcctgggtttgaaggctgctgcactcgaccccagacccgctggtccctaagcccccccggcagggccgcagagccacagctgcagcggctcctgggaggctgggagctcctcagaggcccacacggatcagccgatcaggtaacatgcctgc

SEQ ID NO: 6567 - DNA, 294 bp, Homo sapiens
  source 1..294: mol_type = other DNA
catgctcccacctgagccgcttgagtagctgggatctacttttaattttttaaaggttggtgctcaagcctgtcccggatcacgaggttcaagacctagtcccagctactcgggaggctgaggcaggagaatcacttgaacccgcttgcagtgagactgtcgggcgccttccagtgaggttttaaaaagcactaatttagttcacttaaaaaaatcatttatggcactgccggagaccaggactcctggccagtcacggagtcctcgccctgggcggtgagcaccacacacagg

SEQ ID NO: 6568 - DNA, 768 bp, Homo sapiens
  source 1..768: mol_type = other DNA
cctttggccagccccggggaggacccctgcctgcatcgccgcggccgtccccccctaccccgtccccagcagctccggctgggcgaggccctgcttgaccccccggggcgcagacctggaagcctcgaagctcccgcggccgtccagtccgcccccgagcaaccagagagcggtctgggcccggcccggggctgcgcagaggtcagactgccgcgggcagggccggagcctgctctgggggtcgcggaggtgtctcgagagttgaggacccgacccgggcgcgcgcgggcgcaggtatggggagggcgcggcggctcctggccggtcctaggagcctgcggggaccaagggcgcgcgggcggggccgggggcgcggcgaggctcgggttggggcggggcgggggcgggggcggggccggacccggggaagccgcccgcccgcggggacgtccgcaccgcgagggttaaggccgggagcccggcggggcgggggcggtgtgcgcgcgcgccgggggcgggtcgggggtccgggctcggcgctcgctccgggagagttgacaaagccccgcagggaaggacgcctcgcggcgcggcgccccgggcccctcgccccgccgccccgggatcccggccccggcccccggccccgcggactcgcccccgccgcctgcccggtccgggaccccgcgccccgagcgcccgagcccggaccccgacccggcccgagccgcccgcgcccaggtagcgccgccccgccccgagaccggg

SEQ ID NO: 6569 - DNA, 807 bp, Homo sapiens
  source 1..807: mol_type = other DNA
gggcgggggcgggggcggggccggacccggggaagccgcccgcccgcggggacgtccgcaccgcgagggttaaggccgggagcccggcggggcgggggcggtgtgcgcgcgcgccgggggcgggtcgggggtccgggctcggcgctcgctccgggagagttgacaaagccccgcagggaaggacgcctcgcggcgcggcgccccgggcccctcgccccgccgccccgggatcccggccccggcccccggccccgcggactcgcccccgccgcctgcccggtccgggaccccgcgccccgagcgcccgagcccggaccccgacccggcccgagccgcccgcgcccaggtagcgccgccccgccccgagaccgggcccgggggcgcggggcggcgggatgcggcgcccggggcggcgatgaccgcggagcgcacgccgcgggcccggccctgaccccgccgcccgcccgctgagccccccgccgaggtgagccccccgcgcgcgcggccgcgaccccaggtgggcacacgggggagggcgggggtccggggcgggggcggggaggggcgggttcggggccccagctgggcacgggtcatgcgcgccgccgccgctcctgcgggcccccggcctgccccgcccccgcccccgcgccccacgtgggccccccccagcgcaattgtccgctaatggcgcaggcgattatctgcgggtgtcctgcgggcagggccggagttacaagcgccaggaatccagacccccgctgcggcttcctccgcctggagcgcgggcggggagggcctgtgggg

SEQ ID NO: 6570 - DNA, 885 bp, Homo sapiens
  source 1..885: mol_type = other DNA
aaccagagagcggtctgggcccggcccggggctgcgcagaggtcagactgccgcgggcagggccggagcctgctctgggggtcgcggaggtgtctcgagagttgaggacccgacccgggcgcgcgcgggcgcaggtatggggagggcgcggcggctcctggccggtcctaggagcctgcggggaccaagggcgcgcgggcggggccgggggcgcggcgaggctcgggttggggcggggcgggggcgggggcggggccggacccggggaagccgcccgcccgcggggacgtccgcaccgcgagggttaaggccgggagcccggcggggcgggggcggtgtgcgcgcgcgccgggggcgggtcgggggtccgggctcggcgctcgctccgggagagttgacaaagccccgcagggaaggacgcctcgcggcgcggcgccccgggcccctcgccccgccgccccgggatcccggccccggcccccggccccgcggactcgcccccgccgcctgcccggtccgggaccccgcgccccgagcgcccgagcccggaccccgacccggcccgagccgcccgcgcccaggtagcgccgccccgccccgagaccgggcccgggggcgcggggcggcgggatgcggcgcccggggcggcgatgaccgcggagcgcacgccgcgggcccggccctgaccccgccgcccgcccgctgagccccccgccgaggtgagccccccgcgcgcgcggccgcgaccccaggtgggcacacgggggagggcgggggtccggggcgggggcggggaggggcgggttcggggccccagctgggcacgggtcatgcgcgccgccgccgctcctgcgggcccccggcctgccccgcccccgcccccgc

SEQ ID NO: 6571 - DNA, 529 bp, Homo sapiens
  source 1..529: mol_type = other DNA
aaaatatcatgttaacatgtaatcaatataaaattactaagaaggttttcattcggggcgcaggggtcacttggcccgtagctaccgggagcgctcaccctgcgctcctttgcagcgtcccagcgggtggaattttataaaaagtcacttccccatgctggaacctggaagcagcagaggtccttcccgagctacgccttccggagggaagcaggctcaggcctcccgtgctgaggtctctgcgccagcggccacctggacactagtcccaaagcgtgcagcgcggcctggccccgggcccccagggccccctggccgccctggcctccggcccagctcccggccctcaaggtgggcctggcccgcatcccccgcccactgctgtcgcgccgcgacgcctcctcagcgcagccggttggtgctcggggagacgagtcacacgcgccctcccaggtgctgcgggagaacccgcgaggttggcgggagggcgcgagctccagtgcgcgggcgcagggctgccgtcgacttt

SEQ ID NO: 6572 - DNA, 333 bp, Homo sapiens
  source 1..333: mol_type = other DNA
tttaaatatcaggactttaagaaaataaatattactgacacaaatcaatgttgcttttaataacaaaaagatgtttaggaagaatgaggccaggcacagtggctcacgcctataatcccagcattttgggatgccgagcacctagaccagcctggccatcatggtgggctggtggtgggcaactgtaatcccagctactcaggaggctgaggtgggagaaatggtgccactgcactccagtcatcaaaatctacctaaaagtttgttttttctcattaggactaaaaatagtctgcaagagacttcagtctgtttccttctctgtaaactgct

SEQ ID NO: 6573 - DNA, 364 bp, Homo sapiens
  source 1..364: mol_type = other DNA
gcctagagcccctgggagggctctgcaccgcacacaccgccggcctgcagccccagccctgtgcggggtcctggggaggggggccccctttctgctccaggagggatgtctggccacagtgcagatcgccccaaaggccagggatgcctgcgccgggagccaggagctggctctaatttacgccctgagctttcccgaaaggcttggggcaaagacctcagtggcacctagggaggcacgggaggtcgctgggcagggcgagttgggaaagcggcagcccccgccgcccccgcagcccctgctggaggccaggccgtgcagcctcattggccggcccggggcgccggcctcgggcttaaatagg

SEQ ID NO: 6574 - DNA, 362 bp, Homo sapiens
  source 1..362: mol_type = other DNA
ttctctctttttgaatctgtgaaacattaacagggttccaaacatcagagtgttttgtctaagcttaaaagcgaaggattgagcaagaccattcccgagctccttccgatcccatgactgggggcctagagcccctgggagggctctgcaccgcacacaccgccggcctgcagccccagccctgtgcggggtcctggggaggggggccccctttctgctccaggagggatgtctggccacagtgcagatcgccccaaaggccagggatgcctgcgccgggagccaggagctggctctaatttacgccctgagctttcccgaaaggcttggggcaaagacctcagtggcacctagggaggcac

SEQ ID NO: 6575 - DNA, 252 bp, Homo sapiens
  source 1..252: mol_type = other DNA
aaagctcaggctgaccttgtgactaaagccaccatgaaaagggcttgtggggcagacccaccctccagccggtgaggacaggcacaggacgtcttctgcggaattgtacactgtaacggctggatcacgaggtcaggagatcgagactggcaaccggcgcctgtaatccagtgagccgagatcacgccactcagagcaagactctcgcgcggacctcagtgtggcaggcactcccggggtgcagacggggtg

SEQ ID NO: 6576 - DNA, 423 bp, Homo sapiens
  source 1..423: mol_type = other DNA
cttctggactgagctcatggcagccacctgcaggacggctgcctgttgagctctgcaagtccacgcgggagccaggaattgcatggagtgcctgggactcgtctgaccccagctcccctggggaagtgggggtggtacgtccctgcacccggccacgtgctgccttctcctgggctgcctgtccatgctgagcagacaggaaagtccagtgaggtccctgcctgtgcggtgacacctccccacgcagggcaggtctggctggcccgagacgtaggcttctcagggcagcccaggaatctcgcggataggagtctgcatcattccgtctccatgccgtggtttctgaaattatgcaactatctcggccacgcgcagaggccctccccatggggtggatggaagcgtccactcgcggcgcgagga

SEQ ID NO: 6577 - DNA, 817 bp, Homo sapiens
  source 1..817: mol_type = other DNA
ggtttctgaaattatgcaacttctcggcacgcgcagaggccctccccatggggtggatggaagcgtccactcgcggcgcgaggaatatccctgggcccctcgggagagtctgcaggggcagcccctgggtgagcaggcccagtgcggcctctccctgaagggactttcgggccctcccgggtcggggcttacaaaccctactcttgttaaaagagaaatggggtcggggaaggggttctccagccctgaacttcccgggccgggcaggacgcggtccctccaggagtcggggctcccccgcctggggacgcactggggcaggcgcgcttctcctctcggggtcccatgtgccgccggctctcggactcgggtgggggcgatggggggcccgcggcctcggtgcccctggccagcctcggaggcgcacgggccaggccgcggggcgagaaagggagcggggcggctgcggctgcggcgcggaggagcgccatttacgttcgggcccgcgccaggcgctgacgtgggcggccctgtctcggcttccgggcccgcagggtcctcggggcggacggcgctcccgccagcggcgctgagtccggcccgaccctgcccgacttcctcggggacaggcggtttagaacgtgcggaacaccaggcccggggcctccgccgggctgcagccccgcgagcttcccgccaggctcccgccccgccccgccccgcagccgcgtcccggccgggcgggccctgagccgcccgcgtgagtccgtgcgccgcccgcgctgggaaccaggagaccaaccgcgaggccccgccc

SEQ ID NO: 6578 - DNA, 609 bp, Homo sapiens
  source 1..609: mol_type = other DNA
tcttgcggctgtaacatgtagcagcctccaatagatgtttttcctttgtttaaacaccaaatattttaaaagttgtttagaaatgtgttatgtgaggtttaattgggacgtcatttcctaattaataaaatctaatttcagttttattttggaaaggcagcgcacgacctggatgccagcgctgcccgccctgcaaggagagggcggagaggccacacgcttctcatgcttccgttgggaagtcggaggttccacatcaggattccagcagctggcgttgcccttggtaccgcaggcacgagggacccacaggggaccaccccgcgggagccccaagtaccagcccgctcggccccagctccacccgcccgggccgcagcccgcaccccatcggcccgccccgggccaggagcatccccagctccggcgtctgcggcctgaacccggtagcgaattcaaggtggaaaccgccagccggggctatcgttgattggctagaggaaaccccgcctccggccgactgggcggatacgattggtgcaggggcatcggcccgcccccatcctgctccggccggcgcgtggcgtcatttcccggcgtgcagcgcgc

SEQ ID NO: 6579 - DNA, 176 bp, Homo sapiens
  source 1..176: mol_type = other DNA
ctgtgtgacacctggcagaagcttcccggcagagggatccgctccccagagcaaacacaggccacgacaggttttgccttgccctgggcccaggcacggtggcccaggcacggtgactgtcatcccagctactcgggaggctgacagtgaaccgcgatcgtgccactgcactccag

SEQ ID NO: 6580 - DNA, 758 bp, Homo sapiens
  source 1..758: mol_type = other DNA
cccggcccgccgccggcggcccccgccctgcacccagccccgggagcccagtcgggcgtctgctctgcgtggcctgtgccgggcgccccgcgagtggggtccacaccacgctcctccgaagccacgggcgcggtctccgccgtccgcagccgacctcgcactcccctgcgttcgaggctgcggacttcggcggcaggacggacggcgcctctgcttctcattccgcccagggccagcccgggcccaggggtacctgctgtgcgtctggcgccgaggtgggccccgaagacccccaagcccgcccagggattcccttcccgaggccggagcggggaggcgccgcggggttcagggcgccctgcgcggggcgagctcgggggcgggggcccgcgcccgcccgtctgggcggtcctcaccggccctctgcaggtgaagggacctggctgcgagcccgcgggcgggcgtggcgttgaggcccagaccggaacttcctttcggcctcagtttcccggccggccccgcccccggcgcccgtacatgcggccccggcagcctgcctcgccctcgccgggagcgcgcctacgtcaccgcgcagacctcggccgcgtctttgcgcccggctgtcgagctcagggcacgtgctagggggcggggccttgaccgccgcgtcgagcggtaggtgcagtcgtcgctgtggtgaccccaggtcctgatgcgtccggcccagggccagccaatggcgcaagaggggcggtccc

SEQ ID NO: 6581 - DNA, 516 bp, Homo sapiens
  source 1..516: mol_type = other DNA
gcgtggcatgggctgtgccgcagccaggacgccttgccgccggggccaggacgcctcttctggggtcctgagcccccctggccggcagcccacaggggaggacaggcctcctgcatggtgccctttgtcctaacccacgcctcagggctaggccccgccctgaccgagaggcgccgtcagggtcggggtgagccccacggagcagcctgagagcccagcgtgttggagaatctccgtcctggtccggggaccctgggtgcacgctgggctgcggaggccaggggctggtggcctcgtccctgtcatctgacgcagcgccatggccggcggggcggaccctcttcgacggctgcctggcagacggagggagttgccagggccaagaccttggtccagtggcccctgtggctgtcagaggcgcctgctgaagctgtggtgcagccccgggcgtttctgtggggacacaggggctggaatccccgctaacatcgcggtttgacgtcagcgtgagatgtg

SEQ ID NO: 6582 - DNA, 816 bp, Homo sapiens
  source 1..816: mol_type = other DNA
caggcccctcccaccccaggggcccctcgccaggggtggggagcattgttctgtggaatctccagagtcggcggatatagcccagggccagcacacctggccgtcagaggcccgccctgggtcaggcggctcatctcagccaggacacacccgagccccagcacgggaggctggagagggaggcagggacccccttcctgggaatttgctggagaccccgagagcggggcacggcctccttccgctgcccgccaccccctagggaccccccaagagtccggtctccctgggcctgctgtgctcggacggaaccaggccccccctgcagcacggtccgccctcggcgaccatgagcgagggcctgccaacggctacacagcgggcagacggcaggcgggaaggcggcggcggcgagcctcgggccccgagaccgcgcgccccgggctgggtcaccgcctgagccacggctagtgccgaccgggccctcctcgctgcgcgtcctgccccgccgcctcaggtcgccgccgccacaggtcttgccttctaggcctggaggacgccgccgagtgccaggcacgcacgcgcgcagggggcggggcgtcgatccgggggcggggccagaccctcgcacagggcgcgctgcggactcggtgggcggtgcgagcctgggcgcctggaggccccgccccctccgtcggcgcggcgcggctgagggccggcgtggagaaggcggcggctgacgggctcgcggcggcggcggggcgcgggcggccaatgagggcggccggagggggcggggcggcggccgcggttttg

SEQ ID NO: 6583 - DNA, 631 bp, Homo sapiens
  source 1..631: mol_type = other DNA
tccgcggggccgtcagctgcaaccgggatggtgcggatctacaggacctcgcctccaggtggaacctacctgctgaagcggctcagtcggtggccggtgtgcggtcaacggccagggcattgtcaactgttgcgacctaaaaggttactccaaaactttaagcggccgcgtacggggcctgcagcggccacgggaccgtgggaagcagtcagtacccgccacaggccgcgccttccgggttccgggttccgggttcccgccagggaggagacacgcccccacctgggcagcacgacctgcgccgcgtcgcgcgcggccgaatctcccgccaaagctgcccccgcccgccaaggcgcgacctatcagcgtcgcagaggcccgcggcggcccggccgcctcaatcccgcgggtgggggcaaccttcctcagcccacggcgtccatctggctcccgagccgagggccgggcagtcgggcttcgcggctgcccgcggtcccgaggcctcgccctagccccagtcggctcgcgaggcgcgcacagctgagtggacccctgcggcgtggcccgatggtctcgcccgacccggcgcgcgcgggaggccgaggggcggggcccggcgcccacataaagg

SEQ ID NO: 6584 - DNA, 606 bp, Homo sapiens
  source 1..606: mol_type = other DNA
gcctctggggagggtgcagctggaagggctacagaaacccacccagtagccctagaaagtggcctggtcagggccccagcccccccagcccaccctctccatgaggcaggcctgggcgcctttctgggcccaggcagctgcatcctcaaaccaggatgtggagggtcacccctctgtatccccagagtggcaaacctggccagccactggccatctgcccccagggcatccaatcagctgagagagggaccttccagagccccagctagcacctggggcccagactgcacagaggccctccccagcctctgcccctgtggcgcccacgacaagcaagggctgcttggccttgcaacccccaggcacgtgacggttcaggacttggtgggccggagcatcccttgcccaaggttctgaacttgggttcccgtcacctgcaagtcagtgccggcggcgcccctaagcgcgctcagcccacgccgcggtccctctggatgaggaccggcgcctctccccagctgcgcccaggcgctttcggggcctcggggagctggcggaggcctcctcctgacctcccagcaagccctgcgcaggagaggatgcggc

SEQ ID NO: 6585 - DNA, 741 bp, Homo sapiens
  source 1..741: mol_type = other DNA
ccccaggtgtccgccgcaggcggcctagatggagttggccccaggacggaggcagcacctcggggcgcccgctccgccgtcggtcttggcccagctctagccgcccctggccaccatccagggggcccagcccggcggtcggtctagggccgggtcccatgacagggcgcggtacaggttctggcggcggccccaggaggagccgtgggggacgcttcccggggaaagcggcggccggggcgggagggcgagggccgagggcggggcggggcgggacggcctcgcgcccccaggaccccagcctccccgcgccgtgtagccgctctcctacctgcccgcccgcccgttgccgggctctgagcccgcgccgccgccgccaggaaggaggggtccgcgtctgctccacgccgggggccaagcctagctgctaccgccgtcgcgcttctagcccttgatggccgccggcgcgccggagtttcaaacgccgacggttgccttcgcgcggccaatcagcgcgcggccgggggcaggaccgcaggagggcgggcgtccaatgggaagctgtgcctcgccggctccgccctccccaccccccgctcgggcgccgacggttccgtttccggagtggaggggtgtctgaagctgagaccccgggctcgcagtcgccccagggccagggcctcgctcactgcacaggtgcggtgccgcctccagggccggccgagaagagaggccgcaccc

SEQ ID NO: 6586 - DNA, 774 bp, Homo sapiens
  source 1..774: mol_type = other DNA
cagccttagtcaggaggggcctttactgactatggaggcccgggaggggctctgggcagagaagggaccggccccaggctggtgctttggtgctactctggtgccccaggtgtccgccgcaggcggcctagatggagttggccccaggacggaggcagcacctcggggcgcccgctccgccgtcggtcttggcccagctctagccgcccctggccaccatccagggggcccagcccggcggtcggtctagggccgggtcccatgacagggcgcggtacaggttctggcggcggccccaggaggagccgtgggggacgcttcccggggaaagcggcggccggggcgggagggcgagggccgagggcggggcggggcgggacggcctcgcgcccccaggaccccagcctccccgcgccgtgtagccgctctcctacctgcccgcccgcccgttgccgggctctgagcccgcgccgccgccgccaggaaggaggggtccgcgtctgctccacgccgggggccaagcctagctgctaccgccgtcgcgcttctagcccttgatggccgccggcgcgccggagtttcaaacgccgacggttgccttcgcgcggccaatcagcgcgcggccgggggcaggaccgcaggagggcgggcgtccaatgggaagctgtgcctcgccggctccgccctccccaccccccgctcgggcgccgacggttccgtttccggagtggaggggtgtctgaagctgagaccccgggctcgcagtcgccccag

SEQ ID NO: 6587 - DNA, 381 bp, Homo sapiens
  source 1..381: mol_type = other DNA
gggctccagaagcctgttctcaagctgcagcaccgacctgccggggctgcccaccaccaggtgcctgtggggaagcctgggcagccctggaacctggcttcttgtcccgctgcctagcccggtgggagagagcagaccagagccgctgtcctgcttttctgccctcacgcagaggcctgtggggagaccagggcagtaatacagcagtaggtcccaggaagcagcagtgctgcccatggctccccctgccaggctggagagtgagtctctgaagcaagatggggactcagtctgaggctttctctaatgagcacacctgtgtgggaagtggtcgtgccccttgcagcagctgtcaaatgtggtagtgttgccctcacactg

SEQ ID NO: 6588 - DNA, 852 bp, Homo sapiens
  source 1..852: mol_type = other DNA
cgctttcggggcctcggggagctggcggaggcctcctcctgacctcccagcaagccctgcgcaggagaggatgcggccggccggcccgagcagcctcaccgagcggcagcagcgagtggcacaacagcgtggcggccgtgcggcgcaagtggaagggcacgaaggcggcgtcctcgctgcccagccagcccgacagcaggttctgcaccgtgagccccgccgcgtggaactcgttgggcgtgaagagagtgaaggtcacctcggggctgtccatcgcgcagccgccgggaagctgtcgagctaggcccccgccccggcgcgcggacgaggccgcagcgcccagtcccggacctgtcggttgcggcggccgccgcccggccgcccgcggggcactctaggacatggagtcccgccgcccggccgcccgcggggcactctaggacatggagtcccgccgcccggccgcccgcggggcactctaggacatggagtcccgccgcccggccgcccgcggggcactctagggcatggagtcccgccgctcggccgctcgcggggcgctctgggagatgcagtccccgtgcgggtgcggcctctcttctcggccggccctggaggcggcaccgcacctgtgcagtgagcgaggccctggccctggggcgactgcgagcccggggtctcagcttcagacacccctccactccggaaacggaaccgtcggcgcccgagcggggggtggggagggcggagccggcgaggcacagcttcccattggacgcccgccctcctgcggtcctgcccccggccgcgcgctgattggccgcgcgaaggcaaccgtcggcgtttgaaact

SEQ ID NO: 6589 - DNA, 791 bp, Homo sapiens
  source 1..791: mol_type = other DNA
aggcacgcagcccacccggccggccctcccggccagctcactggctcccatgggccccggacctccttggggtggggtgaggggacccaggcacctccagcgtcccccgcagggcagcaccttcccctcctgggtggactctgagcccaccccgtggagcccagaacctcgggccagctcaggctctgcccagagccgggctgtgctccccaagccaggggtatccagcccccgctcttcatcctaggccgggcaggcagccagccccaggcctgtgtcctccttggggggcggggggtagggacccctcgcgcggggctctcaggcggcttagctgcgtgcggccccaggtcagcacctcgccggtcaggtacgcaggccgcgccgggctgccccagacctgcggcgcacacgggaggctcagcctggaatgccgtcctgccctcctcagggttcagctccgcggcatctcggcgaaccctctgagctcctgagcacagccccaggggacccgagctgcgcgctatgcaaacacaggcctgccctcgccctcggtgcgccccgtgcccgccgccccctgggccgccccgcggtgcgactaggggcctagcccgcctgccccggctcccacgccctcgagaccgccgggcgcccccgcccggccacgccccctcggatgccccgctccgccccgagggggcgtgccctgcgcccccgcgagccgggcggggaccgggcgggagcggggcggggccggggcggggcgcggaccgtcccccactggctgcggc

SEQ ID NO: 6590 - DNA, 784 bp, Homo sapiens
  source 1..784: mol_type = other DNA
agctctggcgggaattctggccagctggcgctcttgcggcgcgcgggaccccaggggctgcttaggccagagcgaaacgaggggtccccccgcgccaacatatctacccctcccgctcagacgggaggacgcggtgtgccgggatggggggccgctatgctggctgcgccgccacccggcctagtgccctcgcctccaggggccggcatggccctgtccttcggggcgggaccctgcgctcccgtccccccagtggtgacggggactcccgacgccgagcagcgccgtatctggggagcgccgcccggtacgcagggaagaggcactcagagctgcgcgcgccagagtgcagaccgccgagggcagagcaggggggccggcgagggaccgcggccgagggcgtcgagggcgcccctccatccccagcgtccttggagccccaagctcccaggagccgtttctcgtgggtgcaggacttagtcccagaagccgccgcccgccggccgctccctcagctcctgcggccgccacgctgcgagccccggcgtccacggtacgacgggaaccaggatgcagcgagccccaggagccagccgccccggtgcacgccgggaccggtagtccgcgcctcagggtagtccgccgctccggtgcacgccgggatcggtagtccgcaccccagcgtgcaggccgtcccggtgcacgccggaaccggtagtccgcggtggcgcggtccgcccctcacctggccagcggcgggcgctgaggggcccaatgggagccg

SEQ ID NO: 6591 - DNA, 646 bp, Homo sapiens
  source 1..646: mol_type = other DNA
aactcagggatcctcatcttagggaagggctcctgggagacggcgcatgagcggtccgcgagcccagcccagctctggcgggaattctggccagctggcgctcttgcggcgcgcgggaccccaggggctgcttaggccagagcgaaacgaggggtccccccgcgccaacatatctacccctcccgctcagacgggaggacgcggtgtgccgggatggggggccgctatgctggctgcgccgccacccggcctagtgccctcgcctccaggggccggcatggccctgtccttcggggcgggaccctgcgctcccgtccccccagtggtgacggggactcccgacgccgagcagcgccgtatctggggagcgccgcccggtacgcagggaagaggcactcagagctgcgcgcgccagagtgcagaccgccgagggcagagcaggggggccggcgagggaccgcggccgagggcgtcgagggcgcccctccatccccagcgtccttggagccccaagctcccaggagccgtttctcgtgggtgcaggacttagtcccagaagccgccgcccgccggccgctccctcagctcctgcggccgccacgctgcgagccccggcgtccacggtacgacgggaaccaggatgcag

SEQ ID NO: 6592 - DNA, 489 bp, Homo sapiens
  source 1..489: mol_type = other DNA
actaggacatacagtcctacagctgggccagtcctacagctgagccataaagctgggccataaaaagtccagttctttccactccagctcaggtccaaccctgggtggggaggcactgtatccccctcttgcctcctgggggatgggtggaaaaggggcccctaggttcaggcctagttgtgcttaaactctgttctgcagtgcccactgaccggtgtggacacagggacttacagaggcccagtacctggcagttcctgatggggaaaaccacccaggcaagcaggctacgttttcctgactcaaccagcctctcaagactggggagctggctggcatcaggctttcacaccccatgcctccccaggcggtgccctgaggtgctggggatctcctagctggagatctccaccagctgggcccccagcgccgcaggtccaactcagggatcctcatcttagggaagggctcctgggagacggcgcatga

SEQ ID NO: 6593 - DNA, 883 bp, Homo sapiens
  source 1..883: mol_type = other DNA
ggaaggctcctgcagcccagcaggtcctgctcgccgggggaccccaaacgtgaccaaagggcacggccgtcctcgtgcgtggacacgttccaccaagcttactcgcgcagggcgcgccagggctgcccagcccttcagaactgtctctgaggcagtgacccgggggacccggccgcctcacggcagaggcccagcggctccgcccggcgctggcggcccagcccgcgacgagacccggggccccacggtcccgcaggggctccggaggccgggaccaccgggctccccgcatcgccgtgacaaccagcccgaacccgcgggtcgtccgcgctcccgacccaccagccgggagccggccccgccctggggtgcccgccgcttaccccgcgggacggtgtaccgaggcggcggcgggaggcgggcgggcgcccggccgcggcagctcctcaggacgccatgtgctcgggcgcggcggccgctccggcctcctgcgctgcctccttctccgcggcggccgcggctcttcgccgtcccggcggcgcttcagacccggcccgcgcggacggctgacagaggcggctggcctcggacgggaggcgctctcctcaaggacccggcaccagcggcggccttgtcccggcacagacgtccggaggcgcggggcggggcggccaggccgcggctcccattgggcccctcagcgcccgccgctggccaggtgaggggcggaccgcgccaccgcggactaccggttccggcgtgcaccgggacggcctgcacgctggggtgcggactaccgatcccggcgtgcaccggagcggcggactaccctgaggcgcggactaccggtcccggcgtgcaccggggcggctggctcctgggg

SEQ ID NO: 6594 - DNA, 324 bp, Homo sapiens
  source 1..324: mol_type = other DNA
tggaagatttccaatattgtggtggtttgatgatctattccagaacttagtggttgaaaaaacaacaacctgtatttgtttacagtaaatgctgtagtgagaactgtcatcacttttgaatgttttgttggtaaaaactggtagagtgacaaagaattattgaccatctttatttatattttcaggcgagagtacagttctaccacacttttatagcaaggtttggtttaaatgaatataaattgttacattgttcagctaaatcatacactgtgatggataatatttattactaattcagcctaaagtttttcaaatgaactg

SEQ ID NO: 6595 - DNA, 857 bp, Homo sapiens
  source 1..857: mol_type = other DNA
aggccgccggctccggcagcacctggaggcaggagccgaacttgggcggcctgtgccgcacgcagtcgcccgcgccaccccctgaagcccggctctaccgcagcggcgctggggtagcgcccctggaccaggcgtcctcccctcgcgagcggtcctcccgcagccgcgcccagctccgggtcggaccctcgcccgggggactcgttcacgccctgcggccgttaggcgggaagagcacgacgccctgccctgccccgtcgtggcgtctgaccctctccgccacgtctgttctgaggctccgggcccgccacggcggggcctctgcggcggtttccccacccgtccccgcactgccgctccgcgaggcggacgccgctagcagcctcccgcgggccccaggccccgcgcccctctcacgggacaggagcttggggacccgcgcgggcgggccgcgcgcccaacgccagcctccgcggccgcgcgcccacggctcgggggcgccggctccggacggtgattgggcgcggatcgtgacgtcactgagcgcggcgcccgcgggcgccgggtctgggccgggtgcgcgccgccgagtagcgggagcagggcgcgcgcccggcgctactctgaggcggctcgcggggcccgcggcccggccctcccggcgctgccagccccgcccgcccgcgcggcccccacccgccgcgtgcctgcccgccccgcccgtgcgcggccccggcgcggatttgaaaagcccggtccgcgggccccgcgagcgcggcagccaatcagcggcgcgcacttttcccgcggcttctgcgaggcggcggcggccccggctgcggcggcggcggcgggcg

SEQ ID NO: 6596 - DNA, 735 bp, Homo sapiens
  source 1..735: mol_type = other DNA
gatcttttaaaaaaaccagcactctgggaggcagaggcgggcgggcggatcgcttgagaccagcctggccagtaaaacgaatttaataaaatgaagtttaacttttactcatgtttgtatctaatgacaagcttttaaaactgaaactcctgcctggcggctccagcccgactgggggccggggcctccctgcactgtggggtcacgagtgcccctggacagctcccgagcgccctccgacccgcatgctcagcgcagccccgtcggcggcgcgccacgggcagagcgggctcagcgggggacggaagctcagcgctgcgaccgggatcccgcaggctcgctccgcagggccgcggctcctctccgtgcaggtgctgggcccgcgggggcggggcgtccacacggtccgcgccgagacccaagcggggcaggtgccacagggagcctccgccccaccgcgcgagcagcaagtctgcggcgcttgacacctgcactgcgaatgccaggccgcagcccgggctcccaagacgcgaatacgcgcgcctgctcgtgacgtcaccacaaagcttcccgaagacgcggccgctacccggagacgcggtcgccacccagaagcgctctcccgggaagccccgctcgtgggaccgcgccacctgcgccgcctctgcggcccgcagcccgacgggcgccgccatgttggggtcctagcgagggacgcgtaggtgtcttcataag

SEQ ID NO: 6597 - DNA, 377 bp, Homo sapiens
  source 1..377: mol_type = other DNA
tgaaaagtttttctatgtttgggagtcccgttcccagcttttcttctaatgttaggaatacctgttgcatgatcacgtcctttcagagcttcataaagtagttctgcttcttttcactcctgagtcaaagtcctgtcccaggagtgggcttagccttctgtacagagatctgggcattgctagggatacctgatgccctcgtttttccagaaaattaaggttacaaaagggacccatagttaacggtagctcctttatgtaaaggtatacacaagaaaacatccttaattaggcattaagtctaataataaagagtctgagctgacactgatgtcagctcccccagctgccatcactgagttacagccgaccaaagc

SEQ ID NO: 6598 - DNA, 858 bp, Homo sapiens
  source 1..858: mol_type = other DNA
ggggcgcccgaggctccgggtcctgcacggcgagcggggcggcctccaggtaggggtgcggctccgcccaccaagaagagggtctggcgggaggtgtggttagtccctgagctcccggccacagcgcgggctgctgggtggggtggggggggagcgggggcgccagcacccacgtgcgcctggggcgccttctgaggaggccaccgcctgtgtcggtgtcggcgtgggggcctggctccgacggctgggaccatccctcccagggcgtccggggcccagattcgcacttgccgggcgcccccgggggccactggctgcacggcgctctttaccaacagccctgagttcacgggactgacgaggacctgtggtcggggctccgcgcaagcggttctccggtctccgaggacaccgagagggccgggagggaccgagcaggctggtgcccaccctgacgcccgaggatcggggagaggctgggccagggaaaagccgggcgagggcggatcccccgagccgatcccccagaccagctctctccgggcggtgcgaccccacactggaccccactcgcccgcggtcggaggccaagcgtttgcatgcgcagctccccgcgcctcgcgagcatcgagcagctccctcaggatcgctccgctctggaggtctcgccccggcgccgcctcctccaggcagtcctctagactgcatccgccatgggcctggacgctgctcccgggggcagcccccggccagggccaggcacacccgattcctggagcgtcctaggttcctctaaacccgcggccagcgcagtctcgggtttccatgacgacgacgtcggatggggaacccgggcgg

SEQ ID NO: 6599 - DNA, 920 bp, Homo sapiens
  source 1..920: mol_type = other DNA
ccccactccggctgcccgtgcggctccggacgaggcttcccgggggctccgggccggggcagccgcggcgccctctccccaggtccaccgcgggcgctgctttcaaaaggcaggagacggagcgggagacgctgccgtgactgctccgggcggccgcggaggcgtggcgccgcgatcgccagcggtcgggcccggggtcggggcgctcccaggcgcgcggcgtgggagcggggggcggggcgggcggcgcccatcacgcgctccgcggccgggtcccgagccccgccggacgcccccgggccaggagcccccgcccgcgccgccgcccccgcccgtgccgggcccctcgcgctgcccggccgccccgtcgcgcccagcgagccacccggcgaggcgggggcggcgtctcccccacccccgcgatcacgcctgcagtggacgctaggaccctgcgggccgcgggcgccgcgactgcaccggcgccgccgcattattgcggcgcagctccctgcgcgcgccccggccgcccgccgcctccgccccgcgcccctgagctgccgccgccgccgccgccgctgccgccgccgccgccgccgccgcgggtccgagggcgccgcgcccttgccctgggcccggccgtgcccgccgccgcccggccgcgtccccgctgccgcgccgcccggccgggtgcatgcattgtgggcctcccgacatggtctgcgagacgaagatcgtggccgccgaggaccatgaggcgctgccgggggccaagaaggacgcgctgctcgccgccgccggcgccatgtggcccccgctgcccgccgcgcccgggccggccgccgcgccccccgcgcccccacctgccccggtggctcagcctcacggcggggcggggggcgcggggccgccgggggggcgcg

SEQ ID NO: 6600 - DNA, 734 bp, Homo sapiens
  source 1..734: mol_type = other DNA
gtaatataactgctagatacttgagtaaaaatgtaacttttctgaatcagaaacaaaacatttgaatgatataggaaatccaatgacctattgaagtaattttaacttaagaaaaactagtaacatatacttggattcagtgaatagtgtcctattaataatgattctgattaaaagaagtataataagatctctattttggtagccgttactatatatatggtagtaatagcagtaaaatttagtaattcatacccttgacttagtccacatttttcccttttaaactgtaatttttgtttatatgaatattaaattagttttcattcattgagcttattatctggtcacctaaagtggaaagtgaaaataatcttaagatgatttcaaatttaggcatacagtttgaaatgtaattgcttttctttgtataggctgtggacaaagaaaatttggatgctaaaatttctagcttgaccagtgagattatgaaactatctgcagattgctaaacaagattattatacagcaagacaagagttagttttaaatcaattaataaaacaaaaggcatcatttgaacttctacagttatcatatgaaattgaatcgtcaacttgaaaatttggttcaagaacttagtcaaagtaacatgatgctctacaagcaattagaaatgttaacagatccatcagtttctcaacagataaatccaaggaataccattgatacta

SEQ ID NO: 6601 - DNA, 524 bp, Homo sapiens
  source 1..524: mol_type = other DNA
ttaggtgtcacagctgggtgaccctccgaaggcttggggccgcggatccctggggcttgccgctgcctctggggttcgcgcggccctggcgtcggggctgcctcagcgctggctgaaggccggcccgaagcacccttgtcgcaatatttagttgatcttcagaagatgtacggagggcagggaagagaggctgcctagcctcctggtgtttggatccatttattttgaattaaaaacaaatgctgctctataaagtgtaatgcattttaaaccattttatctttggaaaaaaagataaaatggatccaaatagatccactttcttgttttctgtttctctttatcatcatcaaacattgcagcttttaaaattcttcccccctaggaggaatcattatagattctaaaaatatattttcccttcaaaacgtagctttttttctgcttggatttattttctaaaaatcaacaccgtaaactggaaacattaaaaaaaattggttatcccaaagctgataatctta

SEQ ID NO: 6602 - DNA, 557 bp, Homo sapiens
  source 1..557: mol_type = other DNA
ctcgggggcgagcgctatcaccgccgggctccaggcaggcctgaagcacaactgacggctccgttgagagcaggcccgcagcgtagagggctccgccccctgcccaggccccgcccctgtccaggccctgtccccgcccctgccctgcgccccgcccaggaggcaggatgcccgcagcggccgggggccgagcgccgcctgctcagctccacgaccacgccgtcgccttgtgcgcttgcgcgcgtccaggcgctcccgtgaggcagtgcgaggcgcgcggggcacggagggcggtggcggcgggctcctgcgagcgggcctcggggctggaggagtggccgcgatcccctcctgggggctccttccaggtgctccagcagctgcccggggatcagggcccggtccgctgggcgaggagctggggcgggggctgtgcggggcctgtcacccccgtcttctgcagctcggtgtcgacggcgattaggtgtcacagctgggtgaccctccgaaggcttggggccgcggatccctggggcttgccgctgcctctggggttc

SEQ ID NO: 6603 - DNA, 377 bp, Homo sapiens
  source 1..377: mol_type = other DNA
ctctgtcgcccaggctagagtgcagtggcgtgatctcggctcagcctcccgagtcgctgggattacagatcttggccaggctggtctcgaattaagtgtttttgcaaaataaagttcattgtaaaagactctactcgggggcgagcgctatcaccgccgggctccaggcaggcctgaagcacaactgacggctccgttgagagcaggcccgcagcgtagagggctccgccccctgcccaggccccgcccctgtccaggccctgtccccgcccctgccctgcgccccgcccaggaggcaggatgcccgcagcggccgggggccgagcgccgcctgctcagctccacgaccacgccgtcgccttgtgcgcttgcgcgcg

SEQ ID NO: 6604 - DNA, 377 bp, Homo sapiens; identical to SEQ ID NO: 6603
  source 1..377: mol_type = other DNA

SEQ ID NO: 6605 - DNA, 564 bp, Homo sapiens
  source 1..564: mol_type = other DNA
ggcgagctggagggcctgggagacgtcctccccgtgtagcccagctccagccagccagtgctggccgtcttccagcatgagtggggcgagctgttccacccaggccggagcgggagcctttgcccccaggttgggccagggctcagggctcccaccaaagggtgggctgcactgagaggcccctgctgcgtgcaggtagttgggggggacacgccctttgtgagtgcacgtgcgggcccagaggcagcgctccaggctcgagtgacaggcgccgcgcggcccctcctcacgcccccgcgcactgcgctctcgaaccccgcgtggcccacccggggagatgtggagaccctgccccacgctgcccgctgcccactgcctgcggggtggcccagctccactgctcgccctcgcgtgcggggcctgacgcctagggagtgacccccgcgtgcgcccgggacaccccggctctgtggctgaggctgcgccgcccctgctgggccccgcccccgcctccccacggtactctcgcgactttgccgcggcgacgtgggggttttatcgcgg

SEQ ID NO: 6606 - DNA, 763 bp, Homo sapiens
  source 1..763: mol_type = other DNA
ggcacttagggcgtcctcggccagaggtggccagcgcctgcctctaggaacgtccctgcccactccggggagcctctcgactctggccgctccggcgtccactgggcgatctgaggagcccgcccgctctgggcctgacaccctcagagacgcctggctcttaggatcagagcgtctgcgtccctctccgaggtcccggcccttcccggggccactctgcgcccggcggggaggggagtcgttcacggccccacgcaagacccccgggcagagcgcgaggcctcgtccccccacgcagccactgctttcgtcgcgctcagacccggcggcccggcccggcccggcgcacgccccggagcgccctgcttcgctctcgtagcggagacgctcctgcgtcctaacgggcccccaggacggcgggcggtccccgcgcgctgcgcttcctctcggcaacgcgtccggctgcggcgccctcattggccgcgcgccccgccaccggccattggctcgcagtgcctgttttacataggccgctctggccaatcggcgcgcggcgcctacttaacatgcacggcggccgccagtcagctagcgcgggggccgggccaccacgtgctgttgctaagctcgggcttactagcgcggccggccttcggcccggcccgaggcgctcgacccgtccccattggccccagcccggcccggcgcccgcccccggggcgcgaacgccgcctcccattggctctgcgggccgccgctctcc

SEQ ID NO: 6607 - DNA, 517 bp, Homo sapiens
  source 1..517: mol_type = other DNA
acaacaagctgtggggtcaggccgacccagatccgccgtgatctggatgcaacccccacagccagggcacgccggcctcgttggcaccgctgcggccggcaggtcatgaaaatcggcggcgcgtcgccccgcacctgtcccgcccccgtacctggcgggcgctcggggcagccgagccctcctgccgccgccacctgccaccgcagcagtttcctgggccagctggggctcagtcgtcgtccgtcagctcccggtggacgccgcggctgtttggcgtcgtcacctagcaaccggcggcacgctccgccgccaacacagcgccgcggcgcggcccgggacgccaagccctgggcgccacctccccgccatgccgatacccgggcgcggcgggtcgccccgccggcagggagcgcgcctcgggcggggtgcggcgcccgcgcagggattgggccgcctccgccccgcccgccccgcccgcagcgcgcggtgggcccggggctcgcggcgccctaggcgc

SEQ ID NO: 6608 - DNA, 499 bp, Homo sapiens
  source 1..499: mol_type = other DNA
ccaagatttggggtgaccttcggtgggcttttttcctggttgctagagctgggactggagctcaagaaccagtccgaccggggacctgcatgcacctctgccgtgctcgcaggggcagggacccgcacgccggcccagggcttggcacgcggggatgctgaaacagggccaggcctggtttccagccggaacggcgggcgggacgaacgaccagctccgcgcctccggccagctgcgtcgagccaggggcaccgcggctgttgtggcctgctcggctccggaggcagctggcgggtcgtccctggcggcgttggagcggtcagtggcagccgggcacgggcgaccgggtcgcccgggtcgccctcagaccgtgactcccgaaaaaccttgcgggcggggcgcgcccgcgccgtctcttgccggaaggtgcgagttaatggttttcttatccaataggattaaaaaatttgtccttccggccgaccgcggaagccgaggc

SEQ ID NO: 6609 - DNA, 753 bp, Homo sapiens
  source 1..753: mol_type = other DNA
gtcagtcctggacccgggcttaggaagccggaggttcggatccgcctcagccgtgggcggacgggagaggccgcgacgcggggggcgtccggcccgagcggggccgctcaccttgggtttgtatcgccgcgccggccctggccggactccgggcggccctcgccctccgcagcgctgcgcccgggcccggctgaggcgcggggcggacgcggaggcacggccggagcccccgcgctgtcgcagggaggctggctagcgaagcccggagcgccgagcgggcggcgggcaggtgcgcggggcaggtgcgcggccctgagtatgctctgcaagcggcgcgccgggcagacctcagacccgggagtgggcgctcgggcgcacggacagacgcgggcacgggggcgcgcggctcctcgctgctcactgacacccagcgctccgctggtcacggccgccccgcgccgcacatgcgcctagggcgccgcgagccccgggcccaccgcgcgctgcgggcggggcgggcggggcggaggcggcccaatccctgcgcgggcgccgcaccccgcccgaggcgcgctccctgccggcggggcgacccgccgcgcccgggtatcggcatggcggggaggtggcgcccagggcttggcgtcccgggccgcgccgcggcgctgtgttggcggcggagcgtgccgccggttgctaggtgacgacgccaaacagccgcggcgtccaccgggagctgacggacgacgactg

SEQ ID NO: 6610 - DNA, 391 bp, Homo sapiens
  source 1..391: mol_type = other DNA
ttcctgctgcttctgctatataagaacagcatctagcagcgtctgcagtggctgacgtagtgagccgagatcgcgccattcagtgtccccaggtgacggaacacatgccacgtgcttggtgcgctgcgagctcagctcctggagcttctgttgctgctgtggccgcaaggcctggaccctcgcggggagattcagacccagctccagaggaggctgatgaatctctggcccagcaccagctggggtgtggacagcctcgggggccaggccaactctcccggacgggtgcggacggcaggggcggggccgggggcgggctgccgtcgggcggggctgcgcggggaagggcggggctgcgcggggggcgcaccggaaagttccgggaagggcg

SEQ ID NO: 6611 - DNA, 653 bp, Homo sapiens
  source 1..653: mol_type = other DNA
cagcttcctgggctctgggacctggggtccagtccccactcctcatggggaggagtccccccacgccccaagcagttgactcccgcactggtggggggtccgctcgccctcaagctctgcaggcccagcttggtcctgagagctccccagggaagccatttcctcccaggaagcctcagaggaggccaagtgtaaagcacccggtctcctgtgcctcccgcccaagacgacctctgggccaccggagtccagacctggtccaagaggcgaggtccccctgggaactggaggacatttggaaacaaagacaaggtttcctggtgcccagtgtcttggccagggcctaagtctggggccgcccaggatcaggaccacggggctgggggggtggacagcgccctttccacctgggtcgctgggcactggggtgcggcgtctaggcccgcgacaacgccagtcttcgccccccaggggcctcgtcccggggccgcggaggccacgtgcagttccccgcccaccctgaggtaccggccccgccccacgcccagctcggacctccaggattgcgggacccgccggggaggggcggggccggggcggggccagtgggcgggcgcgggcgggacggagctgcggcggcggcgggtcccgcg

SEQ ID NO: 6612 - DNA, 558 bp, Homo sapiens
  source 1..558: mol_type = other DNA
ctgctgtgagggtggccccaggccccagaaagccctctctgcccaggggtcctgtcctccctgggcaagttctgggaggagagggagggcgctcagcagccagtggctagaatccccattccctgcttccgggctctgggcctgggcagggcactgggcttggagtacgggagcgtgctttgccactcagccataatgtactttctagcaaacctgccagagcccaggcctagtccctcagtcccttggtgtcaaagggcacagaaagacataacagccctctgtgtggcctcagatggcagagcagggtggcagcagctgccctggcaggaagagcatgctggtaaggtgacaccacctgacacccagggccctgcggggaggcagcagggagcttcctcccagggatgcagctgaccttgcgctggagccagagagccctggcctctgaccacaggatggaggggcagccctgggccccaggcagctttcaggacctcacagggtagaaggcaggaagtgccggctacttggtgctgcccagggagcagggaacag

SEQ ID NO: 6613 - DNA, 654 bp, Homo sapiens
  source 1..654: mol_type = other DNA
cagcttcctgggctctgggacctggggtccagtccccactcctcatggggaggagtccccccacgccccaagcagttgactcccgcactggtggggggtccgctcgccctcaagctctgcaggcccagcttggtcctgagagctccccagggaagccatttcctcccaggaagcctcagaggaggccaagtgtaaagcacccggtctcctgtgcctcccgcccaagacgacctctgggccaccggagtccagacctggtccaagaggcgaggtccccctgggaactggaggacatttggaaacaaagacaaggtttcctggtgcccagtgtcttggccagggcctaagtctggggccgcccaggatcaggaccacggggctgggggggtggacagcgccctttccacctgggtcgctgggcactggggtgcggcgtctaggcccgcgacaacgccagtcttcgccccccaggggcctcgtcccggggccgcggaggccacgtgcagttccccgcccaccctgaggtaccggccccgccccacgcccagctcggacctccaggattgcgggacccgccggggaggggcggggccggggcggggccagtgggcgggcgcgggcgggacggagctgcggcggcggcgggtcccgcgg

SEQ ID NO: 6614 - DNA, 476 bp, Homo sapiens
  source 1..476: mol_type = other DNA
ggcctcccaagtgctgggattacaggcgcgagccacggcgcccagccttgaagtttttagaaccagaagaaacctcggttcccacgttgtgcggagctcccctgctggttggggctcagcgcagccccagggaggtgcttcctgcacctcaggacaggcgctggagggatggcctaggacaccagggtcacaccaggccctccacctagactgcctgctgagggggcagtgccaggagggcagtgaccctgtggcttgacagacaacccccaccacctcagaagtgtgtgtgagtggtgccatcttccagccattctcactggagggagatttgatgggtacagagcagacccctacctgtctaccctccttcggacccctaggaagcttcgcaggccttccaggctgccagacagctgccctgggccccactctgaggggctcagagctgtcattcatttcctgcagaataaaac

SEQ ID NO: 6615 - DNA, 370 bp, Homo sapiens
  source 1..370: mol_type = other DNA
tgcgatgcctgggaggccagcaagggcctctgccggcctttggccaccccaggggactctcctgggtgaggtgcctcaggtgggaggtgccaaggaccagacccctggctccttggagaatccggggctggaggcccatggagtccaggtgagggcggggcacgtgcccgatcccttgccccgttgcccgggccactttcccgagggagctggttgcaagggcccggcgggatgggacctgggcggggcctcagagccgaggctcccgcgccggccgtggacagcgtggggaaactgaggcccgcagggggctcacgtgcctcccgcgcacggtgacgcggcagggggcggggccgggaggggcgcgccg

SEQ ID NO: 6616 - DNA, 866 bp, Homo sapiens
  source 1..866: mol_type = other DNA
gaggctggtcctgccaaagccccgcaggctcactccctggtcgtgcggaggtggctggtgctcgctggtctcctcagcacccgcaggccgggcccgggggccaggcagttgtcctctgtggagccttatcggggcccacaggccctgctcccacccgggccccaaaactcggcctggggactgcacaaggcggggctacgcggggcagggcccgtctgctgggggagtgcgctgggcggcggcgggagggcagggtccctgggctccgacagcccctccggcgggcggacccggcaggggctcgccgcagtctacctggccaccgtgaagccatgacctggcgcccgaagctgccggccggggtgtactccgcgcgggaccctgggcctccgcaggccccggcggggtcgccccgaggcgggcctggcgagtccaatcgccctgcccgcaggggacccgcccctcatgggtcccgccaatcgcagggtacgttgctcggcagtgctgcgcggcttggcctatgggacggcgcgttgttgggctgcagcgccgcaggccgcacccaggtcgggcggtgggggcgagcggaggggctgaggggcggagaggcctggcgggccgctgctgcgggccaggggacgggggcggagccggagccggagccgacgggcggtggccgcactgggaccccggaatcccgcgcgctgcccacgattcagcgggggcggcgggggcccggttcgggctgaggcggcggcgggggcgcggggaactgggccgcggttgcggcgggcgggggccgcggggcctgcggcggcccgggcagcctcgggggcggggaggccgctgcggcgccgagggcgtct

SEQ ID NO: 6617 - DNA, 346 bp, Homo sapiens
  source 1..346: mol_type = other DNA
caaaaaatataataattatctgggcatgagtcccaagctacgcccgggggcagaggttgcagtgagattttcctcaactgggtttgggaaaaataactccaggctcagtactgacccttggactggagagtcctgttgtcagcaacaagagtgcggtctccaaaccatagtcttaatttcagattctaaaccttaagcaagtaactggaatatcataacataccataggattaattaatgctgtagttaaaagaaaaacaacaccagctatgtaattgtataaaagacttaataaatgagacatcctgattgtcagagagaatgctggagtcaggcagcccgagtt

SEQ ID NO: 6618 - DNA, 465 bp, Homo sapiens
  source 1..465: mol_type = other DNA
cccagcaccccatctctacaaaatttttaaaaaattcgccgggcatggcggtgcacgctgatagtcccagctgcttgggagtggaaggatcacttgagcctgggagtgagctgtgactgggccactgccctccagcctcggtggcagaacaagaccctgccatattcacagaattttaaatttgagccatcttggcatgttaggttattaacaaactgagcatcttgacctcaaattgcgaaaaaaaatcagaaatcaaatttcttttggaataaactgtgctgttcttagcagatcttgtctgtgtggaacaagtcaaaagtttaatatttagttctttttgccatgtgcctctgaggccacaaagaagcctcacaatgctcatcatgaaacactgttagacattgatttgaaaacaataatttcttttattttgattctgtaggaacctagaaagattgtaca

SEQ ID NO: 6619 - DNA, 580 bp, Homo sapiens
  source 1..580: mol_type = other DNA
gcggtccttccacggggagggccaggcccgcagggcgcagacgatgggggacaggctgcgccagcgctcgcctgaggccccgcacacaaacctcaggcccatgggtccgctccgcggggcaggcgtcgtgggcccaaggaggccaggccaggagtctcggcctcggggttacgcggcggcgggcagctcttccgctccgctcaggggccggaaacgtgcagagatgtacgtcacttccggggcgtggcgtggccgggcgtggccgtcccgcccctggcggcgtgcctgcgaccgtccgtcccgagcgcgcagccgcggcaggtgcggggcgggaccgggggcgcccggggtgggggggctggaccaggggcgcggacgcgcagtggggggcgggaccgggggcgcgcggggtgggggcgggaccgggacgcacgcggggtgctcctgcgtccggtgtgcaccccatggcccccgccagggagaccgagtccgggccaggggccggaatcgcggggcgcgggccggggctggggtggttgggatcgggatcgggatcgggatcgggatccgggttccccgc

SEQ ID NO: 6620 - DNA, 587 bp, Homo sapiens
  source 1..587: mol_type = other DNA
cctgtcctgggacttcaggctcagcaccaatgcacagagagcggggtcagctcacgcagcccgagcagaatggctgtgctgccgccccaggcccgcggccaccgctgtgtgtgtggcaggagtcagccccccagcgtggggccccgaagcccgcggtccttccacggggagggccaggcccgcagggcgcagacgatgggggacaggctgcgccagcgctcgcctgaggccccgcacacaaacctcaggcccatgggtccgctccgcggggcaggcgtcgtgggcccaaggaggccaggccaggagtctcggcctcggggttacgcggcggcgggcagctcttccgctccgctcaggggccggaaacgtgcagagatgtacgtcacttccggggcgtggcgtggccgggcgtggccgtcccgcccctggcggcgtgcctgcgaccgtccgtcccgagcgcgcagccgcggcaggtgcggggcgggaccgggggcgcccggggtgggggggctggaccaggggcgcggacgcgcagtggggggcgggaccgggggcgcgcggggtgggggcgggaccgggacgcacgc

SEQ ID NO: 6621 - DNA, 536 bp, Homo sapiens
  source 1..536: mol_type = other DNA
taacaggttgtctttttggctgcatgcatctattgcccagagggaccgtttcctcgggtgcttctgcgcccggaaagagcgccagctcctccttcgggtgacccagggagcggggctgccctgtcctgggacttcaggctcagcaccaatgcacagagagcggggtcagctcacgcagcccgagcagaatggctgtgctgccgccccaggcccgcggccaccgctgtgtgtgtggcaggagtcagccccccagcgtggggccccgaagcccgcggtccttccacggggagggccaggcccgcagggcgcagacgatgggggacaggctgcgccagcgctcgcctgaggccccgcacacaaacctcaggcccatgggtccgctccgcggggcaggcgtcgtgggcccaaggaggccaggccaggagtctcggcctcggggttacgcggcggcgggcagctcttccgctccgctcaggggccggaaacgtgcagagatgtacgtcacttccggggcgtggcgtggccgggcgtggccg

SEQ ID NO: 6622 - DNA, 864 bp, Homo sapiens
  source 1..864: mol_type = other DNA
acttctctcatctgggccaggagatggggactgggacctggcccgggcagcctgaccacactgcacagaccccggctccggctccgtgcagatctgggttcccccagtgggaggtgtcggggctctccagggaaatcggggttctccggggatgtcgggttccttcaggggggccagggttccccgggattcggggttctctggggggggggtcgggggcgcctgccgcgcacccaccttgacgcgctttcagcagcagcgagttggccacgatgttctcgagctccatgtcctggcgccgccgccgccggcggattctgcgagaccgaggagactgaggaggcggaacaggaggagacgccgccgcccccgtgtcgagctccggacacgatcccgggaggctgctccgccgccaccactgccaccaagggcgccgccgccgccgcctccgcaggccctcaccagcaggggagcggtcggggcgaggggagggggcagcccgaccgcggcgggtcccagctgtcaccgctgccgcgctatcggcgcgcgtcctcagtgccctgcccccgggcagccccgagtcaatgccgtggctcacttcggacaggggctcactggcaggggcgcccgccgcggccggcgacccgctcccgggcgggctcggcgctaacggcttagctgaagagggagcgcccctcgccgccgcggccggggcactacagctcccagaaggccctgcgccaagagtacacggcgggccgcggcgcgtggcctgctgggagttgtagtcgctgagcctatcggcgagtaagccgagcctgcgggcgcggtgtttacttctcgcgagtcggaggtgctgcgctg

SEQ ID NO: 6623 - DNA, 453 bp, Homo sapiens
  source 1..453: mol_type = other DNA
cttggccagggcgccgcccgaagtgactgactcggcctgacccgtttccaggtcactccagctcaggtcacggccgcagccggccgagagcagcgtggggtccagatcctgccttccggcttcctgagggcccgtgcgcgagacaccccgggcagtcccacgtcgtggcgcgtcttccggcccaggatctggtggccttcgccgggccccctcgcgctcccgccggcgccccggaggccttccttcgcgccgccttcgccatggcgcgcgccccgctgcgcccaagggcccgagacgggccgcggaaccgcttcctcgtctcgcgagaacagcgcagcacctccgactcgcgagaagtaaacaccgcgcccgcaggctcggcttactcgccgataggctcagcgactacaactcccagcaggccacgcgccgcggcccgccgtgtactcttgg

SEQ ID NO: 6624 - DNA, 660 bp, Homo sapiens
  source 1..660: mol_type = other DNA
ctgcccttgaaaggggcggctccccatgaccctgcagtcagggcctggcggccagggctccagcaggtgcgcccggcatgcggtgacagcctgcaccgtgggagtccacgtcagggcccccgagaggccggtgagcccgccctcctgggctggcgcttaggagcctgggagcttcccgtggaggttaagggcgctgaaactgcacaagctgagagctcacagcagtgcgtggtgcctcttcagctggggtgctcacccgcggggagacgtggctttgtgcgcttggcgaaccccacgccagggcgtagcggaagggtgtggacgcactgaagcccgcggaggcacccgtgcgtgtgccagggccagggagggctgaggccccagagctgaccctgctgagggccctcgctggcggccttgaagctgcgcccagatccttagagaaggtgcggaacttgggcttcgcaggatgggccggcccggcgctggctgcggcttccgcagggcagggcagcactagctgacggggacaccagccgggtgccttcacctccgccactgctgtcagggctgcctggagcctgcagccgggatctctgtgctgcctgctgcgtgagaagccagggcacaggcctcggtgcacagtgcctgagggacaca

SEQ ID NO: 6625 - DNA, 584 bp, Homo sapiens
  source 1..584: mol_type = other DNA
cagtgctgggattacacgcacctcgctggaacttaatttttttagagacagtgtcgctctatcacccaagctggagtgcaagaactgggaactaacagctgtttctctgctgtccttctcaagaaaaggcctgcatcaccccccggctgggcggttgtctctgaggccaaccttactccctgctgggcaggctggacagctgccctgctctggagaccaggaccctgcccgccacggcctgtgtcccaggcgtgagggggtgccccacagacctctgctgagctgccgccccttgggggtcctgccggaaggtcagagcaggggtgcactcccataaagaaacgcccccaggtcgggactcattcctgtgggcggcatgcttcctgcacatcacagtgcctctgtgggcagcaggcgctgaccacccaggcctgccccagaccctctcctcccttccggggcgctgcgctgggaccgatggggggcgccaggcctgtggacaccgccctgcaggggcctctccagctcactgggggtggggtgggggtcacacttggggtcctcaggtcgtgccgaccacgcgc

SEQ ID NO: 6626 - DNA, 605 bp, Homo sapiens
  source 1..605: mol_type = other DNA
gcctctccagctcactgggggtggggtgggggtcacacttggggtcctcaggtcgtgccgaccacgcgcattctctgcgctctgcgcaggagctcgcccaccctctccccgtgcagagagccccgcagctggctccccgcagggctgtccgctctggccacgggccagtgtggcgggagggcaaaccccaaggccacctcggctcagagtccacggccggctgtcgccccgctccaggcgtcggcgggggatcctttccgcatgggcctgcgcccgcgctcggcgccccctccacggccccgccccgtccatggccccgtccttcatgggcgagcccctccatggccctgcccctccccgcccctcagccggcctgcccaggcggcctccctgctgtgccccggttgagccccgcgccttcgcccgggtggggcgctgcgctgtcagcggccttgaggcagaacctgcgggggcaggggcgggctggttccctggccagccattggcagagtccgcaggctagggctgtcaatcatgctggccggcgtggccccgcctccgccggcgcggccccgcctccgccggcgcagcgtctgggacgcaag

SEQ ID NO: 6627 - DNA, 605 bp, Homo sapiens
  source 1..605: mol_type = other DNA
cgagtccctgggcgggcggcggcggctgggacagggccagaggcgcaggccggggccgggcagctcctcctctcgtgccagcggtgcctccggtcccgccctcgctgctgcccgcgctccgggaggggcagacccgctggacgccgcagtcaccgcgccgccttcgcgggcgtcccggggcccggagggaacggcctttcctggctgtccccgtggcttcgccgcgggaactcacgccgcccccgaagctgccgccagctccgggcatctgcccagccgaaaagccagggcgccggggcctgactccccacagccaggtttcccgggcccgacggcgaaggacagagacagcccaggcaggggcggctcctcccggccacaccgacctgcccttcgcagggtgtcccgggccagcggaggcagagaaaaccagcttgcgggaacgcagtcgctcccagcaccagggccgggccagtgcgggtacacaccgtgcgcaccagcgccgccgcgcccccaacggaagtcccgcccccggccgtggaggccccgtcccgacgcgaaggccctcgcggcctcggccccgccctcgcctcgaccccgggggg

SEQ ID NO: 6628 - DNA, 380 bp, Homo sapiens
  source 1..380: mol_type = other DNA
gctcctgagaaaagccttctaaggaagcttgagtgggttctgctcactgaacactctcgtgcggggaatgctcatgttcctccacagaaaggcagaagcagagctggcacagttccttcccagcgaccccagagccatggacctagcctggtggcccgcaagaagcttcccttccctcaacctaacgtttcagggttaggactcctagaacccctaaatctctagaaaattaacagatgattttgcagggatcccgtgtgccagatcccgctggctgccacccagtaagctgtgaattaaggttgtgaactactagaaatagtttaaaaatgatctcacccctggcaagccacagcttcctgcagtgtcctgttgccaga

SEQ ID NO: 6629 - DNA, 599 bp, Homo sapiens
  source 1..599: mol_type = other DNA
cacctcggcagccctgggatgtcgctgctgactcaggaggaacccgaggtgccgtagcggctgctccaatattgcagaagaggttcctcaggcagctctgcccaatcccaggccccagggtacctggcccagggttgtgctgccgcagacttggcctgtaccatccaggacatcaccaggggctgctggggggccctggccacccccagagtcagaggggcaggatctcaggtcatccctgtgcctggccttttggccagccctggggccaccgagaggatgcagcaccgaaccctccaggagcccccagtgctgccgtctgtgggacagggacaatcccatccccactgctactgtctgtgctgtgctgggcacagagctggacacctccaaggcccagcgctgtggcctgcagggactgggagcggcgccagaccatatcctggaagacttcctggaggaggcttctaagcatgtcaggtctaggactaggaccagtgcaggccgaggccaggggactcggggacttcctctccggctgggcccgcctgacgtgggaggcagccagggttaatcatttccacgaagccttgacccca

SEQ ID NO: 6630 - DNA, 573 bp, Homo sapiens
  source 1..573: mol_type = other DNA
tgggtgtccccaaccccagggtggtggaggccgtctctcggatggggctgacacccaaggcacggacctgccaggtcccccaaagctggctctctgagaacctggatgtgacatctaatgcccaggccagagcttcccagctgggagggctgctggcaggggcagctcctctgcccatcggagccggctggcctaaccagggcctgctcttgcctggggccctgaggcggcactgtgggtcctggacccgcccacctgcagagacagaggctgccaggggctccccgacccctactgcctgcctggggaggggtcacctcagcatcctaggcctgggctgcttaaaagaagtccccgcccgacccccgccccgccaggcgctggtctgagcgtctgagcccagatggtgcgcttgctccagagggcgggcggctccagtggccgccgcgggacggtggggccagaggggcccgtgggggtgggggagccgcccgcaggagaaggagccccgcccgcgccggccctggagtcgccggtgtcgccgccctgcccgcgggcccgccctcctggccc

SEQ ID NO: 6631 - DNA, 498 bp, Homo sapiens
  source 1..498: mol_type = other DNA
ggaaatgaattaacattaattcctcccctttctctgagcccaaaggggcccagccttgcagcaggcgcgagagcaggcgcttggcaggggccccgggacgtagggggacgtctgcgcggccctgcgtccccgggacaacctggcctgggcttacccacggccaggcgctccgcggagggcagaagcgggctgggccaggctcctcagcgccaggcccgggccgcagtgccaaccccgcaacggcactgggcgtgaagccggagcattatcaggctcagccaccgctctttctgtggggcagagagggaaagaggcctcgagtcgtgcgggctccaggctccgggctctgggtgaggcctgatccctgctcccacctgccagagtctgcagcctcgggccgcggcgtggttgcctgggaaacgcttgcgcctgcgcagggcttcctaggcgctggagtccgccggcggcctcgccgctgccggccgctcacggaggacc

SEQ ID NO: 6632 - DNA, 640 bp, Homo sapiens
  source 1..640: mol_type = other DNA
gccggcagcgtcgccacgtgtcggggctggccttgaggtgacgccagccggagtgtccagccgggtgcagccagcccagtggcccattcacgcggccgccagggcttcattcacccctggccgggagggcagcgcccccgtgactcgcagctggggcttctccacgggtggcggcacgctgggctggtccctgggggccctcctgctgctgtgggggtgcaggggtggatgctggccccaggatgctgcacacggcctcagggcagcacccacacactggcagctccagcttcccctgaaagatgaccaggtgctggccagcagtgacggctgcagcatgtgtgggcaggtgccgtgccaccccgggggaaggaagtgtggtcacatggcagccttcctgggatgtgaccccagctccaggtggcacagctcccttctcctgtggccttggagccctgaggggaccctaccctcaagacggctgtgggggcagggtaagtgcctgctgggtggcagagcagccacatccccccatccccccaagcaagcccggaaggcaggtatgtgggcgggggcacccatctgtccagggcagggcaccccctccctcctccccatgccctgtcggctgcaggaccta

SEQ ID NO: 6633 - DNA, 368 bp, Homo sapiens
  source 1..368: mol_type = other DNA
tggctgcattgatgaaatgctttcatacatttacaaatagagttttcttgtaatatacctctgtggttttcttacaaggagctcctcacgtgcaagtagtagatggcgtggctaagcccaccatttctcagcaccacacagtttgtcgggccccaagaagtttatttaatgcccagggcccccaactcctttcaagtcttgctggacgactcctgaaaagcagtctcctgctctggcacccggaagcctgcgagggcttcggaagcgcagcgtctcacggtcgcgcatcccggccctggacgcatccagcggcagcggtacagtgttttaaaattcaaatcacactagcggacgccggaagcgctgtg

SEQ ID NO: 6634 - DNA, 461 bp, Homo sapiens
  source 1..461: mol_type = other DNA
gtgaaaccttatcaccatatacacacaccttgggagtgaaggtttctcacaaaagtcactgtgtgcgagtacttactaagtggcagtaagcgctactctcaactacagcgtggaaggtagcggaggcgggccgggctggcttccagcgggcttccaggccgaggaagctgcaccagggagaaggcccggctcccaggcccggaacctggccgtctgggtctcagtccgcgtcccctgtgatgcccggcacagagcaaatgctcgctgactctcgcaccccgggagagacgggaaggagcggtgggtccatgcccttctggggcacgccttcgcaaggccggccaccttaccctcggaggccctgcagcagctgccttcaaggccactcgcagcgatccgctggccgcggaatcatcggcgtcacttccactggggggggcgtggccgcggtgcgcaggcgc

SEQ ID NO: 6635 - DNA, 479 bp, Homo sapiens
  source 1..479: mol_type = other DNA
tgtgtcaggcactatgctagaccctgggagcctcgggcacagtgtgagtaagtcccaagtgggccctctctgctctcagaggtaggtgcttcagagaatcctaacattcatggagtaatcctccgagttagattagtagttattctgatcctaagtatgtgctgggcggtgaccaatcgtcctggtttggccaggcccgagggagttcccaggggaccttaagttttaaaactaaaacgagcaggagtgagatctgaatggaactccttcctccatgcgtaacccagaggggctgacggtggaaatgccccagcctcccaggtcggacctctgggcgcccgccaacggtttcaaccggccgcggggagcacgtggactcgccgccgccagcccagcgccgcagctacctgcctctcaggcttcgcggtgccagcgcgcctgcgcaccgcggccacgccccccccagtggaagtgacgcc

SEQ ID NO: 6636 - DNA, 285 bp, Homo sapiens
  source 1..285: mol_type = other DNA
gcctcctgagtagctgggactggctggtctcgcatgggccatcgggcctggcctcagctttttcttaaagtgaggcctgctcaagccccccaggagggattggctctcaagcctgagagctcccctgccccaggtcttgggcatggaggagtgggctggacttttcctctctcctgatggtttgaatatttgtcccctccaaaactcatgtttaaaccccgaggggtcatgaggcttctgccctcatgaatgaattactgcattcatgagttaatggatgaatgg

SEQ ID NO: 6637 - DNA, 632 bp, Homo sapiens
  source 1..632: mol_type = other DNA
tgggtccccgaggcccgtggcaggggccagagtctgacacccgctttccctgggttgggggcggggtgcctctgccaggagcctgggttcagaccaggctggcctgtggtcaaaggcaggtcacctgtcacggcagggcacccgcggcaagttcccaggctgtgcctggggctcaaggcggtcccaggaaaacgccccggaccctccgtagtgccgcggggaagtcccgtccagcgcctgacagggcccagctcctggcccaggtgcccaggaggcaccgatccccgcagccggcctcctcccgcgcgggccgtgagtcctgcaggcaggacgggttggaggtctgcaaacaggaccctctctgggaagccgcgacagcggctgagctcggggtttgggggcgcaggtcgggctagaaccacccccctcgtcccagcggcccctcctctgtgcccaggatgctcgggcggcggctgcagtgggacctccaccttctctgccaaccagagcggaggagcggcgcactgagcgctctccgctgcctggggcagcctcaccctgggcgcccacaccccagccctgggagagcgacgggccgcgcctcctttacgggccgcgccccctttatacgc

SEQ ID NO: 6638 - DNA, 406 bp, Homo sapiens
  source 1..406: mol_type = other DNA
ctagccactgcaatccagcctcattgattgagttgtcaattttaatagctatggcagcggcatccacaaataacagtgattataataataacattattaacgattactaccatttattggccacttactaggagccaagcactttctcagtgagggagccgccagaagggaaggagcctcctagcttcccggtcctcacggagctcgctgagctctccgcgcagctaaaccctccaagctttgctgggagaagcgcgtcgcgaggttcctcctccgccaggtgcgccggctgaggccggaacctttttcctcccgccgcggtagcagggcgcaggccggaacctttcttctcgcgtcgccgttgccggggggaggcgtgtggggcaggaccagtccttcagcggcc

SEQ ID NO: 6639 - DNA, 697 bp, Homo sapiens
  source 1..697: mol_type = other DNA
gcaaacaggaccctctctgggaagccgcgacagcggctgagctcggggtttgggggcgcaggtcgggctagaaccacccccctcgtcccagcggcccctcctctgtgcccaggatgctcgggcggcggctgcagtgggacctccaccttctctgccaaccagagcggaggagcggcgcactgagcgctctccgctgcctggggcagcctcaccctgggcgcccacaccccagccctgggagagcgacgggccgcgcctcctttacgggccgcgccccctttatacgcggacgcgccctcaggacccccaggtgagcgcggcgcgctgcgggcggggaccctctctgcacctccccgcacccctgggggtcagcgcctcgcgcccaggccgccgcccggggtggcgcagcccgcagccctcccgctccgggcgccctccgccgctccgagaccccctgggggcgcgtcctctcccgctcccctgttccctcccccggctcagggcgggcgcgtggtcccaggggaggctcccgcccagccccgcactcctttgtgcggccgggcgggcgctgcgtcaaggtggaggcgcggccacacgcgcgcacccacccgcgcgcacccagcccccgggagaggcaggaagggaggaggagggagcggccgtggagcccaatcgttcgctccccttcccgggtccg

SEQ ID NO: 6640 - DNA, 417 bp, Homo sapiens
  source 1..417: mol_type = other DNA
ttctatatcaaaaggatctggcagctcctttccccgcccggtctagatccagctctaagttagagacaaaggcccacttttacctcgaggtaaagtttgaacaggaagaaaatgaaggtttggttttgtttcgtttcttgaaaagaagttaatagtatgtctttctcctaggataaatagccatgcgtattttaaaaactatatataaaaggaatgtgacccaggggactcccgcagagagggcctcttgggcttcagcgcagaggaaagtttcccgggcaccccccgcctgggccctgccctgcgtgcccccaggcccagcgcgcctccgggcgagtccccaggagcgcggcccaatggatcgctccgggcccgccccctcgcgcgctgattggccgccgccccgctggcctcgcc

SEQ ID NO: 6641 - DNA, 467 bp, Homo sapiens
  source 1..467: mol_type = other DNA
ttttgagtgagccactctcaccagcctcatctcacagataagaccctgcttaacttcttgaaaactaacccttcctgagggtctgctctccctcgggaggtagaagagggtgggggtactcacactccccacacatacggccgctgagagacacacacggcttctgagaggctgggggccctggcccaaggctcacctacctgggtggcctgaccgcagctctgcatccctgctccactgcgggctgcctggagggagggatgctcgccttttcaggaaaagtccctgtgcagaaagaaatttcttgctgaaagtgtgggggaggcaaagccaccctctgtcacccccttgcccggtgggcgtgctggcttcctctctgccaccctggatggaccgcagcctgcgctggccccacaggaagtggaggcgtggagccgccctggaccacccccagcctgcataaaggg

SEQ ID NO: 6642 - DNA, 401 bp, Homo sapiens
  source 1..401: mol_type = other DNA
acccttctcccaagaaaaagaaagacccctgctttctatcaaagcagattccctgcagtcccggagagctgggcccgcaggactgcaaggcagggggacctgcctgtccctcagggagcgtcctgggaacccgcgctcgccccacacgtcttggggcgcatcaactgtggcgcgtatctcccgatccaggctcccgccgcaggagcccagggaccctcaatcggacgccgatgccgcccaattttgggggaatcccgagactattcccagggagtggtttggggcaaactatggctgtctggggcctcagtttccccagattagtatctaatcttaaggggtcagaaagtaaacagatactttcattcagagagccagcagacactccactgcccatccca

SEQ ID NO: 6643 - DNA, 444 bp, Homo sapiens
  source 1..444: mol_type = other DNA
cccctgctttctatcaaagcagattccctgcagtcccggagagctgggcccgcaggactgcaaggcagggggacctgcctgtccctcagggagcgtcctgggaacccgcgctcgccccacacgtcttggggcgcatcaactgtggcgcgtatctcccgatccaggctcccgccgcaggagcccagggaccctcaatcggacgccgatgccgcccaattttgggggaatcccgagactattcccagggagtggtttggggcaaactatggctgtctggggcctcagtttccccagattagtatctaatcttaaggggtcagaaagtaaacagatactttcattcagagagccagcagacactccactgcccatcccaacaaaccgcttactgcctgcagggaccgagctcccggccgagggaggagggccgagcagggatctcgg

SEQ ID NO: 6644 - DNA, 656 bp, Homo sapiens
  source 1..656: mol_type = other DNA
catgttaggtcaggaaaggcctgtccttggatggtaggctgccaggggccaggctcgctggcctgagactttatagacagcctaacagcctgccccgcaggaaggctggcgggagtggagccctcccccgtcaacaggtgtcagctgtcacccaggaccacaaaaggctccaccagtccccctttttgtcccctcggagagttcagggagagcttgctttcccctctttctaggtccccagagaggtggcccagcggctggcctgtttcccactgggaatgcgaggggcacccgggccggcccagggctgacccacagcaggctcgggcagtgggtgctcagctgcacgtcctgaaccttctgggtgctccaggactcccggcgttttctaagcggggatggggaaactctggattcacatccgtgtgtcaggaaaccgttcccaggggaagtgcgtctgagctgaggcttacagacccaggtaggcggtagcggaggggcccttggggtcctggtaacctcgcgctctgattcggtttgggcgcaagcaaacccaggcctggccgccgggcgcctgggccgcgccaactcgctggcccgccaagccccagatgcggggcggctcgcactgagcatgctcggcggcggggcgggcc

SEQ ID NO: 6645 - DNA, 481 bp, Homo sapiens
  source 1..481: mol_type = other DNA
tcgtgcatgtgcatgtgtgctttacccaggcacccaggacaaaagcaaacatctagtagctaccccataaatgtttgtttaaagcaaacacagtgatgaactcctttaattttttatcactctaaagatactcactagcctggacactgcctggtttgtggctggcctatcccccagcctgcaacgggtctctctacccttggtcctagtggggactaggtgtaagggtctcgtgggtctgggtgtaaggatccctttacccatcctcctagtggagactgagtgtaacggtgtctccacccattgtctcggcgtcttcatcaggaggatgggcggagcacccaatgagatcattaagctaaatgcgtagcatattctaagcctcaaaaaacttaaaggagccttctaagcctcagtaaagttaggaaaccgggcccccctccggaagggtccggggctgggaggcgcgggcatgctcagt

SEQ ID NO: 6646 - DNA, 464 bp, Homo sapiens
  source 1..464: mol_type = other DNA
tggactccggggctggtgtccacagtgctgggaggcaggagcaccctagtcctcctcctgacccccagcttgtccccagggctgtggagaccttggtgccagtggcccagccctccaaacaccttgtggggtgacctggtggccccagtgtcagagttagggggctccaccttagaggcccccagggaggcgcgatcctggagggacaagaacgttcccagcagcttgggccgatcctcccacacccccgcagatgttccggggaggcctccagacgcgcggccacacacctgtggcgccgcccgcgggccctgaccgcgccgtctctcgcgagagcgaggccagggcccgccaagggcgtgtgcgcagggcgggggtagcgcttcctggttcgagccgagaggggcgaatccggcttcgctccgcgccgccgggaggagctgtctgcagccccctcctcccgc

SEQ ID NO: 6647 - DNA, 409 bp, Homo sapiens
  source 1..409: mol_type = other DNA
tgcacgtgtatgtgtgtgtcgctgattctcatgcaagaatgtgcccctccttagcaggtcagctcctggaggggttcccagctcctacaacagtgctaggcactagtgggaatgtgcacaagcatatatgtgtatgtgtgtgccgcgtgtgcctccagagcgtgtgggcgcgcgagtgtacgcacacggctcctgccccgcgctctcctcgcgccctgcgctccgcctgggggcggagagtggggggtgcggcgagggcactgcggtgccgcggcccgccctccgcgctgcggctcgggagcgtcaccgtccctccccgccccagccgctttgtagctggccgcgccgctagcccgcagccgcccagaggccccgccccggccccgccccggcgcgcgccacgccccgc

SEQ ID NO: 6648 - DNA, 574 bp, Homo sapiens
  source 1..574: mol_type = other DNA
gtggcccagatacttttatcagattctcaaatgtgggcagcctgttcactgtggtgtccccacatcttagtgactacctggcacacagcaagtgctcaataaatatttgtctaatgacaagctcgacagcagggctggtggggggaggctccctaggctggcatccgcccagctctgccgcttgcggggtcgctgcgtcttcctgaccactgacggccaggacggcgagcccccgagggcagggatagcttcccgggtcccgaggcttgaccagagcctgaaagctcctgccgggggttgctccgactcagcgaggcgccaggctgcccggcgcggctgggggcgctcagcgccgggaccccagccctgccccggccgcccgctggcccagtgcgcacgctccggcagctcagctccccctcccacggcggcaggagagctcccggcatctgcccggggcgggggcgggggcggggcggggcgggcgccgcgccctcctgcctgactggcaggaagacagaccaatcggaggggctccccggggggaggggcggtgccgtgcctgagccgggcg

SEQ ID NO: 6649 - DNA, 507 bp, Homo sapiens
  source 1..507: mol_type = other DNA
aaagtcctccgaagtagtgtgttcagaactcatctccaacatgttggtaagcattcaccgtgtgaaaagcttgctacactgcatttgattctgggcactgaaagcagtacttggctgccttagactctcttgcagcgccggaataggcgctcataatattgcaacaccggagccttttccacgggtccaaaccacctgttacaggagaaggcgagcggcctcgctaagcaactggacgttccgcgggcggggcgggggcggggccggggcccgagtccgctcggaaactttcgctgtgggcgagccggacccgccttctggcccctcgggcccaaccacgcagggggagtgccgggccgcagctaggcgaggcgcaccgtggtggagtgattggcggctacaccggccactcagcaggccgagctggcgccgcatccggggggccgcgtctggagtggagggaggccgaaggccccgcccctgccccgccccctcgtgcagaaggcc

SEQ ID NO: 6650 - DNA, 484 bp, Homo sapiens
  source 1..484: mol_type = other DNA
gagagatctcagagccctgcctgggggaggcccaatcacccctccgaagggagacagtgtctgggcacccaagccgtggcgcacccagcaccaaggtgcccaccgcgagggcccgagcacggcggtgcagcctcggcttgggcgccggctccacctgcagggccgcgggggcggagagcgggcggcgcgagggaggggcctgcgacagcggcggcggcggcggccccagcccgcgcagcccggctcggccccggcttggtcggcgcagcgcagcgccgcgcgcgtcccctcgccgccgtcgccgcagccaggcgcaccggcaccaggccccgccgccgggcgcacggacgcagcgcgcacgggccggccgggatgcgcgcctgggccccggcccgcccgaacccgcggccgccgcccgcccaccgcgcgctcgcttgaccgcggcgcccgcccccggccgcccccgcccgtccccctgccgcga

SEQ ID NO: 6651 - DNA, 703 bp, Homo sapiens
  source 1..703: mol_type = other DNA
tcccgcgggacgtccagcctcctccttcgtctgttgcacgtggaaggtcggagtgtccccttcgcacccggtgggggggcgggggtgggcagcgaccccagctcccagcagggcgggtctgatcgcaatctggagctgagccccgcatcgccatcaggcaggcggccctcgcgcggtgacggctggcggaggcggctgccgctggaccggtgggtggggcagaaagggacgcttcggtccgtggcgacagccccagcgcccgccgcaccccgcgcctcttacccggtgcccggccccgcgccccgcgatccgcgccctgcgatccgcgcctcgcgatcgtcgccccgcgcccaccctcggcgcccgcagccgcaccccgcgccccgcacccgcgctccgggcggagccttctgggcgcgcctccccgcccgcccgcccgcgcagggagccgagcccggaggaggcggaggaggagcggccgccgcgcccggccccccgcagccgcccggaggacgcccgtcgcggtcgcagcctgcggagccgcccatggcccagcagccgggttagcctcgccgcgcgcccccgccccccgccccccgccccgggcccgcgctcacgcgccctccagctgaccgcgcccccgccgcgcccgccgcgcccgccgccgaccagggctcctggtgcctgtgccagctcagggccg

SEQ ID NO: 6652 - DNA, 311 bp, Homo sapiens
  source 1..311: mol_type = other DNA
cagcgaggttacctacttggacaagtcagttactgtctctccccacctgtggtcccagctactcaggaggctaggacgggaggtcaaggctgcagtgagccctgatcgcgccactgcactccccccccatggcgccgcccagatggggttttcagagtcccggagccgccagagcgagcaggcgccctgccccgctgagggccccgcgcctccagccggggtcggcgtccagccggcaaccaatgggccccgcccccgcccgcagccaatgggccgcgtccccgcccgcgcggccgccccgcccctcgcgg

SEQ ID NO: 6653 - DNA, 383 bp, Homo sapiens
  source 1..383: mol_type = other DNA
aggcgcctgtagtcccagctactcgcgaggctgaggcaggctgcactccagcctgggcgatagagccagactctgctcaggtccccctgcgtgggctttaagccgacggagtctcactctgatgcacaggtgtctcgccatgtcggccaggctggtctcgaattcctctgagattacaggcgtgagccaccgcgcctgggaagtgcgggaggcctttttaaaaaatgtaaactcgcaggaacgagcgagagcgtgcggtcccgtacctgcgcgtgcctgcgtgcgcgtccgtgcggccgcgacgccgccgccggtgcctctctttctagacgtgcgcgcgcccgcagctcgcccccctgaccgtaaagaggcgcgcagagcgc

SEQ ID NO: 6654 - DNA, 366 bp, Homo sapiens
  source 1..366: mol_type = other DNA
cagggctcgggacctgcagcccgccatgcctgagcgcctcctcgacgagcaccgcccagtcccatcaccacccaagggctgaggagtgtgggcgcacggtgccgttctcgcaggcagctccacctgcagccctggtgtgggatccacttggtgaagccagctgggctccaggctgccggagccagcagtggcaaccagccgtaacaggtctgcagtttcactcctgagccagggtccgtggcttcattcttgaagtcagtgagaccaagaaccctgaagtcgactttagagggccctgaccctagaatcaacgcccaaagagctgtggcgctacatgcgcatgcgtgcgggggggtacgcgtgcgt

SEQ ID NO: 6655 - DNA, 511 bp, Homo sapiens
  source 1..511: mol_type = other DNA
gcgtgagccacacgcccggcctggagaggtgacagtgtgctggcagtcctcacagccctcgctcatccccactgctgcactgtggaggcccctttctgggctggccaaggccagagccggctctctcagcttgcgagcgggcaccggggctgcacacggcgcttgcgggccagctggagttcagggtgggcgtgggcttggtgggccccgcactcggagcagccggctggccctgccagcccccggcaatgaggggcttagcacccgggccagcggctgcggagggtgtactgggtccctcagcagtgccagcccaccggcgctgtggcctttccgaggggcagggctcgggacctgcagcccgccatgcctgagccgcctcctcgacgagcaccgcccagtcccatcaccacccaagggctgaggagtgtgggcgcacggtgccgttctcgcaggcagctccacctgcagccctggtgtgggatccacttggtgaagccagctgggctcc

SEQ ID NO: 6656 - DNA, 359 bp, Homo sapiens
  source 1..359: mol_type = other DNA
ggcgcacggtgccgttctcgcaggcagctccacctgcagccctggtgtgggatccacttggtgaagccagctgggctccaggctgccggagccagcagtggcaaccagccgtaacaggtctgcagtttcactcctgagccagggtccgtggcttcattcttgaagtcagtgagaccaagaaccctgaagtcgactttagagggccctgaccctagaatcaacgcccaaagagctgtggcgctacatgcgcatgcgtgcgggggggtacgcgtgcgtgcaagtgcgcgtgcgcgcgcaggaccgctgaggcgggagccccgaatgcggttctcgcttgctgcgtggcggtaaaggaccgc

SEQ ID NO: 6657 - DNA, 293 bp, Homo sapiens
  source 1..293: mol_type = other DNA
aaaccctctggcctgctttatttgactgttgaaggctgccgtgccacataagctatgatcacttctgcccgttgattttcagcaaactcccagaggatgaaacaaacctcctcgtgtcagcacgctgggtgccagcacgctatgccactgtggctcagtgatggcgcctggaggcagcccacaccctgggccttggctgggggaaaggttccatgcatttcatcagacatgaatggggaggggcaggacttcctgaatgtcccaaccctcaatatgaggctgccttataaagc

SEQ ID NO: 6658 - DNA, 446 bp, Homo sapiens
  source 1..446: mol_type = other DNA
aggccccctctacacacactcatattactactagtgtggcactgggtggctaagcctagcaacagacttccattccacaatggcattaggttagtgatattcaggtgatcaccaaacagcctccagtctggtagaagcacttatgtactagagaagaattcctctctcgaccctgcttgacgccaggctgacaggagccccccagggactgtggacccacattgctctgggtaaatgaattcatataagttaattcaagcttgtgcatgcttgggagggtcacttttacttttaaaaaataataaaagtaaaatctaaattaagctggtgatggacgtgcgcgcgcccgaggcccctttacgtgcacgcgcccgctacctggtcttgccgaaggcgtgaccgtaaaggggcccggctctgtcgtgaagggccgcaaaaaggccgag

SEQ ID NO: 6659 - DNA, 706 bp, Homo sapiens
  source 1..706: mol_type = other DNA
attctccaacaggttcactttgattaaaaggttaatgcacattttcaagcttccagaatttatttttgcctagttaataaaaaaagagccatgtcacatttctttagcttgtcttctgggttccttaacaacaacaacaaaaaattaaagtctttattttaagccgcctactccagccatcccaggacgcggcgaggagggggcgcggacaggtggcgcgcgagcccgggaaggcgggggctgcaccgggccgcgggcggggccgtgcacgccgagccccacttccccagcgcgggccgggggcggggcgcggcggcagagttcgggggcttctgccgagggcagtcccacgtgcccctccgcgggagacgtctcctctccgacgcccagcacgctggggggctcccgcttcctgccggcttccgccgccccggccaagctgcacggcgcgtcccgggccctagacccccacccgccaggcaccagccccggcctgtcccctcgcgccgtcagcccgcggcccaccgcccgcgcgcgcccgcagcccagccggagggaggggcaggggcggggaccggccggcgctgatgtaatcccggcacccgggcggcgcgcccctggttggcggggcgctgaggccagttgccgggtaacggagcggagcggctcccggcgcgccgcctcccgccctccgcggagtggcgct

SEQ ID NO: 6660 - DNA, 529 bp, Homo sapiens
  source 1..529: mol_type = other DNA
ctgaagcgggagccaggccctatctcctgcgggaaccccgcttgggggccggcaccggggccataagaacacgcggccctctgttcttgggggtatgcgctgtttttcgtgttttgagaaaactgaagataacagaatgtttcctgtttcaccagaaatcactggtggagacggagaccccagtgccttctctccgcctcgggcgcctggagaagcagcttcggggtcggggcgccctcccaagcggttgcctccgcgatacgccggctccgcgccgctctggagccggggtgtgagggtgaacagggctccccacgctcgttcccaggcgggtgcgggccgggaaacgacaagctgcccctcccggcccgcgacgcgcgcgccccaccccggcgctggccccgcccccgcatcgccacaggaggggtacgcctcaggccccgcccaccggggggtggggaaagatgctcttccgtgacccacaattattggtgactattgcctgtccataacaggaaaagcgattatg

SEQ ID NO: 6661 - DNA, 602 bp, Homo sapiens
  source 1..602: mol_type = other DNA
agggctctggggcagggaacctggcttctgcccctctcacccgggtccttgggcggaggatgcaatgttgaggccaaatatgcagatcatctcatcttcagagactgtgacttaagggcttcagaatattaaaagctccgcaggcaatactaaagtgcggctgggaggacgccacggcgccgctcccaagaccaccgcggcggggcctgagctccggtgtcacgtcccttccgcggcggggcccgggccgtctcccgcacaccggccggggcaggggagccccatcgatgcgctccgccgctcggctccctacgcctgccgcttcccacttccaagatggctgcgggtggagccgaccaggtaaggggccccctgtcggatgtccgtgggggccctgcgggcacaaaggcccgctaaaagggccggcgacgccgctccggaggcccgcggcgggcggcccccggaagagggacagccgggcgagcgccgagctccagacgcggcggcacgggcggaagaacgggcgcgggccggcagggggcggggcgcaagtgcggggcgtgcccaggggcggggcgaagcgagggtgcgcgccgctgttc

SEQ ID NO: 6662 - DNA, 738 bp, Homo sapiens
  source 1..738: mol_type = other DNA
cctccggggctgcagcagcctcagcggcagagaggcctggaacctgacttccttccgttcctcgggcccggctccgggctccggctgggcgggctcctcagccccaacctcggccggctcttcgggctcgggctggggctcggccggcctccccggctctccaggcccctcctcgcccgcagcctcggctgccgttagccctttcggggcctcggcctgctcgtccgcggcggtgcctccctgctccgactccagctccccgggttcgggagaggtcggagggccagagctggccttgatcttggacggccgcgcggccaggctttccccgtctctcagagctgacgtccatctcctcccggctcggccagcgcagcggaccccggcaggacgctgttaggtttcccggggcaacagaaggcgcgcgcgctgggcccggcgattggccaggcgacaggccgtcgtccagcgccttctccccgctgcccggcgagagcaagccaatgggaggccgcgagcggccgtgggctctcgccgcgaggggcgtggcgcccccgccgggctttctgcctgcccatttcccaccgccgggcctggggcggggcgttcaggaggctctgggaaaggcggcggtggccggcgcggggggcgcgcaggcgcagagcggcgggccgggcgtccgcaaggtggcgcccgcggggcgcctgcgcgatgcggcggggcgacagctgcggcggc

SEQ ID NO: 6663 - DNA, 538 bp, Homo sapiens
  source 1..538: mol_type = other DNA
actgggaccccggcccaagggctcctatctggcgcggggcctctgggggaaggccatgggcagggtggccctggcctggcagaggctctgaccctggccttgcctcgggaagcgcctgccgtgcttgttcctggaggcccgtctgacactcagggtgagtggccggagcttgtcctgttcagggtagctcccagtcccgatgtctgagccagaggcctggcagtccttggggcagttctgctgaggacaccttaggggcctctgcactgcggccgcctagcaggcctccccagggtcttcagaggccccttgagggtctccctcaggctgtcagctcccggacagggacctggctgttcccagcgggagcccagagaaccaccgagctgggaaggggatcctggcctggaggtggggccgcgctcgggtacgccgggcttcccacgagcgcctgggcggcgggccggccggcaggtggcggtgcgcgctcggcgtcgcgggtggcgccggggccgccgagtcccctcctcccgccgct

SEQ ID NO: 6664 - DNA, 394 bp, Homo sapiens
  source 1..394: mol_type = other DNA
aagacactcctaagtgatcccactgtcgcccaggctggagtgcagtggtgcaatcttggctcactgaaacgattcttgtgccccagcctcctcagtagctgggattgatggccatgccaggtaggtgaagtagtttttttttttttttttttttaaaaaaaaaaaaaggaaaaaaaaccttatccattaatgcagaagctccctgaaaggaggagttcacatccccaatcatcatctgacctaagccagaattcagcacctgaacttggctggagccagctttgcaaaagcagagtctgaaacttagaaaactctttggcattttaaactcccatctccttcttgacattgaaatttaatatcgtggaattgacaccaaatgatgacgtcagtg

SEQ ID NO: 6665 - DNA, 604 bp, Homo sapiens
  source 1..604: mol_type = other DNA
ccagcccaggccctccgcgcctggtggggcacacagtggggacccctgcacccgcgtccaggccctgtgctgggcgcctgatgtcacagggtagccggtcaccgtggaggctggggccggggactgcgccgaagtgagccgcgccacctctcccggtgcaccccccagctgggcgccagccggcgaggagcgacgggagcctggggtgggtggcgaggcgcggacagcccaagcccgagtgcgggctctaaactggtaaagaagagttggcccagaaggtcttcaggcgccttgtagctcgactactcaagaagagctgcaccaaggccgctctcctagcgactcccggattccgtgagcggcagtccccacgtcgcccctcaggccgtggcgacagctctgcagaaggcctcagccgccgtcgcccgtctgcgcctgcgctggccgcgaagcgtgctgtccgatcgccccgcagctggggagccaggcggagcggtggcgtcgaggtgcctacacttcccagggtgctcccgggcggcagcgggggcgcggggcggggccgccaggaggggcgtggcacgggcgtggcctgcgcgccgtgggg

SEQ ID NO: 6666 - DNA, 552 bp, Homo sapiens
  source 1..552: mol_type = other DNA
atatgggtatatgtatgtgcacacgtgtgtgtatgtgtgcatatgtgtgtgcgtgcatgtatgtgtatgcatgtgcgcacatgtgtgtttattcctcataaatactacctattgttcttaggttaagaaacttgccctgtgtcacacagccagtcacaaaggcggtgcccagctcctctgggccccactctgggagatcctgatacagggggtcccgagtcaagaatctgaaggaccagtccctctgggcaccacatgagaggtcctgcccatcttactggtggcacaaaataggtctgcagaaaccggcttgggtgagactggttctcctcatcccagcagagcagggcctggaatctgttcctagggcccagcctctctcctctctgagcagggaacagggaggtggtctgaccaaagccctgggcagactggaccggcccaggagcgcctcagccaagctccctgcggtggctcctccccaccctgcttgggaattctggcccaggagagctaacagttctgacagtcccagggtggggtggggcagca

SEQ ID NO: 6667 - DNA, 568 bp, Homo sapiens
  source 1..568: mol_type = other DNA
tcctggcccctcttgggggagatggctgtgagggagggggaggagtacctgctcctgcctcccagcccaggccctccgcgcctggtggggcacacagtggggacccctgcacccgcgtccaggccctgtgctgggcgcctgatgtcacagggtagccggtcaccgtggaggctggggccggggactgcgccgaagtgagccgcgccacctctcccggtgcaccccccagctgggcgccagccggcgaggagcgacgggagcctggggtgggtggcgaggcgcggacagcccaagcccgagtgcgggctctaaactggtaaagaagagttggcccagaaggtcttcaggcgccttgtagctcgactactcaagaagagctgcaccaaggccgctctcctagcgactcccggattccgtgagcggcagtccccacgtcgcccctcaggccgtggcgacagctctgcagaaggcctcagccgccgtcgcccgtctgcgcctgcgctggccgcgaagcgtgctgtccgatcgccccgcagctggggagccaggcggagcggtggcgtcgagg

SEQ ID NO: 6668 - DNA, 653 bp, Homo sapiens
  source 1..653: mol_type = other DNA
tccgacctatcacagcacaggctggagggatccctccccctagagctgggccggagcccgcagcccacacccaccacgtgggtgctcacactcctgtgttggcaagggcatgcctcttgtcccagctgacgtgagcccaggccaggcttcctcagcaggcaggggcgagactcaaacctggctcaggcctgggaggaggaggggagcccatctcttcccctaaatgttcccatggagccagtggcccggagggcacccggggcgtttgtgtgcatacgtgtgcctgtccatgtgtgcacacacttgtgcttgtgagtctctgtgtgcccatgcatatgtatgtgtgtctgcatgcacatgcgtgtgtgtgtgcatgcatgtatgtgtgcaggcatgcgtgtgtggggctgaggcagccggtggctggtggacttccccaatcccagcctggcgggggactgggtgcccctagcctctactacagagcctgggggctgggcagcgggcaggcaggacagggcctggacctcgtccagcggtgtctgtgcagccgccctgggcctgcctctccgtcaccggccctcaggcgcagggaggaaggccgctgtgcagtcagcctggctgtgggcggcccctgcctgctccgtccagct

SEQ ID NO: 6669 - DNA, 626 bp, Homo sapiens
  source 1..626: mol_type = other DNA
ggacatcctgcagtctgtccgggatgcagtggtggccagcgaggaccaggagggcgtgattgccaacatggtggccgtgggctgagagctactaccgcgccctgcgggtggctcgggacctgggccagcaaaggaaccaggcagtggggctggccaacttcggggccctgtgcctgcatgcgggtgccagcaggctggcccagcactacctcctggaggccgtgcggctgttctcgagttggggagacccacgtgctcctgcagctgggccatctctgcacccgccagggcccggcccagcagggcaagggctactacgagtgggcccttctggtcgccgtggagatgggccacgtggagcacacctggggtttgtgattcagacacaagcggtggtttttccaccatcgagacaggcagttcccacgcagggccaggccctctctgccctactgggggagccagctcctcccggtttgcccagggaaagtcctgcatgctgggaatccctgaagtctggagctggggggccccaggccctcggcagccctgtgcacctgtcatcccaaaaagcagctcgttgtgcagagtgtgccacgtcccacccacaaatggggcttgtgggg

SEQ ID NO: 6670 - DNA, 439 bp, Homo sapiens
  source 1..439: mol_type = other DNA
gcagccctctgcacagggctgctgcgaagtgtccactgcacacagtgtgaagaccgcagctccaggctgtgcgcgcggcgttaagctgacgcactgtcaccagattctgactctcgtgatgggacctgggtctgaaggggccctgcagaaaagcttccggttccgtggacagcgaggactcgggaacactgctcagccatggcctctgcctttcctggaggaggaaaacgcatcccccaacgtttctgggataggctgggcccgggggtccccaccagaaaggaccctcgaccaggccgaccagagtcccaaggcctgccgggtgggtccaggcccggaaggccaggcggggccctgtcggggcctgggcggggctggcggaggggccgggccgccccttccagcgagggcgggctgggcggtcgcctttaaaggcgcg

SEQ ID NO: 6671 - DNA, 422 bp, Homo sapiens
  source 1..422: mol_type = other DNA
aatggggccgagagaactctgtctcaacactgtctctgtaaatttcataagaagtgtgtgtgtcaaacagacggtcaatgagggcccacttccactaggggctctctgagaaactctgcagaaccacccggccccagactgggggtcctgatccagtagccttggagtgggccccaagaagggccgcggtgtgaactgcatctcagaactacggcgctccgagagggcagcgactcgccagagtcggtcagccaggccttgcctaaaaggcaagagtgcccgggagcgcctggcgaagcttcgtggcttccagcccgcccgggtggcagcggcgtccgcgtttccagggcaacgagggtggcgcggttcgatgacgtcagggcgcccgcggctccgccccgcccatgggacggacggaggcc

SEQ ID NO: 6672 - DNA, 280 bp, Homo sapiens
  source 1..280: mol_type = other DNA
taagcccccagaggttaagaactctatgtgaattagaaacctgtagtcccagctactcaagaggctgaggcaggtgccactgcactccagaaaagaaaaaaaaaaaagaattgccctcttttggtgttggatggcccaccgaatggacctagatcaattcctttatattgattcatggttaaatataatatagacaaaaaccagcataaatttagccctgtttaacagcttatggtctcaccttgaagataatgaccaagcccacatccagggggtgggg

SEQ ID NO: 6673 - DNA, 610 bp, Homo sapiens
  source 1..610: mol_type = other DNA
gagaggaactagtacccttaggactttttcattgaactatttccctccgagaaccaagctcacgctgcgcctctggctgcgatcccgccccggagctggtgaggaaggccagcctttgggagaaatcctcccaaagcgaatccagatctgcggcggggaagtcgccctcccttccttcagcatggccggggtgcccggagtccctcaggggcactgaggcggcttccctctgtgccgcactggccctgggcctcctcaagttcgcatgccgtgccctgctcgggtcctgatagcgacctgggacccgggccccctccgggggaaccctggccgggtcccggaccccgctccttctgctccgagcctgcgctagtcccggggccgcgggcctccgcgcagggcagggcggcgctccagcgggcctccaggcgggcgccgcaaagccgtttgtttgccacctgccgcagcccagaagccctgtgggagaagcgcgcctgggtagctgatcccggtacggcccacctcagccatggcagccagcaggtgtacagccctggcagcggcgcgccgagatgacgcagcccggtggcgcggcgcgttgacgtcatgg

SEQ ID NO: 6674 - DNA, 280 bp, Homo sapiens
  source 1..280: mol_type = other DNA
gagaactcccactaatttgtgaaaattctctaaggagaccactactactcctgctgccctcctccctgccaccttgcctagttcataagacaggaggataataataatagttatctgtaaattccagacattgtatgaaaaaagcattgcaaaactttaagtcgtaagcctttaaacaggccaagaatttcttttttggggagctcagctcttaagggctgtaaaaaagttagctttcataagaggactcatctttgtaccccgcctccatgacgtcaac

SEQ ID NO: 6675 - DNA, 404 bp, Homo sapiens
  source 1..404: mol_type = other DNA
caggggtgccccagcatgccagttgtgcacctgtggcaccggcacgagagaggcccacagggtgagccaccctttgtccctcagaaagggctggcagagcgggcaatcgtctgcccaatgccaaaaagcttcctggaagaagcagcttccaggaggcttcagccaagtggcggaggtgggagaggcctcgcaccgcggggctccaggagccaggtggcacccactgggtgggtctcaacaaacgtcgatgcagtcacagttcctgggctgaggctgggggatgggaggaagtcctgagggcagcccccgcccccttccccgaggtcgctccagtttggtgccagcgcctggagggctggtcagctgcgcgcgaaccagggtgtgaccagggcagggactgacct

SEQ ID NO: 6676 - DNA, 615 bp, Homo sapiens
  source 1..615: mol_type = other DNA
ggcacggtgtccccaccccagctctcagggaggaggaggaaaaccctccctgggactgtgcactgccaggtctgaattcgccctcagacctgggctggaaagctcagacaaagactgtggccccggaggctggccggggcagtcagagttgcttctggaaggacccagctgagtccaggcgccccagatccccagatgacctgcaggaagcagcacctgctgggtgccagcaatgagttggggccacagtgagtactgtctccattaccccagcctctgggcgaaggggcttgtcctaagtctcagggctggctgagtggcagctggctctggggactgctactgaaggtggggacatgccttcactttcctcacctgacaggccctggtctgctgggatcagcgctgcagccagaacccgcattcacccgcgacgcagcctgtgcaggggggaatctgcataccagctccacagtgcactcaggtggcagatggggaggggcggggagccccttggacggggcggggcactccgcccggggcaggcaggggccttgcgtttggggcgccctccctgcgccgggggcgggagcccagcgagcgcagagccccggc

SEQ ID NO: 6677 - DNA, 435 bp, Homo sapiens
  source 1..435: mol_type = other DNA
tttccctgaaaggggcaaacatttcaccaagtcaatgacatatgtaaaatgtctattttattttattttttattcagcctcccaaaatgctggaattacaggcactttgacatgagacgtggcaaaatgtcatgacttgtcctatgcgatgccacatcgggaaagtccgtgtggagccagcggctgcggggacacagtcagctcccgacggggctggagggccctgctaggccgatgagggccttactcctgggcttacggcatccctgcgagctgcagagcagagatgagccggctgagccgcatctccattagggtccccaaagacactagacgcccaaaggcctaatgcagcatcagctggccccttgtgtggcacagctgctttgcagatggagacgccgaggctcagggcagcctgctgcggctggcttg

SEQ ID NO: 6678 - DNA, 455 bp, Homo sapiens
  source 1..455: mol_type = other DNA
caccacaggtgagcacgtccctggctgtcccctggggaccacgtctgccaaggaaatgccacaccgtggcagccggcaccctcaggcactcacagtgtgcccagccctcagcaggatggctccattcctccccaggctggctgggtcggggagggtgggcaggaatctgcgtctccttacaggtgagggaagagcttggcatgctctgtattcctaggaaaatgccgcctcctccaagggaatttcacagccgatgaaaaatgcaagtgcacatttggcgcctggactactggagactgctgcccccaggtatccacattgtcattgcccaagcccctggctacgccaaagtcaaagtcatcatccccgcccggatgaagagggctggccgtgtggacttcattctgcaatcatgggcgactgggccccacgacccactgggaggtgccagctct

SEQ ID NO: 6679 - DNA, 437 bp, Homo sapiens
  source 1..437: mol_type = other DNA
gctactcaggatgctgaggcaggagaatcacgtggtgagccaagatcgcaccactgcgctccagcctgggcaacagtgtgagaccctgtctctaaataaaaaataaataaataaataaagtttactcataccctctttatttgtgcctctttgccatattacacataactgatgtgcaaacaatttgtgtgaacttagatttcaatagaaaaattagtttatctcatttgatcgattggacagaaagataatcaaataaaagttgttctgtatctcactaatctgtttataatttcatatttaattccattgcttaagcatgctaacacacggtgccaaaatattaataaataggcatgctcttgtattacgtgcttcttcctattatcagaaaaataaaatgaatgcttttcctctataggtactttaaatgatgc

SEQ ID NO: 6680 - DNA, 680 bp, Homo sapiens
  source 1..680: mol_type = other DNA
ggaacggagacagctccagggtgcgttatgttcccgaacttcccgctgcagatatgggaggacctccccgggcctgcccccaagaccttcgcccagggcagaggctgggccaaaagctcccacccccttctaaggccctggcttcccctggagcgggcggtggagcgggctgccagcggagccctgaaagcatctttccttaagtgcaaatattaagatatgccacattcatttttaaattacacacaaagtcttaaataaaaaaatgtggcccagcctcttgcagtttcttgggagccccggggtctccacgccgccctccgcagcggggtaattacggctctggccggacggtgattggccagcccgttcctcatcggggccccacagccaatgggtggccgctcagcccaggccccgcccccacggagcgggtggcgcgggacgggggaactgatcacgcgggatcggacccggcgcgaccccccgcctgcgcccggggccgcccgccctcggctgcgccgctgcccgcgcgctcaggtctgggcagcgtctcccggcagcggccgcgctcggggccggcgcagcgtcctcggggctcagcgggccgccctcccggcccagcccgcgaccccccccctccccgcccccagtgaggccgccccggcggcgaccagaac

SEQ ID NO: 6681 - DNA, 244 bp, Homo sapiens
  source 1..244: mol_type = other DNA
gtccttgagccagcctggggctggaatacaggacatgtcccctcagccagtgctgaatggcctttgttctaggctacaggagagcccacacaaagtctgcttccagacatggtggcttacgcctctaattccggcagatcacctgaggtaaggaggtcaagaccattgcatcagtgcactccaggcttctgagtcacagccacctccaccccctgggtggcaatcctggagaggtcataggaca

SEQ ID NO: 6682 - DNA, 210 bp, Homo sapiens
  source 1..210: mol_type = other DNA
agcggctccaggggctgactgagtgttgtttgcagtaggaacttccgccacctcccagtatgtcaggcaacttctgctttggacattcgaatctttaaatgatcaggaagcagagagcacagagcaactgcacagcagtttatcaaaagtcagttatgattaattttgaaaagttactcaaacaattacaattcaacttggtcaacatag

SEQ ID NO: 6683 - DNA, 388 bp, Homo sapiens
  source 1..388: mol_type = other DNA
tttgcctttcaaaagctcaacttttgagatcttgttgccagcaactacttcaagcaagggccttacgtactttaagaagcctctcctgcttacagccggggagcgcccgccacgcaagcattctgacgcggctgcttgtctgcgccgccttttcaagggcccgcggggcgtgcggcggaggcggggccggggccggcgggggaggggagcgccaggtccgcgcaggctcgccgggaccgcagccgccgagccgagcgcttgaagctgggggcgagccgcgcgcgggaccgcgcttccgggttcggggcgtccgcaaccacagcgcgcagggcaggcgcgagctggcctctgagccccggcctcggaccgcccactcccccggcacgcc

SEQ ID NO: 6684 - DNA, 313 bp, Homo sapiens
  source 1..313: mol_type = other DNA
cccttacgttcttgttgccagtaactacttcaagtttgcctttcaaaagctcaacttttgagatcttgttgccagcaactacttcaagcaagggccttacgtactttaagaagcctctcctgcttacagccggggagcgcccgccacgcaagcattctgacgcggctgcttgtctgcgccgccttttcaagggcccgcggggcgtgcggcggaggcggggccggggccggcgggggaggggagcgccaggtccgcgcaggctcgccgggaccgcagccgccgagccgagcgcttgaagctgggggcgagccgc

SEQ ID NO: 6685 - DNA, 372 bp, Homo sapiens
  source 1..372: mol_type = other DNA
tccggaccgtagatagaggaggagtttggaggctgaggacctgagctcctcttctctcctgcaggactgcaggctccagggaggcaggcgccaaggccgccctccgcgggacccggtacaaggcaggcgccccgggatggcagactgggccaggaccgaagccgaatccttcttttgcctgcggcaacggtgcgaacgtgttgggtcaagctctaagcccagaagtggggctcggctgggtctgaggctccccgctctggacagcttagaagcccggcgggggcgggcgcagccttagagacctcaggcgccggcctcgctggagccgcgccgccgcttcacattgcgcacgcgcggggctggcgcgggctc

SEQ ID NO: 6686 - DNA, 553 bp, Homo sapiens
  source 1..553: mol_type = other DNA
gacctggcaggcaggcaggggcgcatcctgtagggccggaggctgctgacttaattcagtttgtggtgaaggactaggtcttgcccccaggccctacgcagttctgcgcacaaacgctgcaactttgtcaggttgcaatgcatcctccggaacagatctggggaacggcccctgtccgcctctccgctttccagagctctggtctaggcaagggacgctgacggctccgcctggatgggccgtggaagccaagcctgttctgtgccgcgcacccacgcgccacgggtcctgatggcgctttcagcccagaggcggcaccctcggattccacgccagcctggggagggagcaaattggaatgtcattcccgattcgggagcgaagacgcccaggtgagcgcggggctgcaccgcccgccgcgcggggtagagctctacacgccgagctgggccagccgggctcgcagcgacactgcaggccgcgggcggtactgcagcgcagcgcggcccggcgcatctcgaggctctatcgggcgcgcatgctcagcgcgccg

SEQ ID NO: 6687 - DNA, 183 bp, Homo sapiens
  source 1..183: mol_type = other DNA
ttcccttagcatgcatgatccttgatcaggcacaatatacattgtaatgtcctctatgaagatcaccctggctggctctccaagacagagttgttttacaattatctgttttttgcaaaacattttaataagaggggcacaatatttgcacaaagtacattttcagtaaatggtagtttagga

SEQ ID NO: 6688 - DNA, 542 bp, Homo sapiens
  source 1..542: mol_type = other DNA
tttcacaattacaaaatgggattttacatatgttccttacatggttattagtaagatataatgcttgcaagttgcttagcaatgtaactgactcacaattagcattcaaagagtgcttaagaaaatataaacttctacctttgaatttattgtaaataatgttggagtttgttatggaattcaacatcaatttatataaaactagaatgtcatttatttacaatattttgtttatttattgaaatacttctaaaatataaatattatccttccatcacaattgaggaaatatcatttcctcaatgaaggaaatataatcctcaattatccctcattttttaaaaaagtttctaaaatacaaatattattatcactcaaactacttgagaaaaataattaatacagcaagaataagaggcaggcatttctccctattcacataaggacaccgtgtgtctttaaaaacaccctttgcattggaagatttcagcctctgaaagcttcacgtattgcacgaggaagtcctgccagccctcaggtca

SEQ ID NO: 6689 - DNA, 396 bp, Homo sapiens
  source 1..396: mol_type = other DNA
aaattatttgtttatttggtaagaaaacttgacattaattttttaaattcgtactagagtattgatgactataggcactatgctgtacaaaaaaatctctagaacttattagtcttgcatatatgaaaacttatacaattttgttctactttttaaacttttcacctcccctaggaaggtaaaatgtacctttctccttgagaaaggaaagagctgaaatccatttgactagttagctagcttattccacaacagtcccaggggcctgtatggttgtcagacatttaagaatatgaacttattttcatcaaaagattccatgagaagatattttcagaaatcttgagtttcctgacctcaacatgtgactgttggtgtgagtcaggcttatgtgcc

SEQ ID NO: 6690 - DNA, 522 bp, Homo sapiens
  source 1..522: mol_type = other DNA
tcaaaaccttaaatcttaaattgagttattgggtgcaggtcctttctcccacagaacctcccagcttccggaatagaggagcggggcagaaatatcctgctttttatttcagagctgacgtttgcaatcgcgacagggcgctctttgaagccggctcctcacgcggattctggcccaggccgccgctccggtcccagtccggctgcagagcgagatggcacctcctgcttcccggggggcggaaggagcgccagcgccaggtgggtcacctgccaggaaggggtgtgtttgcagtgacggcggagtcacccatccctccccttggactgaaaccccaggggccaccgcaccgggtgggcgggaccgactactacccgaccagccgctggagctgcgtgccaggcggggctgtgcggagcagctgagcgcagagcggagcaccaggcacctagcgggccggactctgggcggcacccgagcgggccgggcagcagtgggcgctcgcgatcctcctctgcccaa

SEQ ID NO: 6691 - DNA, 459 bp, Homo sapiens
  source 1..459: mol_type = other DNA
tggactcagggcctctctataatgttaaagaattactgtgacctcctatcactactgcattgaaatgtgtccgtattattatgaaaattgttctgaggtcatcgggatttccagaggtccctagaccttcggagctccactgtattcacggccgctactgaggcttcccagcagcctcggcccgctctccgccaggctacgggcgtcccgggtgcccggagacaggccccgccccgccgccggtcctcgaactcctggctgccaggcaaccctggcgcgtagcccgggcgtcactgctccactgaaccattcccttcagagactttctcaagagaagggaaacgcagcgcctcgcctctcccgcacaccagtccagggccgcgagtggttcggctcgtcaggcggggccgccggtcggcgcgggttggctctgaggcgggggcgcgcgcccgacgtgcg

SEQ ID NO: 6692 - DNA, 420 bp, Homo sapiens
  source 1..420: mol_type = other DNA
gggagaaaaaaaaggatgcattttgttcttcgtgtttataatccttccacagaaactacgacttgttgctggagggtgcttcgaggacccctgtctttaccagttttgtctgttatggacggccgggagcgcccgggacagcccagtggaggggtgtggcctcaggctgtcactcagcaccgcgcctctcggaatccagcggccgcggccgcggctaccgccgccgccgccgggggtgggctccggaagagcctgcccagcagggatcgggctgtgcgccccggcggcgctcgggaggggactgctgccacggaggggcccccgccaatcgtcccccgagggggcagaccccagcccgcccctaagggcggagcgtctagtggggcgggagctgctgggccgcgcagcagtgggcggcgg

SEQ ID NO: 6693 - DNA, 618 bp, Homo sapiens
  source 1..618: mol_type = other DNA
tacgttaattgagcaaattttatattaaaaaaggaataacacattttaaaatgtttttatatacccacaatatttgttactattacataatacaatgcatttcttattttttaaagagcaaaaagtgttgtcacttctggatcactttatggtaattcctaggtatacttctaagcaaacaaacatatctatttataattttattcaactcacaagtaagagatatttaaaaaaaacaaattgaaagttttttttttcttcctgatgcaaaacttaacaaactccaattaaattcaatattggtctgccagggaaacgaccataaaatttacagaaattctccactataccatttttttataattcctctataaaaatcgaatcaaatcgaaagaaaaatatttctagagtgatcttaattaactgatcatttcagcaagggagaaaaaaaaggatgcattttgttcttcgtgtttataatccttccacagaaactacgacttgttgctggagggtgcttcgaggacccctgtctttaccagttttgtctgttatggacggccgggagcgcccgggacagcccagtggaggggtgtggcctcaggctgtcactcagca

SEQ ID NO: 6694 - DNA, 503 bp, Homo sapiens
  source 1..503: mol_type = other DNA
ctttaaaaagcaacaatatgcatttttcaataaagttacacacactatttagtaattatgaaattttctaatatttatgttgctttgaccacgtactaataataatttcaaacctgatttgcaaactggggacagtaatcagaccttagtgtttgtccaaagattaaatgcgttaatacatgtaaaagcacttaatacataatatgtgctatagatgttttacctgctataatcatagtaatcaatagcaaatctcctaaaaataagcctgtcgatttgtcttcacagatatgtctatggatctctatgcactgctccgggaaactggagcaagcactgcccccgctcagacctagggccccaggtgtcgcgcgggtcgaagccctaacctccagggactccagaccgtcgccacagtcgccgccacttccggcgcagctcggcctcgcgagggcgcttgcgcccggcgacggtcgaaactggctcttcgcggcctccgtcgc

SEQ ID NO: 6695 - DNA, 795 bp, Homo sapiens
  source 1..795: mol_type = other DNA
gccgcctcccccttctccgtccccctcggcggcggcgcgggcagcccggccgccgccgcttcctcttccttggcgcatcagcagaccatgcaggatgagctgcttctggggctgacacagcagccggcgcggccgctttcgggggcggcggccacggagaaactccccgaccaccaccccggcggcggcacgatcgcgggtgtgacccacctgctgctgccgcacctcctccccgcaggacttcagtaagcggcagcagcagcagctggactcgaagccgccgccgccgcctccgccgctccactgccccggtcggttcagcccgccgccgccgccagccggcccgctcctccagccggcgcagctcgctcagcgccagcagcaacagccgccgcagcagttcagcctcctgcatcagcagcacctctcgccgcaggacttcgccccgcggcagcgtccggcagacctgcccccgctcccgcagctccctccctcgccgcctgcagccccgcggcgccgccacggaggcgcgggcagccctcgcaagaccccagccgcgggcgagggcagcgccgccgagtcccccaatgcgggcttggcctcctcgacgccggtgaaccccgcgccgggctccatggagtcctcctgcccggaggtgcgcttggcgcgggcgccttcagcagcctgcagagcccggaccttccacacccgggcggcggcggcggcggcgggggcggggggcccccaggaggcggagggggaggcggctccgcgtcgccgccgccgctgcccggc

SEQ ID NO: 6696 - DNA, 520 bp, Homo sapiens
  source 1..520: mol_type = other DNA
tgtttacttctatacaagctttgcaaaccaaaattgtcaaatctgttggttggtgtgaacatatgcaatactttatttattcagtattttttgagcacctattatctactaagcaagatctgttttgagatataccatcaaatatttttcaaatcatcattttcagttgatcacagtagtaaaaataataacatttgtaacattggttacagatcaaatgtcagaagatttattcagccacagacactgcaaagtaagcatcttctctagtttatgattcgtatgtaagataaagtttaaaataagaccaatgcaaacatcattttattccccttttgtgaaaaaaattgcatataataattccgatttttcattcagataaattaggcacaaattgcatggaaataattctgttagcaaaagtgacgtttaaacataatttcacttttgcttccagtgaaatgatatcatttggtctttaggcatcactttaaacctgagactcctgcttttctaaatt

SEQ ID NO: 6697 - DNA, 237 bp, Homo sapiens
  source 1..237: mol_type = other DNA
agactttgcatatttcaggggaatcatttgctatctctagaaattagctaacataggagttctcacacaaacacatgtgcacatacacactagtctattggagtgtgttttaggcaaagattaaacttgtgcgttcaaccttccacttttaactggaaaacactcaagtgcaacatttgttggtactctgcagcacctccacagagcttttgctggggcagctcttaaggcttgact

SEQ ID NO: 6698 - DNA, 421 bp, Homo sapiens
  source 1..421: mol_type = other DNA
tgatgtaacatgtatcattattatccttttcctgctggtaaggctggaaagcagaaaattagttaagagcctgtgtcccaagagcatggaacatagtaaatgctcaatatggaagatccaacatcatctcgtgtatgatggtccaatatggatacgacttttcgaaaacatgtctatgttggttaactgtccctcacactcatgggagttttaattttaatacctaaaagtcataccccttttgcattttcacaaaggagttcattgaaaatgtattgtcattgaagggcagccttcaggagcctgattcagagacttatagatgagcctcacaataaggcgggggttagagctaagttttctcccatctcctgagagaggactctagaaaagatcattgaaggccatggactatgatggg

SEQ ID NO: 6699 - DNA, 553 bp, Homo sapiens
  source 1..553: mol_type = other DNA
cccgtcggggttcctgcacttgaggtgcatttccgcacctggatccccgcccctcgcacccaggccccgcgcccgctgtgggctgccgcccgggaccgaagctctcagagcccgcagctctggttcaccaaccgctgggtgggagccaggcccggcctttgagtggcggccggggtggtctgcgctcggccccagagctccggaggtcctggccagaagctggtcacccaggggcgtcggggcgtgggcacaagcagagctcgcggccctgaccgcggccattgtgcttggctgcctctcctcaaggccgtggtgggcagggcagcaacgggagagctttcatgtagtgaaagaagttccttctgcggcttatgaagacgacaaaaaacggggggcgggaggcagaagccgcgagcctctgcgcgcgcccggtcacgtgggccgcagggatcgcatggcggcggcctgcgcgcccccgcgtccccgccggccaagccgaccgggcgcgcgcgccgacggggcgggcgcatgcgcaagggggcgcgccgcctct

SEQ ID NO: 6700 - DNA, 663 bp, Homo sapiens
  source 1..663: mol_type = other DNA
ttaaggtagaatttaaaaaaaaactatatatgacatatatatgtcaacccaaaaaaataaagcagtatatattatatatataagaatatatatatattctcctttatatgttttttgtttcacatatatatataaatatatatctcaaccacaaaaaaatttggtttgtgacaaagatgcacttatttgcacgaacctatcttgttaatgatcaagaaatctgctttgttacaatcattagaggacagaaatatacatacatatttaaatctatttaatgaaatgcagttttatgttaaaaatcaatgatctgctaacctaaagagtcacaggaatactatgattattaaacacaatgcgattctctaaataagtaaacacgtgcaatgatatcaaaaattccagcgtcctggccccgccaggtcggggctggggcgggcgcgggccgggagcgcttaccccgcggcaggagcgattcagcgccactaggttgtggtgtggctgctgcgccaacctgtccggactagccctgtccgcgctcggctacacagagggccccaggcgcctagggagtcgttatcccgcgagaggcggaaatcccgcgagacagcctgcaccgcccgctcccggcacccccggacaccgccccggtctcacgcatgc

SEQ ID NO: 6701 - DNA, 418 bp, Homo sapiens
  source 1..418: mol_type = other DNA
aaagtttgtaacactagttcagttactattgtattaaaaagatatttttaaagggttttctatagtaacagaaaatgttgcaagtttgtcagaagaaaatatgaaatattaataattgttaaggaatgtgataaatgattgttattgttacaatgcttgatattatatcctaagatatatctctagtgcgctgtatcatcttctgaaaatacagctctaatccattttgtgtaagctcttcaggataatatcctttaagcttaagcctcatctattctacatttcagtactaaaagtatggaaattcttgaaatagttcatgcactttcatagctacctacagtgcctaaagtatgtcaggcactggagatacgtgacatattaaaataacagaatatctgttcagctattaagatga

SEQ ID NO: 6702 - DNA, 449 bp, Homo sapiens
  source 1..449: mol_type = other DNA
tcatctccagattccttgtaatatcaagtactatgtaattgttacataagtagttgttacattggattatttagggaatcgtacatgttccgtacagatggttagctgaatttggatgattgagtttatccattgctaaagcgagaaattgcacgttgttgtggttattatttcctgaaaacaaacaaacaccacttattggttggtgtgaaagaggcaaagttgtcgtcctttggagccagaaaagtatttcttctcgtggacagcggtcaagattagcctgggccacagtgcactggtcctgtctaattttatttatttattaattttttttttagacagagtctcactctgtcgcccagggctggagtgcagtggtgcaatcactgctcgctgcagctcacatctcacctcgcaggtagctgagactacagatgccgcgccccgcc

SEQ ID NO: 6703 - DNA, 328 bp, Homo sapiens
  source 1..328: mol_type = other DNA
tggaacaggccaagagcttgcttgggaaatgtttgccccaagggttctcttaataaagaagaggcaagaaaagccactttattatttattaaactcccgcatagagtgcagtattattactgtgtgccaaattgcatctctgagcagctcctagagctggtagtaacaacttacttactgggtgattaccatgtgccaggtattgtgctaaacacgttgtagatattaacaagtaggtactgctactatcccggctttacatctgaagtacagagaggttaagtaacagactctgcttttactgtctgcccccttaggacacctgcag

SEQ ID NO: 6704 - DNA, 553 bp, Homo sapiens
  source 1..553: mol_type = other DNA
ccctctggaagggtatcaaaagatgaataccaaactatgattcttgacacagaatcaaaagttattttcaatttattttttttctattgtagaacaataataataatatttaaaatcatattttcctgtgatataattaaaactgtgttatttcaattgaatttgaaatagaattcatggtctaaaatagactgaatgtgcaattgtaaggcatgcactgtggcctgtggccacggtgatggcgggacagccccacagaggccacaccaggtgactctcctcggtgggtgggagggggagtgtctctgtgtccctctggcacacacatcctcacacactttggattaactaaacccatggtcccccaagatggggattccagggagcaggagggagcctcgaggcagcccagactcccagctgaccctcagccccaaagctgtgtgtggcgctttgtgcgtgacagggctggggcagatctctctgaggcactcaggatcatttgctgcaaaacatcctccccacccttgcagagaaagagtcttttgtgcag

SEQ ID NO: 6705 - DNA, 388 bp, Homo sapiens
  source 1..388: mol_type = other DNA
acagtattctcaattcacaccactcagctaagtagcaactagcattggtactgctgcacactaaggatccaaatgattgaggcacctctacaggaaatggatgctgtccaggtgctggtgggcgccccagggctacgtggcgaagcagctcagcaggcagatccccacgcatgcctctcccgccgcggtgagtatgtttaaggaatcctttccattacggcggccccatacctaggtccccgtccgggacagaggaagccgcaacgggtccccccgggcacccgggcctttctcctgcctcccgccacgtccgagggtccggccgcagcgccgcctgagcccctccgcggccggcagtgggaggcgggctctccgaaagccgtcgcgg

SEQ ID NO: 6706 - DNA, 529 bp, Homo sapiens
  source 1..529: mol_type = other DNA
aggagacagatgccttcctcttgtctcaactgcaagaggcatgcctgtgtcgggctgggggacagtcaggtctttcccttcccacgaggccatatttcagactatcacatggggtagattaacagcatctcaagctgaagaatttctcttagtacagaacaaaatggagtctcctatgtctacttctttctactctttcttttccccacattagggagggcactgaagggacagtgtcttgatgtcatagttagatcttggactttgaaggcaaactagtgggtttgactcttggccacatggttaatcacctgtaatggaataatgccttaaacaaggaggaccttgtttctatctatgaagcatggagaaaataaatgttagtttcaccataaagggtctgtgttctgagtctggccctcctgagaagggaccttctgccagcacctgccctgtggctctggagcaggttgtgtgcttggtttccacccacccatccggattaggctggaggccttgctctaaagct

SEQ ID NO: 6707 - DNA, 336 bp, Homo sapiens
  source 1..336: mol_type = other DNA
ttctgaactaacatttcttgtctagaaatatacacactcaagatcaatctaactattaaaaacaaaaaatgcttattttccagtacctgttttatgttagattctggggtaaaaagaaaaaggtactgacttaatgttcctattaaacacctgctgtatgctagacaccatcctgaaggtgcacagtattctcaattcacaccactcagctaagtagcaactagcattggtactgctgcacactaaggatccaaatgattgaggcacctctacaggaaatggatgctgtccaggtgctggtgggcgccccagggctacgtggcgaagcagctcagc

SEQ ID NO: 6708 - DNA, 709 bp, Homo sapiens
  source 1..709: mol_type = other DNA
gggagcggggaaaaggtttccaccttccccgagcctggggcaccttcgctcccaccgccccagctggtggtggtctcgacaccacgctcgttgcggggtcacacgcagtccgccggcgcgccagcccttgaaactctgccggtccggccgcggcccctcccctgcgcgtccccacctgtgtgaagctgccagggccggcgctcgtgggggtcggtgatctggagccgggcccccgccgccgcggccgcgccagcagtgccaagacctggcgggcggcgccggcgcactccgggcaccgagtctgcaaaagaggccctgagcggaccgccggacacctcgcagactgcgggcagcggtggtggcggccgcctctccggggctccacggccgacccgccgcccgccgccgccatccccggcccgctcctgccgggtccccgactcgagccccggaggcgcccgctctgcgggaccgcgcagcccggctgcatggagcccggcgcggtgccccggccggccgagccagccacggcgcgagaaaccgtcgcccgccacggcgagggcaggaagatggcggctaccgtggcggcggcggcggcggcagcggcctcacacgcgtcgctgacgccaatggctcgcgccggtcggcgggccgcggatggcggcggcggcggcggcggctcgggctccggcgaggggcggggcgaggc

SEQ ID NO: 6709 - DNA, 314 bp, Homo sapiens
  source 1..314: mol_type = other DNA
gggaaaatatttgtttacttgaccaatcttggaaaatacagactttgtctccataagtgttatctggggatgatccattcaattatttgcaattgtttttccttcctgggaaaaaagaccattgctctagaggcaccttaagggccgattagtgctgaaataaatctctgcttttgtagtaatcaacatttctgatacattacaacagtgtggctaacaagcttagcaatcaggtttcttgtcagactggatagtctacaatgtggacaggaacctctccacaaactgcttctttaaaaacaagcagtggtgcc

SEQ ID NO: 6710 - DNA, 236 bp, Homo sapiens
  source 1..236: mol_type = other DNA
ttgtttttccttcctgggaaaaaagaccattgctctagaggcaccttaagggccgattagtgctgaaataaatctctgcttttgtagtaatcaacatttctgatacattacaacagtgtggctaacaagcttagcaatcaggtttcttgtcagactggatagtctacaatgtggacaggaacctctccacaaactgcttctttaaaaacaagcagtggtgccctgctatagagggc

SEQ ID NO: 6711 - DNA, 671 bp, Homo sapiens
  source 1..671: mol_type = other DNA
gctccttaaatctctattttgatgcacaattaaaaataaaaaattgccaaaacagtggtcgaaaattgtactatactatattttacatgcttacacttcccggctcgctgcacgccccgaggcccagcacttgctggcgggtgggaggaggggcttcgccgatgtccccgtcccaggggcagggcctggccgaagttacagtccctccgggtggcggggcgccccgagcgtggcagcgcgctaggcggcagcagcgggcgcggagcggggcgcggccgccgcgcgttccctcttggcggggttggccggccggggcggggcgcggcgctccggctcgaggcattcggagctgcgggagccgggctggcaggagcaggatggcggcggcggcggctgcaggcgaggcgcgccgggtgctggtgtacggcggcagcgtgcaggcttttcgggcccgcaactgggtctccgcgggggtggccgggggctttcgtgtggaacccggcgggtagaggaaggtgggggcccctgtgcaccccctgactcgtgttgcttgcacgtgcgcgcacaggtctacgcgtctattcctgtttccgagtgcgtgcgcacgccagtcccagggcgctgggcctttgctgtgcaaggaggtgctccgtgggcctccgccagaccca

SEQ ID NO: 6712 - DNA, 424 bp, Homo sapiens
  source 1..424: mol_type = other DNA
gttcaaagccagcctggctaacatggccaaccaactaggcgtggtggcgggcgcccctaatcccagctactcgggatcgctccattgcactccaaggagttgagcgctccgccccgcgtccggaagccccgccttttcgcccccgcccgcatgcgcgggcgcacacgaatgcgggcgcacacgaatgcgggcgcacacgaatgcgggcgcacccttgagtcccctcgcggtttgatcccagcggtccagtcggccggtgctgcccatccgtcccgccccctagacgcacgtccgctcgcccggcgcccgagccagtccgcgcgcacgccgtctgcgccccgaaagccgccccaaggcgcgcccgcccaccgctctccacgtgctcgctggagggcggtgcgaggggccacaagatgttcttgct

SEQ ID NO: 6713 - DNA, 505 bp, Homo sapiens
  source 1..505: mol_type = other DNA
gcacaagtttactgaacaaacatctgtgtctgctgtgtacttagagctctggttctctatcagtgatgaatttgcccctaggagacaactgttagcaggccagggatgctgtaaatatccttaattattctgtgttaaagatacagatagaagaaataagacctagtgtggtttgtctcgtctcgctccttaaatctctattttgatgcacaattaaaaataaaaaattgccaaaacagtggtcgaaaattgtactatactatattttacatgcttacacttcccggctcgctgcacgccccgaggcccagcacttgctggcgggtgggaggaggggcttcgccgatgtccccgtcccaggggcagggcctggccgaagttacagtccctccgggtggcggggcgccccgagcgtggcagcgcgctaggcggcagcagcgggcgcggagcggggcgcggccgccgcgcgttccctcttggcggggttggccggccggggcggggc

SEQ ID NO: 6714 - DNA, 302 bp, Homo sapiens
  source 1..302: mol_type = other DNA
gcgccttgggacccttcaaaagaaaaaaaaagattagcatagtgactttctctttgatgtaaccataaatatttatcaacaaagttgtttccgttatccgaccagaattcaggaagaactttgcgactcaacaaatgtttgtggagtgagtgggtgaccctctccttttaccaacgggaaaaagtgacttagccaaagtctctccaattcttaagctaagaaaaaaggaaaatacatgtaaactctgttttgcgataacagaagaattaacgtgagcttctgagccggcttccgcgcaggcg

SEQ ID NO: 6715 - DNA, 290 bp, Homo sapiens
  source 1..290: mol_type = other DNA
tttatgaagattattaaaatttctgataaaaggcaatgtataaatgatatacattcactattgaagacctattattcgagctttaggaaaagctgatcaactttcccttacagtctggcgtctgcccaaggccagtactgtgcactcgcgcaactcaggcgctggcccacaccgtgcgccccgatcagctcggagactcgggagccgccagtcactgtgccctgtccctctccggaggccgccagtcactgtgggggtccagggccgcgcgccacccggcagctcctagc

SEQ ID NO: 6716 - DNA, 412 bp, Homo sapiens
  source 1..412: mol_type = other DNA
agaataccagctcaaaatatactctagaagtatattgtagggtggcatatttacagtcctattttggatggtgcatcctgagatccaacagaagttctgtctgatataatttcatttaaaatttaaaaacctagttcctccttatgcacacttgtaagcttcgggtcgccccgctcagcggacccagcagcgtcgtctcccttctcagaggtggccgggcctccggaacgcgctacgaagccctcgtgtggggatcccccgcccttcggccacaagacgccagcagcccttcccctccggtggcaaggccactcctgcgcccaaagcgcggggtgcgaggtgggtggacccatcgcttcccgctctctgatttccccctctcgcgggaattatttgaacgttcgagcggtaa

SEQ ID NO: 6717 - DNA, 400 bp, Homo sapiens
  source 1..400: mol_type = other DNA
gttattttctctagcacgtggtagaattcattccattaacctttgtaaagtgcttaatcccgtgtcacgcactgtactagggtctagcgagtgacagatgtcacggtacagagatctcagtgaaagaaaattttccttctgcagttttaattttcagtgaaaaaaacccgcatctttttcctagtccttgtaccgaagtcactccgggcttgccctttccctgcggagtgacaggaagacagcagacccggccaccgggcagcgcatggttccgggcgcagggagcgacagactcagccccccagcggcgcggcgcagagaagttgcacacggcgccaagttcagcttcgggatcctggcgtcgctcccgctcagggttttcgcgggcggcgggagcggt

SEQ ID NO: 6718 - DNA, 423 bp, Homo sapiens
  source 1..423: mol_type = other DNA
aattttcagtgaaaaaaacccgcatctttttcctagtccttgtaccgaagtcactccgggcttgccctttccctgcggagtgacaggaagacagcagacccggccaccgggcagcgcatggttccgggcgcagggagcgacagactcagccccccagcggcgcggcgcagagaagttgcacacggcgccaagttcagcttcgggatcctggcgtcgctcccgctcagggttttcgcgggcggcgggagcggtgcggaagcggcaggttgcttccttctcctctggctccctccccgcctctccctgagggagcggtgggagggggagggcagaggtagtgacacgtgtcaatcaacccccctccggggggcgcgcgctccggggctcgcgccgagggctcgcgcccctgcctcgtgcctgcgc

SEQ ID NO: 6719 - DNA, 440 bp, Homo sapiens
  source 1..440: mol_type = other DNA
tgccgcagacaagaaggcggcggcggcggcggcggcggaggcggaggcagctgcgaggcatgggagcgccgaagcgcccaggcgcaggccgaagctgccgcgctttctgggcacggcgggagtgctgagcagaaaggggagcgccgggggcccgcagccggctccggaggcgcgggccgggtttttgttggctacgctgagcgccagtcagccccccaggggctccggagtcggcagagccaccgagtccccgctctccctccctctccccgacctcgctccctggagcgggaggccaggaaagacccgggactgcggccgccgcgtcaggtgcagcgccaggagccgggcggcgtcgccacgccggcaggggtaccgccactgtggccttgctagtgggagaccgccgggggccggccgtggctctgcgccctccggaa

SEQ ID NO: 6720 - DNA, 323 bp, Homo sapiens
  source 1..323: mol_type = other DNA
ccaggggctccggagtcggcagagccaccgagtccccgctctccctccctctccccgacctcgctccctggagcgggaggccaggaaagacccgggactgcggccgccgcgtcaggtgcagcgccaggagccgggcggcgtcgccacgccggcaggggtaccgccactgtggccttgctagtgggagaccgccgggggccggccgtggctctgcgccctccggaatctgcccggctgcggcggcggggcaggtcctggtgcagagcgtcgccaaggacgccgagcgggaggcgcccgcgaggaccggtccaggctgcggcgga

SEQ ID NO: 6721 - DNA, 445 bp, Homo sapiens
  source 1..445: mol_type = other DNA
gtctggggtgctggtcaagtagcaaggatggagctacatagtgttacctaagcaaaaagttaggggacaggtccaaagggcttggaaatacaagggaatatgcattttcctgcagcatttatgatgtggagcataaaatcgtgcttttcactattaaatatttttactattaaaaataatgtagagcacaaaatcgtgctttttactatttaaatgcggatatactgtgaagaatgcaatagcatatgagattcataaagcttcggctctcacccctgaagactcggggggaggagttcacagtcttcagttctccgagtatgcgcaggcgactgggaacccgtcatgcctgcagtgcgtgagctgccccctgaactcctggcgcctggttgcctgggcaaccctcttctggggcgccgcgcggcgcgaccaggttcaggggcgg

SEQ ID NO: 6722 - DNA, 393 bp, Homo sapiens
  source 1..393: mol_type = other DNA
acttttacactgtgttcattaccgggtatatacccaaaggaatataattcattctattataaagatacatgcctgcatatgttcattgcagtacatatacaaggacagagatcattttatttgcaggcttgtaagtgggagctgtcatggcacatgttccataaaaaagaaatatatgttactgttagatttatagagtaatatatattgctacttaaactttttgtttgacgtaatcatataatccactgattatctgaaataattgtcttaaaacaatgctagggttgtaatatctacattaatgacaagaatatgcaaaaaaatcatatacaagtgttttagcttaatacgcttaaactgggaaatgtaaagtcctctgtggacagtcac

SEQ ID NO: 6723 - DNA, 408 bp, Homo sapiens
  source 1..408: mol_type = other DNA
ctcatccaggtggccctgattctatcaagaatcacagcattgacactctacttggagactttactcggaagacatcagaggtctggacctccgatttttggcccaaactatcatgatgattgcttggtattatcaacatcatgcagaaatttcagaaatggtagatagatccttaaaaatattgatctttggcaagttccattcttaaggatagacattatcttaaacttgactatgatcttagagtcctaatgattctcactcaggtagatagatagatgatatagatgatagatagatagatagatagatagatagatagatagatagatagatacagttatgcaagtaaacctcatgtagtgccaggacctggcaggactatatggacatgggtgggcatgacgt

SEQ ID NO: 6724 - DNA, 395 bp, Homo sapiens
  source 1..395: mol_type = other DNA
atttacttacatcattatttataaaggatagaaggacacattaaatactgtatatattttggtgtattgaactctaagatactatgcaaatatgatgaatacttattagtttattattcccagatagctcagtgactgagctttcgggactcatgggaaagaaagtcaatattgaaggactcccttaagccttcagctagttgggacaaaataggtgctctgctccctgtctgcagcaggagtccagtgtttccaaggcaactggccggcccaacaaagccactggtggcggcggcgcggcgcgcagagtcccggggcgcagagccatctcctccgcgccgggcctcgggacgttcctggtgacctcctgggtcctctgctacagcagacaggat

SEQ ID NO: 6725 - DNA, 370 bp, Homo sapiens
  source 1..370: mol_type = other DNA
gataaaactgcacgttctgcacatgtagagcagccccaggggtggttaattcccagaactgagtgttcctcccctttatgtagggtaacttcctgacattgtcatgacatttgtaaactgtcatgggagtgtcttttaacatgctaatccattataattagcgtataatgagcagtgaggacgaccagaggtcacttcaagatggagtcgttctagttcaaatgcctccgacaacttaaaagtataaagctttctccaatttaacagctgccatttttatgattcttgattacacattaaacaagaggtgaattattcatgagttttccaggaaaagggtgggcaattcccagaactaagggttttgcaa

SEQ ID NO: 6726 - DNA, 349 bp, Homo sapiens
  source 1..349: mol_type = other DNA
gatataatatttatatttattcagaataaacaaaaataaacaaactctttcagagaaggcaagcctgtagttttctgtcttaaaaggaaagtactttgtgaaaattgcaaatccttgcaattgttctggctattaactttaaaattttgaaatatgaagaaactgaggcacttctttctcttaggacaattttaaaggagacaattatgtatcctaagaaaatgtagccagttttaagaaacagcttgttttctcccaagaatacatttatagaatcagggtcagcttctcaaaaatctgattaacactgtgtcaagggagttgtactggagactgatgagctgggcag

SEQ ID NO: 6727 - DNA, 586 bp, Homo sapiens
  source 1..586: mol_type = other DNA
ctttcccacctgccatgtttcagggagaaactccaaggtgtctgagaatcctgcttacaaaccttccaggttgttatgaaggtagcacagaatatattttattagcatgatatagtccttgtaaaattttaaacatagggtaggtaagccctgggcttgcaaatgttcgaactggtgaacatctcaagtacctgtcgaatttctttcaaaaggctgcctttcctgttgttgctgaaggccagaaacagcttcagattgaagaggaacctgtttactggctccagtgtattccgaaacacttggttttgccaggctccttgggccacatgggcagtctccaggagcgcacaagactgctttgtcctgtgcccgcggtgcgagcgcggtggcggcgaagtttggactcgaaccgggctccccacaactcctgcccggaggccgaggcccgggcgcgcaccgggtcggagtcgggctcggcaggtcccgggagcgcgcgcctcctccccgaggtcccgggcagctgcagacacggggaggggcgggggcggccgccggcggcgggcggggaggagccgccgcgcgcggg

SEQ ID NO: 6728 - DNA, 660 bp, Homo sapiens
  source 1..660: mol_type = other DNA
catgattaacatatttgccacgtgttagaaataagctatcatatttttttccttttctctttattattattgttgtatcacaagtaaaatatgctcactgaatgaaaattaagataacaaagaccatgtttatgttcatgactgaaaatagctagttctattttttaaccaaaatatcgttacactctaatgatattttataaccttttttaagttgaattaatgtaaatgtattttctcatttaaaatagatgcatatcaattcattgtatagatgaagccatagtttaacaacttctctattacagcatatttagctcgttaataatttcttgcttcataaataatggaaggactaatttctttgtaacatattttctattattctttaggatacagtactactaaaagtagaattgtcatgttagaaaaatggactacatatttagaagtcttttaatgaactagtgtcatttgtgtacatttttgtacatatatttaaaatattttatttttctgactgaaaggaaaaaactgattaaaaactgtttacggtatatgcattagttttacagccaaaaactcgtgttgtaacaaaggtattgcagtctccaaagtgtattttaaagttgtaaatatcaacatttacttatcactgat

SEQ ID NO: 6729 - DNA, 506 bp, Homo sapiens
  source 1..506: mol_type = other DNA
tgttaaaaacatagttttacagagtttaattaaaaaaataaaaactagtcttatctaattctcataatcaccatgatgggttgaaagtgttacctcattttacagtttggaaagtgaggcttaaataagtaacttgcccagggccaagtaaattttccaaatgcctggaattcttgtttgcaattttctcaaattttaaaatcacaggaacctctcaaattcaggaagtgttccctgaatgaatctgttcagccacagactggtcaacagatcagttcatgccctactgaccacagagctgtagacacttccatttgcagaggcaccaagtattgataatgcatcttaaacctagctttaaagtcttttattcatactaaattcagtagaatatgcctgttagataagtctcctgagagacaactttagtgaggaatataactctttttaaaatgcaatggaatatatgtatatttccccaaataaacaatttcttacaaattgca

SEQ ID NO: 6730 - DNA, 385 bp, Homo sapiens
  source 1..385: mol_type = other DNA
gttaagttcccataacagttttctggcaatgccctgtaatgtgaaaggaaagcgtgttttcagcacaggtgacattctaaaatcttccctgtttcagggaagtgccttcccagggccggccactcacatttgcaaagccctgcctcatcacatttgagaaggccttgtacttgatactttggattcccagaataaaatcaggcactgagtagttaaagagtcttaaaatgttgagagtaaattatgtatctcttcccatatgtttgaatctaagtttaatttttatttaacatcacaaacttaataatgataaaaaatgacatgttggttgagtaactggacacgcaaacaatgttctctgcttacgcaacctgtgtttggatgt

SEQ ID NO: 6731 - DNA, 415 bp, Homo sapiens
  source 1..415: mol_type = other DNA
ggcactagggttggaattcatgatctgagcagagcagcagccacttgttttctgggagcctatgagagaagttctccttatatggagcggtattccctactgccatgggggcatttataccttaacacatacaggctattttgttgattaaacaagcaaaaaaaaaaaaaactcaatgagaaaatgtctcataaaaatgcatcatgtgataagctcttgctttagtcccaaactgagcttgagtccacttggagatcttagaattaaagagttcttaggcgttttagctaagaatatagttactctgtcatgaaacagtaaattaaaaaaagttcaaagctggctttaatcacagcatgatgcttgaagcttcactgaagcagagggctgcctttgaggggactgtagtaagaca

SEQ ID NO: 6732 - DNA, 424 bp, Homo sapiens
  source 1..424: mol_type = other DNA
taggaaagaatttttctgtcctttggatttgtagcagcgcgaggccccagccttggctagtgaggatgtcgacaagaagtgaattctctatgaaaatagaacctgctttaatcttgaagagatatctcccagactgcaagtcagcatttgcccacatggttgtttggcaaaatctatttttaaaagtctataatttaatgaagtgagattcattccggtatcttaaagatattcatgcaaaattatgggtccttttgtgactcacatctgcaggtcacatgcggctggccatgatgacatgtgacaaactcagaaacttttttccttgcaacggtagcaagttaccaaggttttattaatcaggaggtttcaaaaaacaaacttggggataatgaaaagacccaggttgattaaggcaggcttt

SEQ ID NO: 6733 - DNA, 466 bp, Homo sapiens
  source 1..466: mol_type = other DNA
gtcccagctactgtgagatgagatcgcaccactgcactccagcctgggtgacagagtgagactctgtctcaaaaaaaaaaaaaagtttctgatagtggagaaaagcaacttagtaacttgcttctggttgaaatagtttaacacactttgcatccaccattgattcaaaagtctcaaaatcaatactctagtttaatagacagtctctgtgtgttttcagacagggtgaaatgtattcatatgcacacactaggattaatcaccaaaggcctttgccattgtgagaagagaaggagagacagacagttctcctctcttgcttaacaagaacaagcagggactaaatcctgttaggcttgctaatggttgctcccaggcttaattctggggtttcaccaggaccttaacttatatgttgagtaaacaagtgcttgttctgtataccctggctgcaattggactgtgg

SEQ ID NO: 6734 - DNA, 415 bp, Homo sapiens
  source 1..415: mol_type = other DNA
attttcgttttaaactgttaaatcaacagagcctagcctagtttgatgtagcattgacttagcttaacaggcaccggtgtgtctgtgcctgcgtggacacgcgcgcgggggggcaactatgtgaaaataattttccagtggctggaacacccgcgccccctgccgtcccgggacgcgcatggcccggcggctatggcgaggaggtcggagaaggcggccggccggccgcgggctgcaaaaggtctggcggcgtagtggccggggctgtagtacaggctgtccccggcagccggcggagtcagcgcgcccacgtgacggccccggctctccggtgagctcccccagccacacgcgcgcgctcgcgcgcgcgcacacacacgcacccccgcgcgcacacgcccgcccgctcgcgctg

SEQ ID NO: 6735 - DNA, 408 bp, Homo sapiens
  source 1..408: mol_type = other DNA
taacaactaccttgcagggtgttatttaacactgcgaaaggaattctctgtattctagaaatagatcatgacaagccttaacattttggccaggctggtctcgaacccgcctcggtctcccaaagcgttgggggcccctcactgcaactgagggtagcgcagtggccgcaagttccagatctggagttactaaatagctgggtctgggtctgagattcccttaaagtcctaactaggactagactttctcaatttcttgagaaggccttcaggttcttcctaacagccgctccgaggagggggacaggagttcccgcctttgggcgtcgtgcgcgcgcacctcgctcacacgcacactcgcacgcacgcacgctgcggaagcgcgcgcgcgcgcaggcccagccctcg

SEQ ID NO: 6736 - DNA, 359 bp, Homo sapiens
  source 1..359: mol_type = other DNA
gttgcagggaggacgggcaggccagcaagcaggctgcctggtttttcccacatgggcttttctgggaaagaagagcttctatttttggaaagggctgctcattttttaaaaagactccttcatctctttaataataacggtaacgacaatgacaatgatgattacttcggtgggcgtgcggggtggacagcctcacacccccattttacagatgatgaaaaggaggtggcctgagtgtgtcacataggtatgacagcacagcgcacatttgcaaggaataagtcaataagttattgacttacatctcaataaagaggtctggctacaagccggtgaagtcgcggaagaggtaacagccc

SEQ ID NO: 6737 - DNA, 494 bp, Homo sapiens
  source 1..494: mol_type = other DNA
aggagaagtctcagcttaatgccaatgccttccccttttgctaattaggggcatgagccatggaatgccaccagtgccaactatttagaattgaataatgctttattttcaatttttacatttgctttctattaatgacaaatgatacgttaaaaaatatataagcaagcactaatagtttaaaaaacaatgctaagtatataataaaacgtggttcattcattcttgcgttcaacaaatattcgtccaataaatatatgtagagcatctcctatgggccaggatcttgccaaaggcacggggacacaggcctgcccgtggggcccgcctcccgcgcggagagcgctgaggggtccggcttccccttgcctagaggccgggcaggaggcgcggagcccgaggtcgcggggctgagggcgcggggcgggcccggcggggctcggctgcggcccgggctgtgtctgcggccccggcggccgcgcccctcctccctt

SEQ ID NO: 6738 - DNA, 446 bp, Homo sapiens
  source 1..446: mol_type = other DNA
gagggcccagttaaggtagcccttcaaggctccccatcctgcccagccaggagctgctggaccatcagccagtcaggatgctttctgggcgttcctctgactggggcgggtggggtgacccgtgggcagctgagcgaggggaaactttcccgggctttcccaggcagcaggcagggcccagagcgccgggcgtgcaggctgcagcggctttgcttcagaacccctggtgctgtgggagcgagagccagacctcactgccccagtcaggccccgacgggggtctccgccaggcttggcccctttccctctgtccccgcgcccggcccggggcgagagggggtggcgaggtgggggccgggtggggcgccacggggccggcgctggccccctcccccgcggggcgggccccgccatgcattattcattggccagagccgggctgcggg

SEQ ID NO: 6739 - DNA, 401 bp, Homo sapiens
  source 1..401: mol_type = other DNA
gtaaaaagagttcaagtgtactttcatgcccttaaaaaaaaaaaaaaacttatgattatatttaataaaactaccgttctctagaatactacaggaatacagtttttctctgcttgttttctaaaattcaagcataacaaaacgtttgtacatttgattacaattatttacagatttcgagaagtgatgataaatgcatacaatgaggtttactgagatatttaaatttccgtaagtgaaactaactgaacagtcccagctactcgggaggctgaggcaggcggtggccgagatcgtcacactgcattccagcctgaaacttttaatgaaattaaaatacaatacagtctacaaacaccattatgtgtggaggtgcgaactttgccctttcctcccgaagt

SEQ ID NO: 6740 - DNA, 227 bp, Homo sapiens
  source 1..227: mol_type = other DNA
tcttctcataatgtcttagattttatcttcagagcagaaaaagaatgaagcactgcaagctggcttaataacagcagctgtaagcttaatcaattttacaaaatgttcttggggatagtttcagaatggtcaaactaattcattaattcaatatcaactttttgtgcccggggtgtataaacaaacttctggcatctgacagtttgaagtttgtgtcaggaacacca

SEQ ID NO: 6741 - DNA, 352 bp, Homo sapiens
  source 1..352: mol_type = other DNA
cactcaaaacttttaatgaaattaaaatacaatacagtctacaaacaccattatgtgtggaggtgcgaactttgccctttcctcccgaagtttgggctgagacagacttgggactagtctcaagcagcgaagagctgccggtgaggcagcaccagcggggacgcccggcggagccagagccccggggtcgcggcggctggggaggggaccgtcggtaccttctccagaagcagcgtatgaggtgctcatgcgagcggcgggcctcacagccctgccgcacgtaagccggcgacaccagccgctctcccgccgcgaagctctcgcggttcatgacagcggtggcgacagtgtg

SEQ ID NO: 6742 - DNA, 590 bp, Homo sapiens
  source 1..590: mol_type = other DNA
tctacaaaaaatttaaatttaaaaattaacaggatgtggtcgtgcacacctgcagttccagctactgtgtcttctacagtttaaagctgagaagatcccttgagcttagtgattgtgtcactgcactccagcctggattagagggcaatttatagccttaaaatactagcattcaatcatcttctactctaagcaactagaaaaaaaacatgacattttgaaaagatttaaaaattgataaacttctagctagattaaggtccctgccctcctggacgtctactgaggaaagaaatgtcatacaattaaatctatagttacagattatggtaaactctgagagagaattctgtcagggagaagccgcttttggttgcaggagggcacctctttgaaaattactcaccttcccgccctccactgggagtaaagcgagctgtgcccagcttctccccgcgctcacggaagcaggtggcggccccaccccatgccccgctgccgccgccgccgccgccacgacccttctgcgcaggcgcgggggtggtgcctggcggaggcgcgaggtggggcgcggccggcggcgaggcggg

SEQ ID NO: 6743 - DNA, 682 bp, Homo sapiens
  source 1..682: mol_type = other DNA
tatgtggaaacatttatgcttatcactattgactagtctttacaagaaccagtgaaatgcataggatgtatatattagatattttcaaatacctgaaggagaaatctgtatttctaaaatatacaagaaaggacatttttcctaatatgcagggaaaaaagaagatgaactgctataattttatttgacctgaacagagaccagaataatcttcccagagtatctttgaacatgatatgtaatatattttactttccctaattttatttttcttaagagtaaactcttaaatgtacctttatttgaaaccttctaatacatggcataatttacatattcatgtaaggaggcatacaataaatttgttgaatgaatggataaggcaagtatttagttaaaaccagactgtttaaaccagtatttgttgagtttttatgttaaattgaatatgtatgtagacctcttggcaggatattctagaatattttaaacttaccatctggcaaaagttatttaatgtgtgtgcgcgtgtgtgtgtaaacatacattcatataatacatatttataacaggtacttatcttcacagtctctgttgctcataaatggatgaaataaaaattataatgaataaatggtttaaaaaatgtcagtgaagtgaagctttttatctttttaaattg

SEQ ID NO: 6744 - DNA, 580 bp, Homo sapiens
  source 1..580: mol_type = other DNA
ctcccaaaattctgggattatagggctattctttgatttttaaaaaactttaaaaattgcttatttattttagagagctgggattacaggtgtgagctcagccttgattttttaatcaagcattttggagtttttagcatacataaagctctgtacatatttcgttagatttacacctatttcatttaaatttagaaattcagtttaaactttcggatttttaaaatgtggacaattctttctttcttatgtataaatgtcaatgagtatactttcagcattgtccaaaagttacagaggatgatgcagtgactgtgactttgaaaacagctgctgcagccatttcagctatttggcagaggtggtaatgctgacaaccacctggctatattcttaagaaaggagggtgcttcatgcgctgagctcatggcacaggtcccgcaagtgacctgcgagccccaccgctaggggccgcttaggtgcagcccccaggtgggcggggactgcgtttcggggcgtggcctccgccgcggcagcccccgcccaagctcctcctaagcgcctgggggcgctgtgggtc

SEQ ID NO: 6745 - DNA, 324 bp, Homo sapiens
  source 1..324: mol_type = other DNA
caggcgtgagccaccgcgcccggccctgagagtaaatttaaaatctactcgcttagtatttccgggaaaggaaaggtatgcaagcatgcccacacacgtgcacacacgggttcccaaaagacctgcgtgtggccgcaggggcctgccccgcccttctcgggccctttcaggtcccggcgcccagcgatcccaccagcacctgggtccggcgcgcggctccctctccgcgcccctcggggctccctgccccgcggtgcgcgccccgccctcctctcgcgaggcagtcccgacgccggaagtgcctggagcgcgcgacagcggcgg

SEQ ID NO: 6746 - DNA, 389 bp, Homo sapiens
  source 1..389: mol_type = other DNA
tactagattttagctcccctttcagataacttagatgtttaaattaattaaaaaacagttatgtatttgcaaaagtacttctgacttgcttgttactgaccaaattaagaaacatactttgtcttgacttaggtggaacgtaatacaaaacacataataaacagatttctttggtatctggttagaccaacaattttgaacctgaaaatatgaatcaaatttaagttcttagtttttggaagaaaaatgtttttgttggtgaaaagctgtgtaaaattgaagatttagttcagtcaaacaccttgtctttgaaatgtatttataattaaaattatgtttgtagtttgcttttaaagatagttttttaactttgtatttccagcaatgtt

SEQ ID NO: 6747 - DNA, 497 bp, Homo sapiens
  source 1..497: mol_type = other DNA
agaataagaagcaggttttcttcctgctcagcagggaaggctttcgtgtgcacattggagacaaagcctgcccagcagtgcccggcacagaactggggctgggacagatcctatctcacagcagtttggagaactgttgtatagcgcagtggtttgccaaacccgcagcaggcttaggagagcccagactcccagggcgtccaggcttttgacctcttgagcctcacaggagctagactagaaggttcaagagccccacttgcgggaatctcgtgcggaccgagtcggggcgggagagggcgcgcaccagccaggctagggcgcgcggggcgccgaggggcgcggggccgtttggggccgttcgggccagttcgcgcggcggggcccgtcggggcagcctggctggccgcgcgtcttctccgcgcagcgggcgaagtaggcagtgccccggcggcggctgcggcaggcggtcctggcggccagcctctttgcgcaac

SEQ ID NO: 6748 - DNA, 388 bp, Homo sapiens
  source 1..388: mol_type = other DNA
gatgtccacgtggaacttttcggcccggcccatttgtatatgaatgtttcacgcaacctgtgtacaggatcatctgtttaaactgagtaaccttgtggcataaatattaaataataatatctcttgggcaaaaaaatatcattcatgttaactgacaacttcttatgaaaatatgaagtaagcccaaccacacaatttgatattggctaattctgaaatatgaaggcagaattataatttgcatttttacaccttcttgcttcaagaaatgaaacattcaagaagtaaaaatttcttcagaatcaaattctaatttctgcccctaagcagtttttagcttcctgaaatgaattcttttccatttcatttatttacagtaatatatggc

SEQ ID NO: 6749 - DNA, 507 bp, Homo sapiens
  source 1..507: mol_type = other DNA
gcagtggtggcggtggcggcggcaccacacaaaacaacgtgccgcgaaccagccggcagggtggggcgcagcccggctgcaaacatgccagcaaggaggcagtcccaagaggttggcggcctgggagccgggcagctgcgcggcacaactccagggggcacactcgccctgcgccctgcgggaatggcgcctgcacgggcgggaactggtctgtgcgtgcgccggggcccagcgacccgggcggggggtggcggcggccaaggggcgggacccgggtcggtgcccacctgcgtgggcgcccgctgctccgaggggtggaagcccgggggccagccggcgctcggctggggctgcgggggcggcgacggcgggagcggcagtggcggcggcggcgggtccggaggtggcggcaggtggccccgcgcgcggcggccggcccggccgggggcgggcgggaaggtggcgcctcgggcgggggccggtccctgcaccaggtgacctgttccg

SEQ ID NO: 6750 - DNA, 385 bp, Homo sapiens
  source 1..385: mol_type = other DNA
aaaggcatggaggcccaaggaatctgtgtctcagctgcccagtatccctgggcaggtcatagtcaggcacaggtatctgttctcggtggcccccacccacggaagcgccccgtggccccatggatgggaccggatgctggctctctgccttggccaaggcatcccagcacagggaaacgttcctcctaggctagcgcagctccggtttaatcccccagcaggccctctcgggccagagattagccgcgcagcggagccgcgggagagcatctggcgcacggcggacagtcgctaatccggcccgcacagcacggaatcccggggaaggcggagggcggggtccgaggccccgcctgtgaccccacccctttcccccggaagtccg

SEQ ID NO: 6751 - DNA, 448 bp, Homo sapiens
  source 1..448: mol_type = other DNA
tgcgtccccaaggccgaggatgtgtcctggttttttaaaaagctgtattactgtattgacctaattaattcatttttttctcagtccaaagcagtggtggcggtggcggcggcaccacacaaaacaacgtgccgcgaaccagccggcagggtggggcgcagcccggctgcaaacatgccagcaaggaggcagtcccaagaggttggcggcctgggagccgggcagctgcgcggcacaactccagggggcacactcgccctgcgccctgcgggaatggcgcctgcacgggcgggaactggtctgtgcgtgcgccggggcccagcgacccgggcggggggtggcggcggccaaggggcgggacccgggtcggtgcccacctgcgtgggcgcccgctgctccgaggggtggaagcccgggggccagccggcgctcggctggggctgcgggg

SEQ ID NO: 6752 - DNA, 477 bp, Homo sapiens
  source 1..477: mol_type = other DNA
tcactgatgcattcaatgttactttaccaagtgcttatcattgtagaactgtgcccagcacagctctaggcacttcacatgtattgatctatttaatcttcacaagaatcctaggaaagaggtggcatattatcccctgaccacgatgtcttaggcagtcaggctccgagcacatgtccaggtggacctagactgtattctagttcacatccctgagtctctggtgacatggtacatgacatcaccgtacctcaactggtgaaggcctcacctaggatttggggtattaagtattttaactcatcagaaataacatctgaggtcaaaattagcctaaagcagctgtaacatcatttatttcctttagtaaaaatcgaaaaagaagaagcaataaatattaatttatgttggtctttacagataccacaaaaaaaaaaaaagacttgtgtctgcattttttcccttagagagagagaa

SEQ ID NO: 6753 - DNA, 297 bp, Homo sapiens
  source 1..297: mol_type = other DNA
taagccgagatcgcgccactgcactctagcctaggcgacagagcaagacagtctgtcagctcccggaggacaggaaacctccccgggagatcggcctggggctcctcctgccctagagccttgtgcgagacgcgggtctcctcccccgccccgcctccgcggcaagccgaccccgcccgcgcccgccgcccgccgcccgcctcccgggcacgcgctgcacgaacggcgcccggagctggtctaggcaaacacctgcgaaagcttaggccgaggtttaggtcccacggtacatgcgca

SEQ ID NO: 6754 - DNA, 377 bp, Homo sapiens
  source 1..377: mol_type = other DNA
gaggagggggcgggattcgggcccttcaccctgctgtcccggtggggccaggtttgcccgggggcttccgggatcaggccgcctgaagcgcgattcgggcagccggcagcgtcctcggctgtgccaggccctcgggtggcccggttccacacacctgggctcacacacggtggtggctgcgatggggtcttagagaggccatgcagcacgcgagcaattccaaggcagttttcccttctggagagaacagagctcaactgcaaaagttttccgcttgaggagctctctctggcttggaaaacacccattgaggaggtgtttcatctaggcctgtcggagcgctccccatggaccacacggagggctcgcccgcggag

SEQ ID NO: 6755 - DNA, 363 bp, Homo sapiens
  source 1..363: mol_type = other DNA
ggccctcgggtggcccgacacacctgggctcacacacggtggtggctgcgatggggtcttagagaggccatgcagcacgcgagcaattccaaggcagttttcccttctggagagaacagagctcaactgcaaaagttttccgcttgaggagctctctctggcttggaaaacacccattgaggaggtgtttcatctaggcctgtcggagcgctccccatggaccacacggagggctcgcccgcggaggagccgcctgcgcatgctccatcgcctgggtaggtttccagggaaggcagcgagcaggatcccctactctgcgggcggcgcgaggcgtctggctcttcgcggcggcggcgaggggaa

SEQ ID NO: 6756 - DNA, 503 bp, Homo sapiens
  source 1..503: mol_type = other DNA
agtggaacagcttgtgtaaagctttgccttatcagtcatcttaaagtaatttaaattgctttatgacagtaaatgaatatatttattgatcagttatcagtttcttgtagctacatgatgccacacttgtggtaaaagcagtgtgaattcttagtagatttaaaatgtgatacatacacttcttactataccatttctaaaaatgaaatattttttatgtttttatgtaagaaacttgatgggttcatttttatgaatgccactatagaagtaatctttagaaactggagctgttttcagtttaatgacgtccatggaattaaccggattcattaagaaggatcctcttttaagtaatttttattccctgagaagaaaattgaagaatgtggggttttactagaaagatctcgataaagcaaactgtcactctattcctcattcatatgagggttcacattaaaaatgacagtgttacacagggtacataccaacacttaagg

SEQ ID NO: 6757 - DNA, 447 bp, Homo sapiens
  source 1..447: mol_type = other DNA
gctcaggagcttgagaccaaaatcagctgggcttagtggtggagcaaggctgcagtgagccatgatcgcgccactccactgcagcctggggaacagagcaagactacctgaaataattctgctcattatttgctgacatgctatgcctcaatgaagatgtgctgaatgcaaggcttcatgaatgagtcttttgtaataaggacccaggtacctatgttcaaaagtgcctcaatcctagttaacagaaacaacactgtgtttagtagcaaaaggcactaattgcttttctataaggaggtagaacacagtccctcctgtaggtgtgtgtgtccgtgcatatgtacacatgtgtgtaaaaactgagaatggttaacgggtagccaggctgtctgtactcagggccctaagactggccctgccttttccacaacaggagtacaaatgctg

SEQ ID NO: 6758 - DNA, 518 bp, Homo sapiens
  source 1..518: mol_type = other DNA
tgctttgcttaaaatatgcatatacacatttgaactcaattttgattatttttgtcaataatttaagtcagttacttttagttctgctaaaaatcttttgtgcatttccttgaaggcaagaaccatattttattaaacctttgtgcccacacagttccttttatgtaaatgttcaataagttgaaagctgaatgaattatgaataaatgcttgaatgaatgaatacttggacaatgtcttattcatccttgaattgctaatgctttgcagaaaacctacaaataatgcctgtctcgtaacacgttggtagtgtcagagcctaacaaaatgatcctttatatagtaaaacgcacaatgtgcatcagaggcgctgtggctctgaaagaatgagctttcttgcctttcaaccatagacaaggcaggaacaacggtgtgaaagcgtcctccccgccccggtctttttccgccggcggaacgcagatgctgtggccttcaggcgctgaggggagttgcctggt

SEQ ID NO: 6759 - DNA, 409 bp, Homo sapiens
  source 1..409: mol_type = other DNA
tactactttccaaaatgggtatactaatttacatttccactaacagtataccagatattcaattgttacagttatcatgtgatcaataatattcatgtaacacctcaaattttaatctttagcctcggcggcttttaaaaaactatgttagttaaatctagagtttttaactccctatcctggatgcaagacacttaaaaagacttccttcctctgctcccagagaaagcagcaataaatttattaaacaatttgactttagaggtgtttccaaagttctcagcgatacctaacagcgtttccaccgaaggcagctctctgaggggcaagcgaaccaggctggaccaccctgctgggtctgtcccgacattccagggccacgcagggggcgaggcgccggaattcccca

SEQ ID NO: 6760 - DNA, 468 bp, Homo sapiens
  source 1..468: mol_type = other DNA
aacaattttgtgcccctgggagaaagaatattccagggcttttaatttatagtgacagtacattcaacacttccttttaaatttgaagggaggtggccttaaaaatatggtttggatgagaaagattccggttctttatttattcaaaccaattagaccaggtctgaacaggatttacaacagagagcagatcttgggtgcacaagagctttgcttcatacctcagaggctaaagtaaattctcttaaataggccttttcactgctaaatctcgctcatttcccatgaattagctgtgggatattgtaaatgtgtaaaacggttagagcaatgcctggtacactcacacatagcacgcgctttgtgaaatgtttgtccccctcgcggtggtaccgtgaatgagggagaggtacacgtcccccttcttcccggtactaccgtccgtctaggaacgcctccggggcgggg

SEQ ID NO: 6761 - DNA, 435 bp, Homo sapiens
  source 1..435: mol_type = other DNA
aacagagagcagatcttgggtgcacaagagctttgcttcatacctcagaggctaaagtaaattctcttaaataggccttttcactgctaaatctcgctcatttcccatgaattagctgtgggatattgtaaatgtgtaaaacggttagagcaatgcctggtacactcacacatagcacgcgctttgtgaaatgtttgtccccctcgcggtggtaccgtgaatgagggagaggtacacgtcccccttcttcccggtactaccgtccgtctaggaacgcctccggggcggggctgggatgccgcgcacgcgcagtacagcagcgccgcgcctgcgccgtggagagcctgaggcgtcccggcggagcgtggtactacgaccagcgcgggccggagggggcggggggatgcgccgcggcggcggcggcgcgggagctgg

SEQ ID NO: 6762 - DNA, 636 bp, Homo sapiens
  source 1..636: mol_type = other DNA
tccccctcgcggtggtaccgtgaatgagggagaggtacacgtcccccttcttcccggtactaccgtccgtctaggaacgcctccggggcggggctgggatgccgcgcacgcgcagtacagcagcgccgcgcctgcgccgtggagagcctgaggcgtcccggcggagcgtggtactacgaccagcgcgggccggagggggcggggggatgcgccgcggcggcggcggcgcgggagctggggttgttggcggcgccagagcagcggatcccggtctcgccgcagcagcagcgcgggtgtcgtgcaccgtttttttttttttttttaaataaccggaaccaatgaacgcagccgggatcagagctccggaggccgccggtgccgatgggaccaggctggcgcccggcgggagcccgtgtctgaggcggcgggggcggccggaggagtcgccggcggcggtggtggcgcctcgcggagccggcgagctgcaggcggccggggcgccgctgcgctttcacccggctcgcctcgactcctggcccagcgtggggctggctgctgcggcggcggcgctgggctgcgttgctggtgctcgggctgctggtagccggagcggcggacggatgcgagcttgtgccc

SEQ ID NO: 6763 - DNA, 444 bp, Homo sapiens
  source 1..444: mol_type = other DNA
ttacctcccggtactcgctcacactttgagcggcccctggagctgaggctgggctttcccgagcgcggcggctggctgacgctccctcccagtttcggcggctcggctgctactgccgccgccgctgcagcagcagcgtcagggacaagcctgatccgtgagcagcagcaaccaccactttgggcaacttgcgggtttcctgctcgcgggtagcgaacgggagattcccactagcggttcagtgtctccgagccgctgcagcccgaggggcggcgggagcgcccgcaccagactcttgcggaattcaccagccgtgccagggcacttaaagcctttggcttttcttcggaaatccagacagaaggacgcccggccgtgcgctttcgccggctaaccctttgaactgcaaagggatcaagttcagcttgagggagagagaggctg

SEQ ID NO: 6764 - DNA, 403 bp, Homo sapiens
  source 1..403: mol_type = other DNA
aaggatctttctccagctctctgggcgctcgtaggttccccaggaccccgataattacctcccggtactcgctcacactttgagcggcccctggagctgaggctgggctttcccgagcgcggcggctggctgacgctccctcccagtttcggcggctcggctgctactgccgccgccgctgcagcagcagcgtcagggacaagcctgatccgtgagcagcagcaaccaccactttgggcaacttgcgggtttcctgctcgcgggtagcgaacgggagattcccactagcggttcagtgtctccgagccgctgcagcccgaggggcggcgggagcgcccgcaccagactcttgcggaattcaccagccgtgccagggcacttaaagcctttggcttttcttcgg

SEQ ID NO: 6765 - DNA, 685 bp, Homo sapiens
  source 1..685: mol_type = other DNA
atatttgtttaaatgagttctttgccataaagcaacacattagtaggcatttagctatatagtttactaaatggttttcatttcattacaatatctgtaaactgtcatagattgttgtttgaaaatcaatatactttttccaaattctggaaagttaatctaccctggggagtacaaaattctttaaagaattttttatatgtatatatcagagatgaatcactccagagcttatatttttacctgtgaacatattaacctttctccagtcatatgtataattatttagaaggcaagaatatatagtcaatgatttgagaacaaatgaatgattttcagtaaagatgttgaaatgtctgagtaaaaagattatatttctttggaattcaattagataaaatagtaacatttttcaagaggtcataaagttaggctaatttttcggatatataagatgaaattatttttacactgaaatcatatttggtgtaaatgtatagttacttagattacagtgcctagcaatgtagacaagtgtactattttagtatagagaaattgagctgagacctcaaagctcagttcagtttcataatcacaaatggaattctcatggaaatcagatcatttgatgtggatatgtgggaaagaaaccaagtggctttatgacatagtataccacata

SEQ ID NO: 6766 - DNA, 463 bp, Homo sapiens
  source 1..463: mol_type = other DNA
cccagctaccgcaaaatatttggaggtccacaagggttctttgggatcccctattttcccaactcaaaggggaaatgcccctctgggagtaatactaataggtcctgggcatctccgtcccgggagctgtcgctctgggctccagggcgcgcccccgcagcttccccagcggggtctgacgcctccgggccgaggtgcgccaggtggcgagggtgccaggcgcggccaagtcgcggcggtctgagtcagtcactgcggaaccagggaggccggctgggccgcccccgccgttgagctccggcttcccccgcgcggggcgcctgctccccgcccccgcgggcggagaggaagcggcggccgaggcgaggcgcgggagcacctgagcaaggcgcgggcgccgggctcggcgtttccggagctgagcgcgggtccgcggcccgcgctccccgcctccaggtgcggc

SEQ ID NO: 6767 - DNA, 328 bp, Homo sapiens
  source 1..328: mol_type = other DNA
cccagctaccgcaaaatatttggaggtccacaagggttctttgggatcccctattttcccaactcaaaggggaaatgcccctctgggagtaatactaataggtcctgggcatctccgtcccgggagctgtcgctctgggctccagggcgcgcccccgcagcttccccagcggggtctgacgcctccgggccgaggtgcgccaggtggcgagggtgccaggcgcggccaagtcgcggcggtctgagtcagtcactgcggaaccagggaggccggctgggccgcccccgccgttgagctccggcttcccccgcgcggggcgcctgctccc

SEQ ID NO: 6768 - DNA, 566 bp, Homo sapiens
  source 1..566: mol_type = other DNA
cggcttccacttgaaaagctttcattttgttccagtacccgaggaggagagagggaggcagactgttctggtttcctcctgcattgcatagccccatatatgatgcgcttatctgaattttaattacatatggtaaagaatcctttagagaaagctactcttctttactttctttcagtgatctcagtctctgcagatttaccacataagaagatgctaattatcagtagaggaatctttttaaactcttggttataaaaatactatacatatacacattaattagagtgaattgtcaagcatgtgtaaacatatccagcttcaacatttattaattcttacatatttagaagcaaaatcagacatcacattatttcattcataaatatttttaagtttacaggaatcctgccagcaatattgttcatacagtttacctttgattaataaacttcttaaacttgaaaagtatttggtacttccacagtatattgaatttgtaaaacttacacagagagttggatcatgatgtattctgtacacagtcctagtaacttttcactagt

SEQ ID NO: 6769 - DNA, 547 bp, Homo sapiens
  source 1..547: mol_type = other DNA
tcccagaatctcaggagcagctggaggactccggactctagttgaggggccagtgggaagaaaaagtttagccttctccatttctttataatgaatgaactatactagagatagtcttgcatactagattagaccagacacttttataatataaattttcttgtcattgacacagatggacaataaaagaaaaacttcagttctttatatttcattgttaataaaacatttacccatctaataattattcaaatgttttgctttttatttagaagttcactctgtagattataaagataatctaataaattaagttgctttcttttattaaaaaaattgctttgtaaaaactgtcttcacccagagaataaaaggagtgttttgtttttttttttttttttggagatgaatgaaaaacaaaaatctcctttttttagtgtcctagaaactgtttttaaaaagccaagcattcatggctgaatgaaggcatgagcagtagttcctttataagtgaaagaaagaacagttcaatcagtttccttaaaat

SEQ ID NO: 6770 - DNA, 197 bp, Homo sapiens
  source 1..197: mol_type = other DNA
actggaggtgtctctagtaaacatcagagtctccccagggaaacaggcttgtgggaagggaaagataaatacatttcaccttttaatgaagagaattcccagctaccgcaaaatatttggaggtccacaagggttctttgggatcccctattttcccaactcaaaggggaaatgcccctctgggagtaatactaata

SEQ ID NO: 6771 - DNA, 751 bp, Homo sapiens
  source 1..751: mol_type = other DNA
catgcactattacaaagtctgtgttttttatttcataaatcaagtgtcaaggataataaatagctagtgaataaatatttataattctataaagaccactcactaatcagtatctctgatgtaatggataagagttcagaaaatcacattatctaaatcaggtaagtgatagattgaggagctatatgtataaatattaatatatcctgtcattcctgaattttcttttatctattgacttgaaattttgaagacagttattaatttcattttctttaatgtacagaaaataaggtgcatatcttatatgtacatgctattgttataaacatcactgcatatagaaaacaacaagttttgattaatcaactggttgactaaaatacagagtaaaaaatacttctgttttagagacttggagtttcaagacaatctgaatgttttgaattgataaatgtgtatactgaagaaatacatttttataattgtccttactaaggggtaattgtcttagtattattgctatgaataaagaattaaagatttagagcttatcaataccttacttttaaatttttttcacctgaagaaaaaaataacttacaaataagaactttaattgtgcatttaatgagcaatagaaaaattttcacttaaccatgaaaaaaattttttttatatattttagttttatttttgagatctcgctctgtccaggctggagtgcagaggcgcgatctcggctcactgc

SEQ ID NO: 6772 - DNA, 430 bp, Homo sapiens
  source 1..430: mol_type = other DNA
attaaagtagatacattgaaaacccatattttattctcttgctggatgagttgaaaagaagagagaagagggtaaaggtggcgcagttgcttaacactttttttggcaagctcagcatttgctttggagcacaggtgaaaagaatgtccagtccttaagcagagtcagttctccaattggatgcagtcttgtggccaatgccctcaggagttcattgaactccccctggggcctttagggccaagttcagcgcaacattggagtaatgctcagaggccatgcgcccgggactgccaccccggccccggggatgtcggacatcgtagggttcgagccctagccccgccggcgtgcaggtaaagggttacgcgtgtcgggaaggctcacccgcagcccgggccacgtgacgcgcgggcccaatgacagcgct

SEQ ID NO: 6773 - DNA, 370 bp, Homo sapiens
  source 1..370: mol_type = other DNA
ctaatagtcacctcgcagagctgatgtgaggataaacagaggaagaaatttaagttatcttttctgctaatttctcactccagtgctggcacgcccgcctagtcccagcgaccgagggaggttgcacccgggcgaccctccccccgccccgggctcccgcgtaatcccggcccggcttggaaaggaagcgggcctggcaagtagaggcacggccgggccacggtgggcagggcgcaagggcggggctatagcctaactgcgccgccaaggcttccatggcctagctacgccgctgaggctgctgcggggtcgcttaggtggagcccggggcgcgcgggggcggggcaatggcggggcggggttcgccgct

SEQ ID NO: 6774 - DNA, 312 bp, Homo sapiens
  source 1..312: mol_type = other DNA
ggtggttaaaataataataataatattaacccctgattgtaagcccttaaaatggctaggaatttgagctcggctcttaagacgcgagtctgccgacgctccgttagagatacaattgatctggagttcagaatacacgtgtagcatctgacatgtgcctggcgcgcagcatgcatcaggcaaacggcaaggaggcgtgcccgccgcggcgcgcgtcactttcccccggaccgactggctccgccgcggctctccccgcccccgcctccgcctccacgtcttggggccgggccggaaggcagatctcaccgc

SEQ ID NO: 6775 - DNA, 634 bp, Homo sapiens
  source 1..634: mol_type = other DNA
tccccagacctgatcggggcatgcacactggggttcctgcgcgtgtgccgggctcgcggggcaggaaaaagcgcctaatccaggctctgcgacctcttgccatcctccaaggacggggagaaggggtaaggcgggggagagcaaggtggcttggtcgcccccggcccccgccccccaaccacgtctgggcaggcagtgccacctgctgagagccactcaggccgagcaagcggcgggcagtgcgggtgtgcgactgtacatcccgccacgagggcctgcatcacgcgcggggccccgcgcccccggctccccagggaaacgctgtgcccagatcctgcgcaggggtctggatggggcggcggcccgagtacttcccccctattccccccacagacactggctgaggatggcccgcgggcgggaggccgcggcggacccgcagtgcagcagctgttgctcgcgtgtgactcgcccgtccgggccgtgctgcccaggcacagtcacacggcgcagtggggaggaggaggacaccgagtccccctcccagctccccggggaccgagtggggagatcccggtcttcccctcgcctccagcgcgctcgcccaggctgggaggaggaaaccagagccgcg

SEQ ID NO: 6776 - DNA, 767 bp, Homo sapiens
  source 1..767: mol_type = other DNA
agcggcaggcctggcccgtgggagttttgccccaggggcccacgaggtggggggcgccgcctgggccgccggccagggggacccgtcgccccagggcacaacgcctacagggtgtcccctgaccccggcgactcggggccagggaggctcggcgcgccccagcggccgctcttcccctcctcgctcctgcaccgcggccgcctcggctcggctgcagtgagctgagtgcgctcagccgaggaggggccgcgccgcgccgcgccggccgcggggcccagcccttcccgccgcgcccggggccgcccttcccgctggagccggctgatcgatggccctggcagcccgcgccccccgcctcggctcgcccgcgagcccggctgtgtgttttggaagcagcgcagcgggccgcagccgtgtgacgcccggagcgggcagcgccgcccttccttccccccgggctcgggcggcggcgcggcggctgggccgggcgggagggctggcggggcgcggactccgcgcgggcggggacgcgggcggggggcggaggccgcgccgcgcacgcccagccccacggccgcgccgcgcctcgtgggacaggttgggccggcggggcggcgcccggctccgggcaggccgtccccgggtgactgggcggggcggggcgtgcgcgagtgactcggccgacccctccggcggctgcctccacccaagtgggtggggacccgcccagcccgggcggccgcggcggctccctctcccctcacccc

SEQ ID NO: 6777 - DNA, 437 bp, Homo sapiens
  source 1..437: mol_type = other DNA
ttaagtaccaacttaaatagatatttgtgcacgtccattgatggatgaatgaatgaacaaaatgtgggacgtacatacaacaaaatagtattcattaaaaaaggaaggaaagattctattattctatgtaataataatagaaatgatatggatgaaccttaaagacattataaattattttttaatggcatagaatttcagtttgtgtgaatgtacttaattaatgccactaaattgtacatttaaaaatgcttaggctcacaggagttcaagaccctcttgcgggctttagcgcaagaggtcaaggctgcagtgagcagtgatcacaccactgcactccagcctgtgataactcctatgttatgtgtatttgaccacaatttaaaaaagtgctaagattataatgaatatatataacataagctttacagaaaacc

SEQ ID NO: 6778 - DNA, 501 bp, Homo sapiens
  source 1..501: mol_type = other DNA
tgtcatccccacatccggttttgatgtcattactggaaaaggacatgctgtcaacaaaccccaggatttttataaaccctatgtgaaaaacacgctaagaatctcttttcttcttagcatatttttcacttagggtttacaaaaatatgttttgaagaaagcttgaaaagatcagtggaaaaaaattcagcaccaaattttctctgaaaatcaacttgtcaaaaaagacgtgattaacatccatccctccctctttccacttttaatagtggatggatgaaaaggagccaattatgatctgtggattattaacattacctcatttacttcatcagtgtagacaatagtaaactgactgtagtatagaaacgtgattctattttaatacctacatatgaataagagaaaataagtttattcttaactatgtaatgtaattccagtgctttttgttttgttttgttttcaacaccaaatgtggttaacagtgaaataaattca

SEQ ID NO: 6779 - DNA, 495 bp, Homo sapiens
  source 1..495: mol_type = other DNA
tcatgtcatccccacatccggttttgatgtcattactggaaaaggacatgctgtcaacaaaccccaggatttttataaaccctatgtgaaaaacacgctaagaatctcttttcttcttagcatatttttcacttagggtttacaaaaatatgttttgaagaaagcttgaaaagatcagtggaaaaaaattcagcaccaaattttctctgaaaatcaacttgtcaaaaaagacgtgattaacatccatccctccctctttccacttttaatagtggatggatgaaaaggagccaattatgatctgtggattattaacattacctcatttacttcatcagtgtagacaatagtaaactgactgtagtatagaaacgtgattctattttaatacctacatatgaataagagaaaataagtttattcttaactatgtaatgtaattccagtgctttttgttttgttttgttttcaacaccaaatgtggttaacagtgaa

SEQ ID NO: 6780 - DNA, 728 bp, Homo sapiens
  source 1..728: mol_type = other DNA
gagtaaggatgaatcacaagaagccagcctttctcttcctcggagatgtccaactttgtcattagccaaattgtaagttttttttttaataaagatgaggtgagataaattatagaatgattgtttcactcatgccttctgtcctttgcagaactcagttaagcaatttactgtccaccagaagtctctgtttaaccagagacttctggtaatcagcctttgttgatgtcattctgaaattcttctaaatggtctttagaaaattgatttttaaattagtcttgcaggatttcagtgttatttattattcctaaattaaaatctaaaccatttaataacaccaaatgttgatcagaatgtgggtatgattgctcgtacatatggctaaatatgtagtcataaatatgtatcaaccagtaaactttccttagaagttgatttttaaaaaaaaacccaaattgtggaactatacttattttattttaaactatctcatccagctaaaataatgctcaaaattgcttgataagggaaactgcaattattcttgaaatgttaaatatggtgataatagaaaacaggctgtttaaaataactttccactctgacactcttacagagaaatattaccttagaaaaatatttttcttcacattgaattgtttgtaagcacacgaattagaatgtctgggacctcagatggcaccaatctgtcaactttaagaact

SEQ ID NO: 6781 - DNA, 195 bp, Homo sapiens
  source 1..195: mol_type = other DNA
tgagccagagtctcactctgttgcccaggctgaagctacccagcgacagggtttatcctcaaaaaaactatatgatagtactcccattttgtggatgaataaatggaggttaagggacttgtcccaagcctcacagtaagtacaagaatagtctccttggtctgttttcttaagactttagtctgatgagtaagg

SEQ ID NO: 6782 - DNA, 706 bp, Homo sapiens
  source 1..706: mol_type = other DNA
gctattttttctttaactttgaatttataattcttcaaaaagaagaaggatcgctcagaaagaatcactatttttaaattgtatttcctccgacttttatagaaaatacaaaattgtttacaaaactagttaatactataaagttcatattaagccatatttgaggaaggccttcatatgtggccttccctcgtctgaagttactgtagcttacttcaccaatcttactgggggacattgagattgtctccgcatccttgtacatacatatttgcccatttgactgcctacttaggacaaattcacaaatgtggaattcctaggagctaatacatcggagttttaacccacagctccaaactggccttctggagtttgtttgttttaaatctatcacactcccaccgtcaaactttagctgaatttgagcgacctcttccccggcggggggttttccaagcccttttaaggaaaggaaagggatctggcgaaccccgagacccacccgccctgggctggagaggcggcgcgctctggctttccgcgctggtccaggagactcgcccagcgcgggcccggccctcgcagcgtgggggtggccgggcgtccccgcggcgctcctcgtggggcggggcgcaggcggggcggggccccctctccagccgcccgccctccggccgcgtccccgccggccctgcagacgtgg

SEQ ID NO: 6783 - DNA, 589 bp, Homo sapiens
  source 1..589: mol_type = other DNA
gagataaatgatgcctttattctcctttggcacctttcagaactgttaaaaatggcatctttaaaagagaaaaataagattgtaatctttaacaatctctttattgcccacaatgatcctaatttttttattttatgatatttgatattttaatacgtatactgtctgttatatatattaatatatcatattatatattaggcaatgtattaataaatcattctgtaaatattcattttagcacctatgatatgtgaggtattgtgttagatactctaaagagtgagcagaagaaatactgtctctgtccctcagtagcttccagccaggtatcctagggaaccttgggaaatttctccagagtttattcacacaaagggcacctgggtaccattagggttgcaatgctaagcataacaatatcgaagtcataaatatgatgttgtcccaggtctcttaggcctgagaaaggtcatgcctttgttcagctgacaagcgaggtccctccctgacctggtgtccctgctggagctgccaaggatgcatctgctgcctcactgccatgctcacgaatggaagacattcatct

SEQ ID NO: 6784 - DNA, 478 bp, Homo sapiens
  source 1..478: mol_type = other DNA
gggaaaaatgtttgcaaaacatatgcaaagatttcatattcccaatagagaaagtcttattgctgaagaaattcaaattgccagcaaatattaaaaatctttagaattactgtcaaccaaacaaatgcaaattaaacaatacttttttttccttttaaattggcaatggttaaaatgttttattttctgaacaccagaacaatcatttaataagtaaatgaatgagtcatgtgcatgcaacctagacatgactgacattcagctggagtgcagtggcctgtcatggctcactgcagtctccacacctagctatattaaaattatttttgtagagaggagggcttgctctattgaccagtctggacattacaatacctttcttgcttagaaagacaaataaatggaagtgactcaaaagtgaagtctcagttcaagacctttttttttttttaagtcttactcaaaaggaagtgagtat

SEQ ID NO: 6785 - DNA, 607 bp, Homo sapiens
  source 1..607: mol_type = other DNA
aaattctgcattgatagatcacactttaatattgcagcattttaatgtttcttattttaccttatcaaatattttgtatttggttcaatagctagatttaattattttgggggttaggaaccaagatatatatatctctgtgtccctgacaatgcctagtagattgcattgttcacaataactactcagtatttttgagttttcaaaccattgtttgttttgctaacaacagagggcactttcctaagtaatgtcatagaaatttggatgttacactaactggcagtggcccatttctacttatagagaaatcctggcctcagtttatttgaaaaagagtatttatagttttcaaacccaggatcttactgtattaattagatccatttgttttctgaagagaagatagaggtgaaggcaatagtctggagccccaccttaactcatctaattttacaaatgcttttttaaaaacttgttttgtggtatttcacttagggacttagtttagaaatagaaacattttagttttaaagtgattatttttaagtacaaagggaaatgctatagaatacatttattgtttcagcaatgaaagagttaatat

SEQ ID NO: 6786 - DNA, 545 bp, Homo sapiens
  source 1..545: mol_type = other DNA
ttaatatgtaaagtactttagtgttttcataaggcgccaaataaattagttgaatgaataaagaacctactttttctgattcttattattccaccactggaaaacaatgattatggtcacagtgctgaggatcataatttccctttaagctctgagacaacagaggccgcctctctcacggccctgcagaggttccccggctcgggccgtccccacgccgcgcaggagagcagaaacccccggcggggcagtggcggccgcggcctctccgggcgcgcgacccggcgagggggcggggcctggcgggagggggcggggcgggcagccgactgcgccgcgccgggactgacgggctaaccggtcgcccgccccctccggggccacccggggactctgaccccccggcctggcgccgcctgacggagcgggagtggctcgctccgggccggccggcgccggggatgaggctgcccggacagggtctaggggcgcgcgaggggccgagcatcccactcagctcgccggccccggcccccgtcctcccg

SEQ ID NO: 6787 - DNA, 457 bp, Homo sapiens
  source 1..457: mol_type = other DNA
tttcctaagtaatgtcatagaaatttggatgttacactaactggcagtggcccatttctacttatagagaaatcctggcctcagtttatttgaaaaagagtatttatagttttcaaacccaggatcttactgtattaattagatccatttgttttctgaagagaagatagaggtgaaggcaatagtctggagccccaccttaactcatctaattttacaaatgcttttttaaaaacttgttttgtggtatttcacttagggacttagtttagaaatagaaacattttagttttaaagtgattatttttaagtacaaagggaaatgctatagaatacatttattgtttcagcaatgaaagagttaatatttctttaaaatctgatatattggcataaaagtaattgtagatatatatatgaatgtgatttattttcctttacatattttagtttgatg

SEQ ID NO: 6788 - DNA, 320 bp, Homo sapiens
  source 1..320: mol_type = other DNA
gcgatccaagaaccctctcttggggtctggatccggacacttaagaatttgcaaacattcattattagttatttcaaatcattgattaactttctctaaggagctcatttttcctgttagctagcacattttgttgacattgaaaaaaaaaaaagattttggtgacatcttagtcatcgcggtcgccgaggctcagcaaggcctcgcgacgcccaacttaccctcgcagagggcggtgcgcttggcccggcccctcgaggcaccgcctttcaattagcactcgctgattggtctcctgggtgacgggaacgcggtagcct

SEQ ID NO: 6789 - DNA, 391 bp, Homo sapiens
  source 1..391: mol_type = other DNA
caggctcagcctgctagagccaaagctggagatactgctttctccaaatgtttcattgtattccgtgattcaattgctaatctattcatatacaactgaggctaaagggcagtagctcgtcccgagtagctgggatcaggtggtctcgaactcctgacctcaggtgacccacccgcctcggcctcccaaagtattacagaatagatatttatacataatatgtaaaacgcacagctaaaacatttatcttactaaagttggtagtaaaaacttttcaaagttactatggtacttgggtaccccgcctgccaaggaaactcagcggcccgcctgccctcggggcagcacctgggcaggcgtcgcacctcccgcctctgggcgggacggaagc

SEQ ID NO: 6790 - DNA, 304 bp, Homo sapiens
  source 1..304: mol_type = other DNA
tttaaaaaatgtaatcatgccactgcactccagagtcagactgtctcaaaataataataataataataataataataataataataataataataataatgtatttttcttcccaccatcccatggaatgtctccattgtggcagtggcagtgacagtagcaacagcagttgtaccttctaagagaaaaacaaaacacttttttgaatgaaatacttggagtgatttcgctgaaggccaacagataatgttctctttgtgattacattccatattctgaattgtaaatcatttggactctaaat

SEQ ID NO: 6791 - DNA, 565 bp, Homo sapiens
  source 1..565: mol_type = other DNA
gtctgatacatctgcttaccagtgtaacacccttgatcatgttctgtacatgactacaaaacagaacaaaaaatgtattctttccagaaactttaagattctagaattaacccttatcaaagcacatggttttcaactggaaaaatataaacccaacagttaagctttgtagaagttgcaacaaacttcccttctggaaaattaaatcatcaggtttatgtgatttttacaaagcaatcactaggaaacattaagacgtgtcactgatgaccactatttggtttttcaatttcactgaacaggctggtattctggacagcaacatttaaagctgaagcactgaaccttaattcgaaaattgttaaagcaaccaaatgtgatgctgttataaaccaccagaagaaaaaccctcaccctcttttttttctttcgcagggttcctctggggcccttcacgataactaaaagacatcaagtctcataccattttctggaatgtcgacagtctgattgctgagaatagtcttcattctgaaacaacactgggggtgaggccgacgcaagg

SEQ ID NO: 6792 - DNA, 332 bp, Homo sapiens
  source 1..332: mol_type = other DNA
cgggttcaagcgattctcctgcctcagcctggcgagtagctgggactatgtttgaacgtggcagtcaagaacataacgtgtgtgtctcacacacagtaagagtccaagatagctatgtggggtgctcactgcagtgctccataaatatagggccagagactctatatcaagtagtaaatgttcagtaaatgcactggcgcgctctgaagggataggatccccccgttcgccccgccgctcacccggggccccagggtgcgggctgcatccccgcagagctgctccctgctttagccttacgtgcgtcgcgcactcatgacgcaataccaagt

SEQ ID NO: 6793 - DNA, 496 bp, Homo sapiens
  source 1..496: mol_type = other DNA
tgcggtgagctgtgatgacaccactgcactccagcctaggctcaagactcttattaaaaattaattaattaattaaaaaattagagattagagaattttagttaagttaaataaataaaataaaaaataaaattagagattagaggattttagttaagttaaatgtattaaattgaaaagtatttcatttttccatccacaccaatacatttttgcaattttcctaaaataggtaacatttattaagattgttcttagatgcgttattactattggtatgtaggaatgctatatacttgtatatgttatttttcttgatatatgagattataaaattaccacacaaaaagctatataccttattcaataatgttcaaaacattcagaaaagatttgggaaataatgtgattttaatccagtgtttacatatgtgttagttacacattcaaacttcttttccataatgagaaacagagctttacaatcacaagcttt

SEQ ID NO: 6794 - DNA, 463 bp, Homo sapiens
  source 1..463: mol_type = other DNA
atttaaagctgaagcactgaaccttaattcgaaaattgttaaagcaaccaaatgtgatgctgttataaaccaccagaagaaaaaccctcaccctcttttttttctttcgcagggttcctctggggcccttcacgataactaaaagacatcaagtctcataccattttctggaatgtcgacagtctgattgctgagaatagtcttcattctgaaacaacactgggggtgaggccgacgcaagggacgggagaccgacagcgggccccagtgtgtcccagcctgcgggcggtgccatcccggcaagactgagtctggcgccgccaggctcatatggcgcttgccgagccgagagtgggagccgcgccgcagcctttccagcaaagaaagaacgtctgtcgtcattacgtacttggtattgcgtcatgagtgcgcgacgcacgtaaggctaaagcagggagcagct

SEQ ID NO: 6795 - DNA, 720 bp, Homo sapiens
  source 1..720: mol_type = other DNA
ctgatgtaatccttaatgagggaaataaaaggccatgattatgcctggctttttttcttatgaaatcccggattgggcctgaggagagcgccaggagggcgtgggggtcccgcctctctcgccagggaccagggagtggacactcactggtccagtcatgaggaactcagcatcctcctgacgggaggcgcctctttcccagaagcggtgggtcaggagtaaaccctgggttgccggcccggagggcgcggttgaccccggggcctcgaggttgtgggcgaggagtaatccgcccgccgagaccgacccgcagatccaggagaccgaaacccgagggcggcgctccagggtgctgaggagaccggaaaggcggccaggaccttccggtcgcctcggcccgcagccctaaagcctggcagacgcggagcgcacgcggcctttgcctcggccaggacagggcagcggggagaggaattcttgaccccgccaggtaggcgcgcaaagctcctacacctgcggcgcgcccccgtcccctggtccagcggacacgccacgcacgcagccccgcccagcgccgctcgcggtaggggcggagccgctgagctggccaaagcggatttgcccagctaggccaggggcggggcaggccctcccagccaggaccagccccagtctccccgcccctgagccgtgaaggaaatagggacctggccctgggcc

SEQ ID NO: 6796 - DNA, 329 bp, Homo sapiens
  source 1..329: mol_type = other DNA
ttatttagtttgagacaaagtctcactatcacccaggctggagtgcagtggcgcgatctcggctcactgcagtagctggctcctgaagtgctgggattacacaataacagccacatttgatgtatttttgtcgcgcccccacgcacagcgtgtcgtaggcgtccgaagccgcaggctcccgcccggcttcccgggacgcacagggcaggcgctgggcatgcgcatgctcggcaggcggggcagctggagtctccaggcgctgcaatctgttgcgccgccgcccgcgggagccggcagatccgggtcttgtggctaagagtgacgtgtca

SEQ ID NO: 6797 - DNA, 260 bp, Homo sapiens
  source 1..260: mol_type = other DNA
caatatagttctgcattttgccaaattgggaaatttccagggcccccaaaatttagcggtaagcaactcttattccagctctacaaccaaagcaactaagacttgggctggctggctgcctagccacagttatttagtttgagacaaagtctcactatcacccaggctggagtgcagtggcgcgatctcggctcactgcagtagctggctcctgaagtgctgggattacacaataacagccacatttgatgtatttttgt

SEQ ID NO: 6798 - DNA, 588 bp, Homo sapiens
  source 1..588: mol_type = other DNA
tttactcattcaatatttattgagtgcttctccaattttcactttaatatatgtgaattttcacatgcgtggtcccggaaccagcacgcccaccctacactctagggtgtgtgtgtgtgtgtgtgagagagagagagagagagagagagagattgtgtgtgtgtgtcaagctgttgcagaacaaaaacgactgcagtagattttctggggctacgaaaatgggccggaccgagatccgggagagcgttttcctgcgctagacacggcgtccgggtggtcagggcggcgttccagccgagtgcggcgtcggaaacccgttcggttgcgcccgaaccttcggtcagaggccagcgctggaagcccagaccacagcacccgggtttaaacaggagcggaggcgccgggaagggccgggggggccggctagggccggccagcttggaagccgcaccctcgcggccccagacgccggcagggcggagccacgcggccgcagccccagccgagacgcgagctcgtggctcgggcgtatgggggctccaacgggagcggctgcgccgcccggccgggtcaacgtcgtgcgcatgc

SEQ ID NO: 6799 - DNA, 710 bp, Homo sapiens
  source 1..710: mol_type = other DNA
atatttttatatttttattttatatgttatatttttatatgttttatgttcatatatatttttacgttaaaaaaacatatatttttatgttttttaatctttggagttggaaacctacgtttgattgtgaggcctggtggcccaaaccaattttcatgttttgcagctttcaaaatattaacttcagaaatctagctgtcagaagacccgagagtgagccgctcacgcttgaggaggaaatcagttcattttcaccgtgccctgcgtgccctcgcaaggccgcgggaacctgggctcgcttcccgccacccgggctgccctctccggtcgggtcctccgggaggcgccccgcgcggcaggtattggcgccaaccgggtggcggcgctgtccgccctgcgcgcggccgcctcgggcccgagggaggcggatgcacggccgggaggaaggggagggagcgaggagcgcgcgctgctctcgcgtgctctcgcgccgctcgcgtgaccggccggtgtgtgcgcgaggccccggctcccggggcacggacggccgggcgcgcgcctctgcgaggggcgtccgggtccgagtcggcggtccgggccggcgcgaggtgcgtgcgggcgggccgcgggggtcccggacggacacaagcgcacacactcccggaggagccttcgaggctgctcttcctcggccagacggagagcggcac

SEQ ID NO: 6800 - DNA, 633 bp, Homo sapiens
  source 1..633: mol_type = other DNA
aatataagtgtatgttcttgcgttaatttgtttcaattacatacattaaattgctcaaacaattaatgcttggtaggtttaaaacatttttaaaaaatgagctcttccttatttacaagaatcacccacccaattaataaatgcttatttctgggttcactctcagagatttttatatatttttatatttttattttatatgttatatttttatatgttttatgttcatatatatttttacgttaaaaaaacatatatttttatgttttttaatctttggagttggaaacctacgtttgattgtgaggcctggtggcccaaaccaattttcatgttttgcagctttcaaaatattaacttcagaaatctagctgtcagaagacccgagagtgagccgctcacgcttgaggaggaaatcagttcattttcaccgtgccctgcgtgccctcgcaaggccgcgggaacctgggctcgcttcccgccacccgggctgccctctccggtcgggtcctccgggaggcgccccgcgcggcaggtattggcgccaaccgggtggcggcgctgtccgccctgcgcgcggccgcctcgggcccgagggaggcggatgcacggccgggaggaaggggagggagc

SEQ ID NO: 6801 - DNA, 653 bp, Homo sapiens
  source 1..653: mol_type = other DNA
gcacgtctttgctttttcttcaagctcggggcaaaggccagcggctgcggttccaccggctaaggacgctggcagggccgatggggctgggcagcctccctccaccccgtggcagtcgccccgtctccccgtggggctccgaggccgcgcgcccggaagccccccgcgggagggccgcgcgcgagaaggcgggttcccgtgcccgccgcagcggccacggccctagtcaggcaatgccgaggccggtcgctcgcctcgccgtcgcagcctggaccccgcgcgcgtcagggctccgagggctagaaacagctgtggtttaccgcgccgcttattttggcaaaaattccgggcctgttgcctcctccagggaccccctggggaccacggcccgctctcgggcgagacttggcagccgaaccggccgggcagggcttgctctccaacgggagagcgggagcgggagaggtgggagcgcccgcgggctcaagtcccccgggccgccgcgccgaggcggagctcggggacgaagcagccgggcggtgggcggcgatccacctgggcgacgtggcagccattgccggcgcctcgagacccctccccacccggccgcccacccgccctctcgcggcgggcttctgcgcggctgctcttcc

SEQ ID NO: 6802 - DNA, 377 bp, Homo sapiens
  source 1..377: mol_type = other DNA
ttctcatccattagagtggcagcagtactttagaataatcagaggggtttaaaataatattgatgctcaattaaactcaaatctttgagtgtgggtaaaataaaaggcatggagttgactttatcctttgtgaccacatcacaaaagttcaatttgttgggttaggcgtttagccataacctaagtagttgcagatggtctctacacctggattgcccattaggacaaaacaagtaaacttgtgtttttaggcaaataccaggtgctcgtccatatgttctttgcaaaatatttgatagtttttaatgcagcaaagccccaagctgatggggggtaaccaagattaaacgcaaacccagcgccttattctgcctctg

SEQ ID NO: 6803 - DNA, 291 bp, Homo sapiens
  source 1..291: mol_type = other DNA
aattgacatttttttataggagtaaaattatatcacatatgagaaatgactgaaactttatatgaagtagcattcaaatgcaaagggtgtcatcattagcaatatcaccattggttattattctcatgctgatagctgatcaaagatgataattactgatatttagaaagtgctttcatacagttatctcagtagctctagagagagaaaatattattttccccagtcatatattcttggactcaggctgacgctagggaccctcaactgagagcaggcctggatctcagg

SEQ ID NO: 6804 - DNA, 196 bp, Homo sapiens
  source 1..196: mol_type = other DNA
ctctgggctgtcaggaaaggccacctcagcccctggcctgtcagcaatggctcagtgaccctcgagaataataacactgggttgtgtgatatgtcacataaaatagtacaggtgcctgtaatcccagctacttgggaggcgccactgcactccagggctggggggcggggaggccctgttgccacgccccgggcag

SEQ ID NO: 6805 - DNA, 341 bp, Homo sapiens
  source 1..341: mol_type = other DNA
tccttaatcgtgggggttcgagccaactccccagagagcaggcaaggtgaagcgagggcgcactaacttctgaacgagcagcgcccaggccccaggccctgctgcgaaggccccggcaaaggtcagggccccgtccgcgtgacgctcctgcctgcgcgcggccaagccatgctcggccccaggtaaggacgccccgggagctcgccccgggagctctccccgggcacgcgggggtcgcagagatcccacctcgtccagcttccgatcggctcggagcagcccgaagggggccgagcgtctgactcggacagatgcccccaggtggagcaggtgccacttct

SEQ ID NO: 6806 - DNA, 519 bp, Homo sapiens
  source 1..519: mol_type = other DNA
acaaaatagctcataggatcattttgtaaggatcacaatggatatgatttctttctttaaatgtgaagttaaatggaggataaaactgataacattttagccttcaataatcactttttaatatttatgaggagtttcaaaatcattttccggcccagtctgggataagtaactatcccagctgaatttccttcccgttagtgagcttcatggaatgcaggcaaattctgttgtcaatcttgtaacttttaagtgagatgaaattcagttgttcccattgtattcaagactgtcagcaatgaatataaactgtttgtaaaaatcccatcgttagaatcttccagaaactgaggctgggagagattaaatatcttgctccacagctggtaatgtaaataactaacactgtgtgctaggcaccgttctaagctctttgcatgtgttaactcaaccagcaaagaaccatttttggaacattctttcactaagcaacccgaaatcacaactctgttttaggtt

SEQ ID NO: 6807 - DNA, 265 bp, Homo sapiens
  source 1..265: mol_type = other DNA
gtgcacctttcaggtcattgaaaaatatgggctgccctcctttcccctttcaactataccagaactcaaatctggaggccgaggagggaggactccttgagcccaggaattctctctgttattaaaaaaaattattacagacgtcccagctactcgggaggctgaggcatgagaatcacgactgcactccagtctcaaaaaaaaaattattactatattttaaaaatattttaaagaatgtgtagttttaacttgtgagttaaaa

SEQ ID NO: 6808 - DNA, 362 bp, Homo sapiens
  source 1..362: mol_type = other DNA
ctttcaactataccagaactcaaatctggaggccgaggagggaggactccttgagcccaggaattctctctgttattaaaaaaaattattacagacgtcccagctactcgggaggctgaggcatgagaatcacgactgcactccagtctcaaaaaaaaaattattactatattttaaaaatattttaaagaatgtgtagttttaacttgtgagttaaaagaactgtgcaagaggcctctggctcggaggggctgaaacaggtgtctccgcgcgctgggggaagagcgactctcccggcaacaggtagcgccaaatcccgcgggaacggccctcgcgccgcgccccctgccccacctccgctc

SEQ ID NO: 6809 - DNA, 504 bp, Homo sapiens
  source 1..504: mol_type = other DNA
atatacagatgcttgggccccaccacatatctaccctccaggcgattctgatccaggctccagtttgacaaccgctgccctggtgaagagcaatcctaaggatactttggggatgtcattcacacgcttacaattagagttatagataatattattggcaatggaaaggaaaacctccttttcctctgatattatcttgtgatttccggatcaaagaagaaggtgtcgcctacaacttacacggaggggatacccgggctgcactgcacgtcctgcctttgggtcttactgggggacccattgcctccctgcgtgttcccaggcgattggggagggtgcctcccgcaggccctgccgcctccacctgcaggggtcgccctgggagcgcggcccgcctccttctgcccggcccccccctcgcgcagccgctgccaaagcctggagaacagcgccgctccctgcgcgggactcgcggaacggcactgagcatgctcagttgccgga

SEQ ID NO: 6810 - DNA, 451 bp, Homo sapiens
  source 1..451: mol_type = other DNA
tagaagtggctggaacaagtaataggatcccttttgttgtggattgtaaaactgcattgtaatatagtattgcactccctacggtgtttgtgcaaaaaacatttttttttccccattagattggaattttgagaaatctggctcggccagttcttggtttgtctaaataaagaagtcatttatttctctgggccacagagaggtaaatgtcatcctaagagttgatcttgatttgattctagaatggttgaaggaggacctttggccttaagggacttaagagcgtttacttccatgctttaaaaaacatgctcttggaatattcttggatatttcatttccttggaaaaatgattttctttgtctttatgtagcaaagctaaagtgctgttacatatttagcaaagcaagggaagggtcaaagccttccctccggccccataagggaatt

SEQ ID NO: 6811 - DNA, 324 bp, Homo sapiens
  source 1..324: mol_type = other DNA
catcttttgactagagatcattagagatcacctgagatcattagagattcaaagcttcccattcttttaaaaatgtcctaatgcagtatctgttatctaccagattctgttttattctaagtcacttaaaaatttacattcattcgtattaaatatatacctgttgaatttttctcaaatgcttcagagactcgagctttaatctcaccggcgagtgagactgcaaggtttgggggcccggccgtaccactccgcgctgcgcacggggggttcgtacccatctggccgcgaccgcacagtgcgtctggccggcgctttatagct

SEQ ID NO: 6812 - DNA, 318 bp, Homo sapiens
  source 1..318: mol_type = other DNA
actatatccacctcattttaggtgaggtggcgccaggctgtctgggcttgaatccaaccctcgggatgataacagtcctatcttacagagctggaataaggactgagttagtcaattatttgtaatgcacttagaacagtgcctggcacagtataagtgccacgtaagtgttttcaaagcaatccattcccctattatagcagcagaattggcggacccagcgctgggctcacgtaggtcagagctccctggtggcctaccagggtatacccaggcaacaggcgggacggcccgctgtgggctcctccacggggaagc

SEQ ID NO: 6813 - DNA, 489 bp, Homo sapiens
  source 1..489: mol_type = other DNA
gaaaccccctaaccacctgcaggaagggacgagataaataaatcaaaaggggggaaggctatcggaaattaccccgcgcttcccccagcgcctggcccagtgcctgacgcatagaagaaaagctcatcagggtcgtttttctttttcttcttacaaaaagtacttcccggcgccgggccaggggctgccccgccttgcccctacctctgcggccaggaaggactgcaggtgctgcgcggccagtgcccgcgcgtcctactgctccggtgccgcagcgcccgctcccccgggcccgggtgcgccccactgggcgcgcgtctcccagacccatccgcccgcccctcagcagccggcggggcgcagggacgtgcggggcggccagcggattccctctatcgggcgagggagacacgcagcgctcgctcctagctgtgctccccctccccgggggcggagcggccctcgaaggtggggaggagaagaagctcc

SEQ ID NO: 6814 - DNA, 612 bp, Homo sapiens
  source 1..612: mol_type = other DNA
aaggctatcggaaattaccccgcgcttcccccagcgcctggcccagtgcctgacgcatagaagaaaagctcatcagggtcgtttttctttttcttcttacaaaaagtacttcccggcgccgggccaggggctgccccgccttgcccctacctctgcggccaggaaggactgcaggtgctgcgcggccagtgcccgcgcgtcctactgctccggtgccgcagcgcccgctcccccgggcccgggtgcgccccactgggcgcgcgtctcccagacccatccgcccgcccctcagcagccggcggggcgcagggacgtgcggggcggccagcggattccctctatcgggcgagggagacacgcagcgctcgctcctagctgtgctccccctccccgggggcggagcggccctcgaaggtggggaggagaagaagctcccggcgcctccgcgctcgctcccgcgggtcactcacggcgcgttggagcccgggcggcgccgggaacagctgccgcggcgtcctctagcagcgcgcggctctcccgggacctgcgccggccgggggcggggagaggcggggagggcgggaaggggcggggagcgcgctcctgcggcgg

SEQ ID NO: 6815 - DNA, 565 bp, Homo sapiens
  source 1..565: mol_type = other DNA
ccattggcatattaatccaataaacttttataaatgatgaattggttgtaaacattgtgttttatagcatttgaaaattccaaatggtaatatttcagcatcctgcttttagaatctgcagaaagaaatagttcatgtcctgtcatctcaatttcagaagattgaatgcctccatttaaattcaaaacactgaaggaatatgatgatccttttttttcatgctcatctataagatggggttgataaatcccatctcagcattgtgggattaaatgagatgatatacataaaatacctaatatgatggatggtacacaggatgttttcaataaatggtagtttactttttattatgctcatgaacattaggatggtcttagaagagatttactttttgaaacattgttattttacaaataaggaaactgagagagtgacttgcctggagtcaggcagcaactttgttccagagttgggacagtactgcaaacctactgtgtgctagtggctgacacctacttctgaagatgccattccttttcctcagagggaatgggcttctccg

SEQ ID NO: 6816 - DNA, 357 bp, Homo sapiens
  source 1..357: mol_type = other DNA
ttaacttttgacctaagagtaagctaccttaatttccattcctgctgcggagtacaaaggcacttcctgcaaaggcattggctccagtttagaccagtttccaaaactgctaacatgaagaatatttatttttcctttctattgggaagggactttcgcgagcatcccagggaatctgcagtgtgataagtcagcctggactattgtaattaatgctaagttttattatattataatcacaggctgtcaaagacagccattgttcgaacatgtgggtcagccacaagtgctttcagctcccccagcgccaagagctggctgagagcgattctgaggcatcaggaaaagcgttttgca

SEQ ID NO: 6817 - DNA, 332 bp, Homo sapiens
  source 1..332: mol_type = other DNA
gtgtaattacattcgaatgcaagaagaaatgcaatttataagatgctttctaccaggtgtatttttaaagaaatccgcttatcgttcacataaacctgttacaaattgagcgtgtaacactcttacaaaacaggttttgtttcttctccctaaccgagggggaaaaaaactaaggtattgtcacccaactttcattatttccaagtagtgtgattgaattaaaaaattctaattagagccaaccgctttgctattgtccaagtggaaagagccaagttatatgctctagagacctcagacaaggcatctcataggaggctttttcataaaac

SEQ ID NO: 6818 - DNA, 348 bp, Homo sapiens
  source 1..348: mol_type = other DNA
ttctgtcaatgttatgatctttattgtaacattaacatgttaaacataggctgacttcgcctaagtagttgctagtcagttgtcaagaaagggatctatccagtcagtcgacagaccccttacttaggattttatttttagtttatatatatataaatggcttcacaacgaactttctaaatctcaggatgtcacacttctgattaaaattgtggtaccatcctgcgcagatttgggtggttgctttttgtaaccaatcagctttgcgcaaccattcagactgattgcgggccaccacttcatttacatgaagtgaactccaagtggccaatgggaaacctctagggg

SEQ ID NO: 6819 - DNA, 382 bp, Homo sapiens
  source 1..382: mol_type = other DNA
taaatttccccgagatagttattttgcagtaatatagataagcgactcagattaactttaaaacaaaatacattccattcaatttatttttgccaggcattgttttagcggctttatacagccatgtacaaaatagacaagattccagcatcatgatgcttattttctattctaggacacaaaatagaaaaaaaaatctctaccatagctagggtggtcaaggaaggcctctacagttaacgtggatactgttcaggtttctttctcctcttatattgcaggcaaaaatctgaggttcaccctttatttcctggcaggctctaggtagagagccctccccactttgggagtctgggtccccgggaaggaaggcctccctatt

SEQ ID NO: 6820 - DNA, 244 bp, Homo sapiens
  source 1..244: mol_type = other DNA
ctgcgcagatttgggtggttgctttttgtaaccaatcagctttgcgcaaccattcagactgattgcgggccaccacttcatttacatgaagtgaactccaagtggccaatgggaaacctctaggggagactctgtatccagggcccgtatggagcctgtcacatagcaggcctcataaatacttattgaaagaattaataataaagatgtttctgaggcctctatattgtgcactgggccaatc

SEQ ID NO: 6821 - DNA, 243 bp, Homo sapiens
  source 1..243: mol_type = other DNA
gattggaagccagtttcataaggcaacacatcatttaaataaatgtgtttctttccctgaacagaagttcagttctgctcaattactggccttggctggcagaggtgaccttctcggtcctatgactgcaccgcattcatgcattatatccctccactcgcgcgcccacgtgcgtggataaacgcgggaagcgcagaggaccctcggcccgcgccgcacccgctgtgattagggttaaaagac

SEQ ID NO: 6822 - DNA, 512 bp, Homo sapiens
  source 1..512: mol_type = other DNA
acatcttaacttgaaggtgaagtatttgttttgacaactttttagcatagatctcggtatacaaaataaaaaggacatcggcaaattaaaatttaacatatttatggattttataaaaaaaaagtcttttggtcaggctgcagagcctgaactagggagatgcaccgggcccacttgcaggcggggcccagatgcacccaagccccatggacaagagcaccatgggcaccaggggcctcccgacctggcagcctgttgctagtgggcgaggcaggaggctcaggccacgtggctgggagctaaaccttgtggcgtctgagttgatcccccctttgagtcgtgatacggtccgaagcggggcggggcggggcgaaggaggctccccctggctctccccgcccctcacccgccttccttgctgagcggccgcgggagggggagcgcgagccccgcaggcccctcccccggcgccggcgcccgagctccgcccctcgccgagccgcccctccgcg

SEQ ID NO: 6823 - DNA, 507 bp, Homo sapiens
  source 1..507: mol_type = other DNA
aaacatttattaagcatctaatttaaaactaaaaattgtaaaaatgtcggaaggaaacagttgttacatacactcctttattattgtgaactgaaagcagattacaaagttttaaaaattattcaaggatattcagtaatttgactgctggcaagccaacattgtgatttcagattaggagcctggcatctttgctgaaggaatgagagcgctgtccctttttctgcctgtccccgcgggtcggggagctgcacctcttgcaggctcggctctcggccccgccccctagcgtcggagcccgggagccgcggctgcagcctatctctttaaatgacagctgaggctcgggtcccagtccggggcttgacgtcagtgcctcctcccgtgctgccaggagtagttagcgccaccgtcggcgctccggcctcgcggcacgcttgcaagctgccggggcggcgagcctcctcccgccctccccacggagagccgagcagcagccctagagcc

SEQ ID NO: 6824 - DNA, 559 bp, Homo sapiens
  source 1..559: mol_type = other DNA
tgtgattaaagacattcaaatttcaaatgcttttaaacaatgtggaaaaaaattactccagcattctgctgttgctccagttgaagattcttaagtgccaaattatctgcctttggacagaaaatttcagttacagatctagatagaattgatagtattagctaggttacctgggtcgggatgggcctaacaccttccagtggttaggattggctaaagtcagaggcagactgtaattagtcttcttaaatattgctcatataaatagaatagctctgatttagataaaattgaccacaactcattttcattttggtgctgagatcttctacataagatcatgtgccatattttgatttttactgcatattattaggaaatccatgaaattacctcagagtttaatagatatgtacaaaagggaattgtatttatctttccacaatttccatattatcaaattgtaagtctgtaacactgttcactgtgtttgtaaaccataataagtgttataagatactgtattcagaatacaaatttagaaaggtatatatatagc

SEQ ID NO: 6825 - DNA, 420 bp, Homo sapiens
  source 1..420: mol_type = other DNA
gagtctggtacagaattcttgatcctaagaaatcctccaaatgaagaaactttcaaaggctctggaaacaatacgaatgattctgtcttcagtcacaatgatgaactgaacacagctgttggatatagattttaaaagtgccattattattttgccattaggtagaaggctaagtctcaacgttgtgctaataatctttaagtccctggactaagacctcggctcctggttcgggaatcagactgcctgggcggcactccaggctccacagctccccacctgtgagctcctgggcaagtcactcggtccggagcagacaatataagctaatatgtactctgtctacaccctgcgttttagggagtcaatcgaaagacgcgctgatgtcacgacagcgtgcggcgtgcagacgtcggcaag

SEQ ID NO: 6826 - DNA, 379 bp, Homo sapiens
  source 1..379: mol_type = other DNA
tagtactaataaacctgtctattatcagtactgtttgaagctaaatcaacgagaatgtaacatcctaaaaacttcatataacgagtttgattacatttttttaacttgtagtttccacagaaacagaaccttaagttggctaggagtcaagattgtattgttcctaacagaaccctaaacggtgttattaatggaacagtgttcctgatggaacatggtgaacaaaagccagtaccctattatatagtgtttttgacacaagacgcttatctgtcattgcaaatatgtgtattcataaatggcaaatatattcatgttgccaaacagcaacgcgtcctaaaggcggtgcgcatgcgcagcgcccgccagccacgccgcg

SEQ ID NO: 6827 - DNA, 379 bp, Homo sapiens; identical to SEQ ID NO: 6826
  source 1..379: mol_type = other DNA

SEQ ID NO: 6828 - DNA, 411 bp, Homo sapiens
  source 1..411: mol_type = other DNA
ccaaaaatcgcttttgcaaacttactgaaggcgatagtactaataaacctgtctattatcagtactgtttgaagctaaatcaacgagaatgtaacatcctaaaaacttcatataacgagtttgattacatttttttaacttgtagtttccacagaaacagaaccttaagttggctaggagtcaagattgtattgttcctaacagaaccctaaacggtgttattaatggaacagtgttcctgatggaacatggtgaacaaaagccagtaccctattatatagtgtttttgacacaagacgcttatctgtcattgcaaatatgtgtattcataaatggcaaatatattcatgttgccaaacagcaacgcgtcctaaaggcggtgcgcatgcgcagcgcccgccagccacgccg

SEQ ID NO: 6829 - DNA, 379 bp, Homo sapiens
  source 1..379: mol_type = other DNA
acagttgttccagctgccagaggctttctggttaccatggcaaccgtcgggctctaaagcagagcctctgaagttattataaaatcagacttctgttttttcatctttcggtgcccggcgggagaagaagactgcatatcctccaggaatgcatggagcctgctcattcattcattcattcattcaattatacattcaccaggtgcgcactgcctgcttcccacgggtaaaggcagcctctccctagggagggattcaaacgtttctccgccgctgcgagggagaagaggtttgtttttcttttagaaaaagggagcccttttccctactgggctcaatttctagtaggagaggctcaactctttttaagataatttat

SEQ ID NO: 6830 - DNA, 337 bp, Homo sapiens
  source 1..337: mol_type = other DNA
ccttggggcctctcgggagccccagcaagcggcctcggggagcagcccgaggctgcgcgtgggctccgctcctccggcgaggtgtgggcgaggggagcggcgctccgagcgcacccaggcgcccgacgccgcccgggtctgcgccgctgctagtgccaggcgggcgacggtcagttacgggggaggggggggagggggggccctgccttcccgggaacctcctttcctccaggcgcggggctcgtgcccgccaccgccggcgcgcaccgcgcctccgcccggcgccgccgccgcggctcctactttcagaggctccctggaaacggaggaggctcaa

SEQ ID NO: 6831 - DNA, 352 bp, Homo sapiens
  source 1..352: mol_type = other DNA
gcagccacgtcgctccacagtagggtgatgttgggggacgggcggcagggcgcggccccagggatctagggccttggggcctctcgggagccccagcaagcggcctcggggagcagcccgaggctgcgcgtgggctccgctcctccggcgaggtgtgggcgaggggagcggcgctccgagcgcacccaggcgcccgacgccgcccgggtctgcgccgctgctagtgccaggcgggcgacggtcagttacgggggaggggggggagggggggccctgccttcccgggaacctcctttcctccaggcgcggggctcgtgcccgccaccgccggcgcgcaccgcgcctccgcccg

SEQ ID NO: 6832 - DNA, 426 bp, Homo sapiens
  source 1..426: mol_type = other DNA
agtgtaagatgggactggaattccaagtccctttgccagcaaaacctaaagggggaaaacctcaaacgttgttacctttcctcccactggggaatgagttgcagaggtagtagaaacacagcaggtccgttgcagccacgtcgctccacagtagggtgatgttgggggacgggcggcagggcgcggccccagggatctagggccttggggcctctcgggagccccagcaagcggcctcggggagcagcccgaggctgcgcgtgggctccgctcctccggcgaggtgtgggcgaggggagcggcgctccgagcgcacccaggcgcccgacgccgcccgggtctgcgccgctgctagtgccaggcgggcgacggtcagttacgggggaggggggggagggggggccctgccttcccgggaacctcctt

SEQ ID NO: 6833 - DNA, 410 bp, Homo sapiens
  source 1..410: mol_type = other DNA
acatctgaatttttggtgcataactaacaaaattgaagtgtttgggtaaaatgacagaaacgtatcagcatacttatctctctctctttttctaacgtttataacaacttctggaggagataataacattctgtcttctgtgcagtacaaaaaggaaaatgtccccccctttttttgttgttggattctatcgcctcagataaaacagagtgtaagatgggactggaattccaagtccctttgccagcaaaacctaaagggggaaaacctcaaacgttgttacctttcctcccactggggaatgagttgcagaggtagtagaaacacagcaggtccgttgcagccacgtcgctccacagtagggtgatgttgggggacgggcggcagggcgcggccccagggatctaggg

SEQ ID NO: 6834 - DNA, 482 bp, Homo sapiens
  source 1..482: mol_type = other DNA
atacagcaagaatgatcattttattatacatatatatattttgagatggagttttgcccagctggagtgcaacggctggccaggctgatctcaaactgctgacctcaggtgatccacattttattatgttcatattatcaatacagactttacaaaaagttttagctttaatatgtaattatatcattttaatttttagaactaatttcctttccaaaatgaattttgaattgcactttattggcccaccaatataaagtctcaaaatctcaaaaaataagaaaacgtataattttaattaattacattgccctcttttgggcaaaatattatgtggtcatcataattagcatcctagtatgcttcaaactttcctagaattatgttggtaggtaggaacacggacttatattagaagaactctcctaatggctgtctttttagttcgagatagcaatcatctatctttcctttcacctaag

SEQ ID NO: 6835 - DNA, 555 bp, Homo sapiens
  source 1..555: mol_type = other DNA
aaaagggaatgagaattattgatgtatttaccttgcaggattgtaacactgtaagagaactctcccataagtagttttgtggtatattacttacttaacatgtagcatattttacataatgtgatattgagaggtgacagcgtgctggcagccctcacagccctggctggaggagtccttcagcctgcagctgcactgtaggagcccctttctgggctggccaaggccagagccggctccctcagcctggcgggtcctgcactcggagtggctggccagccccgccagccccaggcagtgagaggttagcacctgggccagcagctgctgtgctcgagctgcctcccatgcggcagggctcgggacccgcagcccaccatgcctgagcaccgccccccctaccctggctgtgggctcccacgcagcctgagcctccccgacgtgcacacaggactggcaggcagctccacctgcggccccggtaggggatacactgggtgaagccaactgggctcaacacaccaagcagcaccctgtgtctagctcagggtttgt

SEQ ID NO: 6836 - DNA, 364 bp, Homo sapiens
  source 1..364: mol_type = other DNA
gtctctctctctctctctctcacacacacacacacacatccacctctcccctcctctccagaaaaggatggagcagcaatttaaagcaatagctttgggagtcgggtctcaaaggtggtttgagcccggacttgatagcccacttggggtcgggggctgcgaagccggaggaggggcgagagaccccgttcctcatccccgaagcgcgcccccagaaccttcagcgcgcgggcgggtgtggagcggtatacatagctctacatacacattgagcgctgagcgagaaaggagggggcgaggaaggcaggttccgcctcccctggccccgtgcacacacacgcccaccgcggctcgggctggctga

SEQ ID NO: 6837 - DNA, 301 bp, Homo sapiens
  source 1..301: mol_type = other DNA
ttccatcctagttagaagctaatttttaagctgtctcctctttccctcataaaagtaagcagcagactataataggagtagggatatttaatatatactatttacatttgtagaatcgaagttactgaatttgatttaattcaaacaatactaccaccttaaatgctgtcaatttaagaaggagatttttcttaggtggaagaaaagttggcttgcccctcctactcgtcctaggatgcctcccaagggggtgcccgccacaggctccctgactgtcaacgaaagatgccaatcacaggca

SEQ ID NO: 6838 - DNA, 228 bp, Homo sapiens
  source 1..228: mol_type = other DNA
tatcatttgtagaatcgaagttactgaatttgatttaattcaaacaatactaccaccttaaatgctgtcaatttaagaaggagatttttcttaggtggaagaaaagttggcttgcccctcctactcgtcctaggatgcctcccaagggggtgcccgccacaggctccctgactgtcaacgaaagatgccaatcacaggcatgttccactaagtgagcgcgctctgcgc

SEQ ID NO: 6839 - DNA, 535 bp, Homo sapiens
  source 1..535: mol_type = other DNA
tgcaccacttttattattaaatttataaattagattgtaattcctgttcttcagcacctgattaaagtaacagctgtaataagaaataacagaaaggatatttggactttgagcttagtccaacattaaccagttaaatttgaatttcagatggacaaataattttcagtataaatatatcccatacaatatttaggggatacttacaacaaaatattattgtttatctgaaatttcacatttaactgttgctaaatctgacaaccttagtgacttctctaatcatgtttgctttctgagggctgaaaatgatgatctatataaatttaccttgcaaatcagatactttagtagagacttctgttaactttttgttttctaaagagcacacgtaaatgtgcctttaatagcacaactgcaaactgcagtctccctggttacggggaaagcggtagttcggtctctgcgcaagcgcacagggaccgtccacgcccctccccgccggcgagagtcacgtgggcgaggcggccagcct

SEQ ID NO: 6840 - DNA, 470 bp, Homo sapiens
  source 1..470: mol_type = other DNA
gtgagctctttactaatagtcaaacatttgcatgttcttcactcttgttgcacatctgagaaacacttgagtttggccccactttttatatttgtttcaatgggataaaacaggcattcctctttccaaattagacattttgagaaaccagacaggttgttgaaacttatttagaagttttaaaaaaagttgtgaattttaaaacgaccaaatcagaattgtaatatttttcctcatttcttttctagtcataaaaacagtaacattacatattatttatttattttgtggtacgtttagctaaaacagtgaattgttagaattgcagcaaaacagcagaagggcagctcggtcaaacagctggagctgggagccggtcagttgccaggccctgccgctgctacgtcacggagggcggggcggtgggcgattggcggtgcactgcagctcgggctgctctgcagcctggc

SEQ ID NO: 6841 - DNA, 463 bp, Homo sapiens
  source 1..463: mol_type = other DNA
aatataattcagaattttagtctctaatgtgcttatagcttgagctaataattctatttgaacaatttttcagggctaaattcctttgctttttaaaaacttctgtagttacccaaacagaaaataattgccctatttcttgtatataagaaaagtagtttcactgattatttaaacaataatatatacatcattggtatgggaaagattagctgcataaaaatcatatttagtatagtgttcgataaagtacatgagatatttaacacttgattataaagtaggctttgtgttctgtatgctaatataagtgttctgagcacatttaaagtaagctcagctaagctgtgatcacttttgacttatgatattttcatttaccatgggtttatgaatgagcatctgcattcattaattaaaaataagtccagagtagatttgaggtctagaatcagagaaactg

SEQ ID NO: 6842 - DNA, 437 bp, Homo sapiens
  source 1..437: mol_type = other DNA
atattttctacatttgatctcacttcagaaaatatttttttctcagcaataatgttcaagaacaagtgcttggcccatttaaataatggggatggatttattaaataacctcatgagtaattttcaaaatttccattaagatcttgattgaaattggatgaaaaatcatttctaagaaaaacccaatgaagtgtttttctttgccacatttgacaattgccttggacttggtaaagtaatcattactgtgttgaggccttagaaaaggtagctgcttttgaatgacaggcaccttgtccctgcagcctcagcaaagactcaggcagtctggcaaaagcagtttcttcagcatacctaacagaacgcaagtttccatatgcctgatgcaaacagttaattttaatgcttatttggagaaaagtaactcttaacttctt

SEQ ID NO: 6843 - DNA, 358 bp, Homo sapiens
  source 1..358: mol_type = other DNA
caaagcgttttcaatgtaagtgcctttagtttaaaggttgttggagcctaaaactcactaaggagagatgtgactgtcatctgagttacacgtggttacttatttttcttgttctatacaatggctagagagaattaaacgaaacagaaaatcctttatgaaaaatgttaaatgtacacttcacatgtctataatcaaattgttgtaactattctctaaccttgtatgagaatataagtgaaatcttagcacgccgggagttgtagttcccaaaggcctgttcgggccagcgcaggcgcttggggtttcccaagcggcccgtgctgccacgcagtcgccggaacgcgggcgggggctt

SEQ ID NO: 6844 - DNA, 599 bp, Homo sapiens
  source 1..599: mol_type = other DNA
gaaaatgttaatattggttatgccaaaatagtaagactatgtttccattttctaatatctttttatgaagcatgttttatattagaaatatgaatttaatttttacaattctggaactcagaagtcaatcttcctaatgttcattgttcagcaagaaaaatattgcaaatactggagaatgcatgatgtatttttggctaaatggaaacagtatttatttcatgtatgtagcctgtcatatattgcataaaagagttcttagggaaatttacttttaggttattagagtaacactgagacactaactgaaatattgtgatgatttttatacatctaaagcatgaattttatctgtcaaatatgcaattcctccataaaatagacaattaaaagatcaatgactaatgaagtgcatcctactaatattttaaataacttttaatatcatggcactgtatttgaaaatgtaattatactttgtaaaaaacctagacgctattttcaagatgataattggaggtataattttaataaaattcatcaggcaatagtacttcatattaataggctcagactcaagcaaaggataatgatgttgc

SEQ ID NO: 6845 - DNA, 641 bp, Homo sapiens
  source 1..641: mol_type = other DNA
cgaacacttggcgaagggcaaggagcctcgcccagagacaaacgagtgctcccggtttaagcagccagagtgactgcacagcgagtcagacaggctaggagagacgtgggcggcccagacttgcccaacgcccacccccgcggccccgggcgcccaacctctcgcggtgctcgatccccgggagccagcgcagggcgcagcgcagaactcccacgggccccccaggcagacacgccctctgcccaccgggtgacgtcggccgcagactctggaagggagcctgagtcagaggaaacgtccttctcagagggactcgggattcttccccatcctgagttgcacgcggtcggcctcgcgaatcgagtgggagtcccagcaagtgtccggggaccgcccacccggtctcttcgccacccagctgccaggtccctcggctcagggcgggcggcagcctcacctgtgcccccatggccccgggagcgggcttccggaacgcgggcgcttgctcctcacctgggcctctccacacgcacccgcggcgggcggggctgcggggtctgggaatggggcgccctgaccccgcccccggggcagcctccgccaatgggcatggccaggcggggcctcagcgccagccgagc

SEQ ID NO: 6846 - DNA, 510 bp, Homo sapiens
  source 1..510: mol_type = other DNA
atatgcccaggctagtctcgaacttgtggactcaagagacaggggtgagcttggtttggtatctgtaaactgagcgttaataatttaattaatacataatgtgcctgcatatgtatggtataacaaggatatcataaacattagttattaataattcgtggaaataagtctttcccttaaaggtttatttcaaatacccctatgaccccagcagtcagcagcttcggtgcaaagcaacgctctctctagcgggggagcctttagaggagccagaagggggcctcagtgcagcctccactccactcaattcgctccagcagtcgcgccaaggggcagctgctactcctgccagatacaccagttatcacaggccgctcccaggcctgcgggggccctgagaattcgcaacaagccccgggcagcagggctcggctggcgctgaggccccgcctggccatgcccattggcggaggctgccccgggggcggggtcagggcgccccattcccag

SEQ ID NO: 6847 - DNA, 539 bp, Homo sapiens
  source 1..539: mol_type = other DNA
tcacaagctaattttatggtaatgagtcaaaaatcgttcatatacattgctgattttattttacctttatgaatgaaaagaatgaaaagaagcaataacttttcaagatgcatttgacacaaggtacatcttctaaaattataagcattaatttgaatattattttccatgatgactagttggcataaaaggcttaataaacttttgaagtctagataactaaaaagttctgggtatattttaatatgtgtgtgattaccaaatacactgcaatgttggtaaatgttttttagtttccaactttatctacaattttccttttaaagaacttcatgctttagaatttaattccagaatttttcatctggacagctgcaggtaagaatgcttacgcgtagaatatagtgtatattctgtctcattcttttatcttatcttgataatgagagtgataaatagatggtaaatactaccagttatgttcaaacatttaaaaatgcaaacacaattctgctcactggtgtatgtttttctttctg

SEQ ID NO: 6848 - DNA, 274 bp, Homo sapiens
  source 1..274: mol_type = other DNA
ctgtctatgctttttataaaacaagatagatagcactggcaacatttgtcaacatttccttcaaaaatctttaaatatttttcactaagacttagaaaaaaagttttatacgaaattttagggttattactagattggaacattctaaactcaatattccagagcctagaatctaaattttaaaggtgccttttaccaaaattttgtgatttcttgaaaatgatgtttgcgagtcacccacacctttggggatgagagacttcgttttcagaac

SEQ ID NO: 6849 - DNA, 447 bp, Homo sapiens
  source 1..447: mol_type = other DNA
tgtaaatatatataatatataaagttatatatttatgagaaacacgaattgtcttttaattgaaacttttaatcctgtagtatagggagaagaaagtctagattcttctatgaccccctcctcactcaggtaaatgtgtctggggatgcctgtccagcttaaccacgtgcttctaagccttaagaatattccctgggacagtttgcccccacgaagcagcctgagctgtggcggaggatccaggaagctacggagagaagcagccagcatggtgttccgtgcctcccggaggtcaggagatagcttcctttttgccttgtgagcgccaaggaaaagatgtatcaggaagacacagcgccttcccttcaggagttgcgtctcctctgcaggccacgatggtcacaggctggctgctctgggcagggtcagtctagagtctgtgcacca

SEQ ID NO: 6850 - DNA, 489 bp, Homo sapiens
  source 1..489: mol_type = other DNA
tttaaattttagtcgacaatcacttattgtctttctcctacagtagaataaaagttgggaaagacctggatttgaagcccagcttctcaacccagcttctcaatttactagttgggtgacattaggcaagttatttagcttgcctggcacacagttaagtcttacaagtgagtttaatgttaacacattaatagtgcacgtgaccctctaagtgtaaaaccatcttttggtaaaacctggcctcccaccgcttagcggaaggggaggtgcggcttccacaagtggcactactcggggctctcctggctaggggcgttcgagccactaggcgcccccggaaacctaagggacgctccctgaaactcaccgggacgcgcttccgacattccggtccttaatcgccgcagggctgcgcaaacctgccacccagggcccaagcgaccggggcggggcgatcgacagagggcggggcggggcgctttgctctgg

SEQ ID NO: 6851 - DNA, 553 bp, Homo sapiens
  source 1..553: mol_type = other DNA
ctagtttccaagaagtacatacattggccgggcacctgttttcaatattcaaacacaacttcccgggcgtgaacttcactggctttaagttctaggatacatgtgcacaacgtgcaggtttgttacatatgtatacatgtgccatgttggtgtgcagccctgctcgccgctgggacgtgaccccaacgctgaacttgccgcagggcggcctcaggcctggaacactgccggcaggaaggcgaggctgcgccactgcgcgcacctgtccctccttcccggaccgaagaggggacccagagacggcgcacccgcgctcactgcggcacggaggggagaaaatccttccccgttcctcgaggggcgtgtggaagccgcctcttgccgcgctcaggagtatcgcactcccggggccgccccagcccgcccgcggcgcccttacctggctgaagcgcggctgctgggcggtggggagactgcgaggtgcagtctgcgccgcggagtccggagcctagcgccccagagtccagagcaaagcgccccgccccgccctctg

SEQ ID NO: 6852 - DNA, 474 bp, Homo sapiens
  source 1..474: mol_type = other DNA
atgtgatcaaaacaaagcatttaagttttgtttaggtttcctgccgattctaaaggcagacttcactgtttaactacttttaacatacaacttttaaaaaagtcaaggagtagagaagcggtttactatcccccgcttccctttaagtcgggaaaactatgttttaaccgatgagataatgcctttaaaagtgcttagcacactgtctggcaagaaattatgattattttggggtttcttattttcaggggcatcgattaaatatttgctggggctgagcgcccactcgagatccggcccggaacaagggcgagactggcccgcgggtcccacactccctgtaaggcgcccgccgcgtgcagggacggccccgccccataggccccgtccgtggccccgccccgccgcgagctggcgccgggtcctctcagcgcccgccggcggccgcgtccacccccgacgctctgaggtcac

SEQ ID NO: 6853 - DNA, 298 bp, Homo sapiens
  source 1..298: mol_type = other DNA
atgcctccttaacaggccccacctggttggtaagcagcgaaattattttcctttctacatgccataacacacatttttcatggaaattgttcgtttgtaaaaatcgagcttgatattattattacattctactttaagactgaaaatcatgcaaaaaattgtttgcaaattcaagccatcttagggctgcaggctataggaacactgggtctccagatttcattataaagaggaccgggcggcagggcggggcggggcctgcggggcgcggggccgcggcgcggagccggcgcagcga

SEQ ID NO: 6854 - DNA, 632 bp, Homo sapiens
  source 1..632: mol_type = other DNA
atctttgtaaagcataattgagtttaatgtaattgttgtaaaaaaaaaagtgtacttaaaattcctcacaatgttgaattttgacctgtattcagaagaattccaaaaaatatagtatttgtcaaaccagtatcagagaaaagttacattaatgtatttgattacttgatctggtatctacttattaatgaataatcaacatttttctagtggacaagccatgtaaacacaccccaaatcaatttatcttttgtaggaatgatttggttgggaaatttttcagaaccgctctggagcagaacaaaacggtacctcccggtcaccactgggactggaagatccctgggtggttctccatgcactcgccgagggggctcagtgggtagcctcttagagcagctctgagaataaacttatcatttagccagaggcacccggcctggcctcggcttcccggtgagggagcgggggtgggggcaccgggagaagccggctcagctgatgccggtgatgagtttcatcacaaagaaagccctctagaggggccccctcggcggggacgcgggccggtggggcgtggagggcggtgcagcgtgcgagcccccgccgagggccatccccgcctccgctcg

SEQ ID NO: 6855 - DNA, 194 bp, Homo sapiens
  source 1..194: mol_type = other DNA
aggcatctcagttgttcagtaccatctacttaattttttcaaaaaagtaacgaaatgattttctaaatgaaaattgcaggatctcgggagaaaattttgaatttttctcttgcagactagctctttccttgcccaatcagtacaggaagagccttgactgccagggctccaaagcaacgctggccaggcgacct

SEQ ID NO: 6856 - DNA, 438 bp, Homo sapiens
  source 1..438: mol_type = other DNA
ttagtatatattcttccaggattattatttttattttatttaattaaaaaatgtttttaccttaatttttttgggtacaatttttattttcttttttgacaaaaaaaatgaattcatctgtaatctagattaaaaaaggatcctgtccagaggtatatctgtaccccatgtgcaggtctgtagtgacttccttcccaggcaggcaccaacagtcagctcaaatctcagcgtggacgagagcctagcttgagtcgtgagcccatagctagaactaagtgtaactgaagtgaggaatgctttgttatctaaaagaaaatcaatgctatggtacataacgatctgcttatgatgttatagtttagttcaactattctttttagaatagtgattgcagcccactgcaaaggaagtgacagcgtgtgacctctgacactaggt

SEQ ID NO: 6857 - DNA, 444 bp, Homo sapiens
  source 1..444: mol_type = other DNA
ggcaccaccaggccatgatgggccttatattcggtgcatgaagactccaaggaaggaaacacagcgttggattcgtttcacccactgtttagtcactaataacttgcagtacatggcactaataaatacttcacagtgatgtgttgttttaattctaacaaccctatatgtggtaccctgccagaggttgcaaataaccaggtatgcatgcttaaaaattactttctactaagaatgaaattatctcataaaagagataatttataaagtcgctctcaaaatccggaacgccaacccccttccccgccatccagggaaggggcggggcagggttcttggtccgccgctgtcgcctgcgcagtcgcagtgcggctcgtggccgcagctgcctggcaaagggacgagtatacgcatgcgtctaccgcagtgaggtctgacgtcatt

SEQ ID NO: 6858 - DNA, 399 bp, Homo sapiens
  source 1..399: mol_type = other DNA
ctgtttagtcactaataacttgcagtacatggcactaataaatacttcacagtgatgtgttgttttaattctaacaaccctatatgtggtaccctgccagaggttgcaaataaccaggtatgcatgcttaaaaattactttctactaagaatgaaattatctcataaaagagataatttataaagtcgctctcaaaatccggaacgccaacccccttccccgccatccagggaaggggcggggcagggttcttggtccgccgctgtcgcctgcgcagtcgcagtgcggctcgtggccgcagctgcctggcaaagggacgagtatacgcatgcgtctaccgcagtgaggtctgacgtcattgcctgctgctgtcgtcgggagggtgacgcaaacagcccc

SEQ ID NO: 6859 - DNA, 264 bp, Homo sapiens
  source 1..264: mol_type = other DNA
cagagtctggctctgtcgcccaagccaggctggtctgaactcctgagctcaagttcgcttggggtctggatcgggacccctctccggtaacaagtgatatcggtacctgggagccaagcaggcctggggttgactccaggctcccttagtggcctgcacaactcagatgacccgtctgtgaagtgcaggtcacagtgggcaccacacacatgcccacgcctggcctagggcgggggcgcctgggttccagcctgggttgccacc

SEQ ID NO: 6860 - DNA, 643 bp, Homo sapiens
  source 1..643: mol_type = other DNA
ctttgctcaatactcctatggacttaatagcaatgattgctgctaatgtgatcattgtttaatttcagagcaaactttctggaactgataaataataagctctccttaagaaattaaagtgcattaaaataaattgctttcaggggttcttaaacaagttcaagagaaatagctggcctagttattattcataaactaggggataggaggcaattaacaaattgcacttttactatcaaagctgagagtggcccagcagtggccctggccctgccggcacgcttccgatgcgtcgccctggcctgaagatcgccacagtcgggttcgcgccccgtggtcccctaaggcttccagggcgctggagctggtgcacaggacctgctcctccagggtcagagcaccccgtgggcctagtctaaacgagggcaccactggtccggagcgctgcatccccggggttgcttcgggttcgggcccaaatgtcccctgcaccggccaagggtgccgctggggctcgcgccaaggagggaccagaggcgccggaggcggcgcaacgcgcacaggtggcgcccggcctggccaggctctggcaggcgaggctgggtgtggtcgtgaaggggcgggcggaccggccccacactgc

SEQ ID NO: 6861 - DNA, 548 bp, Homo sapiens
  source 1..548: mol_type = other DNA
tgccccctggactcgtccaggctcagtccgcagctcagagcgcggccctgtatttctgtctgatgtctggggcatacagatgtgtgtgacggacaatgcccccagaaggtttgctggaaattaatcttaatccagcctgcggtaggaagccgagttcggcgcgaactggacaagtgtcgtgggacaagtggcgggagacccggccgcgtcgcgccgggcgctagggacggacgcatttccctacttccagcagctggtacgagccgcccccaactgcgctgtgggttccagctccaccaatcccgcccgccactgggcggggtttcagggtcaaggtggaccaatttctctcggacccctgggggtgactgacagcagccgggcccaacccgctgctccggagcatggcctccgccaggggcgttacggagacaaggccccaggaccaatcgtattggccagtggggggcggggcctcgttgccagctccagaccgtcaaatgagagacgcagcagggcggcccctgagccgcggtttagggctggga

SEQ ID NO: 6862 - DNA, 607 bp, Homo sapiens
  source 1..607: mol_type = other DNA
tgaactgaaagtgaatttcagtatgcgatatgcatagatcattctttgcagaagccacatcttgtagtggctccacatgaacttatcaagctaggtcattaagtttacctagataactatttaatcctttggagtcacctacattttagtatttcagactgcagtgatgaaatcatatactcaataatgtgattatttgtacacacagtggcttttaagtggaatttagtttaaaacaaatcacaaaaattacccatttttaaacttatttttgttgtaatttgtacacacttctttttaaaaactttgaattttttctcaaaaatgtttggtacaaaagatactcaatgtttctgtatcgtattacatcttcatggcttggagccagaacatgtatttgataacacattatgttgtatgtatctaaatgatttcataatgatttgaaaagtgcaaaacttgtatttcttctagtcatgaaaagtaagagcctcttttttaaactttttgtcatttatgtaataaactacatggttgattactatgttgtagataagcataatagactttgctctgtattaatggcctgcaaagaaacagggaagtc

SEQ ID NO: 6863 - DNA, 468 bp, Homo sapiens
  source 1..468: mol_type = other DNA
tgggtgtgtgtttatacaaatccattctgatacaaaccctggggtctccgcagcctagtgctgcgctccgcaggccgcctgcgcgccgcctcccgaagctctgagacaagggcatgtacacacatgtccttccttccaatcgcaaccgcggaggcttgggagggcgaaccccgggggtttttcacccagactcctctcggccccacgctgcgcgatggagacttggggggaccaggcggtggcctccgcaggactcagagcgcgtttccatcctccccctcgggtcggacctggccgggttcgggaagccagaggggaggtgccctgggccgcagccgccgcgcctcatccgccgtcccgcgcggtctcctggctccccagcagccgcctgagcccgggttggctgccagggacgcgcgcggcccgcgtcgtggcaacgcccgcgccgccccgccctgggtgacagcc

SEQ ID NO: 6864 - DNA, 399 bp, Homo sapiens
  source 1..399: mol_type = other DNA
atttgattcagctacatgaggaacagttgctattgacttcactgcattttttttcagctaaaataattattggattatatctacaacagggggcctccgaagtgattcaacgtcctccttgaggactctcagtcttcaagactcccacctaagtgaccactccactccaggcttggaggcggcccggggtggagcggaatccccataggccccttctggcccctgtgcgcgccccaggccaaggtcctaggtgcaggggccgccgcagagcctgagcccgcagggctgggatgcgggtcgtcagggaggggagggtgtgagcagcgggtgcccccagtccccgccagggcgcaagcgcaggcgcgcagggtgcggtcgcggaggggcgggcacagtcgg

SEQ ID NO: 6865 - DNA, 681 bp, Homo sapiens
  source 1..681: mol_type = other DNA
tcattttacatatatatatatatatatatatatatatatatgaagttgtttaatgaatatttagcgtatttttaacattagaaattattattctactccaatcaaataacatgttatacccctatagtccttattttgtggtctacagaaaatagtaggaacaagcctttcattttcattagcagatagtaaagccaaaaatgagaggtggtgaaaattcttgattttacaatacttgaatatatgcagtgttcacagattttcaagtacctacagagatgaaactaagttaaactagctagctaaccagctgaggctctgctccataggaatgatttataatcagcacattttttgatggtatataaaagagcttgcttcgaaagcgcttaaagatggcgaagtttcctaagtagttgaacctgtttctgtagcagaatacacacttttgaaatagtgccaaactaggtcaagaaagtcccaattagagaattcaaattaaatgaagctttaacctgagggattaactttaatttgtgaacatcctggagctaaactctattaacttgggtacccacccagtgggtagaagtaagaagtactgaaattttagttacaagtttcatacttttctggacacgcgtgggcacccagaaccggagacgccctgctgccctccag

SEQ ID NO: 6866 - DNA, 669 bp, Homo sapiens
  source 1..669: mol_type = other DNA
tatagtccttattttgtggtctacagaaaatagtaggaacaagcctttcattttcattagcagatagtaaagccaaaaatgagaggtggtgaaaattcttgattttacaatacttgaatatatgcagtgttcacagattttcaagtacctacagagatgaaactaagttaaactagctagctaaccagctgaggctctgctccataggaatgatttataatcagcacattttttgatggtatataaaagagcttgcttcgaaagcgcttaaagatggcgaagtttcctaagtagttgaacctgtttctgtagcagaatacacacttttgaaatagtgccaaactaggtcaagaaagtcccaattagagaattcaaattaaatgaagctttaacctgagggattaactttaatttgtgaacatcctggagctaaactctattaacttgggtacccacccagtgggtagaagtaagaagtactgaaattttagttacaagtttcatacttttctggacacgcgtgggcacccagaaccggagacgccctgctgccctccagcccgcgcggctgcgcgtctcagtccacccctggggcgcgcggctgtcacccagggcggggcggcgcgggcgttgccacgacgcgggccgcgcgcgtccctggcagccaac

SEQ ID NO: 6867 - DNA, 486 bp, Homo sapiens
  source 1..486: mol_type = other DNA
gccttgaagatatggaaaagttttgttttcgttctttaagccgcccgagcgcgccgctgctggcctccgggcgccctttctcgggcgcccggcccgcagctggcgagggctctctgaccgctccggtccccgccggtgccatctggttggaaccctcggggcgaggacggaaggcggccccgggttcgccccggcctgggccgcccgcttccccaccccgcgcaccgtaccgtccccggctccctggctccccgacggcgaggagggccgccgcttccgcgtcggggtcggccgggggacctgcgaggtgcggctgccgcagcggcgcgccccggagcctggcccggcattcaggcctgggggaggaggcggcgcggcggggcccgggaacccagcctggagcgctctgagcggccggctcggactcacgcggcgcgcccgggccgcccctcctccccgcgccgccggccgcggcccaggctccct

SEQ ID NO: 6868 - DNA, 443 bp, Homo sapiens
  source 1..443: mol_type = other DNA
tacagaacaccagtcatgatgagttttgtttctttgtttctgaatcacagagaaagatgatttcctatttttgtattttcaagttgtaacacattataacgttaatatttttatatttcattatgggtttttattcttcattaaaaatgtcagaagggaggcctttgtttagcctaggcgccagtctccccaggggttctcctgcccagggtacctgagctcacccgccagacctaggaagccagacctaggcaggcagtggacacaggtggccaatggctgggcccgtccagcccccgtcctgcccgggattggctgcctgccccgcggccctcctcccagcctgcgccgaaagcgcaggtatgtccagctcggagcacctggccagtgggaccggtgggttcctggtgcctgaatccggctgtccgctctgcggtgccccg

SEQ ID NO: 6869 - DNA, 383 bp, Homo sapiens
  source 1..383: mol_type = other DNA
tataaccggttaatagtgagccaccgcgcccggccgccccttgtctctacagaacaccagtcatgatgagttttgtttctttgtttctgaatcacagagaaagatgatttcctatttttgtattttcaagttgtaacacattataacgttaatatttttatatttcattatgggtttttattcttcattaaaaatgtcagaagggaggcctttgtttagcctaggcgccagtctccccaggggttctcctgcccagggtacctgagctcacccgccagacctaggaagccagacctaggcaggcagtggacacaggtggccaatggctgggcccgtccagcccccgtcctgcccgggattggctgcctgccccgcggccctcc

SEQ ID NO: 6870 - DNA, 414 bp, Homo sapiens
  source 1..414: mol_type = other DNA
atcagccgctggtgacatcttgccatcagctgcagctacagaatgtgacgagcggggccccttatgtacccaagccagtgcaatcgctccggcactaagccggggagcgctcccggcccgcccagagcagacgccctaggttggggctgcagcgagtgcgcgcgtgggctgtggagccggaggctgcgctctcttcctggccccgcagccacagcagctgccccatgctcgcgcggcaggacctaccaggcgcccaccctgggctgcgccgcctcggaccacccgctgctcccgcgcctcacggggctccgcactgactccaggcgcctccgggggcgtcgcgcgcgcggagcggcgccgggggcggggcctcgtgtagggcgccccgggcggggccggccgcggagaaaacag

SEQ ID NO: 6871 - DNA, 341 bp, Homo sapiens
  source 1..341: mol_type = other DNA
cccgcgactctggtgacattttgccatcagccgctggtgacatcttgccatcagctgcagctacagaatgtgacgagcggggccccttatgtacccaagccagtgcaatcgctccggcactaagccggggagcgctcccggcccgcccagagcagacgccctaggttggggctgcagcgagtgcgcgcgtgggctgtggagccggaggctgcgctctcttcctggccccgcagccacagcagctgccccatgctcgcgcggcaggacctaccaggcgcccaccctgggctgcgccgcctcggaccacccgctgctcccgcgcctcacggggctccgcactg

SEQ ID NO: 6872 - DNA, 279 bp, Homo sapiens
  source 1..279: mol_type = other DNA
ttttcggtaagtttaccaggtaaattctttgtggattaggtaatgaattttattaaccattgcatctttagagattatacttagtaatgtaagtatcccataaaacatttcaatttttctccatatgttgatgctttttaaaccaactttgtttattaggataaacccaaaatattgcacacggttgttttttgttcatatctaaggaagataccaaatttcggattagacttttcaaggaacatgagaagattatctgagaagattatctgcgcagac

SEQ ID NO: 6873 - DNA, 410 bp, Homo sapiens
  source 1..410: mol_type = other DNA
acatttggtttacctattaaaataaaaactgtacatactttatgatctatctttgagaaacagacaaatctgcaagcattgtcattttttgttgtagttaaaagtgtaaagtcaaaagcagtacatcaataaatagccatattccatactatgcaattttatgaagcacttaaaatagatatagtttgattcatactaaaatgaatgatactatactgtactgtactatttaacaaggtgaaaattaattttttgagaaatagtactgattgtgatttcttctctattcaggtaatgattctgtatcaaggctgattttcctggccgacagaggggcggggcccacctcagcgcgcaggcgcaaccaggcccaggtggccgccgcggaagcgaagccacctatacgcgcc

SEQ ID NO: 6874 - DNA, 521 bp, Homo sapiens
  source 1..521: mol_type = other DNA
agtgcacttttactattctattctaaagacaatcaagaatatatgttttaggcaaggaacaaacattaactttcaaatctggtgattgtgacttaaagttaaaagtacatgatgcattaaatttattttgagaaaaacaaatacatgagtgagatacctccatgtaggttaagtagtctcttaaaaaagaataacttcaccttaatacaggagacattcagagtttctcttaattaattatttttaaagcacgacttagttgtacagcattaactttatttagctattattacagaatgactgtttctgaaagccgggggccaggaccggtcacagccccccagcccggcccggccgccacaggggtggatgcgcatggtgggcgtgggccaggcgggagaccgccgcggggactgggggcacgcgcacgccgcgctcggcctaagtcaggccggacaggactccccagaggcccgaagcggcggcgcgagaggccagggacgccggccgtttcgctcagc

SEQ ID NO: 6875 - DNA, 493 bp, Homo sapiens
  source 1..493: mol_type = other DNA
tgaaaattaattttttgagaaatagtactgattgtgatttcttctctattcaggtaatgattctgtatcaaggctgattttcctggccgacagaggggcggggcccacctcagcgcgcaggcgcaaccaggcccaggtggccgccgcggaagcgaagccacctatacgcgccgcgccgcttgggtctcctgcgcatgcgcagacggacctgcgctggaggcttcatctgccgcccttctcgcgcctcggggctgcgaggctggcgctcggggcggccatgtcggccggcgaggtcgagcgcctagtgtcggagctgagcgaaacggccggcgtccctggcctctcgcgccgccgcttcgggcctctggggagtcctgtccggcctgacttaggccgagcgcggcgtgcgcgtgcccccagtccccgcggcggtctcccgcctggcccacgcccaccatgcgcatccacccctgtggcggccgggccgggctgg

SEQ ID NO: 6876 - DNA, 691 bp, Homo sapiens
  source 1..691: mol_type = other DNA
agttgttatattaagaatttaaaatatataatttggtttattgtgctgatttattttttgcatatgtaaaacatctaacagttcgaaaggcaagagtatccaaaggtatatagaaacttgtcacatcttttttttcctgtgtttctttttacataaacaagcagatgcataaacatgtatatatatcctgttgctttgaaagagcatcttattagttctgtaaagtattggcaatattgcaaatatctgaactttttatgaagtatgtcaacagggataaaattaacttttttgggaactttactttgaaagagttattttgaaagggattttttataaaatagtataggtttttatgaaacacgttgcactaacaatacttatatccattgttgaagaatatagggaaagaaataccaaaatttttagtaagattttgtaaaattgcaaaaattaatattaagaattcatagaggcacagaaatgtattttttgattaatgtattgtaacctgatgtaaatcctatttctgcattgacatcatactatgttgaagaatatttctaaaaatattctagagttaagaaagtgttgatagcacatctatatttaaatacttagtaccacaagtagtttatatgacttgagaatgatactgtaggaacatactaaatcttctcagtctcagaca

SEQ ID NO: 6877 - DNA, 636 bp, Homo sapiens
  source 1..636: mol_type = other DNA
aataattgtatacaagtcttaggtgttttggccaagattacacaactagcaattgacaaaacatttgaatgtgggttggtccaacttcagatatttttttcactgtgtattatattacatctaaaaaggtgcagcttaatattttttcaaatatatacattcatgtaactacagccagatcaagatatgaatttcttgtcaataaatttctgttatggactgagtactccatgaatagttgaaaaaggatttattaacaatatcagttgaattttacttatgcttaagagtgctgtatatttaaaaatgaagacaaggggtgtaaactatttttcccttcttaggcaaaaaggtttttgaaatggaaacaagtcaggctttttttttttactgtttttgccttttattgagcaagtgactttaaaaatcagtttaaaatgttttttaaaatatgtgttagggaagccaaggttcgagaccatatgagatctcatctatacaaaatttaaaaaataaagatagaaataaaatgtgtgtcacactatccatttactatgtgattgtataatttgtttgtacaaatggaatatattactgttttgtttattttaggagttatggtacagcacctgtaaa

SEQ ID NO: 6878 - DNA, 784 bp, Homo sapiens
  source 1..784: mol_type = other DNA
aagtatacagtaatttttcagtttttgtgaagtttagatataatggggcatccaacctatgattaattgttttgcttctataaagttttaaaggcagtattgttcagaactgaaatatagatgaagagaaattcatctaatttgcatccactttaggcatgcatacttttgtaaagtcctttatctgcataatagcttttaacattattttatttaaaatacaacttactaggtttttctcttaaatttatagcattgttttatgatagactatttttccatatccttataaactttaaaaagattgtagaggtgaggcgggtatttaaatatttgaatttttctatctaaatgcaagttatcagaaatggcaaactggttccttttttatgttttttaacacttggaatatatcacaaggaaaatatcttgtgtatgttaaaatgagcataatatttaaagtttctgtaatagagctgtagtatgtgttacaattgtagtggaaagtcttatttaatttcacaaagataaatttatttggagactactaaaactagtaagtgtagaagagctctacagagacttaaaacttaacattatgatcattgttgggtatgtttctagcttgtttattaataaaaatttttatgacaatgcaaagtagtgataatattgtgatctggttttattttaaaatttattgcaaacacattttgtttttatttcttttttattattttttaagcatctaattaggtgaaactgaattgattcaatttttatg

SEQ ID NO: 6879 - DNA, 562 bp, Homo sapiens
  source 1..562: mol_type = other DNA
aacatgtgtaattattatatatttatattcttagctctagtgctattttgagaacaagcattattttcctctcaattcaaattggatttggactgcagatcacatctcttttacagtttgaatccattcagaattaatggtccagttgtcaagaaaacatttctatttcaatcttctcgaaggtttgctctttaataaaatagtgaaccaatagtatgtgagagattttgacttactacattgagtcttgcttggtttcattaaagaaaaattcagggccttgtctcaaatttttttaaaaaagcattaaacaaaatacctattgtttgccaaaaatcaaccctatacagtatttccggttttgttctaatttgttactgtatattataatatgcatttcagaagctgtatacactgggaatctgagataatatcagtgaaaaactgattattcctcacattatatttatgagaaaatgcattagattattttaaacccagtgttatattgagaatttgtgtatttaaacagaacacaccttttttttttttttttttttcc

SEQ ID NO: 6880 - DNA, 459 bp, Homo sapiens
  source 1..459: mol_type = other DNA
tgtcattaatgtgatgaatgtaattatctgtggcattccagagcttaggcctgcaaagaagtcttgatgcagtctcaaatcccagatcttaaagctggaagaggggatgagagcttaaatgaaacaagtgtcatacagctgatttcagagctcaattcattccccccagggagaaggaagaatggagtgactcatttcctcaccaaacaggaacctgtacattgtttggacagaactttatgtctatccaggctctttgttattctgacagagaatggcacagagatcaaaattagcgaggaagctgtcactgtcacatctctttcatatgtcagtgcagtcaaggcagcttttcattatttaattattcacaccgtggggtctgaatgtgtccagccggtgatgtaaatgtaccagctgcttcccaagaaccagtccgcatcctgcaggaggggctgg

SEQ ID NO: 6881 - DNA, 471 bp, Homo sapiens
  source 1..471: mol_type = other DNA
ggaagatgccagagagtttaacagtcctgggatacctcccgcctcctttcctgctggaaaaggtgaagcaacgatctgacagtactaccattccaatctgaatcatttaaattgctcctaattgcaggcctgcagtgcactgtagaagttttgcaaattcctgaatatggaattaaaaaaagtgtttgaaaaccactttgaaactgctgacaggtatcctatttcaaattgtttaaaagatgaattggaaatgtcaacttaaatttgtcattttattggaattagagaaacacttggtgttcaggttcgaaaaggcacctcagatatttctaagttcccttttaactcctttgtgggcagatatggggaaaggacggggctggacacgtgctgtgctcaggaaagaaagtaaattccggcaaattgctccctacctgcttgcaggtattcaggtaaatgacaggtgggcgg

SEQ ID NO: 6882 - DNA, 534 bp, Homo sapiens
  source 1..534: mol_type = other DNA
aagaaaaggaaaggaattccctaagattttaaggaaaacaacaaaaaccaggttatgtttggtctgcatcttctaatatggaatccaggtaatttatcagttttttttcatagcatgactacggtgagatttcttgtaagaaaaaaaaaaaaataccagcatcgctggcctcatatattggattatggaaaaaagagactctggttctcatcatagtgacggaactgcatgtcccactggacattccaagctgcgttgtcggagtcgcgggtcgcggcctccagtcagcggagccgccgcccccagggtccgccacccagaagtcggcggaggggggcccgccggcgggagcgcgcgccccggtcgccgtctgcgggtagcggtggcctgggagcgcgcgaggccgcacgtgcgcgcgcccgcccgcccgccagccagtccgctcgcccacgcgcccacgcacgcgcccgcccgcccgttggcccgggaagtctcgcgatgccgtagccggctgctcccgctgcgggtggctcg

SEQ ID NO: 6883 - DNA, 440 bp, Homo sapiens
  source 1..440: mol_type = other DNA
gtccaatgtacggaatgaggacagggaacatgattgtttttattcacctgtggagtggatgaaagcaatattttattatttaattcaaaagccctcttcataatcaatccgtatgcttgttcaccagtgtatgccaaatatatgcaattaatatttgttgaatgaatgattccttatttcagataggaaacggccaaggccacatagcacctcctgccctgtgtccccggggcatagggacagggcgcgggaaccctgtgctgcgcggccgaggacggttgtaagtctgtcctcactcgcccgcgtcccacacctgggcgagggcaagggagctctggggctgcgcgaggtgctctctgcgcgacagctcctaccctctcactgggaaaccaccgcgacggatgcgcatgcacgagcgcgagtgaggaggcgcctgtgcg

SEQ ID NO: 6884 - DNA, 297 bp, Homo sapiens
  source 1..297: mol_type = other DNA
gagagagtgagactctgtctcatctctgaaatatagcatatcatagcatctctgaaacatagcatataatattaaatgatatattatgtacgtgctttataagcagtaaaatattacataatgcccttgaatctgctgagcatcccggggcgtactgaacagggaagttagagctgacattcaaagtcagggcctgtgcctcattcacacacgtagagttcagtagatatttgttgaatgaacaaataccctccagggagggatacaataagtctgatacaactactgtatttttcc

SEQ ID NO: 6885 - DNA, 432 bp, Homo sapiens
  source 1..432: mol_type = other DNA
cctggttagccttgctaagctgcccatgattggtgaggtcctccctccaaaatcttcaggatggagtttgtaggattgccctggaatgccatggtgttactacttggagaaagaaaagggtgactcttcaacatctctctctctctgcggaagtgggaggccccttgacggtttcttagctgggaggcctcacagttctgcgccggacagtcctgaactgccaagtccaaaagctgtggacaggggtaggtgtaaccgtggccagagctgcgctcagggactggacgactgccagtccgtcgcccgcacgtccccacctggtacgctttgaggaggccggcctccccgggcccgagggtgcggagctgccgaggagcctgagccgagcggtactccgcagcatcacgtgccagggtggggggctataaaata

SEQ ID NO: 6886 - DNA, 469 bp, Homo sapiens
  source 1..469: mol_type = other DNA
ccacctggtacgaggaggccggcctccccgggcccgagggtgcggagctgccgaggagcctgagccgagcggtactccgcagcatcacgtgccagggtggggggctataaaatacccgagccggggcgccgggcgggggacgtgaggaccagccctctccggggacctgcccgtgtctgcgcggctcccagggcagagcggtcgccgcgaactgccggggcttccagccaccgcaccccgggccggatttctgggcatgtgtccggccccggctgcccgtcccgcaagagcggcgcgttctggggggtctgtgggcgccggcagcgggggcgcaggggccggggttaccggggccggaggcagtggggtggcaggggccgcaggggcactgcctctgcttaagggccagttctcttcggcgggacgcgcagttttgcccgcgggtgaaccatgcgctcagccccagcag

SEQ ID NO: 6887 - DNA, 330 bp, Homo sapiens
  source 1..330: mol_type = other DNA
attccaaggaattcgtagggttcgacccacgcggcgggagggaacggagggagaatcaaaaggcatcctcccccacgacgcggaggcggtggtacgattcctcaaacgcccaagcttgagctttttttgtatgcgagatagaagccagggcaacctcgcccatcggagaacgttccaaacctactattagaagggacatttcttgattctagatttttgtatgttccttttcttcttttcaaagagaatacaaaactatagcaagtctgggggtttacttagagcaaatgattagttttagaagatggactataacattgaatcaattac

SEQ ID NO: 6888 - DNA, 301 bp, Homo sapiens
  source 1..301: mol_type = other DNA
agtctgggggtttacttagagcaaatgattagttttagaagatggactataacattgaatcaattacaaaacgcggtttttgagcccatggaaaagaaaaaatgattttttgtttataagggaagtccctgatcagactccagttgtgtgtccagagagtaatttttttttttcggaataaacttcacatagagttagaaagtctaggtattttttttaaacacacattttccagacctatttttaaaaacaatgtttttctaacaaccctatggcctcccaaagaaattgtttaggcttc

SEQ ID NO: 6889 - DNA, 422 bp, Homo sapiens
  source 1..422: mol_type = other DNA
cagttgtgtgtccagagagtaatttttttttttcggaataaacttcacatagagttagaaagtctaggtattttttttaaacacacattttccagacctatttttaaaaacaatgtttttctaacaaccctatggcctcccaaagaaattgtttaggcttctcctcgcctgctggcgggacagcgctgcagcccatggtgtggagaggcgggctgggctcggctggagaccggacctcggtgttggcctacagcacagggagccggccggcgacaagcagaggcgcgcgggcgcctgccgggcagtgtgctcgggttgcacgccctagcgcgggggcgacagcggcggcgcgggcgggcggtctcgtcgcctcgcattccagcaactgggatgcacaccaaggggccctcattgtgctccgt

SEQ ID NO: 6890 - DNA, 350 bp, Homo sapiens
  source 1..350: mol_type = other DNA
ttccccgggtctaactcgccgggtccaaccgcagcatcagccttggggcggcagataatctttcggtctcgcctggggcgcaagatgcaggatcgggggcaaatggcttctcccaacttccccctagtttctcggcccccgcgaaaggggagcgacaagcgcgggtgggcgcggactcttggtgcagtggtgcgatctcggctcactgcaacctcgcctcccgagtaactgggaaggtgagaagccaccgcgcccggccaggaacggttcttaaatgccgagagggcgcatgctagctctagccgctacccacggccgtgcggctctcgtgcccataggaggcgctggcg

SEQ ID NO: 6891 - DNA, 482 bp, Homo sapiens
  source 1..482: mol_type = other DNA
gtttctcggcccccgcgaaaggggagcgacaagcgcgggtgggcgcggactcttggtgcagtggtgcgatctcggctcactgcaacctcgcctcccgagtaactgggaaggtgagaagccaccgcgcccggccaggaacggttcttaaatgccgagagggcgcatgctagctctagccgctacccacggccgtgcggctctcgtgcccataggaggcgctggcggagcgtcgtgcctggggcgcagcggcctctgcagctctgaggttcagagcgcggcgcgcaggggcgcaggggcgcaggtccccggagcggctgggcatcgccgccaaccccgggacaaccaagccgccgaggacttggtggaggtggcggaccgcgcagtgttcctctgggtcccggggtcagaagccggacagtggcgggggctggacagtccgagcgcagagcctcccgggcgaagtctgcgcgcagcactcccgg

SEQ ID NO: 6892 - DNA, 530 bp, Homo sapiens
  source 1..530: mol_type = other DNA
ggggctgtcgcgccctctagtgggctccggggacgcatcccgctttccccagccccgggcggtcggcgccgctatctcagtggagcgcagcgctggaaccccgggggcccggagcggaggctaatctgggtcacctttcccctcctccgggcagccagtggactcctcgcaggctctgtgtgggcccgggaggcgccgggggggggcaggcgccgtcttctgagcccgcgggcagctgcgcggccgtcgcggccctcgccaggctggtttatgggggcggcggtggcgcgcggacagataggacagcgcggcccgggaacggcgtcgaggtccaggcggtccccctgccccgagggggcggatccggctgagcctctgcggcctagcccagcagcgtcgtcttcccggctccgaagacgtcttcccgaagccccgctgccccggcgcaccagctcccggtgatggggaatggggagatgtccccgaattctcctggggtcccgaggagcaacccgtggacgcacgtcctt

SEQ ID NO: 6893 - DNA, 496 bp, Homo sapiens
  source 1..496: mol_type = other DNA
tcattcccagatttggctgtagaaaattagaaagtgcttttactttaacatgaaaatgaatgatcagcctccttctcagcaggttctccaagggttcctgcaagaaccccggctgggtgcccaggtctgagcctggatgacacacattgttggaagtttcagaaattctaggtcaaaatggcactaattttctaaaagttgtagagagtgtgacctctttattaattgaaacgtgaaaggaagctgagaaaaaatatatatatatgtatttatttctttgttgtttgaattcttaatataaatggtttaaaggaccattgaaaactgcatgcaatcacagaaggttttggcttcaggcagctcccgccatgatcttggggcgtcttactgtttgaaccttgaattttaacctgggacatgtttgactaaaatgatgctgttaatattttctgttgtgcaaaacacaaagagaactaggctccagggttgtttctat

SEQ ID NO: 6894 - DNA, 181 bp, Homo sapiens
  source 1..181: mol_type = other DNA
ctcttgggttttacttaccaattgtgaattaaaatccgtcagcctgggagtgcagaggctgactgcaacctcaatcccctgggactacaggtgtacaccagcaagatattttatggttacacataagagtctgaaatatggaattggaatcagacatcctctgttgctgctctcagcagat

SEQ ID NO: 6895 - DNA, 615 bp, Homo sapiens
  source 1..615: mol_type = other DNA
ttaaatcatcatcactggtgatcctaaattctgatttggggatttaggaccccgtctgtggctataataataagcttaaaattactaaaggttattacccatgcaagatttcatgtttcatcagttgacttcaaaatactgtaaggaattcttttcttacatggggttagatgcctagattaattttagtaacttaagaaaagtgatttgaagaaagtagtttagacttcaaccctttgatgtcttggggaagtataatacatgctgaggtcaacagatatttcctgaacacttgttttaaaatcagagcacagctaattttgtgccaggcactgtgctaggttctgggaaagaatgttggttgattaaatgaataaatttattagtcaaggagattgttattattttgtaattctgtattataactatatgcctaattgttgtacaccatctcacaatcaagccttgtgagattttccaaattttatcttgatcaaactggtttgcaaattatttttcagggttttcttaaaaaaaaaaaaaaaaacccaaactttataagatcctggctatcctgtggattttttatagcaacatcagagctggatctagaaa

SEQ ID NO: 6896 - DNA, 442 bp, Homo sapiens
  source 1..442: mol_type = other DNA
caccttatatgtgtcattaactgtccttttaaaaaagactccgtctctacaaaaatttttaaaaattagccaggtgtggtggcatgagcctgtagccccagctactcagaggtgccactgcactccagcctgggcagcagagtgagattctgtctcaattaaaaacaaaataaaaaatctcatgattttctaagcagctagcttttggagcgagctttttaaaagtcggttttcttccccttttgctgtagaaaggcaaaggcatcacaacatggtgtacactttgacggtccccgaggccacggtgaaagtgctgcccgccaggctaccagggaggtcagaaagtcactattttaatggaaactcttccctgtacagagaaaggtttcattgaaatcaaacccaccttcagccagttggaagctgtcaacctgcatgaagt

SEQ ID NO: 6897 - DNA, 141 bp, Homo sapiens
  source 1..141: mol_type = other DNA
tataatataattttactcctgggctcaaccaagtagctggggctacatgtgtgaggcatatgccatgtagatgagttgtgaactcatattccactttgtagtctcatatgtccattctggacttggtcgatgatcaccatg

SEQ ID NO: 6898 - DNA, 246 bp, Homo sapiens
  source 1..246: mol_type = other DNA
aagagtgaattttaagaaccactgttctaagaagatttttactaacatagttgtttcttcctctagacagagactcctcaccctagggaagttgaactgttcagttttagtcatattttattaaacttgattatctctttcagcacatgcagacaagttttaatgttcatctgcatgtaaaatagaaatgctcaggaattggccctatacctggactattttggccaacaatgtctcaaatcgatg

SEQ ID NO: 6899 - DNA, 443 bp, Homo sapiens
  source 1..443: mol_type = other DNA
cccaatgacaacccatggagagtgggccctccctcacctggtggcctggttgtcattggccagtcttgacaacccaggtgctgaacaacccaggtgccctggcataaccctgacatctggatggttcatctgctgctgatttaaaattgtaatttgagtctttccctccatggatgatcacaatggatcatcccccagtggcttaatggagtcctgtactcccttaaaagcagagaggccacaactttgataaaaagataatgattcagaattgtctgtgttgatccagtagtcatacacattgaaaaacacttgaacgcttatttctaaagatgtagaattttcaacctggagtcctaattaaacttaaggtttgagctggtctctgaagtcaaggagatgatgacactgaattttcttgaaaaaaccagtgcttcaaggct

SEQ ID NO: 6900 - DNA, 443 bp, Homo sapiens
  source 1..443: mol_type = other DNA
aacaacccaggtgccctgcataaccctgacatctggatggttcatctgctgctgatttaaaattgtaatttgagtctttccctccatggatgatcacaatggatcatcccccagtggcttaatggagtcctgtactcccttaaaagcagagaggccacaactttgataaaaagataatgattcagaattgtctgtgttgatccagtagtcatacacattgaaaaacacttgaacgcttatttctaaagatgtagaattttcaacctggagtcctaattaaacttaaggtttgagctggtctctgaagtcaaggagatgatgacactgaattttcttgaaaaaaccagtgcttcaaggctcatgatggtggattctacatggccaagcctgacccccgggggcctgtgttcacagtctgtgggtctagggggagggaggggccc

SEQ ID NO: 6901 - DNA, 439 bp, Homo sapiens
  source 1..439: mol_type = other DNA
aagagaatcattgtacttttattttgctcgcagttaagagccctagccctaaaactgtcgtctgttaccctgtctccacacaagtcccggcaggggcttcttgggcggaggccacgccgaccaataggaacccactgtgttcctacaggtcagcctttaccgcggtgccaggagctcctaacaggcctggaggggaatgtccagcctcctcccgcccgaacgtgctcgaggggcgggcagtcgcacctggcaggtggcgggcccgtgccctaacgtgtgcgtggggtccgggaacggcctcagcctggccgtccacatcccaggggtggaaagagcggggagagagggcgcgcgcgccctcctcctcccggcgggcacggccccccggcatgggcgctgggaggaggggctgctgctcgccgctcgcggctctgggggc

SEQ ID NO: 6902 - DNA, 475 bp, Homo sapiens
  source 1..475: mol_type = other DNA
gatgtcactccccaggtgtggggagatggagttcccctccaaacagcgtccacacacgtggagacagttgtgcaatttggtcacagagtgtcctccactgaagcacgctggcagctggcctccttcccctgggactaagttcactagggctcgccaaatattttggttctgattaagagcaaccagattcagctttttaaactacaattatactggctcgctgccagcttgcgacccggcataaaactgctgcagattctcggccacttcagacgcgcgcgatggcgaagagggtgcgccgggagcgctgctcttcgcagcgcccccaaatttcggggaccggcaagcgattagcaccagaaacaaagttgttgctcgggcgacttggggcccatcgccgccgggtacccgggtgaggggcggggctggccgcacgggagagcccctcctccgctccggccccgccccgcatggc

SEQ ID NO: 6903 - DNA, 565 bp, Homo sapiens
  source 1..565: mol_type = other DNA
acacatatcggtatctcattggggtaagggtgatgagttggctacctctcccctctttgatgcctgtcatacagtaggcatacaatacttcagaattaacattttaaagacttttaaatacttaaaagagctagattttcacttatagtaaataaaatcagtgttgtttaaaatcagtgagtcaataaataaaactttgcttctaaggattggaaccctatctgttttttaaacacagtttttaccactatgatttttatttaaattacttgtctacatgtttacattatacacatatccaacacataattatccatatatacacacattcatattaatatagttgtttgcaatcatagctatgtatttttagactgcatgatattctaacatgtcagtgtatcataatttagctaaataaactaaaatgcaacatgtaaggtttccattttttgctttctgatgaatcatattctggagctccatctaagaatccccatggaccaaggacctccgcggctgagcggcgagtccgggaggggctctgcgcgtccccgccccgcgc

SEQ ID NO: 6904 - DNA, 461 bp, Homo sapiens
  source 1..461: mol_type = other DNA
aatcccagctactcgggaagctgaggcaggagaatctcttgtaccggttgcagtgggccgagatctcaccattgcactccatcctaaacagacggaaattttattatcctgtgacagtatcttaaagttagtgataaacttccttagctctttactgagtacaggtttactgtatgtaaatatgtataatattagattagtgcacatgttttttcttttgggaagacgtaaaaatattctcaagcctaacagtccatttcaaaagcccagcatttttaaaggactggacaagggcaacgttagccatttttggtctggcagtatcttaaaacaaggcttgaaaaatgtcatgttatttccaaatcccatttcagaactttaaaaaaaaaatagcattttgagctcctaagaacgttttgtggcagtgcctgcgagtcagcgccacgtaaccagaggcgctc

SEQ ID NO: 6905 - DNA, 513 bp, Homo sapiens
  source 1..513: mol_type = other DNA
gttagtgataaacttccttagctctttactgagtacaggtttactgtatgtaaatatgtataatattagattagtgcacatgttttttcttttgggaagacgtaaaaatattctcaagcctaacagtccatttcaaaagcccagcatttttaaaggactggacaagggcaacgttagccatttttggtctggcagtatcttaaaacaaggcttgaaaaatgtcatgttatttccaaatcccatttcagaactttaaaaaaaaaatagcattttgagctcctaagaacgttttgtggcagtgcctgcgagtcagcgccacgtaaccagaggcgctctccgggcgcggcgcaaggacacgcggcgccgggtacctgccgggagcgccggatccaatgggaggagggcccgcgccgcacctcaacctggcagaggacgtcacgacgccaaggcggtcgccgggccaatgggaggccgtcgcgggcagggacggggccgggaggagtcggggctggg

SEQ ID NO: 6906 - DNA, 529 bp, Homo sapiens
  source 1..529: mol_type = other DNA
tgagcccgcggggtcgctgacgacgcatgcgccgggagggggcgcaatcacggactcggcttgcggctgccgaaatctggccgccgccgccgcgagcgctcccggtgagaggcgcccgcccggtgggcccagggcctgccgagtgccggttggcttccttggcggcgcatgcgcgctcctggggtgggtggggggcgccactcacagccccaggtgctgctggaggtgggagccgcggcgcctcctggacacaggcggggtagtgcgggacttcgggccgaggcccgccctgcctgagaggccctctggggcagctggggttaccgcacggcggggccgggcggcttgagggcgcccggagctgcggccgattccagcagctgggagccactcgggcacgtttggagcagcgcccaatggggcgccggggcggccagctcctccggggaacccccgccctcccggcgcccggcccgcgtgccgcagtccgcagtccgaacggccgccgttgccggccgcgggctggttc

SEQ ID NO: 6907 - DNA, 565 bp, Homo sapiens
  source 1..565: mol_type = other DNA
tgtggaccaaatgtgccttaacgcatcaagataagtaattttcacacgttgttccaacgaggaaaattacactgtcacttgatttttaataaaagggcaagggaaactggccgagggcgcatgccctgtctcaactcttctctcccagcaccaggagaggaaacacgaatgaaagctggcgtcggctcttcctcctcctagcccccggcatacggggggaaagccaaagagcctaaggctagcgctctgccggccggccgcgccctccacccgaccaggccccgcctccccggctttctagtaaccggcgccgttcccggccggggcagggaacggtgcgcctgcagagccagatttcggcccaaggggcgcgggagtctcttcgggcgtccgggatcccctggcgcggctccgtgctgcctaacggggcaagtcgcatgcgcaccgagccgcgctggggggaggggcgagcgcagagcctccgccggccgtctgagcccgcggggtcgctgacgacgcatgcgccgggagggggcgcaatcacggactcggcttgcggctgccg

SEQ ID NO: 6908 - DNA, 548 bp, Homo sapiens
  source 1..548: mol_type = other DNA
atcttctgctatatgatggggtaaattaacaaatcatgttttcccactcctgatccttatctgaataagtgcttcagtttgatggagcatacagaatgaaaatgtttacaggaggattttacggccagaaaagtgcattttttgaaagaaaaagatggcttttatttcaaatccaaaagatattcattaaaacataggaattactaggaattaagactgtaaagatctcttttccagtagatgtggaccaaatgtgccttaacgcatcaagataagtaattttcacacgttgttccaacgaggaaaattacactgtcacttgatttttaataaaagggcaagggaaactggccgagggcgcatgccctgtctcaactcttctctcccagcaccaggagaggaaacacgaatgaaagctggcgtcggctcttcctcctcctagcccccggcatacggggggaaagccaaagagcctaaggctagcgctctgccggccggccgcgccctccacccgaccaggccccgcctccccggctttctagtaaccg

SEQ ID NO: 6909 - DNA, 491 bp, Homo sapiens
  source 1..491: mol_type = other DNA
ttattccagaggaatctaatctacatttgtttccaggcctcaaacatgtctttaaattcacgtgtggaaagatggctccaggtctccattctcaaccgtagtttgcagtcgaccaaaatatcttctgctatatgatggggtaaattaacaaatcatgttttcccactcctgatccttatctgaataagtgcttcagtttgatggagcatacagaatgaaaatgtttacaggaggattttacggccagaaaagtgcattttttgaaagaaaaagatggcttttatttcaaatccaaaagatattcattaaaacataggaattactaggaattaagactgtaaagatctcttttccagtagatgtggaccaaatgtgccttaacgcatcaagataagtaattttcacacgttgttccaacgaggaaaattacactgtcacttgatttttaataaaagggcaagggaaactggccgagggcgcatgccctgtct

SEQ ID NO: 6910 - DNA, 444 bp, Homo sapiens
  source 1..444: mol_type = other DNA
caggcttgtgccaccgtgcctggcctaaagccagagcttctgtcacttaagcatttctcttaatttcagaatccctaaaatctatccaaatacattgtatgggctaagtgtagttcccgaggatcacttgagctcaggagttcaaagttatctgggtatgatggcacatgcatctgtgatcccagctacatgggctgtgagcagtgtttgcaccacttcacagacagagcaagactctgtctctaaacaaaaaaatatatagtctatggattccaggctcctctgaagggttccaccccaggagtcatagagtctctgaaacaatcggttgatatgctccaggacctggcgcgtcagtactgcattgcctggcaaccaagctgccacgccgccgggcctgaagcgggcgctcttccagcctggagaaggctgcgggtctccatc

SEQ ID NO: 6911 - DNA, 269 bp, Homo sapiens
  source 1..269: mol_type = other DNA
gtgtagcaaacctaacttgaaataataataataataataataaagaccagttttccctctttctatagaaggaaattaggatgtcctggaagaggctgcttcctgaaaggagtttccttaggcttggaaatccgtaggatacaactgtccgcctggtccttccaaaggtgggaatggtctctttatcctgctgcaggggcggcaggcggcgaggtgacgcgcggcggggaccgcgcagcccagcccacttgtgcgcgagatttaaaagt

SEQ ID NO: 6912 - DNA, 476 bp, Homo sapiens
  source 1..476: mol_type = other DNA
tatataaccagatcctgctcttaaaagggaagtcatttgatgaaagtgaaaagtattctaactactgtttgctcatttaaatttatatatattcatgcctgaatcacctctgtacctggaatcaggtgccaggaatattgaataaataaacatttatgcatcccaaacttaaatatgcataagcatcatcttgctaagatgcagattctgattcagtagatctggtatcaaggtcatgaggacaatggttcttgaccttagctgcatatgagaatcatctgtgatgtctgggtcccacccgagggattctgatttaactcatttaagctctccaaagtttaagtagcaaagatctagagttaatagagctttacgtatgaaaaaagaaaacatttaatcgaatttcttcttaaatgaattgctgcaaatatctgaataaatatccgcctggccacgcccgtcggttggcgcccctc

SEQ ID NO: 6913 - DNA, 385 bp, Homo sapiens
  source 1..385: mol_type = other DNA
agttccaggttcttggtgttatgaacaaagaatttaggtatgaccctattctgctgcctcagaaggcctatttgggagaactctgactgtctgggaaattttcaggtgaaacggtttatttcaatttaattccactcacaaatgttttgctgagtagaatagtctctgactgattgtattttgatggaggcgttcaccttgcaggtgaaggctactccgctgcagggaccggtactggggcggcgtttgttccccgcacgcagtaggtgatccacacctcccgccgacaggaggaagaggatgccagctcaggcaccagctgaggtttggcatttgctggccgcgggcgccgacctccagggggcgccgtggcctcgcgctgtcc

SEQ ID NO: 6914 - DNA, 463 bp, Homo sapiens
  source 1..463: mol_type = other DNA
taggtatgaccctattctgctgcctcagaaggcctatttgggagaactctgactgtctgggaaattttcaggtgaaacggtttatttcaatttaattccactcacaaatgttttgctgagtagaatagtctctgactgattgtattttgatggaggcgttcaccttgcaggtgaaggctactccgctgcagggaccggtactggggcggcgtttgttccccgcacgcagtaggtgatccacacctcccgccgacaggaggaagaggatgccagctcaggcaccagctgaggtttggcatttgctggccgcgggcgccgacctccagggggcgccgtggcctcgcgctgtccgggccggggcactggggctccgccatcgtcgccaagcgcgtccccgccgcgagccgctaatcgtccgccgctcccgttaccggggcaaccgcggcgcctcctccgtgtcggc

SEQ ID NO: 6915 - DNA, 564 bp, Homo sapiens
  source 1..564: mol_type = other DNA
taggtatgaccctattctgctgcctcagaaggcctatttgggagaactctgactgtctgggaaattttcaggtgaaacggtttatttcaatttaattccactcacaaatgttttgctgagtagaatagtctctgactgattgtattttgatggaggcgttcaccttgcaggtgaaggctactccgctgcagggaccggtactggggcggcgtttgttccccgcacgcagtaggtgatccacacctcccgccgacaggaggaagaggatgccagctcaggcaccagctgaggtttggcatttgctggccgcgggcgccgacctccagggggcgccgtggcctcgcgctgtccgggccggggcactggggctccgccatcgtcgccaagcgcgtccccgccgcgagccgctaatcgtccgccgctcccgttaccggggcaaccgcggcgcctcctccgtgtcggccccgatcggctctagcgccggagcccgtgcctggacggaggcggaggcaacggcggctggagctgccggtgagtccggatgtgggagccagagggccagct

SEQ ID NO: 6916 - DNA, 304 bp, Homo sapiens
  source 1..304: mol_type = other DNA
agttatcttctgtatctaataaaggcctggagatatgtatagatagagataaaaatattaaaaaaaaaacaaaactatctgacttaagtgtttttctcagcctcttcagtggagaagggcatttggctatctgctttgttaaagaaagcaggcactgccttattgcatgagacagggtctcactctgttgctcagactggagtgcggtggtgtgatcacagctcactcatgggggggcgccagcccggaagtgcagccctgccacactgcagcatgtgtttgttttagccttttaaaaaaagaa

SEQ ID NO: 6917 - DNA, 342 bp, Homo sapiens
  source 1..342: mol_type = other DNA
atctctaaacatgggattccttgagaacaaactgggtctgataattatttgtccaagtggactaatttgtcacattccagcatcctgtctaaatttgatctcttgacactttgagcatatcctgaaatgagtgcccttagacctcttagggaatttcactttaactatcaagacccctggaattttgatcatgcattatcaactgatgtgtcagggatgtgaaaaaggacattcctcccctgttgcccattgtgacacctggcacccatggtagcagggatgggcccatctcatctgaagcaaatgtcctcacagttattgatgagctcataagtgctgggc

SEQ ID NO: 6918 - DNA, 349 bp, Homo sapiens
  source 1..349: mol_type = other DNA
tgcttagattagaagcacagtttcttgtcaccaacactttaaaacacctctgttattgcccttgacgcttattgtaataattgacatgtctccaactgtaacaattccctatagtttacattcaatctgcttcccaattaaaatgtcagcatcatgatgacaggaacgtcgtttgcaggcgtcactgctgcagccatatctccagcacgtttccagaaaatgtcattggttgaaagcaataattatgaacgagaatactgcggctcaaaattcaagagtcttgcccagagttttttaggagaggcagcgccagctccacgcagccggcccggggtcgctcgcactgacg

SEQ ID NO: 6919 - DNA, 598 bp, Homo sapiens
  source 1..598: mol_type = other DNA
attttgcaatagctattgattataaataatacttggcagtaaagttcggggaggcccgggagcgcctgggccacgtgtgcgcccgcgcggctgcctagaggcgctgctgcagggaggcgggacagattcgcggctcgcacgtggccgcgagctcacggcctgggggtcagggagaccgtgaagggcccggatccctgttactcacccgggggcggggaaggaggcggggccgcgcgaccctgcgccactcttttcgagcacagccgcctaacccggaggggttggcttcccgccgcgcaggcgcagagacgcgaccccgcctccgggccgccccgcgctggcgcagtgcccggacaggcgaaaagtggcgcgcactggcggcccctccccactctgagaaatgaggtgtccgttactcccattactgttgggtgctggaaaataacggagatttccacgtgcagccaggcagctcttaggggaaggctagctccaccctacaaccccgcccctcagccgcgggaccgcccctccgccctcgctcgttggtggactcggagggggaggagcagggctgagctggccacgccacctaggg

SEQ ID NO: 6920 - DNA, 489 bp, Homo sapiens
  source 1..489: mol_type = other DNA
ttaatttatgtgagatctactaccagtagtcattctcaacatcaactcaaaagcttgtggtggttggctccgggagaccagtcggcggcggtttacaagctggccagcctctggatgggtgcacacaccgggggggtgcaccaacccggtcgacgccacaggcaggtactggcttaggtcggagaggtcggtcctcccgggccctcgggcgctcatgagaacgccgactgcgggaagcggctccgagagatggagacgcacgcccccgccacccccgctgcgtgggccactctcctgaggtccatgtcgccgccgaaagcacgtggaaggacctgccgctgcggccaaggtcagctgccagctcggcccgtcgagctcagaagctcgcgctcgcgacaggctcttccttcccgagggtggccccagctactgcggcggcgcgcgctgtccctaggtggcgtggccagctcagccctgctcctccccctc

SEQ ID NO: 6921 - DNA, 629 bp, Homo sapiens
  source 1..629: mol_type = other DNA
gtgcaccaacccggtcgacgccacaggcaggtactggcttaggtcggagaggtcggtcctcccgggccctcgggcgctcatgagaacgccgactgcgggaagcggctccgagagatggagacgcacgcccccgccacccccgctgcgtgggccactctcctgaggtccatgtcgccgccgaaagcacgtggaaggacctgccgctgcggccaaggtcagctgccagctcggcccgtcgagctcagaagctcgcgctcgcgacaggctcttccttcccgagggtggccccagctactgcggcggcgcgcgctgtccctaggtggcgtggccagctcagccctgctcctccccctccgagtccaccaacgagcgagggcggaggggcggtcccgcggctgaggggcggggttgtagggtggagctagccttcccctaagagctgcctggctgcacgtggaaatctccgttattttccagcacccaacagtaatgggagtaacggacacctcatttctcagagtggggaggggccgccagtgcgcgccacttttcgcctgtccgggcactgcgccagcgcggggcggcccggaggcggggtcgcgtctctgcgcctgcgcggcgggaagcca

SEQ ID NO: 6922 - DNA, 605 bp, Homo sapiens
  source 1..605: mol_type = other DNA
ggaagcggctccgagagatggagacgcacgcccccgccacccccgctgcgtgggccactctcctgaggtccatgtcgccgccgaaagcacgtggaaggacctgccgctgcggccaaggtcagctgccagctcggcccgtcgagctcagaagctcgcgctcgcgacaggctcttccttcccgagggtggccccagctactgcggcggcgcgcgctgtccctaggtggcgtggccagctcagccctgctcctccccctccgagtccaccaacgagcgagggcggaggggcggtcccgcggctgaggggcggggttgtagggtggagctagccttcccctaagagctgcctggctgcacgtggaaatctccgttattttccagcacccaacagtaatgggagtaacggacacctcatttctcagagtggggaggggccgccagtgcgcgccacttttcgcctgtccgggcactgcgccagcgcggggcggcccggaggcggggtcgcgtctctgcgcctgcgcggcgggaagccaacccctccgggttaggcggctgtgctcgaaaagagtggcgcagggtcgcgcggccccgcctccttccccgccc

SEQ ID NO: 6923 - DNA, 296 bp, Homo sapiens
  source 1..296: mol_type = other DNA
taatattttatatctctagaacaaatatagtatccccatttcacaatcgggaaaacagactcccagaagctaagtaacttgtttattgtcagacatctagtgagtggtttcaccaaacccttttcgtccggccccgcaccgtgggaccaggacgctgcctcgaccatggcggtctcctggaaacaggctgctttgagccgcacaaatttcttgccacgagagcagaagattatgatctctgatgctgccttagggctgaagacggagatcctgttccggggcagaggtctccccgc

SEQ ID NO: 6924 - DNA, 462 bp, Homo sapiens
  source 1..462: mol_type = other DNA
ttagtttttacaattcagtcaaatagttttaagtatttacaatataatcaaatatatattgtgaaatatatatagtaaaaactattataaaaactaaaagtctcataaatacactgagtcattcaactaaataaatatctagataaacagatgtaaataaataatatgactagaaagaagtgttagaagtattaatacgttttacacaggttattttaaaaaattttttctcgtgaacccagaaggatcacgtgagtgccactgcattccagcctgcaagactctgtctcaaaaaaataaaattttttattttctacgctttctaaaacttggcatgtgtaccatgttttacttttcttcaataaaaacagtgaaaatgttattcaaaaggtaaaacccatgtacatacatttttatactcttcctttataaaatgatctgatgatttcagggatgccagta

SEQ ID NO: 6925 - DNA, 454 bp, Homo sapiens
  source 1..454: mol_type = other DNA
gattttgcaattgtttgttaaaacaacaaaccaacgccttgtcttttactgtcagcgacagtcaagtcctgacactttctataccttcatgcatcttaaattagcaggaggaggttacatctgccaatttttaaaatttttaagtttttggtccctgactttatagtaaattttaatacaatcacagggaagtctgaaattttaaaagacagctggttggacccctcggggagcacacagtgaggcaggctctttgccgaattgtggaatagtggcctggtgactgcagtgtaaaatggaggtggggtgtgcagccctgcctggagagggccccagacagaaggccgcctaccggggaggccggaggccggctagtcgcggactcgggcgaacccaccctcgcgcaagtctgtccccaggggaggtccccctttcgggaggaagtttttaaggg

SEQ ID NO: 6926 - DNA, 372 bp, Homo sapiens
  source 1..372: mol_type = other DNA
acaaaccacatcacaacctactcaggattgtgctggatgattttgcaattgtttgttaaaacaacaaaccaacgccttgtcttttactgtcagcgacagtcaagtcctgacactttctataccttcatgcatcttaaattagcaggaggaggttacatctgccaatttttaaaatttttaagtttttggtccctgactttatagtaaattttaatacaatcacagggaagtctgaaattttaaaagacagctggttggacccctcggggagcacacagtgaggcaggctctttgccgaattgtggaatagtggcctggtgactgcagtgtaaaatggaggtggggtgtgcagccctgcctggagagggcccc

SEQ ID NO: 6927 - DNA, 207 bp, Homo sapiens
  source 1..207: mol_type = other DNA
aataatgtttagtgcactgcaattgagtattagctatctagctatacattctgtgcccaaaagaaaacaagggcatagcttggcatccagctctcagagctgtgaaatcagtggatgagaagactcagggtcccttttctcttcctatcttggtgaagaagcttgcgagactcgcagcctgcgtcagccagcccagctatttaagca

SEQ ID NO: 6928 - DNA, 413 bp, Homo sapiens
  source 1..413: mol_type = other DNA
atatctgtggtcccagctagttgcagtgagctgagatcgtgccactgcactccagcctgtctgaaatttaaataataataataatttattatgtattttcaagtagctagatgagaggattttgaatgttctcaacacaaagtaatgataaatgtttgaggtgatgaatatgctaattatcctattttgatcactacacattgtatgtatccaaatatcactatgtaccataaatatgtacaatcattatgtgtcaactcaaatagttaaaaaatatattagagagcaaggacctcctttgtcgaggtcaggcccctaggagggagaggtcttccccttcgtctccttggggggaggggaaggtgttggggaacaactgccccttcctctcccgcgccccgtcgcacgagcgc

SEQ ID NO: 6929 - DNA, 372 bp, Homo sapiens
  source 1..372: mol_type = other DNA
gaaagggggggttactccgacacaccgtggcccaggttttaccgcagacgcttaaaacgaagcttaattcttggagcgctttagacttgagaggccactagctctaaagagatttgtttgtaatagaaatcgagaaagggagtggggcccgcctcttttctgacctgaggggccgggaggattacgggcggctccccctagacgcgcccccaggcgagctggagactggggcccttgcttggtagaggggcggggcgcgcctagcggccacgcgcgcgggcgtcggagggggcgtgtctcgcgggcgcgcgcgggcgtcggagggggcgtgtcccgcgggcggtggcggcggcggcggcgcggactgggtgc

SEQ ID NO: 6930 - DNA, 812 bp, Homo sapiens
  source 1..812: mol_type = other DNA
gctcgcggcgcagcagcggagcgagcgccgccgaggcccggggccccagaccctggcggcggctgccgcagccgagacggcagggcgaggcccggaggcctgagcaccctctgcagccccactcctgggccttcttggtccacgacgcggagaaggagcggcgactcagggtcgcccgcccctcctcaccgaggaaggccggtaagtgggggggagggccgcccgggcggcggcagtggcgggacggggagggcggcgctgtccatactgtggctccggcggcggcggccccgccgggcgggggctggcggccgagcaggatcgggttacacagcagccgcccgggggctgggggcgtttgttgggagcagcgcgtcgcctggaccccctccccactggaggctgggacgccgcctccgcgctggcccggacgctccaccgagtcaggtcctttgaggccaaggagcggagctgctcgggcccgtagcccccgggtcccaccgcagccccgcgccggcccgcggccctcctggccccctcccccagggcctctccctgtcgccggaaggcgccgttgagtgcggccgggcgggttgagtcagccccggggcccgggcggttccgcctgcggggctggacagcgattctgcgcttcagccgtccggcgccgctggcccccgcgtccggccacccgaccgctggagctggcggggctggggcgcgcgtcctgccgggcgccgtgggggagtgaagttcgcaaacttccggggcgcgggggtggcggctggcccgtgtgggggccccctccggcg

SEQ ID NO: 6931 - DNA, 865 bp, Homo sapiens
  source 1..865: mol_type = other DNA
aggagcggcgactcagggtcgcccgcccctcctcaccgaggaaggccggtaagtgggggggagggccgcccgggcggcggcagtggcgggacggggagggcggcgctgtccatactgtggctccggcggcggcggccccgccgggcgggggctggcggccgagcaggatcgggttacacagcagccgcccgggggctgggggcgtttgttgggagcagcgcgtcgcctggaccccctccccactggaggctgggacgccgcctccgcgctggcccggacgctccaccgagtcaggtcctttgaggccaaggagcggagctgctcgggcccgtagcccccgggtcccaccgcagccccgcgccggcccgcggccctcctggccccctcccccagggcctctccctgtcgccggaaggcgccgttgagtgcggccgggcgggttgagtcagccccggggcccgggcggttccgcctgcggggctggacagcgattctgcgcttcagccgtccggcgccgctggcccccgcgtccggccacccgaccgctggagctggcggggctggggcgcgcgtcctgccgggcgccgtgggggagtgaagttcgcaaacttccggggcgcgggggtggcggctggcccgtgtgggggccccctccggcgctcggagcccgacgcctcgcgagggcgcccgcggagcctccccggccctgggcgttgggcgagccccggggcggtcggaggggcccgggggcggtcggagaagcccggacgccggctgcgcggtaactttccgtcctctcccgggacgggggccctagggctggggagggggctgcctggactcggggaggactggttccggccaa

SEQ ID NO: 6932 - DNA, 387 bp, Homo sapiens
  source 1..387: mol_type = other DNA
gttttgaatttttaaaataattttaacagtaaaaatgaaggttactttttatccccaccagaacaattaaaagtgcttgaggaggcactgcaaacaattggtagaattgttttattagactattgggaattaacaactattttaaagatttgtttttaataggcgatgaagtttactgagttataaagatcatactggaaaatttttaagttatgaagaattacagcgatgtttaagccagtaacagtagtgtttaaataattcagaataatggcagctgctgtatttgaggcatcaggtgctccagatatttacagttcaaataaagattgaagaacagtttgtgcatcatcacagtgctaagaaattttttgccagggaatctgg

SEQ ID NO: 6933 - DNA, 334 bp, Homo sapiens
  source 1..334: mol_type = other DNA
tcaatttatttgcctttataaggaccaaaacacgaagctattttttatttttatttatttattgtcgcccaggctggagtgcagtggagcgatctcggctcactgcaaccaggctggtctcgaactgctgacctcaggtgatccacccgccattacaggcgtgagccacgcgcccggccggactggagtgcagtggcgcgatctcggcccgagtagctgggacggcgtgagccaccgcgcccgaccccggaagcttctcagtctcagagcttaaatcgcgagaactgacgggctttcgtctcgggtcaaatgcgcgcctcggaccctagtgcgc

SEQ ID NO: 6934 - DNA, 686 bp, Homo sapiens
  source 1..686: mol_type = other DNA
cagcaggagcccggcgcgggcacagtcctcccacagtcgctcccgcagcctctgccggtagccaggagcatcctggggcaggacagctgcttggggcccaccagcgcgggcaagtcgggcagcagggcgtcgggcaggtccagcaggtccaccatgtagagcaccagggaggggccgggccgccgcaacgcggcgctcaccagctccaggtactgctcgcggctcacctgcaggcgtagagcgcgccggtggtgcgacagcagccagcagcgctggcacacggtccgtgccagcccgccgtctgcctccgccgtgcggaggaacttctctcggggcaggtagccgggcactccggcgtcctggcagtgcagctctgccccacagcccgagcagttcacgccgctgggcggcaatgccgggtccgggtgccccacgaccgggtgctcccgggacctggcccgctcctcctcctcctgctgttgctggagctcctgcagctgcttttggttgcggctccggatccaggatgtactccgggaacaaggaggaggcggcagcgcacctcctctccaggagcggctcccggaggccatggcgcgctgccgtgggagcggatcctggagccaccagcgcgcacgcgcactagggtccgaggcgcgcatttgacccgagacgaaagcccgtca

SEQ ID NO: 6935 - DNA, 255 bp, Homo sapiens
  source 1..255: mol_type = other DNA
acatatcatctgagaactgtgacattgtgagaagaggaagttaaaagtcatcctttaagacaatttactttgacttacaaacagtactgtcccggaatatttccaggttcgttaagtcgactgtggctttaaggaaaatttttaaagggtgccctttgcttcaaattcaaaacgtaatttatcttacgtttcgttcccggcctggtaagtgtgggaacaaggctggggactgtgcagccggcgcatgggaaggcc

SEQ ID NO: 6936 - DNA, 357 bp, Homo sapiens
  source 1..357: mol_type = other DNA
gtcccagctactcgggccgagatcgcgccactgcactccagtccggccgggcgcgtggctcacgcctgtaatggcgggtggatcacctgaggtcagcagttcgagaccagcctggttgcagtgagccgagatcgctccactgcactccagcctgggcgacaataaataaataaaaataaaaaatagcttcgtgttttggtccttataaaggcaaataaattgagcacgaacactttttaataataagtatacctggttttgttttcaggtgtcgttatttgtgcaacaacattgaaaaacaaaccgcagattgcgggagctgtcctctcaatgcccaagcttgacctaatttgcgca

SEQ ID NO: 6937 - DNA, 465 bp, Homo sapiens
  source 1..465: mol_type = other DNA
gtgaaagctgcattggagaggccagtgttcctggttcattaggtgcctccgtggcagctccaacgaggaaggagctgggacccctgctcctctcagctgcgctctgttctcccgagaggcttgctggagggcgagcagttccacagcaggcctgtggccagcggggacacagtccacaagtgggggtttttaacagcttgttcttaagagagcttcccaaaccacagagtaatgagcactcaagccgctcgcactgcggtgcgatccctgagggctcggggcaggtgagaccgagcgcccatgggccggtcacgccgggtgcccgctcaccccccgacgccagcaggagcgcgcgcgcaggccccgcggggccgggagggcggcacgggcggggcccccgtgctctcaccgccccggggtgtggttcccgcggacaggccgggcggggcggcgggtttaaggcgc

SEQ ID NO: 6938 - DNA, 394 bp, Homo sapiens
  source 1..394: mol_type = other DNA
ttattatgaactgaactgctggctttcagtcagcaaccctgtaaatcccatgcagaataatgcacgctgcaatgttacacattcagtgtgaaagctgcattggagaggccagtgttcctggttcattaggtgcctccgtggcagctccaacgaggaaggagctgggacccctgctcctctcagctgcgctctgttctcccgagaggcttgctggagggcgagcagttccacagcaggcctgtggccagcggggacacagtccacaagtgggggtttttaacagcttgttcttaagagagcttcccaaaccacagagtaatgagcactcaagccgctcgcactgcggtgcgatccctgagggctcggggcaggtgagaccgagcgcccatgggcc

SEQ ID NO: 6939 - DNA, 342 bp, Homo sapiens
  source 1..342: mol_type = other DNA
gctttaaagaatgaatgacattttaactgtcactttctaggattgatgttacctcttaaagagctcctagaagtcgttaggtcattctaaatgtatacattgaaatacaatttgggaaatatgaatatgataaatcttaatgatttgagtgtactgtatagaaaataacatcttagccatttgaaatcacgacatttcagaaggcatggttttggaacctttctgtatccattatggtaatttccattgatgatgtgaaataagataattgaatctccacaatgaacttgcaggtcgagttaagtttttcagactcggtacttgcataatgaaaatacggaa

SEQ ID NO: 6940 - DNA, 465 bp, Homo sapiens
  source 1..465: mol_type = other DNA
aatgaacttgcaggtcgagttaagtttttcagactcggtacttgcataatgaaaatacggaaggcgggcctcgaagcaagggaagcctctagtggccgaactgctaggtggagcccgcgccgcggagcccacgagcactccatatccggggcgcgagcccccgggaggcccgcccgaccgctgctcattctggcctccgctccggccccggctgcgcctaccccgcgcgcaggctgcacggtccccgcgcgcccgcgctctgacccgctgtctgcgcgtcgcccccctcgcctgctggcccggcaccgctcgctccagttcccaggagcggggatgcagatgctgcagctggtcggggtgggcgccgccgccgccgccgccgccgctgctgctggttcgttgcctccgctccggcagctgctgccgccgccaccgccgcctgtggtgtgcgcgcgcgcgggttag

SEQ ID NO: 6941 - DNA, 561 bp, Homo sapiens
  source 1..561: mol_type = other DNA
ggcgggcctcgaagcaagggaagcctctagtggccgaactgctaggtggagcccgcgccgcggagcccacgagcactccatatccggggcgcgagcccccgggaggcccgcccgaccgctgctcattctggcctccgctccggccccggctgcgcctaccccgcgcgcaggctgcacggtccccgcgcgcccgcgctctgacccgctgtctgcgcgtcgcccccctcgcctgctggcccggcaccgctcgctccagttcccaggagcggggatgcagatgctgcagctggtcggggtgggcgccgccgccgccgccgccgccgctgctgctggttcgttgcctccgctccggcagctgctgccgccgccaccgccgcctgtggtgtgcgcgcgcgcgggttaggagctcgctcgtggtgagtgtgcgtgtctggagagcgccagtgcctcgctcgctctcagcggcggcggcgcagagcccggggccgcgcgatgaagctcccacatgcccgcagctgcccggcccggccggcgagctaatcatccaccccacgggctcgg

SEQ ID NO: 6942 - DNA, 620 bp, Homo sapiens
  source 1..620: mol_type = other DNA
cgagcccccgggaggcccgcccgaccgctgctcattctggcctccgctccggccccggctgcgcctaccccgcgcgcaggctgcacggtccccgcgcgcccgcgctctgacccgctgtctgcgcgtcgcccccctcgcctgctggcccggcaccgctcgctccagttcccaggagcggggatgcagatgctgcagctggtcggggtgggcgccgccgccgccgccgccgccgctgctgctggttcgttgcctccgctccggcagctgctgccgccgccaccgccgcctgtggtgtgcgcgcgcgcgggttaggagctcgctcgtggtgagtgtgcgtgtctggagagcgccagtgcctcgctcgctctcagcggcggcggcgcagagcccggggccgcgcgatgaagctcccacatgcccgcagctgcccggcccggccggcgagctaatcatccaccccacgggctcggggttcgccggcccccgggacgcagccctcggcggccgggcgcccgctctgtctgcgcgccccctccgtgcaccggggaaggagcggagggcggagaagccacccctggccctccattccatcgctcccgctccgaggcggaaaggggagg

SEQ ID NO: 6943 - DNA, 799 bp, Homo sapiens
  source 1..799: mol_type = other DNA
attttatttgtatgttttcattgaaaatcacattccagaatattttcctttaatatcattttgaatcagtgataatatagatttacatatctcagaggactaggagtttttctaaaagctcttttgccatattttctataacatagtgttgtggaaaatgtgatgtacagattttgtatatcagttcaacagatttccaaagatatacaatgttaaaataatgtttacttctttttccccaggttacaaaattgttctctatcaaattctaatctcatagtttgctatcttttcaatgtttatatgaagtgaagaattcatcattttatattgtgtaacatattttaagttcgttgggatttgtaattagtactgacaaaaataaatttttcactttagaatgctttacatgcacatgcacatatatttatatataaaacatatataaacatatatatgccacttctctttaccttagacaggattttttaaatgttacatagtaatgtactaggacttttaaaaatttaactttaagatagcactttgctaatgttaaatacatcgcatccagaactcagagatgatgaaaatgttctgtctattcttgctttggaatttcagataagagtagtcatattacaaatggtaaagtaatactctacacagcaaatcacaatagcgtgttatatatagaaataagatcagtcactgttttcaagcctgctaaataaaactgaactcttggaatggcataccatttgacctttcaaaggttctccagcagtatttaactgat

SEQ ID NO: 6944 - DNA, 405 bp, Homo sapiens
  source 1..405: mol_type = other DNA
tgtactaaaattgtccttcaaatgtatctctttgaaagaatgaataaaagcatagaaagttgattgttttaactgttgcacaatcaattaaaataattaatttttcaaaaccctgaatttatttgaaatgtaatatcgtccaatttctaaaatactaaaacattttatcaatgaaataaatgaattaaattctcaatagtcaaattctttgactccttgaatttactctacaatttacttctgaagaaaacattgagtaatttgttggccacagccagggacccgcgtctctaagggccgccggctgagctggggctgatctcccttccgcctcccgggaaccagcccgggaggaagacgcgcctttcccggccgtgggtgtgtgacttcgtcgaagcaactcac

SEQ ID NO: 6945 - DNA, 644 bp, Homo sapiens
  source 1..644: mol_type = other DNA
tcatagttcctttttttctatcaaaaaaataaataaaataaaaaaattggcagcatttgttaaagcactacatgttttaaaaatctattagctcaactcctgattaatgtatttattcaattagtaaactattttctgattagaattttcttgtaattttaaattaaataataaaataagatacagcttcatagagaagtcttcagagcgtctaatttagacttccattctatcactatggaaatggtgatagctagtcaatggctggcagttcaggattctgtatagaattcttttcagtgcatcatacttaaatgatagatatttatcatttgttggcaatgcatcataaaaatatcatcaccattattatacataattattcaattattttcagagatattagaaaaatctcttcaaaaaaagattctattaaaaaaaaagtcgtttccaagtattacttattattccttaatagaactgttgagaagttttacattgggagttcccaggatcgtgccttcaagcccagtctcgcgcctgtcccgggcgcggcgctgaggaaggctgcaggctggagggccgttggcctggagcatgaaggggcgagcccactaacggactctccgggttcaaacccaggc

SEQ ID NO: 6946 - DNA, 457 bp, Homo sapiens
  source 1..457: mol_type = other DNA
aggctgcagtgagctgtgattgcaccagtgtattccagcctcccacagcattaattaattcattcattcatgagggcagaggcctcatgactaaacactgttgcattggggattaagtttctaacacataagttttggaggacacattcaaaacatagcactaaatattcattgggaactcagaaaaaagaaaaaaattccatattccgtgttcccataattgtggtttatatttagtgaagcatcaaatgagcatgagatacaactattttttttatttacacaaaacttgaccctaaaatatttaaccaacagaagtagtactaataaaattattctatgaagtaatttttaatgaagctgagtttattcaagtcatgtcttctgcaaattagaaagaataactgtgttcttgatatttaaatctctttcttacctcacaaaaagtaatggaaaa

SEQ ID NO: 6947 - DNA, 574 bp, Homo sapiens
  source 1..574: mol_type = other DNA
acataaagcttccaggtattttaagatgtgcaattttgaagagaatagaaccctcatcatatgagaggaaaaatttctaattaaaaatatgatacatcacagaaaattacataatacccaaagtatatgctaattttaaaaatcctgcagatgtttattcaaatatacagtgttatttagtgaaagacaaatcctacaactcatttttgctttctaagaaaggtgaaagtaaatgaaaaagaattatatgagaactttttagatatgtgttctggtaatgaccaagtcacttgcactgaccggaagttcctttccctatggcactaaaagtcacatgattctattaaatctgaggcagcgcctcacatgtagtggactcccaaaattatttattaaatgtataacatctttaagtggtatccctttagcagccttcagtttatttataaaataaagctgtttcctcttcttaccgttaagactcttttaaggatttacatctgccggatgcggatgccagtcgcaacagtacaggacgcccctagggttgacgggaaggcgctgccgggctcct

SEQ ID NO: 6948 - DNA, 734 bp, Homo sapiens
  source 1..734: mol_type = other DNA
tacctgctttggctgctgcagaagcaaacttgttggcattagacaaatcaagctggtgatttaataaattccaatgtaagtctttgatgaatagttcctaagtggtcccaatttgaaatgatcagataacctataaaagaacatattcatattatactaacataaacacatataaatgcacttacagcagttacacaactagtttttatgcattaatgtgtaataacagcaactacaatatttagataattataaaaaccaaggcaataatttaaaaactgattaaccgttttactctaacttaagcatggattggatcagtaagattgattaataaatttgaatgcagtcagttggattgattctaatttaaagttttaatttgttgtagaataattttaagtgaatatatttgtaacaaagaaatgtttttgagaaatgtgttaattccttaagacaatggattttaattggatctagttgttttcatttttcattatcattatacatctgtatgttggacagaacactaacactaaatagtttttagaaaaattttttaaagttatttaaatcataatatcatgactgacttttaaattcaaaattaggctgtgactatccttcttcacttaggaagacaatacacaaaacaagttaaccttgatctttcacattaagtatctcagggacaaaatttgacatacgtctaaacctgtgacgtttccatctaa

SEQ ID NO: 6949 - DNA, 501 bp, Homo sapiens
  source 1..501: mol_type = other DNA
agatgaagtcatagaattttataattgagagtcctctaagtttcttagtagatacatgtgacttatggagaaataagtaaattttttcccttaagctacacaattagttggtgaaaaagctaagactagaattcatattgtactactaataatattgtaataattctattacaagttccaattctttagcactagtagtagtagaatagctttttcaaatgatcatatttggaaaaaaacaaagtggattttagttccaactattctgttcaattatgctctgtttcatatattatgagaaaaactgcatttaatcatacagatgaaagtgactctattgtgaagtagtcacaggctttcacaaaatacctgtcaattgtaattgtgtttaatctcaatttaccagaataaataaatttcttactaatttgtgaaattccctgtctatttccaaacttgtttaacaagttagattttaattaacatgagaaactatagatc

SEQ ID NO: 6950 - DNA, 623 bp, Homo sapiens
  source 1..623: mol_type = other DNA
agctacttggacggccactgcactccagcctgggcgacagagggagactccgtcacaataatgtatacaatgtgatacttttaaattaaaatgcataaatgttttttatgcattataagcattaacaccggacattgtcaaacatggttttagtctcattttttacaaagaacatgtattaatatgttgtttgtctaattgaaaatgtttattaaatgtctgtcaatgttttatcacattaagtcatttggggaaacatatagttttatattaatttatttgcctgtactctcagaagtgggtatttaaaaaaactattatgtattagtaaattcactatgcttctgtaagatacctgctgttcaacatgaatttatggaatatttcttgagttatatttttattatgtatttagattttaagatctgtctagagcttttatgtgacagtttctttaaaatacttatatacctaccataatcttctttaaattcttaattctagtacattcctaagattagtccatactaaaaaaatattgctttcttgttgttcagacttgtcaaactagtttcatttcaactacttgtaatttgttctttgagccgtagacttctaataca

SEQ ID NO: 6951 - DNA, 596 bp, Homo sapiens
  source 1..596: mol_type = other DNA
ctcctgatctatagtaattaaaactatttagtattgacagaattttgtatatgatataggaggcctcataagtcttggaaaacaggttattagtaagaaaaaataatttcaaattaagacaatataaaattaaattatcatttcatgtcattacaaaagtaaatggattcttgaagtttttaaagaactgaaatctctttacataatgaaatgtcaagctgcaccctggggacaggtaattaataaataggtgaacataactggttaatatccagtataataatacattaatatccagatcataaactataagaaaaaaagattagcaacccatttttttttccttaccatctgctgcctgttgatgaaaaactaaacttatgaacaggattcttcaaaatatgtgaaacgattattctcactgcaaaccacaatgaaatagaatttcatctgcatgagaatgatggcaatatttgccatattaaaattgacgtattgtaaaacgacatttgtcagaaacttttaactagttatagttagtttcaactgagaagaaccccaaactcaacactagtcagacaagtttcatcttattt

SEQ ID NO: 6952 - DNA, 384 bp, Homo sapiens
  source 1..384: mol_type = other DNA
gaagttacttagttaccttctttcccttataactcagttatagttcaaggaagcaaaattagattgtttccgttggacaatgaatcttaagcaagtttctcttgcagattttaccacactatgtagttatgtatctccagggccttgataacatgtttaaattagttattaattacaaagacctattatgatacagctgagatcgcgctgctgcactccaacctagcgacaaaactagcaggcttttgtgactacaaacaagctggttgcatgaatcaggagtcctttagagcgactctagctaagtgggctgagggcggcagggcgacgcgctgacgtcacgtcacgttcctctccgcactgtgacgttcccagagaggaacg

SEQ ID NO: 6953 - DNA, 613 bp, Homo sapiens
  source 1..613: mol_type = other DNA
atacattcttcacattttgtttatggtcttggatgatattcagatgatttaataacaaggacgactgtcgtcctaacttgagactatcagctaatcatactaattaagtgtactattataccctgattagtatcctcagattacaaagttattgtaccaattctgatgtcaatttgatctaaactggttgacaacataatttctaaatcttttccctgcaatgattaaagtataatccaacagcttcttaagatttaaagataagattttcaagatcataaaaggtttaacataagaaagactgtactaatatcactcttttgtcccaaacacttcctaagtccttctaggtaaggactaagataaaataattccaagaaaagacctcatgctaggaatagtctgtttagagtattctttttatttccaaattagataacctgctacaatcatgaattattttacatagtttatttatattaaaatttaataaaacagtggtaaagtttatctggtactttaatactgttttattatcattcacattatttcatagaaaaaggaatgggctgtcccagcatcaggcacagcagctgcacttgtctgcagccct

SEQ ID NO: 6954 - DNA, 232 bp, Homo sapiens
  source 1..232: mol_type = other DNA
caaaatttggttgagatcacttgcttccaacccaaggaaggcaagttttccctgcttccataatgatggaaggcagataactcctttatggagtttgagctcacttccaacagggaagagtcttgctctgtcacccaggctggagtgcagtggcacgatctcagctcactgcaatcatgctgggggtcgctaggatggtagagagcagccttcagcctgaaatccatcctga

SEQ ID NO: 6955 - DNA, 436 bp, Homo sapiens
  source 1..436: mol_type = other DNA
attgggtttgatcaactctatccaactagatcaaattgtgaaaggctttgattttgactactaataggctttatttacatagcaaggtggcctttttgctaatcaggccaaagagcaatggctattacttctgaaatagcagcaatttgtcctagctgaaatatggtaatgatatttaaaaacatattttttaaaggggctcagtggctagtcagcttaattaaaagctaacatccaagatgtgtgtgtttgtatttaaaagaccctcatgccgagcaaaagttttttcgcaccctctgctgcatggggaacctaaagggttccttaccttcggaggagaaacctgtttttccttatggaaccagaatgcaaactttttttcactcacgtccgtgtgaagagaccaccaaacaggctttgtgtgagcaacaaggct

SEQ ID NO: 6956 - DNA, 589 bp, Homo sapiens
  source 1..589: mol_type = other DNA
aatattcagtctgttaagaattcacaaccttgtggagttgagatacaattaataaaatttctagtataatgaggtaagtattatgataccatgaatatttgcatagtatgtgagcacacgtttaaaaaaatgtaataatataactgatttttctagaagaatgatgccacataatttaaaaatattaatgcttttctaatctctagtgtattttcaatggctaacatagttaaaaccaaagtgaaatttttattatgtacataatcgaatgcaaattgtgtcaggctagtttaaaaaatatgaatgtcagtcctggcttggcaatttaataactatttggtttttgaccaagtcatttaacttaattaaacctcagtttcttctctgtaaacaagagaaggtcaagcaagatagttttaaaatttctttccaaatttatacgtctgacttttctaaaaaatctggtttacactaatacttaaaagaaattatcttaaaacaataaattataaatttattttttgctcttgcgtcagactggttctgttgagatcatcagtgacttatttcctcacttcaattcagccca

SEQ ID NO: 6957 - DNA, 445 bp, Homo sapiens
  source 1..445: mol_type = other DNA
ttccatatcagacaataaaaggagctattatcacctctgcctttttggttcctggaacggaatcaaatggcttagaggcgtccccctaagaccagatgatcagggagtgcctgaccaagagaggtttcccctgttaactgggctcccagggaaggaagagaaagaccttctcatattattttatattgtttttcactcagtacatgtttaagaaaaaacaacatatgcctgggcctgcctggcctaaacttagtagttaaaactcaactcataacttagaaaccaatgttattcatagattccagacatgtatagaagaacagcataaattgtgcactcggggagctcactccctgacccagaagcaaggtggaaggctgaggcagccccttaggtggcttaagcctgccctgtggagcatccctgtggggtactccgggcagcc

SEQ ID NO: 6958 - DNA, 607 bp, Homo sapiens
  source 1..607: mol_type = other DNA
aggaatgagctgcttgggtatccagagagctcccagtattcagcttctccagtggggatgtgtattctggagagggggatcaccctttcccactacccaggtcctgcaggagcagtacgcttcctgcagagggcagttgacctgcagctaaaattcacaatgcaagcctctgcatgctgctctgtctggagctgccagaaaatgctaatctatagagatagaaattagattagtatagaatcttttggagataatactgattattgtagtgaaagtaaaattctgtgaatatactaaaaattgaactgtacacactaattggtgagtcatatggtatatgaattatgtgtcaacaaagttttagaagacattacttgcaccacgatattaaaaaatggcgtaacaggcaggagcctctcacctgccactgttcttaacagtattataaaataattacataagacaggttacttacgtattctaggtcataaaaattattgcttgactagagtaattgtaaatataaaagaataaaataaatatgaggtcaactcaaattttagcagttatattttaacttgattgatttttcctcagatataagtat

SEQ ID NO: 6959 - DNA, 593 bp, Homo sapiens
  source 1..593: mol_type = other DNA
ttcagcttctccagtggggatgtgtattctggagagggggatcaccctttcccactacccaggtcctgcaggagcagtactcttcctgcagagggtgttcttgcagttgatctgcagctaaaattcacaatgcaagcctctgcatgctgctctgtctggagctgccagaaaatgctaatctatagagatagaaattagattagatagaatcttttgagataatactgattattgtagtggatgtaaaattctgtgaatatactaggaaacattgaactgtacacactaattggtgagtcatatggtatatgaattatgtgtcaacaaagttttagaagacattacttgcaccacgatattaaacaccgaacaggcaggagcctctcacttgccactgttcttaacagtattataaaataattacataagacaggttacttacatattctaggtcataaaaattattgcttgactagagtaattgtaaacaaaataaatatgaggtcatcaatcttttgtttagtattatgtatttacttcaaattttagcagttatattttaacttgattgatttttcctcagatataagtat

SEQ ID NO: 6960 - DNA, 682 bp, Homo sapiens
  source 1..682: mol_type = other DNA
cagaaagcatgtacatcaatgttaatcaacgctaatgtccgtacactgataaatgaatgaataaataaattgtgtttataagtagcatctgatactatttggcaataaaaatgtgaacgctatttataatggcctcaatgtccatccactgaaaaatgaataaataatttctgcttataagtagcatctgataaaaagcaataaaaatgaaatccttatatacactattctatggatggtcctttaaaaacattaaactaaataacaaaagaccacatattatatagtttcatttatttttaaaaagatcctgaataggcatatttgtagaggcagaagattactgtacaggattttttttttttttagataaaactgattgctatgctgtgaatttactaggaaatatttaattttaaataatcattcatgaatcatatggtatgtgaattatacttcaacaaagttttacaaaatattccttgaaccaagatattcaaaaattctatttgcattgtataattagttcttgacactattataaaatacattatataaaacacgatatttgcaaggtcattaaacttaggtggatgacgtaaatatgaagtatataatgtatttactttgaattgaaggagttatgttttaacttgattgatttatctctgtatataagtat

SEQ ID NO: 6961 - DNA, 627 bp, Homo sapiens
  source 1..627: mol_type = other DNA
cctatctcagatattatcagtaaattcaaattttaaattaatttcttgcatttaactattaacaatttatgtttcattctattaggttgacatgtctcagtaactaatatataatttttatcgtctctgtgttgagatgcaagagtttcttgctaaagaaaaggttgatcttgtgactatcctttaaaacttgagtaaataattatttgcctataaattatgattcaaactcataattttttatttaaaattatgttctccaatttcaaactaacgattttcaaatatcagtgaaatgcttcctttggcaacagtaaatcctatcaaagctttcatctcacctcctaagtcaaatgccttattaaagcttttattatttcatattaaagcaattgtgcgaaatactgaacactttgtacttattatataaaattagtcaaaatagttacccaaactctctaagtatattctcagtaaacctctgcacatgaattattaaatctaaagacttgaaaaatttttttctttatcatcaatccaggtaataaaagtatatttatgtattttatttctaagtgtgaactttactcttaaaatattaatttttaacttctgtgcttatattgt

SEQ ID NO: 6962 - DNA, 637 bp, Homo sapiens
  source 1..637: mol_type = other DNA
caaaataaaattgataaattaggtttcatcaaattaaaatttttcacacatcaaaaaagagaaaccagagtttgaagtatctatttgcaagttacatacctgataagtgacttacttatataaaaaaaaatatcaaaaaatgtttaaaaatctaaacaggaattttaccagggaatatccaataagatcatgaaaaaaatgttttatgttggattacatagttaagagaaatatataacatcttcccaatcacaagtaacttttccttttcagagctgtaacaatataaaattaaagataacactagtcttcctaagaatccatactagggattaaaatattataaatgaagagtctggtttccatattttttaacagtatctttccctactctgtaaagatgctattttaattcttattatatatactaagtcaaacacacatgaaaaagaccctctcatattattttatattgttttatcctcagtacctgttttaagaaaaaaacaaatacccggcgccaggcccaaaaccagccctgggcctgcctggccttagttaaaaatcaactcataacttagaaaccgatgttactcatagattcgtgcatgcagcccctggtgagcccttaaaaggg

SEQ ID NO: 6963 - DNA, 631 bp, Homo sapiens
  source 1..631: mol_type = other DNA
agttgatcatttcataatgtttaagttaatatttatagaaggattaagaggaacttaatgattaatgctgaatgtactacaagcttggtttttctttctttatctttgattactttaacaaagtttaaaaagatagtgtcatcttgaaactctcaatatcttacatgatggttgtaagaatcaacatgtatacgctatatcataaatgaacctttaaaatattatgttacataaaagaagccagtcacaaaataccacatattgtatgattctatgcattaaaaattgtccagaataggcaaatctatagagatagaaattcaattagcaattacctagtagatgcacaattctgtgaatatactatgaaacattaaattttacacaataattgataaatagtatgatatttaaattacatgtcaacaaagtttacaaaaatatgtggaccatgtttagtcatttaatctttagttttgtgtcaaatggactgcagaaacaagatctgtcactgctactgttctggacactcttctaaaatatattgcataagacagatggcttgaacataaaagggaaattaatcacatctgtgtgaacagatcatttatataagatttaaatttatctt

SEQ ID NO: 6964 - DNA, 670 bp, Homo sapiens
  source 1..670: mol_type = other DNA
gtgagaatagaaaattattcactcactctgaaaaagtctatatttacatttaccacataattcagtaattgcctttctaggcatatccccaagaacagaattcatgcacatcaatgttaatcaatgctattcataatgaaagtggaagaaaatcaatatctatcaacttataaatgaataaataaattgtgtttataaatagcatctgatacaatttggcaataaaaatgaagtccttatttacactattctacggatggtcctttaaaaacattaaactaaccacatactatattgttccgtttacttttaaaaagatcctgaattagaggcatacacaggagttttttgtttttttagataaaactgattaagtctgtgaatttactaggaaatacttaattttaaatactaattgatgaatcatatggtatttgaattatactccaacaaagatttacaagatattcattgaaccacgatattcaaaaatgctgtttgcattgtacaatcatcttgacactattataaagtaggttacataaaacagggtacttgcaaggtcattaatctttaaatatgaagtaatcgaactttgtttataatatatttactttggattggaggagttatattttaacttgattgatttatctctgtatataagtat

SEQ ID NO: 6965 - DNA, 580 bp, Homo sapiens
  source 1..580: mol_type = other DNA
ggtgagaatagaaaattattcacccactctgaaaaagtttcagtaattgcctttctaggcatatcccatcaatgttaaacaatgctattcatatcagtatccatcaactattaaatgaataaataaattgtgtttataaatagcatctgataactatttggcaataaaaatgaagtccttatttacactattctatggatggtcctttaaaaacattaaactaagatattatatcgttccatttacttttagaaaatacaggagttttttgtttttttagataaaactgattgttatgtcaagtctgtgaatttacaaggaaatacttaattttaaatactaattgatgaatcatatggtatttgaattatacttcaacaaagttttacaagatattccttgaaccacgatattcaaaaacgctatttgcatgacactattataaaataggttacataaaacagggtacttgcaaggtcattaatcttaggtggatggagtaaatatgaagtaatcaaactttatatatgattgaaggagttatgttttaacttgattgatttatctctgtatataagta

SEQ ID NO: 6966 - DNA, 581 bp, Homo sapiens
  source 1..581: mol_type = other DNA
taaatcatacatgatggttgtaagaatcaacacgtaaatgctatatcataaatgaacctttaaaatattatgctaagtaaaataagccagccataaaatatcacatattgtgtgattccatgtatttaaaaaatgtccagaataggcaaatctatagctaaagcttatagggtttatttttaggagataagagttctctaaaattgactcttacggtagaagcacaattctgtgaatatactatgaaacattaaattttacacaataattgataatttgtatgatatctgaattatacgtcaacaaatttacaaaagtttttgaaccacatttagctattttatctttagttctgtgtcaaagagactgcaggaacatgatactcttatgcacactattctgaaatatattacatgagtcaggtgattgatattagctgaattacagcctgtaatcccagcactcagctactcaggaggctgagtaaacgcacttgtgtaaacaggtcaagactgttaatataatgtatttactttgaagtgtaaaagttacattttaacttcttgactgatttatactgg

SEQ ID NO: 6967 - DNA, 480 bp, Homo sapiens
  source 1..480: mol_type = other DNA
atatttatgtattgtttaaagcacataacactctatttcttcacttaaaatctaacttccaaaagcttttaagtgataaatatcaaaacaataatactatacttggtagactattagtacaagactttacaaaaaggtacatataaacagtcctactacgtatctcaatgattatcattgtgtttttccttgcaaaattaaagaccccagaatgatcttagacaagttaagtaactgtttaatagcaaataaattcaatacatttttaataatttaaaatgttatttgacactcaattttaaagcagatataattacataattggccattaattttatagaaagagcattttcagttaacattaatcacacttcaagtttcattttcagttcagatatcatctcctcagtaatatattcccagaaaatgcaaatgctgttaattactgccttttgtagaaaacgtatccttctttagaga

SEQ ID NO: 6968 - DNA, 728 bp, Homo sapiens
  source 1..728: mol_type = other DNA
ggagtaattataaaagatccataattggataatttttaaaataaggaagaaatgaaattaacgtgttaaagagtttgcgtaatgtctgacataacaaggacttaataaacgcctagatgtcaagtagctgtttttcatgcaggctagatatagtaattctcttaaatagctcctattcactactagcattacctataatctcttgcacatattttattttattcatttatttataatattttcttgaggattaacaaactatttttgtaaacatattactaaagtagtaatataatactatatgtgttatacatattatttataagtattatttgaatttataaatatttgaatttataaatatttatagtaatatatttatacatattatttgacaatcttatatattgtaactgttattataatgtttaattgtgataaatggaattatattcatgcattaaaaatttaaaaacttacagcattaacatctttaaatttctgaatgagtgctttatccaatttaatagtaaaaatgtaacaattatgacacattacccataaatctgtaaatatcctaaaatatggagctactatgactagtatcactttctagaaagaaggcttttaaggatattaatggtttgcctcaaaattgagaaataattttgtctttcctttttttctttaaaagcagagaaaaacatttgcttcacatctcatcaaat

SEQ ID NO: 6969 - DNA, 670 bp, Homo sapiens
  source 1..670: mol_type = other DNA
aagactcattttatttagctgagaagttaattacattagctattcaaaatggagaaatcattgtatgaaacacacacattacttctcttttatcatgaattgatgaattgaactatacttatcagctgtatgaaatttatttccacatttccataagtttgcttatcagcaaaaacaacaagtggtgatgttctatctcagtacttagttattactaaatatgacatatttgggatgctatgccaaaaaacatactaagttattttttgctacttcaaaatatttgcacaaagaaacagcagtaattttattccctctaaaaaagttatttcattatctaaattactatcttctttatttatggcaaagactttcatcatcatgaatcaggaaaatatatatatataaataaaaataaagacattttaatttttaaaacttttttcataataatataataattgtttgtttcataagtttgagggatattaattgctcatacttattcataacaatctcaagattactaattattgtcaatcttattttagattacacctttgacaaaaggttaatctgcttcacagtgtagtgggtggaaaatgttaagtataaacaactttacataatcttttttccatttaagatcatattactcattatattatgc

SEQ ID NO: 6970 - DNA, 407 bp, Homo sapiens
  source 1..407: mol_type = other DNA
tggagaccagccgtggcggcgcgcctgcaatcgcaggcactcatcttttaagaagaaaatatgctttacatttctttaatacatttataagttaaactgatggtctaaaggagacgagtgctcttaaaaaatggattgatttccactcatttcttgtttatgtgattctgcataccaaaagaagaaaaaaccaagattagagtatttgtgtttctgatgccaaagtaattaatcatttcatctttaatatgtttgacatttaatgatattagaaactcacgtttacacacacaaaaccaatttttatttctgttatgaccaaaattgttagaagacattcttataagatatagagaagcattctcagacactttgaagcttgcagagagcttaaaatctaaacagcc

SEQ ID NO: 6971 - DNA, 669 bp, Homo sapiens
  source 1..669: mol_type = other DNA
ataaaattgaaaaattgtaagaccattgtaaattgcagaattcagtgcattttcaacttacaatattttttatttatgatgggtatatcaggatgtagcctcatcataagtagagaagtatttgtacatgaataaaatatatatctatgcacatgtatttatagaaaaatcaattaacattttcttcttgaacttggagtgtatgtatgatactttaaagaacaatcctgtaaatcacagataattctttacttgttatctgccatattattttcaaaggttccacattaaactaccttttagtgactaaaagttctcagtctcatggtcttagaacctaggtttctgaattgttgtctctggcatttagattaccacctagacagaacttacattaaataaactcaaattaactctttaacttaatctggtgttattttatatcttaagatatcatgactgacataggaaatataatcaagctgatgatgtcctcatttcccctttatggctagctcagatacattaaatgttaaaagaatgagccaatcatttgtgttcttcatgacacatattgaagctataaaattcaaggtgatatttgttcaagatattcccatcaatgactacctttttgttcacaacatttgaatcagatttgaatcacct

SEQ ID NO: 6972 - DNA, 444 bp, Homo sapiens
  source 1..444: mol_type = other DNA
ttgatttacaacacagtaaaataaatactagttaggagaaagttcaaagtttaaaagtcactaagagaaacatagagtcttgtaagagtgagcctctcatgtaatctaacagtatttgtggattccacaaacctatcattacctgaaaaattcacagtatgctattttgtttttaaaattttcaggtctgcttaagagttaaaggcaaagagtttaaataggtgttttccaattgacatgttatgactccaataagtttattcttttgaaagttaaccatagtcatgctattatttgtcaatgagtgaatagaatatataattaaaaaaataacagcaggatatttctacatctccatgaatgaacatgactctgtgtggttactgcagctgcaggtatgcatttacatctacattaactattgcatcatggacttcatgaagc

SEQ ID NO: 6973 - DNA, 791 bp, Homo sapiens
  source 1..791: mol_type = other DNA
atgactgtgaaaaggctgtaaatatcattactatttttttatttcctaaaatatatagtatgattcttttcctgtaaaaaagcaaagtcgcagtcaacaacaatttttaaaaaccctctctattacagatattttcctcaggatatagtatttttctacattgtataatgatagttaacataaaggaattttcatttctttcctttatttacttttaaaaaacaggaaatcagaggtatggcataattttccaaaatcttttaaaattaaaattaatgaataaatattacttctaattagtcaatgttataatttgttaaataaatactatcacaaccatgtctgccaaaataggacagttggatatccttctttgaaaaaaagatcagagcatatacagtataagttaatccataaaggcattttaaaaggtaaataaatgatgaattcttttaatggcatagaaattggaacgtttctagatttccattataggaattgaatttttcaaaagatatacagagaattttattaatatgttcctgtcaaattatcccttcaacataaaatcatgtttttataatagccataaatttggaaatttttgtattttaatttgcaataatgccactttattttatcatagcgttgaaaattctcagaatttcctgggaaaggaattggacagaaaattagtttcctatttgggagaattcttagaatttaaataaacctattggttgaactgaaaccacaaaattagcattttctaattaccacatttaaatagc

SEQ ID NO: 6974 - DNA, 667 bp, Homo sapiens
  source 1..667: mol_type = other DNA
agattctgactcagcaagtttgcgaaggtggatttccacacctgatgctgtctgtgatgttcccatatggctataacttacctcaactttatatataagtttttgatattcgggtaatttttacacaaattttcctaggaatgtaatgaaaacattttttccttcactctagtgtaatcatgtcaacacatggctgctatggaaaaatatgtagccttaaaaactccaggaaattaaattgaatttccaaatacatatattcagtcatatgtgagatatgtatcagtgagcacttagagtcatttcaccataaatataataattttttatcatatagtacccaaaagattactgaatttggcaaatgtttacgttcactttgtaacttaaaatattctaaagtcaatagaagatggtaaaaaataatgatttgaagaaaaactcttgaagtatatgaagactgtaattttattatgccagttaccacgagttatcagagaacatgtaaaatcttgataacatggtaagtattatttgtgtcatagagttgttccaccttggacacatactctattgcaaaatcactttgttacggttcattacttttagtttccataatgtgatctcataattgccattatttaacaaaaacaaatgagtgtttaaa

SEQ ID NO: 6975 - DNA, 641 bp, Homo sapiens
  source 1..641: mol_type = other DNA
gtacaacttatctgaacttagaagttagtttttaatactcggttcttagcacattgaattaaacaacgtgatcttttatacatgtttgtctattaatttaattaaaattctattttttgtacttatttcaataaatgacctctgtgaagatatatgggccaaaactccagggaagtaaattcaaatttctaaacataagaaatcagttttatgtgagagatatgtgtttgacattaaatatgagaatacttttatcatatggcatccaaaagatgactgaattttggccaatgtttacattcattttattacttaaaatattctaagtcaatgtaagcaacttttgaagtgtcaattttattatgccaattatcactatttactagagaacgtgtaaaatttttcataacatggtaagtattatttttgacatccatcttggacatatatttgttgaaaagtagtagatggtattctacagaaacatctttatcactgcaatcactgactcactcagggctagactaacactgacctggttaagtttatttttagaatttgtagagacagatcgatcatatgatctcataattgatgttattttgaaaaacaaaagggagatttcaaaaaatgtttaaata

SEQ ID NO: 6976 - DNA, 694 bp, Homo sapiens
  source 1..694: mol_type = other DNA
gaatctgcatttcaacagctactagctgatgctgatcatgttatctgaactttagaaaagagtttttaatactcagttcttaggcctatgaattaaattaaaattctgtttttctctttctgtctaatatagttatttcaacaaatggcctctataaatatatatgaaccctccagggaagtaaattcaaatttctaaacataagaaatcagttttatgtgagagacttttgacattaaatatgagaatgtttttatcatatgatatccaaaagatgattgaattttggcaaatgtttacattcactttattacttaaaacactcaaagtcaaaagataaataatgatttgtaggaaaacttttgaagtatagaatgactccaattttattatgccaattatcactatttactagagaatgtgtaaaattttgataacatggtaagtattatttttgacatattccatcttggacatatatttgttgaaaagtagtagatggtattctacagaaacatctttatcactgcaatcactgactcactcagggctagactaacactgcaatgatctattgtaaaatcacctggttaagtttatttttagaatttgtagagacagatttcaatcatatgatctcctaattgatgctatttagaaaaacaaaagggagatttcaacgtgtttaaataca

SEQ ID NO: 6977 - DNA, 544 bp, Homo sapiens
  source 1..544: mol_type = other DNA
gatggatcccttcacccaggtattgagcatagtacctaataggcagttataagggagaacacgaatatttggttttctgttccactgaaaaggacatgattttattctctttatggcttatctttgcaatatttaatatttaaatattcatttagcaatatattatgaacctaatatgattattcttaacaaaactttttgttgggatttaatatttttcacattatgagattctaaataatgctataagtgtccttgtatatgcaatttttcggtacaagtggagatattttggctttgaagaaatacttctccactattcttcagaaatagagaaaaaaaattacgatcaagtttaagattagaaatttttctaagtaggaatggtgacatttaagcaattttatttcctggtaagacctccaaaataaattaattgcaaaatatgtccctggggagctaaatgagttgacatctacttttagacatttcagttggaagtcaattaactgttgaacggtatctgctaatatatatttatatt

SEQ ID NO: 6978 - DNA, 581 bp, Homo sapiens
  source 1..581: mol_type = other DNA
ctgcttctcagtctcaaaatgggatggtgttgatgggagatttaattatattatatatataaagcatttaaatttgtgcttcagcacttaaagtcctcaaaaaaacttacctgctattatttttctgagttgccttgagaactgaattctagaaaaaattatataacctcttttgaagtagaaatcgaactcaataacagaatattcttaaaagctcgaattagttaaagctcaaattttatgactcttgaaaaaggcatatacaatatgcacgcatatttaaggtaattcttttctgctgtaagtgaatttttagttgagaaatagagtatagtgttccataaggtaaacagaatcatgcaaaagattttaatcccatcttaaacaatttttagattttttattttcttaagattccagcactatcaaatatataggttataatcaataccagtaaaatgcttagaggtattttaatttggagaaaaaaaccacaaaagattttggtatttggtagtttctaggaaactaaacattggttattccccaatttcaacatattgagatagttgatgagtaat

SEQ ID NO: 6979 - DNA, 473 bp, Homo sapiens
  source 1..473: mol_type = other DNA
atttccttatgaaagtagctaatatatctaggagacagtatttatttagacttctatgtcaattcaatagttgaaactctggccaaaacactgaattctaattgccgtcactctaaatgagagctcttctatgaagtaacggaaaacagataatatgatgcccactttagaagttcttcttgactaggttctggcctcatgcagaggaaagtagtaattccaaaacattgatctgcataaaaaattatttagtttcttatttgttcttcaaacttgaacaagtagtacagataattaatcatttgctcaaaaagtatttgtctaatatgtgccaagcacagtattttctaatggaaatagtaaatgaacatatataagttaaaaaacattttatattgtaatatgttatgaggaaaataaaaggtaaaataataaagtgtttgaagaagtatttagacaatgaatataaatgg

SEQ ID NO: 6980 - DNA, 673 bp, Homo sapiens
  source 1..673: mol_type = other DNA
taagcaaaattttgtttagctattttttgccaaaatattctcaatgtcagtgggtttgtgatttatgctctaagtcaaaatgactttccttaaaacagaacaattatctccaattcaataatttaataatttttttttcaaaatggttcacctatattattgaaatttaaaatcttaaaaaaagtttattcataagaggataataaatcactaagtatgtagtcaatgttccccactatatactgattaaaatgtttcatatatgggtgccaattatttaatttttaaaaatcaataattgtaattctggaaggaatatcacttgaaatccaggttcttaaactaaaagaaacaattaaaatgtgaaagtattgtggctatttttcatttcaacagcagttttaagtttaaatagataggataagttgaataagaatacaattaatatttttaaaaattcttctatatttctttataaacaaaaaaagattatttaaaaagatatgaatacttttttcaagctttatgagtgatattttattttatttttattatactttaagttttagggtacatgtgcacattgtgcaggttagttacatatgtatacatgtgccatgctggggtgaccctgctatcatcatcttattgggtcaaggtactaatacccttt

SEQ ID NO: 6981 - DNA, 439 bp, Homo sapiens
  source 1..439: mol_type = other DNA
tagatgacacattagtgggtgcagcgcaccagcatggcacatgtatacatatgtaactaacctgcacaatgtgcacatgtaccctaaaacttagagtattaactattagttattatctctactgaaaaagtgggacttcctgttatgaataagggaactaactgaatttgtagtatacttactgacaaaaacaccattaatttttttagataccaattttttttaatactatgaatcttaagggaaaatggctttcaaataaacttgtggcttccaaagttttatgcctggcagtatcaggagacattttccttataaacagaaacatccctgcaattgaaatgcttggctgtgaatttgatttcataatcagagcggactctatagtgcatagttgatgcaacaatcaccatgatgacccaagctttaatcactctga

SEQ ID NO: 6982 - DNA, 582 bp, Homo sapiens
  source 1..582: mol_type = other DNA
tcttgtctcactgtgctttgaagtggaatgaactattaagttcacttgattcatctctctgatgtactgtaacacaatgttagtaaaggacttaaggcagctaattagcatctctgtataaaactgagatgataatagaactcattttaacctagaggctcaataaataatagctgttattatgattatataataatgtattaaaacgagagtataagatcagaaaaattatcctcagtgcctagatttatcaaaaagacaaggctataaatttccattagacatccacttcaaagtaaaaatatctgtataattttcccataatcaaatctttgcatgtcatcatattttcatttaattaaaactctcaagttaataacaacagggaccacatgatttttaaaacacggttgttctcagttcttcactgacaaaagggaacttcctatagagttggtgctttttctttaaaataaagaggaaatggtgcgcgattttatttgttgaatctgtttccccaggaaacaacaaatattgatttcttttactgccaacagaaatcttttgcaatatataagaact

SEQ ID NO: 6983 - DNA, 511 bp, Homo sapiens
  source 1..511: mol_type = other DNA
tgatttttaaaacacagttgttctgaacttcctaaaaaatgcatatataaggtcttgtaaatagtctactaacttaagataatcacaaagaaatgaaatatagttaagactgagaaactttttttgaaacttagatccaaatcttaatagcaatccttcagaaacatctactcaatgaagaacaataatacaatttcattatttcaaccaaaaaatagaagatcaaaacagtcaagtgaaattttagatattctttacatagcaatatttatttaattaggcacttttaattttaattatcatatgttagaattcagtttaaaaatatttgtatttcgcacatatggattcgtgccagcttttcctttgaaataaagaggaaatggtgcaccatttcctcaggaaacagcaaatgttgaatgcttttcaggaacctatctttgaagagcatcaactcggaagttattttatttccgaagccaacagaaatccattacaatatataagagct

SEQ ID NO: 6984 - DNA, 533 bp, Homo sapiens
  source 1..533: mol_type = other DNA
tatcttctgttatttccaaaattaagacaaagaatttatttcaactgcctactcttactatacatatatatatgtcagttctgatacatatgtatagacacattaaaactccagtatctatagcctttaaaaagcttatttgcaatattgcagcaacgtgcatgcaggtggaagcaagttctaatttagaaatgagagtactgtgctcactacctgggtgatgaaataatttataaaaaactaacataaataaaattaataaaatttttaaaacaaaattaaattactttgtctgtcttctcccataacttttgataaattgttctggggtaaggtctgagaagtggaattttttaaagcttcccaaagtttgatgtgtgctgccccagggcctgctaggacagtgattggatcacagttctatagatgaagctgccaaactggcaactgcaactattatttctttgtttcagtaaagaatatcaatactctcttaactccaataaaaatccagacagaggtatttaagaaga

SEQ ID NO: 6985 - DNA, 390 bp, Homo sapiens
  source 1..390: mol_type = other DNA
tcacttataatgggtacaatgattagtacctaggtgattgatatgagtttaactatataacaaaccttcacatgtaccctgaaactactcagattaactaatattagatataagaaaagtatgatatttaaaaaactgatggtaatatcataacaaaaaattttagtgagcctgcgaagttctaagagatgctaaaactttagctcatatattttcagtctttcttatttttttataaatatttgagagctagaataaatattttgtaatttcctttattaattattttatagtctcaaatgtattaacatgtgatttcattcatatgcgtagggatatttctattgattagcaagaaatatgcatattaagacacaatccactgtttct

SEQ ID NO: 6986 - DNA, 687 bp, Homo sapiens
  source 1..687: mol_type = other DNA
cttttttaagttattaagtttctttttaaaaataaatatttataaaatgactagtctagctatcaaaatatttttcctggtaggaacaaaatgactaaaaatatttttgccaaaatttgagtataaactcaattttagattatatgtttgaattattaatattgtttaaaagaaaggcttttagagaaatgctgaaatagagagtagctgttacaatttctgtagtttaccttaagatacttcagcaaaacaactaagatatatagcaaaatgttaagaattatgaaaaccagggaatgagtatatagttcttttctatatgtttgaatatttttcaagacaaaaagtcaaaaattgtttttaattacttgtatttaaaaattcagtgttgattttttggctttaaatactgccctgcaccagtacttggcaccacagtacctttattaacttgtcttattgacaaggaaatatggtgttccatcacattaactgtcagaaggcaatcactctgcttaccccaacaggaaagagttaagttactcattgagaacctctgatcgtcactgtgctcatcaggaacaactattcttttctttaaaagtaaattccttgacacaaatgaccttatcttaaatctaatagatttcctatttccaaaaagctcgactggagtgttataaaacc

SEQ ID NO: 6987 - DNA, 696 bp, Homo sapiens
  source 1..696: mol_type = other DNA
atatctcaaaaattccaggtgaagcccacaggtaaaatgttaagtagcacttaactgttcttcttgtaaaagaaatctcagtcctgtttaatataaagcaaatgtacatatcctctgatacattacttaaatgtacataccctctgatacattacttaaatgtacataccctctgatacattacttaaatgtacatatcctctgatacattacttaaatgtacatatcctctgatacattacttctaagaatactcccatatgtgtgaaaaaaaggttttataagaatggtgcttgtgatacctttgtaattacaaaataaactggaaatggattaaatgttcatcaaaatgtgatataatgatgtgtacccattaaataaataaaataaacctgtatgtactaacacataaagttgtccattatttgttaagtaaacatatacataagacttcattttgatgtttgatttatgtattcatacttacatgataaaacacgtacatctggaggtgaagaagcatttaaattattttattgtctgcatctttttttaattacataaggcctgtctccttgaaacaccttctattcaaatggtagacattgggtaacataatgtctgcagctaattgatttaacagacagctaaatcctgattggtctctcagtttccactggaactgagtttaaattt

SEQ ID NO: 6988 - DNA, 367 bp, Homo sapiens
  source 1..367: mol_type = other DNA
atatctgaaatcacaactttggaaagcacatccaagatattatctgttcacggagaaaaaccaatctgtgttgacgttaaccttttaagtgatcgaaatatgtcttattaacctggcttgatactaaaaagcttggctatctctaatcaattatctccagatatgaaaatatctaggaaattcaagaagaaatcacacacattaattttccatctaacattttagtgttcagtagtctcttttactacatatctgcagataaaacctgcacaaaacaggttttgttttgcacctattttacatatattcaccaaaataattgtcttcagctgcagtggactaattgcagttggcactttaaataaag

SEQ ID NO: 6989 - DNA, 673 bp, Homo sapiens
  source 1..673: mol_type = other DNA
aggctggtcttttctaattccaattccatgtttgagcttataaaataactgaaagtaatcaaaatatattttgtaagatatatacaaaatacagattttgtgagatatatacaaaatacagattttgtgagatatatacaaaatacagattttgtgagatatatacaaaatacagattttgtgagatatatacaaaatacagattttgtgagatatatacaaaatacagattttgtgagatatatacaaaatacagattttgtgagatatatacaaaatacatattttgtgagatatatacaaaatatatatttaaatctggtagcttggttaattaaggactagtataaaaaattaacataagatacacttgggaccttaaaggactttcatttattattctaggcatgacaagtgtcagatgtctgatttgaagactaatatgaatatatctaggtaataaaatggaaaatccctatttcaacattcttaatggaatccttcctttattagtcttctggtttaaacatttatatagtgtaaatgcaaaataaaaatgattgtatcaaattatggtttttatttggatgctttgcaagaaaatacttaaatgtgagtcatacatttttccagttcagcatttaaacttcagacttcaaccacagttgtgatt

SEQ ID NO: 6990 - DNA, 707 bp, Homo sapiens
  source 1..707: mol_type = other DNA
gctagagtgcagtggtgccatctcggcttactgcagcctcttgcatccaagattcaagcgaggctggtcttttctaattccaattccatgtttgagcttataaaataactgaaagtaatcaaaatatattttgtaagatatatacaaaatacagattttgtgagatatatacaaaatacagattttgtgagatatatacaaaatacagattttgtgagatatatacaaaatacagattttgtgagatatatacaaaatacagattttgtgagatatatacaaaatacagattttgtgagatatatacaaaatacagattttgtgagatatatacaaaatacatattttgtgagatatatacaaaatatatatttaaatctggtagcttggttaattaaggactagtataaaaaattaacataagatacacttgggaccttaaaggactttcatttattattctaggcatgacaagtgtcagatgtctgatttgaagactaatatgaatatatctaggtaataaaatggaaaatccctatttcaacattcttaatggaatccttcctttattagtcttctggtttaaacatttatatagtgtaaatgcaaaataaaaatgattgtatcaaattatggtttttatttggatgctttgcaagaaaatacttaaatgtgagtcatacatttttccagttcagcatttaaac

SEQ ID NO: 6991 - DNA, 232 bp, Homo sapiens
  source 1..232: mol_type = other DNA
cagctgcccacttagctgctccgcgccgccgggctgacttcggcgcaggaatcaggcgctccggtaactcgtggctctaaacagcagcgcgctgtttgccagcatgctctccgcgtggcgatcacgttgataccaacttcctacgctttctcgggactcgacggaatcctgacggcacctccaggcgaggtcccgatggccgcgctgcgctttacgccccggagaagtcccg

SEQ ID NO: 6992 - DNA, 421 bp, Homo sapiens
  source 1..421: mol_type = other DNA
tttcaaagaagtacaacttcctctagcaaaatgttacacaacagtgatttttaattatgagtcaacatggcttctatgccagcattaaacaattgtctttattgccgaaagaaatgtttacttaagggaattactggatcagtaatcattgattcgaaaattgacatttgtcgtataaattctaagtgatttaaaggtggaaggaagacacccacctttggtttccaaacagtgaatcaacggttgaagttgcttttaaaagttggcggttacacgacaaaacgcgccttacagggcccagcgggggcggggcccgagggcgctgccccctaggggagccgagtcacaggctgggggccaggcggccggtagcgaggccgcgccgtcgggcggggcggtccctccagctggcttggaccct

SEQ ID NO: 6993 - DNA, 313 bp, Homo sapiens
  source 1..313: mol_type = other DNA
actcagtaagcaatctgcacataggaaataatcaataaatattatcttttcctaggagaaaggtccttccctcccacattttcatactgtaagagcttgtatttgaaaatcagatttaacattcctctaagagtccttatattcattgacgactctaggaggcctcaatccgggggacggatctgttcgtaaaaaattagttactagtattactaaggccgcactggcggcggcggcggcgcagcagccacacctactcagctgccgcggcgccgggagcccgaaaaaggcgggtcagaggggccacggggtc

SEQ ID NO: 6994 - DNA, 480 bp, Homo sapiens
  source 1..480: mol_type = other DNA
atggtttaatctgcttagaaacatatttcatgcagaccagcctggccaagagatcacgccactgcactccagcctgggctacagagcaagactgaaaaaaaaagaaacgtattttatgcttaatacagaagccattaattgggaaagattttacttttttaacttgaagttacctaaaaggtcaggtttttgtaccttggagaaggaaattataaatgcccaagaataagatatttaaattgaaaatctactttagcttttctttttattttttatgctttagcttttcttaaaacataacatttagcatagtaaagaattttaatagctatgtagataagaatgaaagaggtgaattatatgcttgttaaattaatctaactgcctcttttaccatctttactatagattattatccggtattatcagtccttgatcgagagagaagcctaattgctctcccatgcctgaattttcagt

SEQ ID NO: 6995 - DNA, 518 bp, Homo sapiens
  source 1..518: mol_type = other DNA
ctgggatgtgccaaataatagtgcatatatgcagtataatacatttcatatctgcacctaaagtgtattctgccctttgggataagccaaaggtgagctaatatctgcacatgatttgttttgctcagattctctttggtaaagaagacggacatctcttcgatatgtgaaggattcttaaacattctagcttctaggatgttctgtgcatagaatgcttacaaccctatcatgctgggaccgcccttggccggacactcacggtgggcctaactccggtggtaattccatccgcgggaccttgacatccccgagctgacctctggagcccagctgagcggctccgagagcgggtggacaggggggccgggcagccgcggcgcacacgctgggcgtcgtccctacccatgccgcagccggagggccgggcttgcaccgctatcgcgagagctcgtgaggtgggggcggcggggagctggggaggggctcgcggagagcctgccccgcctccctttcct

SEQ ID NO: 6996 - DNA, 406 bp, Homo sapiens
  source 1..406: mol_type = other DNA
aaatgcactcatctagctgggacaaatcctacactgcatttgtcccatctagatgagtattctagcagaaaaattcaacatacagtacattttgttacgacacttggaacaagcagcctctcagtgcctgttttcccactggcaggtaaatgggctaatgacggtatttctggcactagacttcgttaattaaaaacagcctggctctctaagtgggcagtgcgattcccaaggcttcctctaggctgagaagccagagtaaatccatttgattttctcaaagctttaagtctaactgcaggtgacgccctctgccctccagcgccctcaggcctctggggtcctcttcccgcgccctgcccgggcgcctggctgcttggggtagaggccttccgccacacgcgcg

SEQ ID NO: 6997 - DNA, 498 bp, Homo sapiens
  source 1..498: mol_type = other DNA
aaatgcactcatctagctgggacaaatcctacactgcatttgtcccatctagatgagtattctagcagaaaaattcaacatacagtacattttgttacgacacttggaacaagcagcctctcagtgcctgttttcccactggcaggtaaatgggctaatgacggtatttctggcactagacttcgttaattaaaaacagcctggctctctaagtgggcagtgcgattcccaaggcttcctctaggctgagaagccagagtaaatccatttgattttctcaaagctttaagtctaactgcaggtgacgccctctgccctccagcgccctcaggcctctggggtcctcttcccgcgccctgcccgggcgcctggctgcttggggtagaggccttccgccacacgcgcggccccgccccggccttcacgtgacctggcgtgcggagcgcgcacgcgggaacccgcgctggaggcgggcgaggggcggcttgaggagggcgg

SEQ ID NO: 6998 - DNA, 565 bp, Homo sapiens
  source 1..565: mol_type = other DNA
tgctttccaagcactggtgaggcaccatggatcggatctcttccagttttgaatactagaaagaaactactgttgaaaacacagtttggtcagtgatgtccacatacacattacatataatatgtattactagaaaatgatatacacttgcatgatataccatgtgctgtgctgacagtctgttcatatcttaatggtttacttatgattcaatagtttaccaatggcaatggtgctggatcactgatatattacctcattattagacttaggaacagaataaatacaaataatcactttgctaaggctgttttcctaactcccaaggaagacagaaaagtgaaggacacagttgacaaccacgttatcttcagacatcttttgttaaaggtgaacaattacttaatactgtgttatggcagcactctatacgccccaagttttataaagtggcaagagcggccggtccggagccgggtcctccgccagctccgggcgggcgctgcgcacagagcccaagcccccggcggaggcggcgcggctcgaggcccctccccgccgccga

SEQ ID NO: 6999 - DNA, 596 bp, Homo sapiens
  source 1..596: mol_type = other DNA
ctactgttgaaaacacagtttggtcagtgatgtccacatacacattacatataatatgtattactagaaaatgatatacacttgcatgatataccatgtgctgtgctgacagtctgttcatatcttaatggtttacttatgattcaatagtttaccaatggcaatggtgctggatcactgatatattacctcattattagacttaggaacagaataaatacaaataatcactttgctaaggctgttttcctaactcccaaggaagacagaaaagtgaaggacacagttgacaaccacgttatcttcagacatcttttgttaaaggtgaacaattacttaatactgtgttatggcagcactctatacgccccaagttttataaagtggcaagagcggccggtccggagccgggtcctccgccagctccgggcgggcgctgcgcacagagcccaagcccccggcggaggcggcgcggctcgaggcccctccccgccgccgatgcccgggcggctgacgccgagcagcggcccggagcggtgggggccgggctggcgggcacgagcgagggcagggcagggggccggccgaggccactt

SEQ ID NO: 7000 - DNA, 332 bp, Homo sapiens
  source 1..332: mol_type = other DNA
gatattattaccccagttttatagatggaaaaactgagacttaaaaaagaaaaacgcacacttgttcagtacaatattcaatgcctgagcatataattgtacggtatgacatagagcagctgtccccagagaaagttctttgtttctagactggtactacacaagcagcatttgagcaattcaggatttcttataaatagacctcatggaattctgtatatcaaagttaatgcaatgaaacagaatataccctaaaaatggattctgaggtcttatttagcatatgaaattgcagagtagatcctaatgtggttacaaaatgaagaactggc

SEQ ID NO: 7001 - DNA, 570 bp, Homo sapiens
  source 1..570: mol_type = other DNA
aatactgtgttatggcagcactctatacgccccaagttttataaagtggcaagagcggccggtccggagccgggtcctccgccagctccgggcgggcgctgcgcacagagcccaagcccccggcggaggcggcgcggctcgaggcccctccccgccgccgatgcccgggcggctgacgccgagcagcggcccggagcggtgggggccgggctggcgggcacgagcgagggcagggcagggggccggccgaggccacttcgcaggctcgcgctcgcggcacagcctccgccgcggccgccttccgtgagcccccgcaccccggcttgctcccgaggggcgcctgggctgggctccactggttgcagtcctgcctgctcctctccggagcgcgcacccacccaggcggcaaagttgtgactacttgggcgcgggtgactggcgccccgctcgctccgcgcccggcgcagacaacttcccgcggctcggccccgccgcgtcccgggctcgcgcctccagggattccgcggccccccagcctccaaccccggcggcgcgccgggcagcgcttcg

SEQ ID NO: 7002 - DNA, 480 bp, Homo sapiens
  source 1..480: mol_type = other DNA
ggaactcatctaattccaatgaatgttcactcttctgtaaaatgaagggatttcatgtcctacagggcctctctgagctctcaaattacatgcccataaaatatactagttgtaaactattagtagaaggagctttaaacatttaacctctccagtgcaatacagcatagaaatacaaagtactatgccatcatctaaaataagattacttcatagcatcagaattatggatttaaaatattatgttgactggtctgcaatattttaaggtaatgcttatttgtagtagatttatttccgattttccacttagttactaacatattaagtaaggaaaataatctatataccttggctcttttgcagtttgacaaagttaatgattaaaatctcctagatattattttatctcttttgggccaaagataacttctgagattaataattgattaattcatagtcaggaatctttgtaaaaag

SEQ ID NO: 7003 - DNA, 343 bp, Homo sapiens
  source 1..343: mol_type = other DNA
tcggcctcccaaagtgttgggatcgcaggtgacattttaataggtgaaacacattttattttaatgattagtttcgatttttaagaatatttttcatgggtttatttgtactaaataaattttgatctatggaattttattctgtcctgtattataataggggtcatttgtgtacatatatttctacaaatttatatatgcatgtgtgtatgtgtgtctatccataataaatatatttgtgtgtacttgaactgcattcacatgtatataacatattctgtaaagaagagggcccatcttgttaaatattgtatgaaaaagtgactggttcaagctggctttt

SEQ ID NO: 7004 - DNA, 431 bp, Homo sapiens
  source 1..431: mol_type = other DNA
ttctgtattccacgtgtaccagtgatataggccagataaagaaatgaatttggcttctggagcttttctttcatttgtgaattggaaataattatatatcaactcttcacaaacttctcatgcttaaagcacctttaattatccctttcttagtaattgtataaatctctaagttaatccattaaagtctgtgaatatatttccagaatttcagcaagtctacgagagtttgctctctcagtcccattagaaccttaaagatgatgatagctcacatttaatgtaatgattaatgtgtaccaggaccattccaggagacaaataattctcagattacttactgattaatatcatcatcatctctattttacaaacgaggggatctggagccaagtaatggtgaaccccagcggccagctggtgcctcctgg

SEQ ID NO: 7005 - DNA, 473 bp, Homo sapiens
  source 1..473: mol_type = other DNA
catagtagatactcagaaaatatttgttctgtgaaaattttacttctttacaggtccagacaagttgccgaaacctaccttagctaaaataccaatcagtatattttttttcctgtaatatggaaaaaaatttgaaaaagctatcattgcaccattttaatatacattcaggttgcatagtatctgtatatgttgatttcaaagaataatctgaaaaacgaaaataaaaagtagcacaacgtttactttttattaaagttacattagcactggcatgatttttcatgtttaaaatatattttgaaaatatatacatatatagagatataattttgcataagtgcctaaactaaattatatcataatgttgttttttaattcttgatttttaaattcccaggctagagtgcagtggcgcaatctcgcgtcagcctcccgagtagctgggcagtggcgcgattagcggtctccat

SEQ ID NO: 7006 - DNA, 299 bp, Homo sapiens
  source 1..299: mol_type = other DNA
ccactcagctgagctgccaggctccacctggtgcttactaacacctcctccggtggaggcggcaggggagtggtggtgctttcaagagcacatcagctgcggagctatgtcctttgtcttcagctaccagggcaggtagagatgcctctgctgcctcacacaggttgccagggaagtaggggaaagccggcaacctcaggcctcacccagctcctatgcagcctgcagcctgaaaggctgatgtgcccctgacaacaggactgagtttatttccagggctgagaacttaccccaggtta

SEQ ID NO: 7007 - DNA, 409 bp, Homo sapiens
  source 1..409: mol_type = other DNA
actcacattgcttttaaaaaagaacaagaactatgacttatcttgcatctcataacaagataaacactagctcgttttattgtgggcaggcctcttcaagactgtccagttgaagtcttgaagaaagcacccacaggtgtcggctaggattccagcaaacctcatcttttaaaactaatataacgcgcgtcccgccagtcgggaccggtggcgcccctggaccctcccctcctctcgccctaggcggagaaggagaggctccagggtgggaggtcgagcccgggccacaccagcccccgagcggtctccaatcctgacacggtgcggggggcgcgggttcgggccccgcatgacgtgggcgccacggcgggaggggcagtccggggagctccggacgccttattagcgc

SEQ ID NO: 7008 - DNA, 526 bp, Homo sapiens
  source 1..526: mol_type = other DNA
tgtaataacatggttaaatacattatttgttattacctaaaatcagatgattttagatctcaaatatctcatagaggagaaaccaaaatagaggtttattctgacttgtcaaggtaagacagctgttactgagtcagtgtaaattgacagatttttcatttctttttaatgaatagaactcctggatagctagttaatgaagttagtaatttattcagtgctggggtctaattctaattccaattaataactaattgacctaatatcctgttttactaggtggggccatttagttacttctcatttgtatatgtaaatgtcctcgatatatgattttgagaagacttagcagataaaacatcaactcacattgcttttaaaaaagaacaagaactatgacttatcttgcatctcataacaagataaacactagctcgttttattgtgggcaggcctcttcaagactgtccagttgaagtcttgaagaaagcacccacaggtgtcggctaggattccagcaaacctc

SEQ ID NO: 7009 - DNA, 639 bp, Homo sapiens
  source 1..639: mol_type = other DNA
aggcttcttttcctaagtaagtaaataaataaataaataaaaatcaaggtttactcctcacaacatattttagtctgtagtctaggggtgacccttcggtgaggaaactcctccacaacattccattttgttgtttccaggaacacaaaagttaaaactatatagtccatgtagattcaacgtattcctttaaaccagaagacagccagtgctgctgttcaggctctttaaagcttatataggatacatcccttaaataaagagatgatacttttactataagatttttgctgctatttatcatggaagacaaaacaccgaagaaattcagtttgcagttggtggtccaaatactaactggaacagatgggccaattaaatctacaaaacatgcgtctctctactcttgagtatgataatctatcgtaatcgcttctgtgactattagctttagtgaaaaagaatggtaagttacacggtgtagatgaactttacaaggcgagagctccccagcctggtgtccagtgccgcgtgggaaaggcgggactttcctatcgcgacgcaagacgtcaccggcttgactgggaaggtcaatcgcggctgcaggcaggcgcgcatgcgctttatgcccgctgttgc

SEQ ID NO: 7010 - DNA, 696 bp, Homo sapiens
  source 1..696: mol_type = other DNA
gtgcattttttcatattcaaagttgtataaggaagaaatttgacaatctaacaagttttactaaatggaagatcaattacaggaatgaatataatatatattggctccactgtccaggtctctaaatttcatttatctaggatattttagtctcttagagtatttattgtaagagaaaaaggccatttctttggttagtaaatgaagttaaaggcactactagaaaatgcatatatcaaatattatagcttgcttcagtaactgtaaattagttgaatgttaacctggttctcataagtatttacaagcagattagtttataaaaaccaatttactattaaaaaatctacattaggataattatttttgaaaccctgaagtcaactgtaatatgtatgttatataatacatttgcctgatgtagcaaatttctaacttggcattatcgctttactaaggataagccagacgtgttaaatagctttttaaaaaatatgttatttcttttttgaaattttaggattttaaaaattgaagtggtaaaataagagactttattttgtctgttaaaattacttgacagaagtttgtttggaatagagcttctgtatctttaaaaaatacacagtgagtcaccccctgctcttttgagctaagctgctttaggcatgtaatagaacattccatttcctgttc

SEQ ID NO: 7011 - DNA, 590 bp, Homo sapiens
  source 1..590: mol_type = other DNA
cccggggcacacgccgcagcactgcgcgcccgcggggccccagacccggcccgcgcgccacggctcaggcgacggctgatggcgtcactgcacttccgcctgcggctgccgggagctcgcgggcgctctggttgcaatcgcgcccccggaagctgcccttagtatcgcgagacggagagctggcggagcggcggcggcggcggcggcagtagaggtgaccgaggcggtggcggcggaggcggcaccgattgctgtgtcggccccagtgcggccgaagtcgcggtagagcgtagccccacgcccctcccccgtccgcgccctccctctttccctggggatggagaaggcgacggttccggtggcggcggcgacggctgcagaaggagaagggagccccccggcggtggcggctgtggcgggcccccccgcggcggcggaggtcggcggcggcgttggcggcagcagcagagctcgctcggcctcgtctcctcgtgggatggtgcgagtctgcgacctgctcctgaagaagaagccgccgcagcagcagcaccacccagcagcagcgaaagcagcagcgacagcgacaacag

SEQ ID NO: 7012 - DNA, 674 bp, Homo sapiens
  source 1..674: mol_type = other DNA
ttgtttttagacataatgttaaatttattttgaaatttaaagcaacataaaagaacatgtgatttttctacttattgaaagagagaaaggaaaaagtcctattgtatattatggcaaagataatcatcatctcaactgaagatcccatgagatatactcacactgaatctaatgggaacatggaatttctaagtcctatcttatgcatctgaggcaacatcagctttgacacagaagccctaaaatatgtatgtatgtatatgtgtgtgtgcatgcgtgtgtaaatttttcattatctataggtaaaagcacacttggaattagcaatagatgcaatttgggacttaacttcttatttctaagcaaagtatttagtttggttagtaattactaaacactgagaactaaattgcaaatgttcaagtgggaaattacagttaaataccatggtaatgaataaaaggtacaaatcgtttaaactcttatgtaaaatttgataagatgttttacacaactttaatacattgacaaggtcttgtggagacacaagggatttagtcaaacaattttttggcaagaatattatgaattttgtaatcggttggcagccaatgaaatacaaagatgagtctagttaataatctacaattattggttaaagaagtatattagtg

SEQ ID NO: 7013 - DNA, 680 bp, Homo sapiens
  source 1..680: mol_type = other DNA
taatcttttagaataattgataggaggtgagccactcttagcatccatcatttcatcatcttgagttgctaagtgaatgatgcacctgacccactttataaagacacatgtgcaaataaaattattataggacttggtttattagggcttgtgctctaagttttctatgttaagccatacatcgcatactaaatactttaaaatgtaccttattgacatacatattaagtgaaaagtgtttctgagctaaacaatgacagcataattatcaagcaatgataatttgaaatgaatttattattctgcaacttagggacaagtcatctctctgaactttgagaaagatgaagatgtcagacaatgtcttgtgtgcctggcatatgataggcatttaatagttttaaagaattaatgtatttagatgaattgcatattcattaacttaatttgagagaaattaattattctgcaacttagggacaagtcattattctgtagtttgaggagaatatttgttatatttgcaaaataaaataagtttgcaagttttttttttctgccccaaagagctctgtgtccttgaacataaaatacaaataaccgctatgctgttaattattggcaaatgtcccattttcaacctgttaacaggcattgcctgaaaagagtataaaagaatt

SEQ ID NO: 7014 - DNA, 434 bp, Homo sapiens
  source 1..434: mol_type = other DNA
ttcttaagacctagtctcttagcatattctaagcatacaatacagtattattagctgtagtccatgtgatgcatttgaccacatataagtatattctcatatggcagaatttccttctttttaaagattaaatagtattcctaatgaggtaataaacaccgaagtgcaggtatatcttcttaattttttatttttaatgtgagtacatagtaggcgtacatatttatatatctttgagatactgatgatatatatgcataagagagattgcttgattatatctttccagcgaaacacaaaggtaatttttttttctggttaatatttagcaagaattctgcagagtgatcaaaaaaatcaaatactcagtatttcagaaatagattaaataggttacttttttactgataatgtgaaagaatgatataaaaact

SEQ ID NO: 7015 - DNA, 368 bp, Homo sapiens
  source 1..368: mol_type = other DNA
tacacttgtaaaataacctattatgtttaaaaattatgaatagttgctttacataggaaaccagtaaaataacaatgatccttaaatgtacttcatatttccacagcaaaattggagatattggataaaacaaagcccccaaatccaattcagtagataatgactaaattattatttatctcctctgtaaaaatataactggtgcaccctgaagcgcgaaacgctacgtgaataatggcgttcagtcttggttctcctggggctccaggatcgctgatcgcgtcgggggcactgcaagcgcccagctgagccatgctctgggaggagacaggcgccgcccctgcgcccgcgcgggcctcggacctccc

SEQ ID NO: 7016 - DNA, 437 bp, Homo sapiens
  source 1..437: mol_type = other DNA
ccaaactctttaaggacaagtacctagtcttatctatttccagaaagttactccataaatgtttgtggaactgatgcattagaaaactaaatcttttgaaaaggtaacagttcctagaaactctctaaaatgcttagaaaaagatttattttaaattacctgattttatcttcaccatcatgatagcatctgtaattaactgaaaaaaaataattatgccattaaaagaaaatcatccatgatcttgttctctatatctgtcacatggtactatgataaagttatctagaaaatacaattgataattcaccaaattgtggagcttcagtattttaaatgtatattaaaattaaattattttaaagatcaaagaaaactttcgtcatactccgtatttgataaggaacaaatccatcagttgcaaatcgtggaatttc

SEQ ID NO: 7017 - DNA, 377 bp, Homo sapiens
  source 1..377: mol_type = other DNA
tataggatcttacttaaagtgctatgacaaacatgcaacctgaacatctagagtcattctgtttgtctggcgtttgaacacgaaagatactagctgcctgctgaactttttgcaggaatcagattacacttgtaaaataacctattatgtttaaaaattatgaatagttgctttacataggaaaccagtaaaataacaatgatccttaaatgtacttcatatttccacagcaaaattggagatattggataaaacaaagcccccaaatccaattcagtagataatgactaaattattatttatctcctctgtaaaaatataactggtgcaccctgaagcgcgaaacgctacgtgaataatggcgttcagtcttggtt

SEQ ID NO: 7018 - DNA, 425 bp, Homo sapiens
  source 1..425: mol_type = other DNA
tccaattctgtgaagaaagtcattgtggggatggtattgaatctataagttaccttgggcagtatggccatattcacgatattgatttttcctacccatgagcatggaatattcttccttgaagaggtccttcatgttgtaagttggattcctaggtataagttgcttatcagcttaaggaaagttgcttatcagcttaaggagatctagatatacaattatgtaatttgcaaatagggacaatttgacttcctcttttcctaatttgtcctggccattggagaggaggagcatctcccagacagctgcgtgcctcagagaagccagcctcgctaacccctcaagcccagggtggagccacagctccctccaccgcggggcggggctaaaatgtcctcccccttaagggagcaggcagctcctcc

SEQ ID NO: 7019 - DNA, 505 bp, Homo sapiens
  source 1..505: mol_type = other DNA
cattcttttttagagaagagaaaacggtcgatatggatctcttccgagagcatcactgctccatctcaccctgtcactggcagtgactgaggacacagcaggctctggaagacatggcctggcaaactctccttgtcctctcttctggactattattcaggattgaaacaatgaagaaacatccaggagctaagtttttataaaaataatgcattcaaatattacttctgcaatttttctaagagtcctacagtatactgggtgtccagagactagggaagttttccacattcaggtgaaattcagaaaaacttattagtattagaaaacaattgcaaatagactgaatcctgaagccttaagttgcttggtgactacagagaactctactatgatacaacacagaaaatatttctcttctaagatgcaagtagtgtttctaactccacaaatgtaagtgtatataaactgagagccaccccaggcttccggactggaaggacag

SEQ ID NO: 7020 - DNA, 421 bp, Homo sapiens
  source 1..421: mol_type = other DNA
agggtgcttgcacaccaggtacccactccctctggccagcccctccgaggctaacactggattcagcttttgacactgataatctgttgccaccatctcataatggactgtactttcacagacagcactgatgtttcctccaaagaggtcgcgccttctctgtggtgagcaggtggtgcaggctgccactcagcccccctccagggatctggggcagaaggcgaatatcccagagtctcagagtccacaggagttactctgaagggcgaggcgcgggctgcatcagtggacccccacaccccacccgcaccccaagcgctccaccctgggggcggggccgtcgccttccttccggactcgggatcgatctggaactccgggaatttccctggcccgggggctccgggctttccagcccggg

SEQ ID NO: 7021 - DNA, 328 bp, Homo sapiens
  source 1..328: mol_type = other DNA
gaagactgtccatatggatgagcatcactgcgcactggctgaagacacagcaggcactgggagacatggcctggcttgtttacaaaaagaatgcattcaaatattacttctgcaatttttccaagagtacgagtaatgggaaaatccagagactagggaagttttccacattcaggtgaaattcttattagtagcagaaaataattgccagggtcctgaaataagttgcatgatgacagcagagaactctactgttaatacaacacaaaaaacattccttttcttctacaaacgtgcttgtctggccagaaaggcttccggactggaa

SEQ ID NO: 7022 - DNA, 669 bp, Homo sapiens
  source 1..669: mol_type = other DNA
aaggaacacatattttttgaaggataaaagtcagctgtatagtgatccatatacaatacttctatgtatatgtgtacctctatgtcttaaacgtgtctcattgtatacatatacatgtgtgcatataagtgcagacagaattgaaaactaatgcaaaattgttaccagtgtttaccactgaatagtgagaaatttgtgttttatttcaaagacatctgcagcatacgaatcttttgcaataaattatataatttttctgttaaattaaaaataaaaagaaaaataaatatgctgggtcctactttttaggtattcttaggtggtagaaacaagtagcttcttttgtaatataaaggaggatgagtttcatttgtagtttctagatgaaattacaaaagataatatagatcaacctttgacggtaattggaatatttatcaacattcatgaaaagaacatttgctttctttggcaagcaaagataactttctctttcaagggccacatgtttgtgccttcaggtgctcctaaagtttctattaagcctaaaaactgcagttataaatcatacaaagaaaatgcatgtagtatttcagtctagttcttaccttcctgaacggagttcttacacaggtgtcttactggctttgagaaagagcatataaatga

SEQ ID NO: 7023 - DNA, 411 bp, Homo sapiens
  source 1..411: mol_type = other DNA
caccagccatgatcctgctggacctgaatccctcccactgggagaaggtctccaagttcccactgaattcaaattttgacactgataatctgttgagtagaacattcttctctggaatccgagagcatgatgttagatgtacatgaaaaaagctctcttcctctaaactaccccgtacgcggggggtcatcggggacctaaggtcccccctcacaggctgtatcttcagcgaggtggactcactgcctctccaggaatttggggcagtggagggcgaggcgtaggcgtcaccagtgggctccccctacccgtatccgactccaccccgggggcggggccgtcgccttccttcgggactccggatcgatctggagctccgggaatttccctggcccggccgctccgggcttt

SEQ ID NO: 7024 - DNA, 550 bp, Homo sapiens
  source 1..550: mol_type = other DNA
acagagctggggcaggcctgggatccctggcaagctttagcctgcgctaatagcatagcaactgccaatagcaaggtatcttccatggcaatttgctgggtgtatacttgctatatactacaagtacagaattctcagtatcctttcaggccactgacttcaagtggcaagagacaagggtctcttgttatcatgttatcttggcttccaacagtccagagattcataaagtcattcaagaaacctagaatgacctgcctgcaaggaagacaggaaggactttcagtttatagcaattcaaacatgaataacatttcctgattaatagtaataataattagaaaggattgactttcagaaatttttctcaaatcacaccttttctctctagaaggagaggaggagcagagggctgcgtgcctcagaaaagccggcatccctagcccgctctggcacaggccatgaggccctgagctggagccacagctccctccaccgcggagcagggttacaacgtccctctcggtagaggtgcacgcagctcccccag

SEQ ID NO: 7025 - DNA, 404 bp, Homo sapiens
  source 1..404: mol_type = other DNA
agaaaattctatagtaaatgaaatgtgattttatgtgtgatcttcatcagcaggcagctgtttggtttgcacaccaggtaccccatgatcctgctggacctgaatccctcccactgggagaaggtctccaagttcccactgaattcaaattttgacactgataatctgttgagtagaacattcttctctggaatccgagagcatgatgttagatgtacatgaaaaaagctctcttcctctaaactaccccgtacgcggggggtcatcggggacctaaggtcccccctcacaggctgtatcttcagcgaggtggactcactgcctctccaggaatttggggcagtggagggcgaggcgtaggcgtcaccagtgggctccccctacccgtatccgactccaccccg

SEQ ID NO: 7026 - DNA, 342 bp, Homo sapiens
  source 1..342: mol_type = other DNA
atggccttttctgcccagggacagcactagtcgagatgttccaacgtatttgcttttaagatcataaaacaccaggaaaagctcttatgcgtcatctgagatgacacatgtactgttaaagcgtgcgtttatttcaaacattaatgaaatttgtgcagttcttgccctacgtggtctgagagcggcgggctctcgctcccgctccagggatccggacgtcactcgtgagtgccccgacccccctccaccccagaggcggggccatcgccttccttccgaactcgggatcgatctggagctccgggaatttccctggcccgggactccgggctttccagcccg

SEQ ID NO: 7027 - DNA, 329 bp, Homo sapiens
  source 1..329: mol_type = other DNA
cctctagaactaaaatttcctcgatagctgtttctctagagatggcatggaaatgcaattatgttagcaatctagtatgtatatatcagacatgtctgctggccttttctgcccagggacagcactagtcgagatgttccaacgtatttgcttttaagatcataaaacaccaggaaaagctcttatgcgtcatctgagatgacacatgtactgttaaagcgtgcgtttatttcaaacattaatgaaatttgtgcagttcttgccctacgtggtctgagagcggcgggctctcgctcccgctccagggatccggacgtcactcgtgagtg

SEQ ID NO: 7028 - DNA, 542 bp, Homo sapiens
  source 1..542: mol_type = other DNA
tgaatggggaagtgccacacacttttacaccaccagatctcatgataattcactgtcatgagttgggatttgggtggtattataataaaacgtgaaacatcagataaattcaaattgaggaattgttcctacttgaatctgcattggatcctgaaacagttttatctatctatccatccatttatccacccataacggtaaaggatattattgggataattgtcataatttgaataaaatctatagattaggtattagcattacatcaccattaatttgatatattctgcttttataagagaattttcttgttcttaggaaatactggataatctgggcaaaaaaattctggaattctttagactcttctttcaacttttccatataagttttaagtttatttcaaagtatgaatgctataaaattaggaattcaaacaaaattgagaggtgtgtacatttaacaaaacagttatattaaatcaggttaaattttaagcatgctgaaaatttgcaaagtatattgaattttagtgttgcaat

SEQ ID NO: 7029 - DNA, 388 bp, Homo sapiens
  source 1..388: mol_type = other DNA
cccattactgggtatacaccatacctaaatgcccattaataatgtggtgtgtgtgtgtatatatacacacacactacatacacacacacaatgctctcacttataagtaggagcttcatacttaagtggtacccttgaacttaaaataaaacttaaaaacaaataaaaataaataaatatttttgtataatatttggtcataatgttcaacttttctttttaaatgtatctttctattgaatttttaaaaatttgcatatggtaaaatttactctttttggtgtgcagtttcattaatttagacaaatgcatgtagtcatctattaagttaattagtctaacacctgctgtgtcacatccatttttattactcatcattgaatgagtt

SEQ ID NO: 7030 - DNA, 603 bp, Homo sapiens
  source 1..603: mol_type = other DNA
atgcctcaggaagatatatttataaatcatttatattaatttggggcaagtgaaaatttctgtagttgtaaaatatagtagctgtaatgacatattttggcctttaaagtgccactttaataattacaactagatgaacttgagaaataatttgaatgttgtattaacttagaaactttctattcattggatgtatccaaactaaatgtcatcttaattttctcttaatggagaattttaatattattattattgctattatcattatgttggtacctggaatatggcagcccatttcagacagaaaggtgaatattatactattaaaaataattttatttacagcacttgtcatagtaacaaaacctctgtgttttcacaaatttaactgttctctgcaactaaattaacaaattatcttgatttgaaatggaacttatagtctgtaataaaaggtggtataaccaactatagtttcaggtatatttcttttagaaacatgttgttttaagtacttttacatacatgattatgcagtgtttacttgatcacattgctagataatacaggtatcctaaccatctgctctgccagaagcttcat

SEQ ID NO: 7031 - DNA, 499 bp, Homo sapiens
  source 1..499: mol_type = other DNA
gatcagccaggaaagagtagggtatcccattcttattgatatgattttaaagagcatattttctgacagtctatgattttaaaaaacaagttttctcagtaaaagtgcagctatgaaagacgttgttctgactcaacaatttgcaaaatgaatggacagtctaatgttttactttagcagatgggttcttagcctgcatcgactacatattggtcatacttccaaggaatctcacaaaggaagtgggaaacaatgaacctattacttctttcctgctttaaatcacgtagtcacggagttggctgggtgcggggcccagtcgccaggccacactgcacgctctcagagggcccgggacttgggtcctggccccgccccctgcggacccggcactctgtcagttccgtccccggtcctggtggctgggaagcgctacttgctgccctgccagcccgggtgagggcggagccaggcctccagccgcgaggactggagtcgc

SEQ ID NO: 7032 - DNA, 229 bp, Homo sapiens
  source 1..229: mol_type = other DNA
caggatttcactaattcctttaaaaagtaccagcctgcaatttgttgtggcaggccttgtccaaaaagcaatacttagtaggaaaaaataacaggaattttcttcacaatgactcgactttgaggtaatctctccaaaggcatgtatggggaacctcccggagggagtccagggagggaggatgacttcctgacggtccaccccgttagggcccgggaggggctcccta

SEQ ID NO: 7033 - DNA, 576 bp, Homo sapiens
  source 1..576: mol_type = other DNA
aatgctttttctcttcctcaagtcaagaaaaatccagttctttagttgacagtacatccaagttagtcaaattaagtagcttgaggcacagtctagagcactactcttcaccccaccagtagaaattatcctttaggctaaatattgttcttcccagaaaccctcttttcaaggatcagtttaaacctaaattcatcagagaggaaatttcagagtcagatgaagaattcatatccaccaggtaaaattttaagtgcataatttggcaataataaatcatcaataaatattaatgttgatgaggcccctgggccaattctggccacttcacagaaaaggggctcttgattgagatagaagcccatcctacatgaagcaattcctcattgattggtcttaaagtacttttacatctaatcagagtttgaaacatctggacttctgtcaggtactagctccggaaggcttgcagctagaggtttaagccagggaggcgccgggcgccgcctgcctccacccacggccgggccttgacgtcatgggctgcggccccctcccggctgagcctataaagcg

SEQ ID NO: 7034 - DNA, 464 bp, Homo sapiens
  source 1..464: mol_type = other DNA
cggggtgcctgggcaggcatcttatcattacttgcgagttgtgtgaactcgggcaagttaaactctccaagttgtgagaactttggttgagaacattgtttcattttctcacctgtaaaatggaataataataattcttagaaggattcatgaaacaactagtagggtagtaagaagctgaatgcagcggcagacatcctggttcgggccccaggaagctcagccgggtaaatgaagaaggtcctcattcttggaacatgtgcggcataaggtcacctttttaaaggctgagatgtgctcacattgcacagtgcaaggcgctgcaaacccagcagaggccgctctgggccggggctctcgggacctgagggctgagggcccagtcatcgccgcggggcccgggtgggaggggtttggcagcggcaggcgcggcggcggcggcggaggcggaggcggccccgggc

SEQ ID NO: 7035 - DNA, 484 bp, Homo sapiens
  source 1..484: mol_type = other DNA
gctgaaggggaatattttccctttcccggtgttttaggaaacacatcttccagggccttgactctttaataaggagaaacatatttagctgtgtaatgttctttgtgccacaaagccttttgtcgcttccccagggaagccttccctcactgacactcagattgtcagagctgctctaatattagctctggtgactggcaatagtgaatgtcagtacatatttagcacttcgaggtgccagcgagcaccctggcgtccaagagcagcgcgcgggacccgctgagcccagggcccgggccgagctccgcccctttctccaggctccccgccaccggagggagagagggaggacccgtcacaggtaacgatgcgcccagtgagcgtcccgcgccgctgccgccaacctcgcgccgaactacgccctgagatttgggcgggacggagactgcgtcttagccccgggaaccggaaatccgtctgcccc

SEQ ID NO: 7036 - DNA, 421 bp, Homo sapiens
  source 1..421: mol_type = other DNA
ttgaggttccaaagctcaagttttctaagcaaaatttttgtactgtttcttgcaaggaaaatcaggaaacttcaattgaatacgtgccaatttaaaaaaaaatacagattaagaagttttctcagagtaacaatacatgcttattaggcactttcctatgcataatttcctatttaatggcaattacattgaaatccccagtacaggcccggggctgcctcagtctacttcggcagcaaaagacgaatcccaaaaacgttctcctcaagaagaacccagttccaggtggaaaaggtatcctgaaaatcaggttaacctcaaacttaaggaagcttgtcaggggcgtcacctttaggagacatcctggcgccatcttcccgggcccgtgacccggggcagacggatttccggttcccggggc

SEQ ID NO: 7037 - DNA, 433 bp, Homo sapiens
  source 1..433: mol_type = other DNA
gactctttaataaggagaaacatatttagctgtgtaatgttctttgtgccacaaagccttttgtcgcttccccagggaagccttccctcactgacactcagattgtcagagctgctctaatattagctctggtgactggcaatagtgaatgtcagtacatatttagcacttcgaggtgccagcgagcaccctggcgtccaagagcagcgcgcgggacccgctgagcccagggcccgggccgagctccgcccctttctccaggctccccgccaccggagggagagagggaggacccgtcacaggtaacgatgcgcccagtgagcgtcccgcgccgctgccgccaacctcgcgccgaactacgccctgagatttgggcgggacggagactgcgtcttagccccgggaaccggaaatccgtctgccccgggtcacg

SEQ ID NO: 7038 - DNA, 482 bp, Homo sapiens
  source 1..482: mol_type = other DNA
ccagtctctgatatcttaaagtctctgatatcttaaaacttttaaactaaattataaacatgtaaaggtatcacattgtcacttcaaatttaacaaaaaggttatttaaaaaggactcgggaactaaagttcaaaattgaagacttaagtagaactgtcttttgctttttataacatggccaaagtatttggcttaactacagcaaaatcttacacgtgaaatgtcagtccttttaactgaaagctgaaggggaatattttccctttcccggtgttttaggaaacacatcttccagggccttgactctttaataaggagaaacatatttagctgtgtaatgttctttgtgccacaaagccttttgtcgcttccccagggaagccttccctcactgacactcagattgtcagagctgctctaatattagctctggtgactggcaatagtgaatgtcagtacatatttagcacttcgaggtgcc

SEQ ID NO: 7039 - DNA, 379 bp, Homo sapiens
  source 1..379: mol_type = other DNA
aaaagattgaaatttaaaaaaaattttttttaaaagcatctccttaattcacaaattcctctaggcccctgaggcttcagcaagtctcagggactcaccccaactggacatagacatgtcatgtccattttatatgcaatattcactaagttactcccaatgtttgtttagacagtgaccatcatgaccactagggaagatcatctgctgccctcacctcctggacaaaagcagagttgtttcgctttttaagtaggtaagctgcacagagagaagcacacagcttatttctcttgcagaggaaccaaaatccccctctggggggagatgttccaagaagcttctggttgacaaactgaatcaggctgctggtgactca

SEQ ID NO: 7040 - DNA, 355 bp, Homo sapiens
  source 1..355: mol_type = other DNA
gaacaggactgtaatccttgtatttcagatgtaaaatgctttagtatctactgatatttagccatgcctgaaatagtcttttaccggctgcattttaagctttccgggcgcgagcgtgtgcgagcgcggcagcgtactgcgcgtgctccgcagagggacagggcgggacgtccgtggtccttgtcgcacgtcgcagcgcctggcgcccgggaagaaggcagacgaactcgcggctctccggcttccgaggcttccgagttgtcggaggaagggggcggcggctccgcgcgacgtacccgccgccgccgttggctggaggtgtgtacggaaagggacattccattcgcgctccgcg

SEQ ID NO: 7041 - DNA, 279 bp, Homo sapiens
  source 1..279: mol_type = other DNA
atgtttagttcgtaagcattcatttgctatctcggtattctctgaaaacactgccattccttttgatgaaacaaggtcaccagtgtctcaccctgggggcaagtctgggcttagagctagaacaggactgtaatccttgtatttcagatgtaaaatgctttagtatctactgatatttagccatgcctgaaatagtcttttaccggctgcattttaagctttccgggcgcgagcgtgtgcgagcgcggcagcgtactgcgcgtgctccgcagagggaca

SEQ ID NO: 7042 - DNA, 388 bp, Homo sapiens
  source 1..388: mol_type = other DNA
ttggacagtggtactactgagcacggcacgcacacagtagaattgactttttttctttaaggggaaagatgacgagttcaattttaaatgctgttagctaactaggaaaatgacaatttttcatgttaaaaaaaaaaaaactgaaaaataacgaaacattatgttaccagcagaacaatgtatttctctagtaagctatagatctaggaagaatgctggtacccgccaggaagccttacctgtcacgttggccaaaggaaaatttcactttcgactcaacaaaataagacctcagatttgatgcctgcagggccgggcttccaccacgtgggtggctgcggccagcaggatcaatcggcgtgcccctgcggcggaacctagctaagag

SEQ ID NO: 7043 - DNA, 490 bp, Homo sapiens
  source 1..490: mol_type = other DNA
tacttgtcatagaaatcttcaaaatacctctttcaaagatggtcatctgaattaatataattaacaaatttagaaaccctgtctctactaaaaatagaaagactagctggccatggcagcgggggtgcctgtaatcccagctactcgggatgctgaggcatgagaattgcctcactgcactccagtctgggcgactgtctcaaaataataataataataataataataatgaacaaacttgatatagacaaacagaatatcactttctttgagatagattaactgaaaaagtaagttgtccaagaatagtgattaaccacagattaggttatatcctaaggaaagtgtcctatgtgtcttctgctgaggggactccagagcctatttcagggctaaggagctcaggcttctcagatgtggcctgggaaacacagtcttctaatccaggagagttataggcctgatctgactgacgtcagggggtaggcaa

SEQ ID NO: 7044 - DNA, 378 bp, Homo sapiens
  source 1..378: mol_type = other DNA
gtcccagccttactaagattttcctaagtttgtctcccagacattgggaactcaatgattaaatgagataatgtccgcgaaaaatatttagcagataaatgttcactaaattttgagctttaaaaaaatgttttaccgacgctaaagtttaactgaaaagtctttcctgacaccttttcgacactccttcggcccaagcaggtgcgctggaaccggcagttggtgagaagccggctgccggcagccccaacccttagcggccccgcggtcagggacctccaggcccgatggacggcggggacgggaggtgtcgccgctccggcttgccggtgacaggggcgggcgggtcgtgcgcgggccccacctccagcgatcgca

SEQ ID NO: 7045 - DNA, 433 bp, Homo sapiens
  source 1..433: mol_type = other DNA
cactataaagaaatatacatacacatttttttccatttaaaaaaaaatttagagggctgcagtgtcaggctgtatatattttaaagaaatcctaattacttggaaagccattaagtctctatactaaaagcctttagactaggggttagttgacaacccatattctttttctttttggcctaatcaaattactaaaatcctaaagtagtataaaaatgataaacaaatattcatctaaagacttggcatttctacaagttgtgctataggatattagtacgttttgtgatcatatttgcgtacttatctgctgtaaagaggtttgaaaagcagatgtattaaatttggaaatgtcttagtccctagcagagactgattgtgcccttgactggagactagctggagcacatcctgcattggagtcagagggtag

SEQ ID NO: 7046 - DNA, 331 bp, Homo sapiens
  source 1..331: mol_type = other DNA
ttacaccttgagattgtagaaatgtattcatctgaattaaaaactctgactgaggagtgcttacaaagcttataacgatggttgaattttaacgattaattgcatttattaatggtcaacatgatcacattttatccggagttgaaatcatacacattaacttatatcctcctaagagggaatagaaatgaggccggtctcgaactcccgacctcaggcccgccttgtcagtttctaattttagactgcgggattaaaaataaacgattaatcctcatttatacacacgtgaaaaaatttacatttcagatcctttcagaaacgcaaggca

SEQ ID NO: 7047 - DNA, 392 bp, Homo sapiens
  source 1..392: mol_type = other DNA
gatcattagtgatgaattcattctagatatagattttacatgcaactgaccccttattctaaccaatttattagtttaaaaaataatactgtagcaggttaagttgttaagtgggcaatataagaaaatatcaatgtagccatctattatacagaagaatatgccataaatagtaagggaatttgaaaagtatattatttatctggactttaatatttcccattgttgtataacattagtatattcattatataacctattcttcacacaggtgagcaactgtgaatctatcagtgttgctagtttcacatcctatttatgtgaaatggaaataagtttgtggtcaatttagttagctcagctaaagaaaatgaatatcctaaataaatatg

SEQ ID NO: 7048 - DNA, 586 bp, Homo sapiens
  source 1..586: mol_type = other DNA
agttaaaattgtgccaatttcagttatcactgttactaaaaaagcaccctttgttttttacaataaccctaggatagcataccatcttatgatgttttcattgctataagacgtgaaacttgttttaacacttttccctcaaaatagttatgttggaggttaatctaatggtgttatgaatgatcaaagcatttattgaattatttaaaacttgccagttccagatcttcctattactttatagtatttgatcaaggaggactgtcttgtgttaccaaaaaattaggtttacctataaaggatgaaaaatttctattactggggatattttgaaaaataacctctgaaagtaactgtaaaagtttaagtgttgagaaaaagcattatagttagaatggattgcaacctttgtttttttctatatgcaatgaagttctttttttcaagaaacagttcatgttttggaaagtgaaacctaattcactattgaggctacaataaattaccttcgagtcttccaggaacagccagcaggttttgctaagtcaactgtaatgcccttatccaatcagaattagggagggaa

SEQ ID NO: 7049 - DNA, 475 bp, Homo sapiens
  source 1..475: mol_type = other DNA
gtgggctcaagcacagccactgtgggcgcctgaccaaactcactaaatttgtgtgggacatgatcccagaggtgtgtggcttcacccctaacgagtgacgtcctggctgccatgaggaaagcagctgccaagaaataaaataaatataaaataaagtaataaaattaaattaaatttaaaaataaaataaagcaaaacaaaataaaatatataaagtaaaaattgttgatttacaggtaaaaatatgaaattgaataaaggtcatctggtgtcaaataatataggccttatctattataagagtttggactgaaaagcaaaagtgagataataaaaaaaagcttttcagaatattattttgtatagatcagtcttcctgaatgaatgacaatcaccgacaattaaatggatttctaggaaaagctaccttaagaaggctggttactttcaacgtataaaatgctctatatatgcc

SEQ ID NO: 7050 - DNA, 357 bp, Homo sapiens
  source 1..357: mol_type = other DNA
gcctaattttgttcttgatataaattaaatcatacagtataaacatgcttgtatctctttttttactcaaaatttcattgctatataaaatttcacttacagtctaaatgaatagtgctactatcaacattctattaatgtccacagtcagtgaagttactcaaatgacagctgtcctgacgaggtacctgaatgtcaccattgccagtgattaacagagcaagtttccctagttatgtgaggaagtcatttctctctgagagaagcccagaactgtgggctcagaactgaatgtctatggctttacaagcctcttggagatttcacaagtagcgtagtgtgccactgccaagctac

SEQ ID NO: 7051 - DNA, 464 bp, Homo sapiens
  source 1..464: mol_type = other DNA
ttaccataatttacaaggcaatataatataatggtaatttttacaaattgggactctggagtggagaaacatgagtccaaagcaaggtgactttgggaaatacagttacagaatcttctctatttatttattctgaggattaaattatattacaagtacaacagagggggcccactcttcccctctttttcagtttcctcttttataaattggagatagcagcaacccactcataagatagctgattaaattatgtaaacgcaacgtgtttgctacaacctcgtgggtgttgggggggttctcaaccccagccctgctgccctcccaggcccgctagttgatgaggcagcaacgaacctccctacggcagtttttaaaggacagcccaccggaagtgagctggctgggggcgttccctcacaaccacccgcgtttcccggccggactgagaaggggagcgcgct

SEQ ID NO: 7052 - DNA, 554 bp, Homo sapiens
  source 1..554: mol_type = other DNA
aagtctgaaaaaggcccagttcaatgtggggccctaggtcatccaggcagaacatgcttgctggcatgatctcagcaggcacctggcccagcgcgtggcccatgggaggcgagcgctgggcctgcggtgcagggcgctgggagcggccaggccgggcctggctcaggcgccgcagccactcagggccaccggggaccggccggggagggcgcgggccgaatcactgccgccgccgcagggcacatgactgcggcctccgcccccgcccgcctccccgcgcagtcgccggcggttgcctcgcggggttgcggcgagcccggcccgcgaacgtcacgtccctgcgcgctccctgcactctcccgagctgcgctaggcgggcgccacggctgcccggcgaaggaaaccgaccgagtccgggcccgtccctccgcggccccatccgcccggtgcacccggggccgcgctcgccaggccgcggagcccagagctgcgcgcacgaaccgtgcgccgggagggcgtgggcgtggcgccgaagggtcccgggtcttcgacgc

SEQ ID NO: 7053 - DNA, 374 bp, Homo sapiens
  source 1..374: mol_type = other DNA
catagtattaaaagcaggcaagaacaccagcgatgcctgctaagtctgaaaaaggcccagttcaatgtggggccctaggtcatccaggcagaacatgcttgctggcatgatctcagcaggcacctggcccagcgcgtggcccatgggaggcgagcgctgggcctgcggtgcagggcgctgggagcggccaggccgggcctggctcaggcgccgcagccactcagggccaccggggaccggccggggagggcgcgggccgaatcactgccgccgccgcagggcacatgactgcggcctccgcccccgcccgcctccccgcgcagtcgccggcggttgcctcgcggggttgcggcgagcccggcccgcgaacgtca

SEQ ID NO: 7054 - DNA, 476 bp, Homo sapiens
  source 1..476: mol_type = other DNA
gcataggaggcttctccccaccttaattttagtgaggacaggtagcttagaattatattttaaaatatatttcccaaaatgaaacttatttctattttatttatttatttaccaggctggagtgcagcggtgcgatctcggctcactgcacagtctcccgagtacctgggactacagaagtatcttactttaattttactatttaaatcaggcaaagaaaaattttttttgagagacagagtcttgctctattaggctagaatgcagtggcacaatcctagctggctgcatcactgcagcgagtagattttttttccttccatagagataaaggtgttcaacttggcctgccaaagtgctggtgaacagccaggtgggagggggtccccggaaaaactccaaccaacctgcgcgttcacgctgtttgcagcggggaggagcctggccgcctcacttcctgtgtggaacctaggatt

SEQ ID NO: 7055 - DNA, 373 bp, Homo sapiens
  source 1..373: mol_type = other DNA
ccactattagacatccacgaggagatgcccagaagttgtggccttagataatttgccctaccagagagagcaattatagcaattactcccatcagcttgaagctgtatatatatataacaccgcacagggttgttgtcttgtgaggattaaattaaatacacacttaaaacatccggaatacagacagtgcttaataaagagctgctgtttttattaacaaacttatctgtaggagctcgtccatggacaacatccagttcatgactggcatctttagatggatggtcctcagtccagtccttccaggctaagcgcgctgagctggcggcggagcggagcttccactagggctcccagtttccccgcaccgcg

SEQ ID NO: 7056 - DNA, 425 bp, Homo sapiens
  source 1..425: mol_type = other DNA
tgggctaattataatgattacctctattaactaactcacaacagctctgttaagtagctggaataatagtacttgcataataataattcttgagggattcttaattcattattattttccccattttcaggccaggtaattaatgaagcttaaaaatgtaagtaccctgtgcataattattaagtagaaccaatgcttatatttaaatccacgtgcctaccagggtcagctggtgtgcagccctcggtttacagaggctgttcagtaaacgttttttgaaacgatgatgagcaaaaaacgctcccttccctcggccaggtccacgtccccaggcgtcggagaaggggttggaccgcgcagcggggcgccaggcgcccggggcaaggttgtgcggtgtcctagcaacggggcggcagcagggcaca

SEQ ID NO: 7057 - DNA, 570 bp, Homo sapiens
  source 1..570: mol_type = other DNA
atatatataacaccgcacagggttgttgtcttgtgaggattaaattaaatacacacttaaaacatccggaatacagacagtgcttaataaagagctgctgtttttattaacaaacttatctgtaggagctcgtccatggacaacatccagttcatgactggcatctttagatggatggtcctcagtccagtccttccaggctaagcgcgctgagctggcggcggagcggagcttccactagggctcccagtttccccgcaccgcgccaccgctctagcccgcgctccagcccgcgcgtcaccgacgcccgcggccgccgaggtgcccggtgcgggccgaggcagggctgggcctcgcgggcacccggctgcgcggggccagggttcttcacgcgggacacacgtggaacgccgacccctgcgcccctggccgctggcaactggcaaggcgctggagtcttccccgggagggagcccggggctgcagcccaggggcggggagcggggcgggggtcgctcagggccgggctccgccggagtgcccggcgcagaatctgtgtgcgtgacctga

SEQ ID NO: 7058 - DNA, 557 bp, Homo sapiens
  source 1..557: mol_type = other DNA
atcagccaatttttacccctcccttcaagtgaagttaccattgaaaatcaaacttgtaaattaaatgatatcctttcattaattataagtacaaacaaaataattgcagtagtttttaacttcagttttcaacttaattctcattatcccatacttttaaacagaaaaaagttttagtacatatattacctggaagtaattctaatctgttccaataactaattctactgttcaaatttttaatacaaagcatgaatgttaaatttgtatataacattattacaaaatgacactggtaacatgaaatcagaacaacattctcgagtacctagtacttacccacaaggcattgtagatttcttttcatttaaagagtggataacaatcttgaaaaacccacctcctgtttttattgagtcaaacaagcagaactttgattggaaagtcccatttcatatattacactggtagtattttcttctaacgaaaaaaaaaaagccctaaacgtttacccaaatcacttaggcattgggtttttaaaaacacatttttaactt

SEQ ID NO: 7059 - DNA, 578 bp, Homo sapiens
  source 1..578: mol_type = other DNA
cccttcaagtgaagttaccattgaaaatcaaacttgtaaattaaatgatatcctttcattaattataagtacaaacaaaataattgcagtagtttttaacttcagttttcaacttaattctcattatcccatacttttaaacagaaaaaagttttagtacatatattacctggaagtaattctaatctgttccaataactaattctactgttcaaatttttaatacaaagcatgaatgttaaatttgtatataacattattacaaaatgacactggtaacatgaaatcagaacaacattctcgagtacctagtacttacccacaaggcattgtagatttcttttcatttaaagagtggataacaatcttgaaaaacccacctcctgtttttattgagtcaaacaagcagaactttgattggaaagtcccatttcatatattacactggtagtattttcttctaacgaaaaaaaaaaagccctaaacgtttacccaaatcacttaggcattgggtttttaaaaacacatttttaacttcctacgtgttattaactgtaagaagtgcttactgtgcagaa

SEQ ID NO: 7060 - DNA, 624 bp, Homo sapiens
  source 1..624: mol_type = other DNA
ccacgcagccgcagccccggtctgtcgccagcgacggctgatcccccacgtgtggctgctccagtgacacccaggggaggcctcggtccttacccctagagcaaccaatggctgcccctcccaagcaggcggccgttgggtcggccgaaggcagcagctcccttctcaagggaagcggtgggcgaccgaggtgcggcctggagggcccccatgtggcggaagggcaattcttccagaggaggccagcccagccgcacttcggtcgcccaccgctccgcctggtggtccgcagccccttccaggccggcttctccgggtggggcgtgctagtccggggctcttccttctcccggcggccgctggagctgcccgcttcgtggagccggtggcaggccccggggctgggagctcgcgcccaggcttttactcagattccagcacctgatggagcagggggtggcggccagcgcacaggctgtcggcatacggaggggcgagccccgcggccggggccagtggagctgggctcggagcccgcccaccatcctcccgcccaccaccgcggccgggcgcgcaggctcacaccccttcctggggaagcgaatggtcccttccaggcgggtg

SEQ ID NO: 7061 - DNA, 251 bp, Homo sapiens
  source 1..251: mol_type = other DNA
taaatggttgagatctagctcttcctctttcaaaactctgtaatactacatatttttaaataattaaaacaatcaaaatagcaaaaagtttttctttaagcacctggtaataaaacctatttggaccacaggaagcgctgcgcatgcgcagcgcactctccggccaccgcacgccccctcagtgggggcccagagacgctgacgtcaccgtgcggtctcgagggcggagccgaggaagccggcacttcttc

SEQ ID NO: 7062 - DNA, 335 bp, Homo sapiens
  source 1..335: mol_type = other DNA
tcctgaatttttttaaattatggaaaaattccaagacacttttttctcttggactgtaaaattttaaagcaaatacccaaacttgtagcatttattgaatattttagtaaacgccccgacaatgttataataatttggtgggttattgcaaaaagccccgcagggcaggtaactctgcacacccaggcatgcgcaatccagaccctggacggacttttcaggaataaggacgcccagattccgctctccgccctagcgccaggcgggaggactggctcggtgcaggatccctccgcggggagtcacgtgccccgcccccttgggggcgtcgaaac

SEQ ID NO: 7063 - DNA, 277 bp, Homo sapiens
  source 1..277: mol_type = other DNA
gcctataataacaacgctaattataatgaacaataaatgataatttatgggttatactcctgaatttttttaaattatggaaaaattccaagacacttttttctcttggactgtaaaattttaaagcaaatacccaaacttgtagcatttattgaatattttagtaaacgccccgacaatgttataataatttggtgggttattgcaaaaagccccgcagggcaggtaactctgcacacccaggcatgcgcaatccagaccctggacggacttttca

SEQ ID NO: 7064 - DNA, 426 bp, Homo sapiens
  source 1..426: mol_type = other DNA
tgatttcttagcagatcagtgggtctggtttgaactttttttttaatcaaagagcttctagaaaatgggataagcaaacctaacttcacatatgtttatgtcagactgtaatatggggtgacttgcacacgacagccagagagattctcttcctcaaggctgttgtctccctcccttcatgcagacccttctaagaattccatgatggtcagattatataagtaatcatatatttcagatagcataggatctgtatataaagagacattcatttgctgtgcaaatatttacctactaaagacagtgctttggagtatagtccatgtttgcaagaaatattttattatagtgctctgaaacaaatttataaagtttgcaagagaagttttaaaaaagcaagctcagcaatatttgggggcttttaaa

SEQ ID NO: 7065 - DNA, 392 bp, Homo sapiens
  source 1..392: mol_type = other DNA
tgcactccagcttggtgggggccaactgaccccagctgtggactgaccagcacctaactcaaattgaattagttcttgaacactcatatataaaagtttacaaagatagatttaagttcttcgatttttttgcataagtcacaaattgttatagaatctttgaagtaactgcttaggtgttaacaagacaaggcaatacattagaaatcttattttttcatgtagatgagtactatgtataaatatgaataaagcatctgggaaatgcctttgatccagttcatctgcctgtgggcagcttcattgaagcaagttaattttgcaggcttgccattctaattgagtcactaattcatgtatgcatatattcatttattcagcaaacatttact

SEQ ID NO: 7066 - DNA, 315 bp, Homo sapiens
  source 1..315: mol_type = other DNA
ctgtttaaaagaaacacagcctgaggcgaaatctttaaaaagttacctaggtgtatcagatttgttttagataaaccacaccattttaaaactagaaatgttttataaatgtcaagtattattattcaattgatcctaatggtaagtctactcgcttgccagcagggtaaatgtagagattaatttaagattttaaagctaaggttgatcttgcgctgcagaaagtttgacaattagcaaaaaaagtttgtcagtgagttggacatttttaaaataagtactctcacagcctgttaaaatttttttaattcttcc

SEQ ID NO: 7067 - DNA, 493 bp, Homo sapiens
  source 1..493: mol_type = other DNA
aactcaaattgaattagttcttgaacactcatatataaaagtttacaaagatagatttaagttcttcgatttttttgcataagtcacaaattgttatagaatctttgaagtaactgcttaggtgttaacaagacaaggcaatacattagaaatcttattttttcatgtagatgagtactatgtataaatatgaataaagcatctgggaaatgcctttgatccagttcatctgcctgtgggcagcttcattgaagcaagttaattttgcaggcttgccattctaattgagtcactaattcatgtatgcatatattcatttattcagcaaacatttactttgagtacactaaaaaccatttaattgtacaatttaaattggtagattgtatgctatgtaaattatatctcaaaactgtttaaaagaaacacagcctgaggcgaaatctttaaaaagttacctaggtgtatcagatttgttttagataaaccacac

SEQ ID NO: 7068 - DNA, 315 bp, Homo sapiens
  source 1..315: mol_type = other DNA
tgacagggacctgccagtttcaagttattccagttattcggaaaagtgaattgttccaagtggcgtcagtgcacgttagaacgtgggcccgcgattgagggacccgagacgttactgttcccttataaaacgattaaacgtggaccagctatttttattcggtcctataaaaatagcatctgggggcgcagctggacccacagctcccagactttgctctcaaagatcttcccgggctgctggtaaaagccaggatgccacggtcccccggacgcacttagttcagcaggaacactggaatttcgccaaagctcc

SEQ ID NO: 7069 - DNA, 266 bp, Homo sapiens
  source 1..266: mol_type = other DNA
gcatctgggggcgcagctggacccacagctcccagactttgctctcaaagatcttcccgggctgctggtaaaagccaggatgccacggtcccccggacgcacttagttcagcaggaacactggaatttcgccaaagctccgagtctctgggtccatccctgcagacctcctccggggtgttcagcgcggaggtgggtgttggtgtgcagcaagccgcgtccccgcagccctcctcacccaggcgaggggcggggacgagaaagtag

SEQ ID NO: 7070 - DNA, 347 bp, Homo sapiens
  source 1..347: mol_type = other DNA
acactggaatttcgccaaagctccgagtctctgggtccatccctgcagacctcctccggggtgttcagcgcggaggtgggtgttggtgtgcagcaagccgcgtccccgcagccctcctcacccaggcgaggggcggggacgagaaagtagaacagtctgcttcagggagcgcagcctgaggcggtgtggtgcggtgcggctgcagggcgggcgagtccccggagctgccctcagcgctgcacagtttccagcgagcggaccccggcagatgaggtctgccgagccgggtggggtctttcggggctcccggcgacccgcggtgccgacgcaacgccgtttaaaaagct

SEQ ID NO: 7071 - DNA, 285 bp, Homo sapiens
  source 1..285: mol_type = other DNA
ataaccgataaaagaggtaaggtattcaagcacttcaatgcctaacacgtttagtagaggaattactgaaatagttgggttccaaattgtgaagtcaatttcctcatctataaaatggggataatagtatctacctcatagagttgtgagccattttaatggcaaaaaaataaatccgcgcatattctttatagggacagtctaatctccgaatcagagcccggcggcagcagggcgcggcttccctttcccggggcctggggccgcaatcaggtggggtgcggt

SEQ ID NO: 7072 - DNA, 420 bp, Homo sapiens
  source 1..420: mol_type = other DNA
aagctggaatctactttaaacgcttctcttcaaatagcaagaaagaacaaggattttaagttcaaagtttttgtctaagcacattttctaatgtttctacccgttatctcattaaaaagaataaagaaatagggggaaccacattcatctactttcatagaaggtgcatactggagtcctgcagatacaatttatttgatctatattttaaaaattagggaaatgccacattagaaaacagttccaggtttttggttctcttaagaaactggaacctctgggcacagtgtgtggctgcagtcgggagactccatgaaattgatacaacagggctttttttcttttagccaagagtgatgaatggtctgcaaagtggtatgagatgtttaaagtactcctaagtaatttataaactgcaaa

SEQ ID NO: 7073 - DNA, 602 bp, Homo sapiens
  source 1..602: mol_type = other DNA
ttcttttagccaagagtgatgaatggtctgcaaagtggtatgagatgtttaaagtactcctaagtaatttataaactgcaaaaagtccagttactggaatccactccttccgtcctgctcccacctcctacgctcagggtgggcgagcggaaggacggaccccggtgcgtgaccagcgcgggagccagtcccgggccacctccctgcttgaagtcgggcctggccagtaccctcccggcgcaaccccggacccgggagtgacaagagccggaaccgtcacttccggcggcgcgggcagcgcgcctgcgcgggtcgcccggcctcagtgagcggttggcagcagcgccccccccccccccccgccaacggccacgagtggcgggcggcgcgggttcggccggggcggcggcggcgcgacgggctgcggtcctgcgggtttgtggcctgagacgtctagcccactccctggaggggccggccgcccagccccggctcgcgctccaggcgcttagtgaggcggcgggacgcccggggcactggcggaggcggcggcgtcgcccctggattcggacccgccccctcgcgcccccgccctccccacc

SEQ ID NO: 7074 - DNA, 648 bp, Homo sapiens
  source 1..648: mol_type = other DNA
ctaataatgctattgttggaaaggtgatattaggcttctaggaaaaggtagtaaatgtgttttggtagctttcttctaaacatccttaaattgtgctaaaaatggttttaattgaatctaattgttgataattttgaaaccagttctgataagcatatttattaataaattatagtaatttagagtatagctattttgtattgatgtttggactactgatttctcaaatcattatggtaagatcaatactttaaaaaagtgacacaaaaaaggcataacatttattaatttgattttctcgttgtagtagcagcaacagatgcttcaacaacaatttttaatgcattgtaacttaaataatttctagagatttctctgagtatacattatggaattcacagtatgaatcatattattcagaatttagtaattcaaaatcaagtaagttaattgacatgtattttatcaaagccagtcatatattctcaagcagctttaaattgcatatggcacatagtaacgtacttctcttatgtcattatataagggaaatgatgtcttacctattttcattcagcacatatctattgagtaaaaaaatgaaacccaaagggagagtatattttcttcagagaataatttgacctt

SEQ ID NO: 7075 - DNA, 398 bp, Homo sapiens
  source 1..398: mol_type = other DNA
aagcaatccgcctgcctcggttgtgataagtgaggacaagatatttttcttgcccttacattataagtaaacacttgcattaccacaggattttttaatatgttctatattattcagttaagtagatattctcatttagtttaattctactgtgatcagagaacatagttccacgtgcatcaggctaagagctgcactaagtgtgtgtaaaacggtaattacctcgaacttgatttttcaaaatgcagcaactattacttctaataaaaaaatccacttgtattcgcctgtaggcgtgagagacgcccgggagcccgggccgccgccagcgcacgctcgagcacacccgggcgcgccccagcaccctgcccctcccagctagggctgaggggcggggc

SEQ ID NO: 7076 - DNA, 378 bp, Homo sapiens
  source 1..378: mol_type = other DNA
atcaatagacaagaatgatattcattacaaatatatctgacaaaggacttatacccagaatatatttttgataaaactcaaaaattaatgtgaatggctaataagcatataaagtgctcaactttactcactctgaaaaagtggcagtatttataaaagttgaacatcattatattcaatgacccaataattctaatcctagataaatatgcatttgttccaactaaagacaagtctgtataaaaaaaattgtgacatatacacaaaaataatgcatgcactatgattccatttatataaatttgtgaaaatttattcagatgtacccaaatcaaaaaataattgcaatggatcgcgttatttaaaacaaaggcgacc

SEQ ID NO: 7077 - DNA, 546 bp, Homo sapiens
  source 1..546: mol_type = other DNA
aaatattttgaggtacaactttccactcttccttggcttggctttttttaaagaaaaaaaaaaaaaaaactaagcaggtttctttaggagtgaggaggccgtcacctcccatggaatcctgggggctgttttagcacagctgctaaaataggccaggcctgcaacaagtgtgcgtgtggctcggaggcttcagctggggccccgccctcgtccccagacgcagcccagacccggcccgagcgggctcctgccctcggcgtggcttctctccagccgggagtcccagggccagctagcctcctcccctaaaggggacggcctgtcagcgcagtgtccagcgaggagaagagtctccactgtcgccgcgtcccagggaccccttgtcccgaagcgcacggcagcgggggggacttcagccctccaggcggggtgggttccaggtccgggtccgaggcgggcgctggaggctcggccccaggccggagaggaactcctttcgcgagctgtcaagagttccggcggcagctgcggcggtggcggagactc

SEQ ID NO: 7078 - DNA, 569 bp, Homo sapiens
  source 1..569: mol_type = other DNA
aataataggcactcaatgaatctttgttaaagtaactaatttttatcttcaaagagctgacatatctggttgtatatcaaatataataaatgaaaagttaaatacatagagatgtatatgtaagtactacataaagcattgattttgttaaaaatgaaaaggtatttaggttctaaaatttgtgcacaaacttgagtgcttgcacaagttttgcaaaggagacctagcttgcccaaagcttggagcgtgggctgaaatattttgaggtacaactttccactcttccttggcttggctttttttaaagaaaaaaaaaaaaaaaactaagcaggtttctttaggagtgaggaggccgtcacctcccatggaatcctgggggctgttttagcacagctgctaaaataggccaggcctgcaacaagtgtgcgtgtggctcggaggcttcagctggggccccgccctcgtccccagacgcagcccagacccggcccgagcgggctcctgccctcggcgtggcttctctccagccgggagtcccagggccagctagcctcctcccctaaagggga

SEQ ID NO: 7079 - DNA, 495 bp, Homo sapiens
  source 1..495: mol_type = other DNA
cttcagccagactgtcagcttcatgaaagccaaataataggcactcaatgaatctttgttaaagtaactaatttttatcttcaaagagctgacatatctggttgtatatcaaatataataaatgaaaagttaaatacatagagatgtatatgtaagtactacataaagcattgattttgttaaaaatgaaaaggtatttaggttctaaaatttgtgcacaaacttgagtgcttgcacaagttttgcaaaggagacctagcttgcccaaagcttggagcgtgggctgaaatattttgaggtacaactttccactcttccttggcttggctttttttaaagaaaaaaaaaaaaaaaactaagcaggtttctttaggagtgaggaggccgtcacctcccatggaatcctgggggctgttttagcacagctgctaaaataggccaggcctgcaacaagtgtgcgtgtggctcggaggcttcagctggggccccgccctc

SEQ ID NO: 7080 - DNA, 472 bp, Homo sapiens
  source 1..472: mol_type = other DNA
atgtctatggacctttgcagtaactccaaatgtttcactgagtctgtcatcacaatattttaaatttctacaggccattccaatacttcagccagactgtcagcttcatgaaagccaaataataggcactcaatgaatctttgttaaagtaactaatttttatcttcaaagagctgacatatctggttgtatatcaaatataataaatgaaaagttaaatacatagagatgtatatgtaagtactacataaagcattgattttgttaaaaatgaaaaggtatttaggttctaaaatttgtgcacaaacttgagtgcttgcacaagttttgcaaaggagacctagcttgcccaaagcttggagcgtgggctgaaatattttgaggtacaactttccactcttccttggcttggctttttttaaagaaaaaaaaaaaaaaaactaagcaggtttctttaggagtgaggaggccg

SEQ ID NO: 7081 - DNA, 204 bp, Homo sapiens
  source 1..204: mol_type = other DNA
attatattaaaattccagcagtggggtcttcaattttgtaatatttgatatttctgccccatgagtgggtagcagaaattcctgaatgagaactgctgtggttatgatgtcaccaggacttcactttattctaggtctgaaaccagacttcacaggctagactaaggcctgttagcagcaacattgttcatcaaacattcatgt

SEQ ID NO: 7082 - DNA, 234 bp, Homo sapiens
  source 1..234: mol_type = other DNA
tgggattcctgatgccagggtggaaggaagccatcccgcccggccgcgcttggggattggcagccaatgaatgattggcagcgggcatctctgtcagagctttggccagatgtgccactgggtgacatgccagatctttctagcaggcatctccctgcccgcatccagattcaggaaagggaaatagttttcaaaatggaaggaaggggaaaaactacacttcccatcctcccc

SEQ ID NO: 7083 - DNA, 324 bp, Homo sapiens
  source 1..324: mol_type = other DNA
ctagcaggcatctccctgcccgcatccagattcaggaaagggaaatagttttcaaaatggaaggaaggggaaaaactacacttcccatcctcccccgcccagctctccatccccggagggagaatggctggagggggaggatcccctcctaaacctgcgggtaccgggctgccctgtaatcggcgggacttgagaacggcaggcctccgctcctcctcccacgcagtacttggggcgactgggcgccactcccacgccagagccctgccccgcgcccgcctggggccgagcagcctggccgcccgctgccgaggctccagactt

SEQ ID NO: 7084 - DNA, 361 bp, Homo sapiens
  source 1..361: mol_type = other DNA
cgagacggcctcggcaactccatcccctcctccaccacccgctggatgtgaaaagcgcccacgtacccgtgtcctgggactaggaggtacctgtccggtggctccagggctagagaatccctggattcacggaacgcggactccggggaaatacgcacggggtccgcacgcgctgggtgtcctgcctagtgaaacggggaaaggcccttcccagagggcccgagctttaggaggaggcgggccgggacgctctctgagaggcgttgccacccggggtaggcgctcaggatctgcggggcgcgggcagctgcgaggcaggcggcgccggagggagcgcctggcatgtgcagcaaacaaaaag

SEQ ID NO: 7085 - DNA, 484 bp, Homo sapiens
  source 1..484: mol_type = other DNA
tttcccagataaataacagtctggggacgttgcccgtacagggaaattctctgttctcaaggaaattttcccttctcacgtcattaatcattcactgaggtcggtccctcagtgcaggtctgggtaagctaaagcgagcagttagctaacccttcctgccacggggatcctggagccgctgcccccggtcggagcgcgggggtgcgtgtgccctcactctcacgatcagggtggcgttttaaacgctgaataaacccattccttagctctttaataaaggcttcccaagttgggctgcgaatccctgtttggttttccaacgccgaaagacgtagaagcagtgtctcctggtgggacgcatttctccaagggctccctggaaatcgtgtccagaggtgggagaggacatggccgcgcgacgcgagagctgggatgcgtggccctggtatgggcgcacccagcgtccggggcgcaggttctctca

SEQ ID NO: 7086 - DNA, 431 bp, Homo sapiens
  source 1..431: mol_type = other DNA
ggtaagctaaagcgagcagttagctaacccttcctgccacggggatcctggagccgctgcccccggtcggagcgcgggggtgcgtgtgccctcactctcacgatcagggtggcgttttaaacgctgaataaacccattccttagctctttaataaaggcttcccaagttgggctgcgaatccctgtttggttttccaacgccgaaagacgtagaagcagtgtctcctggtgggacgcatttctccaagggctccctggaaatcgtgtccagaggtgggagaggacatggccgcgcgacgcgagagctgggatgcgtggccctggtatgggcgcacccagcgtccggggcgcaggttctctcacgcccccgggaccgcgaggctccctccccgcaccggccagtgagtacacaaagccgcgggtgaggggac

SEQ ID NO: 7087 - DNA, 690 bp, Homo sapiens
  source 1..690: mol_type = other DNA
acatcctaatttttaagatgaactttttaaattaggaaagctaactgaaatgaagtatcttaccagatgttttcattaaaattttgttagcaaatctgtgaaaatcttcaagatgaattaaggcttagcattgtattatatgctaattcccaaggatggtttgtaaaatattaaaatccaaagattggttctgaacatattgttggattactttaaattcatattttaaaaacacaatactgttctgaagaaaacaaaaaatctttagtgaaagactttatttaataagatttcacagatattttattctttaaaaaggagcttcaacacagcaaaatttttcactgtgctaaaatagtaaaataagtgcaagaacttggtgccaaaaaaggtctgcaaagacatttttttgactgagtttctatttcataaattgcttcttgtacacaaacattagcaataatttacctttgttataactttaaaaataatttaacaaaatcattattttattattgtcgttgtcacaacaccatttgatatacttgtttttgagacagtctttttgcaaaatgtctctgcataacattgttttagaatgcaattgggagctaattcctaatattttgtctaagtatacagttcactgaagcctgcaaaccgccggggggtgggattaggtggagcctc

SEQ ID NO: 7088 - DNA, 214 bp, Homo sapiens
  source 1..214: mol_type = other DNA
aaggctggtctcgaactcctgacttcgtgatcccgctttgccaggctgcatctccattgtacagtttctcacctcgagagaagatctgcaggtgcaggggcccgcaaaagaggaagttgcttctatcccagcctggtgcaagctaagagggtcagctagagagcgaaagaactaagtctctctctctcatacacacacacacacgcacacacgc

SEQ ID NO: 7089 - DNA, 251 bp, Homo sapiens
  source 1..251: mol_type = other DNA
tttctcacctcgagagaagatctgcaggtgcaggggcccgcaaaagaggaagttgcttctatcccagcctggtgcaagctaagagggtcagctagagagcgaaagaactaagtctctctctctcatacacacacacacacgcacacacgcgcgcgcgcgcgcgcacacacacacacacgtgcgccgcagctgctcctcgagcgccctccggaccgctgcgcacagccccggctccgacctggcgcctggag

SEQ ID NO: 7090 - DNA, 217 bp, Homo sapiens
  source 1..217: mol_type = other DNA
aggccgagccgctgggacccgggcagggccaggcttggctcagacactgagtcgccagagctcagttgagtcgcctcgggtcaccttgccatcggcgcagttcaggcaaaaatggtgtatatagatgaatatgcacacaaatttgtgtatgtgtttgggccgaacgcgtctccaaggagtccttcgtcagcaccatgtgacgacggtcaggaactgc

SEQ ID NO: 7091 - DNA, 573 bp, Homo sapiens
  source 1..573: mol_type = other DNA
taattataacagtataggacaggtatgaatagtgttgttttatatatgagaaatcacttactcaaggaaatacagttggtaagatccttttatgtgtacaaagtgaagtacggaggtttttaccttttttctgaaatagttatcaaatatcccgtggttaccatgacaacacattcacggaacaggttcctctccgtgcaacttctagactatgtaagtttcacaatggcgttttgcacagtgcttagcaccaggatctatgtgttatttgcacagtaacctttagctcacaattatgttaataaatactgtgtaatatttacagatagtatcccggggcaggtgctgaccaacgctgttaaacaccgctgcgctgggctccgcgggcctctgccgcgtgggagggcacccaggctgacgcgctgcgggagtctggggcccactgggacttgcctgccgggccgggtggcggcggcgtgggcggtgagctgcgcggtgattggcccgcgcctgccggggcggggcggggctggcagcgggaggcaggcgcctgagccaaggggggcgtgcgcg

SEQ ID NO: 7092 - DNA, 560 bp, Homo sapiens
  source 1..560: mol_type = other DNA
tgactcacgacatttatatattctatgtacaaaggctaaagaacattaaccttgatttaacacactttccaattattagtaacgtaaaggaatcacggtacgttttaggatcttaaacaacaaaagcaaagcaaaaacaatgttttccttaagatatgcaagttacctgcttcttgtcacccggtcccgggcggcgacggcagggagagtagctgcggcaatcagtgcgcgcgcggtccgctgcggcgcctggcgctccgcgggcgtccgggtggacagcgccaggggcacagggctgacatctcaggcttaagccgccgcagggtgtgagcctcccctcccccacccgaacgccgcagctgcacggggcacgacagccttcgcagaggtgcagccacaccccggcctaacgctgctgctcccgccgctactggagtggtggggaggggtgagtggatcggggcggaggcagggggcccctctagccgctactcggttccttttaaaggcccccaaggctgtggggggacgcgcgaagggcgcgctctcgcgtcacgtga

SEQ ID NO: 7093 - DNA, 657 bp, Homo sapiens
  source 1..657: mol_type = other DNA
gcgcgcccggcccggggcacgtgcagaaaggagccccgcgagtggcgcgccggggaccgcccctcctcccggcgtcagcccgccagaggccgcgcggggcccgggcttcggccgatcagcccgggaggccccgccgcgcccccttggcccgcgcgcccgtggtcacagtggaagaggcgcccgcgctgcgctgcccggaggagccgtcgcgcgcccgcttcctgctcgaggacaaaacacgcgtgcgcgcggcgggcgagcgcgctcgccgcctcagtcgccagcgccgggcgcagtccgcctttttccggagcagactggccgcggtgctagtcggtagcagcggccgccgcagcggctccgcactggcgaacaaaggctcccaaggcaagagggactgtggccctgcgtcggctctgctcgggactgctgaccctcacgcgtggcctctctccttgccgggagggccgcgatggaggtcccgcccaggcttctcccgcagcctctcccattggcggccgcggccgccgcggcagctagccccgctcctcccttcgctcgctcccagctccgcccggcagggggcgcgccgggcccagcgccacgtcaccgcccagcagccctcccgattggcgggcggggcggctataaagggag

SEQ ID NO: 7094 - DNA, 453 bp, Homo sapiens
  source 1..453: mol_type = other DNA
cttcagtctttccattttgagatcggaagctttaaggagcgctcacctgcggaagcgaccgggtgcacacctgccgggtggcgaggcccgcaccgtcacaccccgcctctggatccaaccaagcgcaagggcggggggaaaagcatccccgcttagaaaaaataataactgtttttaaggaaaaatcgggcacggtgacggggaccgctgttggggagggcggagggcggcgccggctgcggctgcggcccccggtaccgtcttgggcttccggcggccccgcgcgatctcggagccagcgaccaagtgcagcccgccgcgcgtggggagaggacactcaggagccctgaactcgtgagcaggacggggcaggagccccccttgcggcggggcggggagggtgaaggcgccagcgccgattggccgccgtcaggccaacgcgggagcagggtg

SEQ ID NO: 7095 - DNA, 379 bp, Homo sapiens
  source 1..379: mol_type = other DNA
cattgcggcactgcactccagcctgcccaggctcatgatgagcctaagataaaaatggcattgatccatgctgctgctcactgacatggtgccatggggtcccatctctgtgtttgttcaataggatggaaaaaaaaaaaccatgctttgtgcagcggaggatccaagattctgtccttggaagcggctcgcccgcccacacccggctcctgccccgggtgactattaggggccccgggggggtggcagaagcccgagacccaggggatcaactctccccgaaggcctagcagcggggaccccagaataagtcgggggcgggccccggcgcggcaggagggggccgggcgggcgggtgagcagatcccaccccttcctg

SEQ ID NO: 7096 - DNA, 585 bp, Homo sapiens
  source 1..585: mol_type = other DNA
aagcctgggcgggacctccatcgcggccctcccggcaaggagagaggccacgcgtgagggtcagcagtcccgagcagagccgacgcagggccacagtccctcttgccttgggagcctttgttcgccagtgcggagccgctgcggcggccgctgctaccgactagcaccgcggccagtctgctccggaaaaaggcggactgcgcccggcgctggcgactgaggcggcgagcgcgctcgcccgccgcgcgcacgcgtgttttgtcctcgagcaggaagcgggcgcgcgacggctcctccgggcagcgcagcgcgggcgcctcttccactgtgaccacgggcgcgcgggccaagggggcgcggcggggcctcccgggctgatcggccgaagcccgggccccgcgcggcctctggcgggctgacgccgggaggaggggcggtccccggcgcgccactcgcggggctcctttctgcacgtgccccgggcctgtctgcggagggcgcgctctcgcgcaccctgctcccgcgttggcctgacggcggccaatcggcgctggcgccttcaccctccccgccccgccgcaaggg

SEQ ID NO: 7097 - DNA, 230 bp, Homo sapiens
  source 1..230: mol_type = other DNA
ttttgagaccagcctggccaaatcccagctactcaggaggctgaggcgagagaatcgcttgtgagccgacattgcggcactgcactccagcctgagcccaggctcatgatgagcctaagataaaaatggcattgatccatgctgctgctcactgacatggtgccatggggtcccatctctgtgtttgttcaataggatggaaaaaaaaaaaccatgctttgtgcagcgga

SEQ ID NO: 7098 - DNA, 416 bp, Homo sapiens
  source 1..416: mol_type = other DNA
ggagagctcttcacaaatctttcacaggttaattttccttggaacaccaactgagcacttactgtgtgcctgggtaatccacagctagggtcgcgactccaagcaagtatttaaaattctccaacccaggtggcctgaggcttgagaagaaataaaaggcttctcaataccataaaaggcattttgggggtctgtgagccgccctgcaggctccctgccccgggagccaccttccacccgcccccgggcggaggcggccaactcccgcccagcgggctccccagttcggccccgaaaagccgaaaggggggcgcctttgtctataagcgccgcacgggcgctcctgattggctgtataagcagggctgctccttcggagcgctccctccagcgtcgcggccgcgcgcccctcccgc

SEQ ID NO: 7099 - DNA, 491 bp, Homo sapiens
  source 1..491: mol_type = other DNA
ttagaattgcccctactgtcactacctggagttgagcagaattctgctcacctaaatatacagttacattgcattttaatgcttttaggatgcaagaagcagtttttagcacaattaatttatttttgcagttttaaattgacttgaactacaaaaacaccaaccaaggttttgacaatggtttaaatctgattttctttttccttttttagcattgcagaaattgaagagaaacaaaagatccctttatggcatttatacttataatcctggtgacatttcataaatatttttaaaggctgttagcatcttttgccattcattgcaattattactctgtctgatctttaatcattcaaaatgtgctgctcagaaaatgtggtattatgaggaagatagaatatgcaaaatgcaatgtttcttatgcaataaagtttttttttaaataaacatagaattccatttcagagattgtaattccatctggtgaa

SEQ ID NO: 7100 - DNA, 394 bp, Homo sapiens
  source 1..394: mol_type = other DNA
cttatgaagctgcaagcttcagatggaatgttagctggcaggatccttctgaatccaattcctccctaaactaaaagtacacttaggcaacgcatctaattagatttgagggtctcaataccatgggatagtaacaagtatgaaacggtactaattggaattaatataacaccaattttaagaactcagtcacagcagtgtcgccaggggctgccgacgcctcacaggactagtgctacgtggcgtgccgcccctcagaaaagggtttctacgatcgccggggcgcgatgaccgcacggagccgtaccccgcctcccaggctaccgccggtcccggaagtgccgtggcgggctggcagggcgtggctgcggctgcggctgccacgttggaacgg

SEQ ID NO: 7101 - DNA, 317 bp, Homo sapiens
  source 1..317: mol_type = other DNA
aagaagcaatcttgttagtatttggaattatttttgtgtgctatacaaagaaacggaaaagttgcaaacccttctctgttttctgtatgctaaggatctccttctcagagacaaaaacccttccttctctttcctcaaacataagagcttataactaagacattgttctaagctctatttcattgtggcaaagtgtttcagaaaagggttccttgaattaaaagttatccttccgcctccaacgcggagggaggagcggtcaggctcaggcccttgctacggcaccggcgcagggccttcggagaggaagtgtcgcg

SEQ ID NO: 7102 - DNA, 583 bp, Homo sapiens
  source 1..583: mol_type = other DNA
ttcaactgactgatgacaagagctggtaactcttacctacctagtaggtagctctaggacttgctgtttatttttactgtacagaacaaatatatcagcagcagatggtttttttttaatttgatgacttagatcctaaaaaaacatttggcaaataattttagctaagagttatattttcaatattttagaaatcgatcattcatgaatgtttctacaattagttcaatcatttcaaatctagttgcgctttgacgtcttaaaccgaaattaagttggagaggaagatagctcagaactttatttttttaaattagatattttgaccacaaagttggtgaatgacattaaaggtctttcacagtgtttttagttagccacagtgaattttggtaccccgcaggtggcgcgacttcctttggcgtccctgcgggggcccgtgctccgcccgggggtgaaaggtctcggcgtagcccgtgtgcacttgcacggggcgggaggcttccccggatatgtgggtgtgcgcctcccgggtggggcgggcgtggtggtggcggcggcggcggcggcccgggctccggct

SEQ ID NO: 7103 - DNA, 442 bp, Homo sapiens
  source 1..442: mol_type = other DNA
ttgttatttttatttgctggataggaaaataaacgttattaaataccagtactgcttgtgataataatctctcagaataattttttcactccgtatttggatatcaaataaaaggtgattaaatacaaataattttgactgtgttagtcttagctgcgtgttgcaagaaatgcaaaacgtctttcaaaataagtttaactctcaatgaatctccctgtggctttttagcgacactgcaaaactagtgcctaaaaacacagtgacttggcattggatatcctggaagtcctctcccaaccgcagcgcgatgcgggtcctccccccatcagcttcagtccgatggaacattccgtgcgatcgctttgaccgggcgccactcggcgtcacgtggaactggagcgccctggcggagcccggcggaatgacgccggccgtggggcgg

SEQ ID NO: 7104 - DNA, 371 bp, Homo sapiens
  source 1..371: mol_type = other DNA
tttattaatatttgcttgtatttgcagaaattctataagaatacatgagtattgaatgttatacaaacataatcttccattgaaagggaggatgttattattattattattattttttgagcgagcctcccgagttgctgggactacaggggtgcaccacgctttgtactggacaaactggaatgtctgaccaaccattaatttctaaaaagtatcttctgtggtgaatcggaaacaaaactcattcttttggagttacaccagagactcactactggagtggcaggcctcagacctgaggagtggagctccgcatcactcaaccctgggggcggagctagcccaggctcccaacacagacgctactctgt

SEQ ID NO: 7105 - DNA, 414 bp, Homo sapiens
  source 1..414: mol_type = other DNA
aaatgtgggaagcccccacctgtggagcaccatctggagcctgcatcacgcatggcctcagccagcccggaagcggagagcgttaccaggtcccagacaaaatcccctgccttttggggatttgttacttttcccaaagccaacaaggtccttacctcttacactgtgataaaaactttttacaatttaccggtgagcctgggcgcccggagcgacagagcggcgggtgcccgggaggaagcggcgccagccctgcccagctttgcggctcctggcgcctgccgctggggctgggctccgagaccgcgcgcccgctgcccggttcacgccgagtccccagcggcgcgccgccccggcgaatggtcccccgagggcagccatccgcagacggggctgctcttaagaatttaccgg

SEQ ID NO: 7106 - DNA, 536 bp, Homo sapiens
  source 1..536: mol_type = other DNA
aaactgaactttgaaatggaccagttttccaaaaaacaggagatcctataaggaaagtaactttgaaacaaccaatctatctttttttctacactcattctattttatagaatgatgtgttgcttgattctagaattgcaaataaaaggcaattacatcttctaaactaaatttgttgtaattttgtcttttgatagtttaaactatgggatcagaaattcaaagactatgaataaaaatttcaaaagctgagctgacatgagctaaaatcctaggtaagaatctgagcttgtttcctcacctctaaaattgaaaaaataaggcctaactatcaaagtcattaacaagtcattgataatgcttggcctagtatctgtaagttgataccattaaaggatgcttgagatgccaactactatataatctgaaacaataatgatcttttttttccccacaaagataacaaaaaactcaaactatataatgaattaaatcctttccccacaccttatttggcaagagatatattcattctc

SEQ ID NO: 7107 - DNA, 401 bp, Homo sapiens
  source 1..401: mol_type = other DNA
ctttagcccagctgttcaattagccagccacggtggctcgtgtctgtagccatgatccctccactggtctccagcctggatgacagagcaagactctgctgaccagacttttcagcttcaggttcttagcattgtctgggctgtcaaatttaaaattttcacttgtgtaatgaacatcccttaaccctgaatgcgattttaatttacagtctttcctggtacaactgttccatatgaataaacactatccttttcattttatggagaaagcttaatggttaaattatagggggccattgttttgaactaagttcctgcactaggtccgttgtatctgacattcgccatttcaaaatgcaatcgtcatgacaattaagtttcctgttaacctaatgttaacc

SEQ ID NO: 7108 - DNA, 229 bp, Homo sapiens
  source 1..229: mol_type = other DNA
gttactgtctcagagcatacagtaggcactaagcgtgcgatgcttgctatgattatacatcagtgtaagcatcaaaggtcctgagaatattgtcttaatgagaagttcaatcagattttgcaggaagcctggtccgggatgcccagcgctgctccccgggcgctcctccccgggcgctcctccccaggcctcccgggcgcttggatcccggcccgcaccctagtgggtg

SEQ ID NO: 7109 - DNA, 314 bp, Homo sapiens
  source 1..314: mol_type = other DNA
tattaaagaaaggttttgtattatattcagaatggttaaaaacttttatatttagggggaaaagaacatattttcccgcccatacctgtggttagagaaaattcttaatgcaaattcttatgataaaattgcaaaaattatgcaattttgttctgtttggtatccagagatcttaggaaagtctctgctttacttcctcatacgtttaaatactttaaaggagtggattagacggacgactctaaccattaggactaaggttaatggatgtgtaaggctgacagcagccgttaccaccgaaaggcaggtcacgt

SEQ ID NO: 7110 - DNA, 363 bp, Homo sapiens
  source 1..363: mol_type = other DNA
tctagataatataactagcttaacataacgggtcttcaataaacagcagattttatttgtacacttaactggtttacatttcatatttatatagaaatgtaaataacaaggcaatcaatacctcctaagtgccgatctttgcatctgggaaggatgccaaaagtttgcagtttctctgtcagtgggcatgtgacgtaggaggtccaccacctcccggcagtacgcccgcatctccgggcacgagctcggccgcggtgggagcgccacccaagcttggacggtcccgccggcggatgcgggatggaagggagagtgggacgccggagcccgcttctacatccacctacgtgacctgcctttcgg

SEQ ID NO: 7111 - DNA, 585 bp, Homo sapiens
  source 1..585: mol_type = other DNA
taaaaaataaaataaattcgtatcccttttccttctgtcactccagtgaaccttcagagggcagagctttcccttaatgaaggcaagaaacttaattctagggaataaatatataatcattaattatatacatatgtattgtgtgttacgcaactaattcagtagtctgctattatgcttactttcagtcatttaagaaacatacctttacgtgtgtgtgtgtgtgtgtaaaatacatttgccaagccctggtccaacattaaatgaaccagcttagaagaacattaaatatccatgtattgtttaaattaagacaatccccaaatggttattagtattctgtaagtttccactgtggcatcgtaatgttggccagccctctgcagggtaccgacatgcagcggccttccgggagaggccggcagcagaagcgaaggaggagccgagcgcgcggctggggacccgcccgcgcccgccctcagccccctcgccccgcccctctgcggagcgcgcagcagcccgtgcgccggcgcaggccccgcctcctcgctgggccccgcctcgctgccaccacagggtttgcct

SEQ ID NO: 7112 - DNA, 586 bp, Homo sapiens
  source 1..586: mol_type = other DNA
aaataaaaaataaaataaattcgtatcccttttccttctgttcactccagtgaaccttcagagggcagagctttcccttaatgaaggcaagaaacttaattctagggaataaatatataatcattaattatatacatatgtattgtgtgttacgcaactaattcagtagtctgctattatgcttactttcagtcatttaagaaacatacctttacgtgtgtgtgtgtgtgtgtaaaatacatttgccaagccctggtccaacattaaatgaaccagcttagaagaacattaaatatccatgtattgtttaaattaagacaatccccaaatggttattagtattctgtaagtttccactgtggcatcgtaatgttggccagccctctgcagggtaccgacatgcagcggccttccgggagaggccggcagcagaagcgaaggaggagccgagcgcgcggctggggacccgcccgcgcccgccctcagccccctcgccccgcccctctgcggagcgcgcagcagcccgtgcgccggcgcaggccccgcctcctcgctgggccccgcctcgctgccaccacagggtttg

SEQ ID NO: 7113 - DNA, 306 bp, Homo sapiens
  source 1..306: mol_type = other DNA
acctggcagtaagtacttaatgggcagggcagtttttttccagcttgaaacaacacctgaaaagtacctgtaagagattttggtcgaattcagcggcaatctggaaaatccctctggtctctaagagaacagcaatgtagtaaatgagacacctgtcagcttggtgaatgaaggcttgcgccggcctggcatttctgctacgcctaagcgcggattttctgtgccagggcttcctactctcgggcccacagcgccagaagcggcgtacacggctgcgtggtgcgctctagttcattctgcgggtga

SEQ ID NO: 7114 - DNA, 403 bp, Homo sapiens
  source 1..403: mol_type = other DNA
tgggcagggcagtttttttccagcttgaaacaacacctgaaaagtacctgtaagagattttggtcgaattcagcggcaatctggaaaatccctctggtctctaagagaacagcaatgtagtaaatgagacacctgtcagcttggtgaatgaaggcttgcgccggcctggcatttctgctacgcctaagcgcggattttctgtgccagggcttcctactctcgggcccacagcgccagaagcggcgtacacggctgcgtggtgcgctctagttcattctgcgggtgaagaaaatattgacatttttcagatgaaaactctcctcctgaaaggacaggaggctgcggcactcctgggctaagtactgccagggagctcccccgggcagcgcgcagaaatagggcg

SEQ ID NO: 7115 - DNA, 497 bp, Homo sapiens
  source 1..497: mol_type = other DNA
agattttggtcgaattcagcggcaatctggaaaatccctctggtctctaagagaacagcaatgtagtaaatgagacacctgtcagcttggtgaatgaaggcttgcgccggcctggcatttctgctacgcctaagcgcggattttctgtgccagggcttcctactctcgggcccacagcgccagaagcggcgtacacggctgcgtggtgcgctctagttcattctgcgggtgaagaaaatattgacatttttcagatgaaaactctcctcctgaaaggacaggaggctgcggcactcctgggctaagtactgccagggagctcccccgggcagcgcgcagaaatagggcgctgggcgcccgagcgcagccagcttccagcacagcccgcggcccggtgccagctccgccggcgaccggtgtgccaaagtgcggtgctcccgcagggaacctggctcggggagggcctccgtgagtcatctaggaaatcaggcaccggg

SEQ ID NO: 7116 - DNA, 539 bp, Homo sapiens
  source 1..539: mol_type = other DNA
ggcttgcgccggcctggcatttctgctacgcctaagcgcggattttctgtgccagggcttcctactctcgggcccacagcgccagaagcggcgtacacggctgcgtggtgcgctctagttcattctgcgggtgaagaaaatattgacatttttcagatgaaaactctcctcctgaaaggacaggaggctgcggcactcctgggctaagtactgccagggagctcccccgggcagcgcgcagaaatagggcgctgggcgcccgagcgcagccagcttccagcacagcccgcggcccggtgccagctccgccggcgaccggtgtgccaaagtgcggtgctcccgcagggaacctggctcggggagggcctccgtgagtcatctaggaaatcaggcaccgggcggggcgggttcctggctgcgctcgcgcgctctgcccgcgccgcggtgtgcctccggctccgaccactggctcgcgctacccaggtctccgcacgccgcggtggcttcagcccagacctgggcagccaaggatattgccg

SEQ ID NO: 7117 - DNA, 342 bp, Homo sapiens
  source 1..342: mol_type = other DNA
gagtgccccctccctttcgtcccccagctaaagaggggtagggagtgctgtcaggtcgccgggcccgttgtggactgacgagcggcgccgaaacccagccgttgccccgtgggccagagggcactgggagccgcggggatccgtggcactgccctttctggcgcagcagcccggggcagcgtgggcggaggaagcccgcacagaggctagatctcccgcgggctggatgcgctttctccccgggcacagtgagcgtcgaaagaggagcgccacgggctgcacaaggcgtcctttgaatgggcccgccgggacgcctgcttttctcggcgagctgccgcctcc

SEQ ID NO: 7118 - DNA, 443 bp, Homo sapiens
  source 1..443: mol_type = other DNA
catttgttagtaaattttcaacactttacttacttttaccgtgtcagtaaagaccttgaggaatttacatagttgatctattttgtcagtaatgaccgggtggtaacaggattaagactagaattaatgcagatcttgtgaaggtccaccaagagctggagggcaacggcgtcccatagcatctcacactgtgttgggatccggaatgccgcggggccaaccagtccgtcctgccagacccgacccgccgcgcgtgtcaagctgacaaggccggggctcctccagccgactagcccagcccgcgctggcaggcccccacctgccagcacgcagaggcgggggcggggtcgcgggccgggctcctgacgtcacctcacggggaggcggggctgtgggaaccgcagtgcagcgcagaggggcggggcctgcggcgcgagacctgg

SEQ ID NO: 7119 - DNA, 521 bp, Homo sapiens
  source 1..521: mol_type = other DNA
ttgtcagtaatgaccgggtggtaacaggattaagactagaattaatgcagatcttgtgaaggtccaccaagagctggagggcaacggcgtcccatagcatctcacactgtgttgggatccggaatgccgcggggccaaccagtccgtcctgccagacccgacccgccgcgcgtgtcaagctgacaaggccggggctcctccagccgactagcccagcccgcgctggcaggcccccacctgccagcacgcagaggcgggggcggggtcgcgggccgggctcctgacgtcacctcacggggaggcggggctgtgggaaccgcagtgcagcgcagaggggcggggcctgcggcgcgagacctggtgcgggaggcccgggcagggagaagtgtgcggggccgggacaagccggctccgagtccggctccggggggcggggcgggaggggcctgcgcggcggcgggagcccagagccgcgctaaagcgggtcaagcgtgggcctctgcgtggagacgcgcacctgg

SEQ ID NO: 7120 - DNA, 805 bp, Homo sapiens
  source 1..805: mol_type = other DNA
tttagtaaatttagtctaagaatatctcaagttcatggagaaaaggttgtttttaaaaacttcatttgacttcttaagcatatgatgacatgatttttacgtgattttacttatttttataagtagttgtttaattattatttgtgaattactgtaaatagaatacatttaatagtaaacaaacacctcattgttagaaatgttgagacatttttaactctcactagatttggacgtttaagtcatagtatacagaaattaagtaaacataatttaataggatttctacgtggtattcctttttacttgttagcagggttagcagaaatcatacaaaaatttaagactttcttttggtatgttcttatctttgaacaattgataatttttttcttagaaaaaactctgttgaattaagcttatgctcttaggatgctgttaccaggatactgagctgaaagttctgttttataatatacctcctttttattacgaaaacttactgcatagatttatgactagattttaggctttagactatttgaggaaaataatgttgcaaattttatgatttagaaaaacatcacccagaaatgaaagtctgtgtcaaatgtattagaaatacttgatgtgaagtttaaattacaaagtataaaaagtttttataatcagaaaaaaatacgtagcaaaataaaattgtattactaaatagagttttgggattttaaaatctaattcaattttctttcatttgaagaagtgatacttaaaatttcagtcttagaaacactaatctttttaatca

SEQ ID NO: 7121 - DNA, 558 bp, Homo sapiens
  source 1..558: mol_type = other DNA
aggtgatacaaattttttgaaacatttttttttttctttacaaaaattgttttttagcatacatatatttcagatgaatccattttaactcatggaaagaaactcagtagaaacctctttctagcagcttgagatagaatggttcaaagtattaacatactttactattgctcaaatatcataggaagagttctcaattctaatgcaatatatatttttaaacataaaaacataccaacctaattcctatacttaagagtctcatgataaagttttattttttttaaagtcggatttttttactagacttatgcactaatacaacatgtttttctataaattagcacatttttagttttgttctcaacctgctttaaaaagcccgaagaatagggttttgtttttcctttttaattgtttggtgttcaaactacatagtaaaccagttggcaaccattactgaacaaaaatagtttttcgtatgcatgagcaccatgcaacatatgtttctgtgaaaggaagacctgatattgcagatctcacaattaaatggccttt

SEQ ID NO: 7122 - DNA, 249 bp, Homo sapiens
  source 1..249: mol_type = other DNA
atcctgaaacttctgtagattgcagtgttaggaaaaacaagtttgtgattacagcgatgttatgaccactgactcagtcattggtctgtttaaacttgtgggcagttcttttatactctggctagagtaaaattaacgcacctcttgtcctttctcagctgagtcctttcagatgggagcatccagcggcgctgtctgcagacaggggcgaaggcaggagcggctgcaatttctgcggccggctcagta

SEQ ID NO: 7123 - DNA, 523 bp, Homo sapiens
  source 1..523: mol_type = other DNA
gcacttgctttgtgcaaaggtcttggatcactggcaatcaaaactagagttcctagaggcattcaatgaatgtctgttgaatgctttacttactatgggaaatggttgtatttataacccaaacttaaattaaaattttaactaagtgttagctaaaattttccagttaatttcattgttattgaattatttctttggatttatactttgaggctggatacatgtaaaaactattgataatttctttcttgcaaatttataaagatatgtttgaatcttagtttttaaaggataaagactaggttatatactcatagtgaattttaaatggggtaaagaatgtaaaacaatgaatacattttctggcatgtagtaaatactcagtaaatggtaattttctattaatattaatagcaataatgatagtaatagcaccataatactaataatggaaaaataataaactattatcagggtgatagtaaacaaattatgtgctactttgctagaaaaatacaagtac

SEQ ID NO: 7124 - DNA, 372 bp, Homo sapiens
  source 1..372: mol_type = other DNA
gacctcctgggctcaagggtgctaggattgcatgactgatccactgtaagtgggtttctaaaacagagatctttacaaagctttttgaaataatttgactcagcatgccaggaactgtaagatcacaatttgaaacagacattgtggtaagtaattatactttgaatttctctaaggctctagttagagagcatccatctaaatgtgcatttccaggaatattgctttaatggcccaggtaattctagcaggagacatgtattcaccacttctcgcgcccacagccccagatctgtggccaacactttgggagggcggggctcctgccggcctcccctgtactaccagttgccaaatgaaatctgaaacctc

SEQ ID NO: 7125 - DNA, 391 bp, Homo sapiens
  source 1..391: mol_type = other DNA
ttctaaaacagagatctttacaaagctttttgaaataatttgactcagcatgccaggaactgtaagatcacaatttgaaacagacattgtggtaagtaattatactttgaatttctctaaggctctagttagagagcatccatctaaatgtgcatttccaggaatattgctttaatggcccaggtaattctagcaggagacatgtattcaccacttctcgcgcccacagccccagatctgtggccaacactttgggagggcggggctcctgccggcctcccctgtactaccagttgccaaatgaaatctgaaacctcaacacagcccagctccgggtggaaaccagcagggggggtggctgggtggctgggggaatccccccaacttccca

SEQ ID NO: 7126 - DNA, 579 bp, Homo sapiens
  source 1..579: mol_type = other DNA
tcaaaaaggtaattttaaaaattattataataagcacatcactctttcagttagaaaaacataatttattcaccaataaataggaaatacatgaaagacaccaatgaaaattgttatgttgcttctctgttttatttaacaaattatacaatcaacaataatcaaaaccaaatgtgtgtattcaaaaaatcttgatagagagtagtatcactgatactaggtagaacacttattctgccacctgtccttactgaagcagtactctgtaaggactaatgagttgtaaaaatattctggacaatcagcaaaggaaaagattatttcctaatatacaaagaaattggagattaaagggaaagtttcaatattaaggattttaaatccaaaggaaatgttttctctgagacagttctcacatcaattcctttgcttattatgcaaggatatagaggaaaaggcaaactatttcccctcactggttatttgttaacgcactaattcacccggctaaattatatttaagctaaatgctcaaatactacattatttaaggtatatttcggaagagtttatatcccc

SEQ ID NO: 7127 - DNA, 466 bp, Homo sapiens
  source 1..466: mol_type = other DNA
aattgttccttctccacttctaagaagatcaaaatatgagaaataaaaacttagactctacagggaaatatttattaacacgtttgtatctatttataatatatacattcagagtgattatatttttggcaagaattgtgcatgcataatcgagactgattttgaaagatgataggaatttttatgagaaatttaaattgattctgtcagctctgaaataaatacatctttactatattttaatatggaagtttgcataattccagtatgtatgcaaaatgcaagagtttatgggccagaaatcattttgctcttagaattaatttgattttggcaaatacttcaattttctaatcccagctctgatttacggagttcagaatctcgaaaggcaaggtgtctggagtttagggtctcaggggagcccactagtgcccattccaggacagagcagctgctctgtctc

SEQ ID NO: 7128 - DNA, 389 bp, Homo sapiens
  source 1..389: mol_type = other DNA
agaaagcatgatgctggcatctgtgtagcttctggggaggcctcaggcttccagctggcatgtcttacatgtctggaagacgaggtacttttaaacaattagatcacaattgaacatgatatgctgtgctcagtggcttacgcttaaggaacccaagtgtgcgtcccagccactacgagcctgcagtgacctgtgatcaccccactgaactcctgcctgggcagccagggagaccctgtttttataaaaaaaaaaaaccaacttgaatatgcaatttgggtggggacacagatccaaaccatatcaatgtgcctcctttattgtctataactgccttgtttgctgcataagataaattagcagagtagccacctgtaaaagccaatggc

SEQ ID NO: 7129 - DNA, 430 bp, Homo sapiens
  source 1..430: mol_type = other DNA
ggaattgaattagattacgtaatttgagggtttaagcgaaatttgtattgaaaatttttcttacataaaaaaggtaaaacaaatttggtaaacctaatttttttttatagtactgttgtcattctaagaaactattatttatggatagtaaaactgtttggagactttaaaaataccctataacagttaaaggcagagcaaattactgaaataaaattgcgatatttgccccaaatagtaacagtacaattttcatcagttctctagaaaattatctgcaattaaaaaaaaaagaattctgatgtgttaactcaaattaatcagtattttctttgtacactcagattgcaacctaagtattaatatttattcaggatttttacaaaaacaaggaaaaagaggttgcatttccaggcaagctgtagctgca

SEQ ID NO: 7130 - DNA, 209 bp, Homo sapiens
  source 1..209: mol_type = other DNA
gaatagagctgacacagagtccgccgggaggtggtgctttcaagagagctagggccttggaactcccaagggtatactaggcatgtctgagctcagactcttatgttcctaggaggcttgacagggaagtgcgggcaagctggcagtcacaggcgaaaataaacagggctctccttcttccctgctctgtccatcagttgaaattgtta

SEQ ID NO: 7131 - DNA, 626 bp, Homo sapiens
  source 1..626: mol_type = other DNA
aggagatggatctacctaattagagcgcaatgtactttgttttgcacttctgcacatgcagcgcagagcccagggcggctctcgtccttaccggctggtcccgagaccgggtcctgctactggagcgccgggcgagggctgcagggacgcggcgtcggggcgggccgccggcagccgccgcgggcgccgagagccaccaccacttctcccacaagcggctgcgggcgtgggctgaaggaggggagggggagaagaggagcagcatctcctcctcctcctcctcgcctcggaaacgctccccagcggcgatcccggccgaccaagagcttcgccaaaaccttctggcgcgggcggctcaactcctgtaggcgactctgaccgctgccgaggcggaccggggagctacggagcacggctcgccagcacgacggtctccaggggccgtgagcatggtgtgtcaccctcgcctcagcgtggccgctggagctactcgcaccactggggctccacctcgggcagccgcgccggctccgcccccccggtcctgccccggcactgggaggaccgctccctagggacgaggtcgccagggagaccagcgccccggttgccatgacaaccagtgc

SEQ ID NO: 7132 - DNA, 421 bp, Homo sapiens
  source 1..421: mol_type = other DNA
aatcacaggatattatttgttcatgaattcagcaagactctcttgtttaactattgaaactcaaatatttcggcttgctatagaaaagtgggaggttatcgactatgttaaaccttttccttaaattttcaaacttcgggattattttagtctcatagataaaataacaaggcaagtatttacaaacttttttcaaaaatatgagaatttcagctgtcaccacacttttgaagatagctttacaaccgtgggaaaacgcaaggagctggcaactgaagttagaattggcctaaaagttggagttcacgcactggttgtcatggcaaccggggcgctggtctccctggcgacctcgtccctagggagcggtcctcccagtgccggggcaggaccgggggggcggagccggcgcggctgcccg

SEQ ID NO: 7133 - DNA, 579 bp, Homo sapiens
  source 1..579: mol_type = other DNA
ctataactactcaaatcattcttgaatgtgctctttacctactagccaataaatgtcttttgttgtgcttaataaacagtttcttttttttcctcctagtttagtagtattaagttttttaatttttttttaagagacaagatctagtggtgtgatcatagctcactgcaactttaaattgctgggctcaagtgatccctccgcctcagcatcctgaataactgatactgcagggtatttttagaaactccttaagaaaccatagtcaactttggaaccaatgttctagactctactagaatagagtgtagaaaatttggttcccataaatgcagcaacattttttgtgttggattatattttatatttatgtattttttctatataaatcttaagaatttaaaacacaaaaatgtctcagaagcatctatgtatatgcctatctacaggcctttaatttaaggtacaaatatttccctagagctgtacatggccatatatggtatgtaaatttatattttaattaattaaaattagatacaatttaaaattctgcttattacaactagccatatttta

SEQ ID NO: 7134 - DNA, 443 bp, Homo sapiens
  source 1..443: mol_type = other DNA
acctccagggaggctggatggccagagcttattctttcttcaaatagttagaatttacttcacatttgaatctaacttgtatttttaatgtcctgagcattctgtcatggagaagaatttgctcatccatgaataaacaatgcatatgctgtgagaaggggtgtggccagcagtgcctgcttagaatgcacagaggggccctgggcactgtggtcagaggctgtcctcagaccccatcctcttatctccaaaagcaagtgagagctcccttgaattattttgggtgaaggattagttttcacatgtttcatgagacataattaggtgcctaataccatattattctcacaggtgtttaattattgactttagacacaaattctaatagaactagaagaaaaactgagacaaattctgaagctccttgaaattatttgctatgg

SEQ ID NO: 7135 - DNA, 391 bp, Homo sapiens
  source 1..391: mol_type = other DNA
actttgatcaaacttctctgaacctcagttttctcacttgaaagtaaagaccaagtaagataattaacttatgaatattttgtagccaaataatagaaaaaaattctgaatgtcagaaagtccttaataatcattttttcattttttgccaccgaataaggagaaaatgccgtttcggtgtcgccaccgctgcgccaaaatgtgtctgatcgtggcagtgctgagcgaccaaaggctctgcctgcacaggaaccacccgccccggcccgggcactttgagcaccccgcccttgcacgccgattcggggcgagtcccctacccttccccggacggacgcgcagggcccgggaggaactggttcccgggacgggtgggggcctcggccgccca

SEQ ID NO: 7136 - DNA, 586 bp, Homo sapiens
  source 1..586: mol_type = other DNA
gacaggcgtgagacacgcgcccggcccatccaccgtgcctggcccacaattgaaatgagtagtatcttacctatttcataaagttgtttttaggctcacaatcaagacatagagcattatccttgttttatagatgaagaaattgatgaaatcttaaggttaaatcttaagtggcagagctagaattccaaaccagttctgacatcacgtttcatttgaccgtgggtggccatctgatgtattcaaatgaagaaatacgaaatcaccacagcgtaataacggctttagaaattgatgctgtcttgctctgaacacgaacacctaaaatatcacacgtgggctttgagctcactgccttcacccactgcagtgtgagaacgcagatgtcagcagcccccctacattggaaagcgtccttcccaggaaaggtctggcttacagccctctctctggggctggattccgagagcgcggcctgccccggcccggttaccagagagcggaccccgcggggcgcgtctcccgggcccggcgtcccctccctggcgggtggggagggccccacaaagccctttgttgaggctcc

SEQ ID NO: 7137 - DNA, 253 bp, Homo sapiens
  source 1..253: mol_type = other DNA
tgctctagttctacctgtaataaaaacaaaaacaaagtatttattcatgtattcattcattcaacaaggagactcctatcttctagaataaacattttaagtatatgattattccaacaaaactttatttacaaaagttgaggccctcctcaagctaaggaatctaggagtggccaacccggagattcattccctgcagcctattccctggaatgcaggctgtacaggggatgtgaaaatgctatataaattg

SEQ ID NO: 7138 - DNA, 652 bp, Homo sapiens
  source 1..652: mol_type = other DNA
ccggggtgcaggagagaagaaccccacttttccccgccccctaggagcatgggtgccgcgggatcgcaagtagggcggtgagagctctgagccctagcccgttctccccgagggctcccaccggaaaagtggggagagcctcggcttccgagaagtccgcggcggcggcgtcgggggccgggcggatcgacccccagccctgggtggcgcagggctgcgctcacctgtcgggcgcccttcacctccgccctcccctgacctgttgcggtgggaaagggcgcaagtgcggacgacgcaggggagcgcctcctcccggggctcggctgcggaaccgcggaggcaaaggtgcagctgcggccgcaacgcgcgcaggcggcggccgagtgcgcaggggccgcgcgcgcccgtcgctcgctagctggctggcaagctcagcacgccggctgcccgggacgccccgaggccacgccctccgcgcgaggccccgcccccacccccacctcccgagctgcggtaccgggttccgccccggcccgcgccctctagctggcgccacccaagcggcaagggacgtcgcggccctcccgggattggtgggaggaatacggcaatgaccgccccggtcgcgagggtgaccctgccccgggctgct

SEQ ID NO: 7139 - DNA, 535 bp, Homo sapiens
  source 1..535: mol_type = other DNA
tttacattacacatcatattaaatttaagtaaggcgctttaaaatttttaaaccataaaatactctgcgtccctttcaggaaggaaggtgcgacaacacaatgaagacagcctgttgctttccttcaggagacctggtttcccatgccacttagtagcctgtgacatatatatctgttttataagattgtgtgaaaggccttttctaaattgtaaagcgctagttattatctcctttaaagggcacagaatctgtttcaatattataggaggttgcaaaaaggctccttgacactttttgctcagaacttgaccctgagcttaatctagcagcccggggcagggtcaccctcgcgaccggggcggtcattgccgtattcctcccaccaatcccgggagggccgcgacgtcccttgccgcttgggtggcgccagctagagggcgcgggccggggcggaacccggtaccgcagctcgggaggtgggggtgggggcggggcctcgcgcggagggcgtggcctcggggcgtcccgggca

SEQ ID NO: 7140 - DNA, 296 bp, Homo sapiens
  source 1..296: mol_type = other DNA
attcgatttagtaatacaatctggaccggtgtgctggtccctatgagatttttcctgtcacgtgtagtccaaaaaaggcggttttgtaaatagagctcaagggggccccatattcaacaaatattcaattggagctggagagcactctcgaggagcccgcaggcggggctcggccggggaccagcagggcttgtcggcgcccaggctctgccccctacccgaccctgcctgccgcttgccgcctgcctttggctagggccgccgagcgccctgcccatttaagtaggcgggccgta

SEQ ID NO: 7141 - DNA, 383 bp, Homo sapiens
  source 1..383: mol_type = other DNA
attaatatttaacagttcattttcttgcaggtgaaaagcaaagaataagttatatttgaaaaaagaaaagtctccaatatcccagtgagtttctctagttttacgtactacatttatcttcaaatattcaagtacaatactgggccatgcctaggtattcttcggccccaaagaaaaaaaactagactctgggtccaaaggtctttttcgtaggtctgagagaggtaacccacggcttgcacaagcaagtcccagggaacttaatttacaagtttgcactgaaggttttaaatcagtctgatttccccgtggtgagtcacaccccgcaacgtgcaccaagggggagggtgtttaaaattatctccggctccacccttcacttg

SEQ ID NO: 7142 - DNA, 446 bp, Homo sapiens
  source 1..446: mol_type = other DNA
ttttcctgtcacgtgtagtccaaaaaaggcggttttgtaaatagagctcaagggggccccatattcaacaaatattcaattggagctggagagcactctcgaggagcccgcaggcggggctcggccggggaccagcagggcttgtcggcgcccaggctctgccccctacccgaccctgcctgccgcttgccgcctgcctttggctagggccgccgagcgccctgcccatttaagtaggcgggccgtatgggcgccggcggtcttcgagcgtgggggcccgctggctttcccttctcagaaactgcgccgggggcgctcgcttgccccggattcggacgcggcgctccccgggctcgtctgaagtgcagatcgccgcagaggccccagtgcccggatgtccatcaggcgagccaatacgggccgagcccggggctgcgccgaggacg

SEQ ID NO: 7143 - DNA, 476 bp, Homo sapiens
  source 1..476: mol_type = other DNA
tttattgacattatagaaaaattaattcatttcaacagcacttttacttgcattgctttctcctgcctcagccttgcgaatagctgggattggggatggtctcgactcctgacctcgtgatgcgcccgcctcggtttacaaactgtgggtgtgtatttataaacacagttgttttgtataacaggaataaatgcaaacctttttttcccctttccacgccctggtccgccttcaccaggccgggcaacactgcccagtccctgagacccggccgcccactagggagccgcgggggcgaggccgtgggggtggcctcggggaggaggtcccgagaaccacacttcccagagtgccgtgcgcagccccgcccagcccgccccgcccccagaggccgcggctcgcgggggctgaggcgagaggacgccaagcgcccgccggggctccgcggggccgcgcaggagagcgcgcgtccgccg

SEQ ID NO: 7144 - DNA, 423 bp, Homo sapiens
  source 1..423: mol_type = other DNA
tggcaaaagacacatttaggggaatatctttctttaaaaaaaattttgtttttttgctttattgacattatagaaaaattaattcatttcaacagcacttttacttgcattgctttctcctgcctcagccttgcgaatagctgggattggggatggtctcgactcctgacctcgtgatgcgcccgcctcggtttacaaactgtgggtgtgtatttataaacacagttgttttgtataacaggaataaatgcaaacctttttttcccctttccacgccctggtccgccttcaccaggccgggcaacactgcccagtccctgagacccggccgcccactagggagccgcgggggcgaggccgtgggggtggcctcggggaggaggtcccgagaaccacacttcccagagtgccgtgcgcagcccc

SEQ ID NO: 7145 - DNA, 685 bp, Homo sapiens
  source 1..685: mol_type = other DNA
aagctgccagataagtcctataatgacagttctctgggctttgggcttttgagagttccaaatccattttttcatggctgtcatgatagcaaggttgttaattttcaagacggcaagttaaaatgccacaaatctcaccgttttaacaatatttagtcattttttaaaataaatactttttagattgtcgtaaacctttgatgaatttccagagttctgaaaatattgattttgaccatttttgccaattatggagaagatcttcactccaccattgaccagtaattactgaatgtctcttaagtacagggctatacctaagagtcaatttatctaaaaacttattgctactgtatacattggctgttgaaaaagtaaagctataataaataaatttgtatactaattcagacatagatcagaaagcaaaaaaatagaaaaaagaatatatgtgtatactattatcattttgattaatggattcagggaaatttctggaagagaaatttttgaaaacattagccatttaaaaacaagggcatgcttttcttttttgaacagttatggattgttatctgtgagtcttacataagacttcctgctcacaattaatatgaatttttaccattaaaccacctttgatttaattatctcagagaacccacgtgatccaggatatgtgttt

SEQ ID NO: 7146 - DNA, 454 bp, Homo sapiens
  source 1..454: mol_type = other DNA
gtttctggaatttataaaccacctggttattatcacaaagggaatcctaaaatctcccccaaactcaagagattttcagggaaatggtcatcatgtgtaaaataattagcagttacttttgtgaataaatgaatcaaatagctaagctgggttcattcagactttatctaagtttctttaagcttatctctacattctcctttttcatattgaaaaaaggtaacaatttccagaaagataccaacagatcattagctgatgcagtatcctcctgcctcagcctcctgggtagtagaattgtttctagaggtgaaacttcaaggtgaaatatagtacataactgcttttcaagtccagagagcacactctcttgtgcatatttgaggtgtttcaaacccattagaacacgtgaacaagcctgcttccaaagctggcttccatctggtagtccctg

SEQ ID NO: 7147 - DNA, 428 bp, Homo sapiens
  source 1..428: mol_type = other DNA
atttgctatttattcacttgaataaagataaaattcctaaagtacaacatatattttttattttcaaactctaataggtcaagtgaaaaatgattattcaaatatactcttctttcttgtgacgataacaattttttctaggtagccaatttccatcctttaagataggaatctacataaagtctggccttttcgtccagaagcaattcccgtgcctcagtctctcgagtagctggaactacaggcacaaaaaagagaccgggggtctccctatgttgttcatccttcccgccagggcttctcggatcacaggcgagagccgccgcgcccagcggcacaaagaaggggggctgcgcaaagcagaactaggaagctttgctccggtctggacttcgtccctcccagatctctgagctagcaagcactgc

SEQ ID NO: 7148 - DNA, 493 bp, Homo sapiens
  source 1..493: mol_type = other DNA
tggctcttaaatatgaaagttgactattgtcacacaacaaagtccgagtgtctaaatgagttggaaaaaaatgcatgcaataccattattaactcttactgtaaccaatctctagaattttttcaagtcactagttagcatatactgaatacccatttatataggctacaaaaccaaatgttacataggtaatctttaggctaaatgatttgctatttattcacttgaataaagataaaattcctaaagtacaacatatattttttattttcaaactctaataggtcaagtgaaaaatgattattcaaatatactcttctttcttgtgacgataacaattttttctaggtagccaatttccatcctttaagataggaatctacataaagtctggccttttcgtccagaagcaattcccgtgcctcagtctctcgagtagctggaactacaggcacaaaaaagagaccgggggtctccctatgttgttcatcct

SEQ ID NO: 7149 - DNA, 246 bp, Homo sapiens
  source 1..246: mol_type = other DNA
tgtgtgagaccggagttctattattactcaaatcagtgcccagggtggagtgcagtggtgcgaagctgggaaggctggtcttgaacttttgcccataacgaagtattattcaaaaatatggctaagacctgtgggaggcccaaacagttcccctgcactgcagcctgggccgtccccaagtaagcctgcgcagactgggaagtctgggaagtcccaagccggcaacgcacgacctttgctttgcgg

SEQ ID NO: 7150 - DNA, 274 bp, Homo sapiens
  source 1..274: mol_type = other DNA
aggctggtcttgaacttttgcccataacgaagtattattcaaaaatatggctaagacctgtgggaggcccaaacagttcccctgcactgcagcctgggccgtccccaagtaagcctgcgcagactgggaagtctgggaagtcccaagccggcaacgcacgacctttgctttgcggcgcggccgtaaagcgccattacgcgcggttccccaggcagctggcgctggaggcttcggcgttgcccatcagatacccgcggccgggactcggagctgt

SEQ ID NO: 7151 - DNA, 431 bp, Homo sapiens
  source 1..431: mol_type = other DNA
caagctggctggcctatcaactgataataacgcataaaaagctgttacacagtgtctgacacataataaatgtgtgataaataagtgatctataatataaggagcaatcatttttatatatgtccatttccaaatctcattcaaagaaggttaaggtatctgaagtacccttctattaaaattcagactgtatttgctagaacaatttccaattgagcaacgtaaaaatgcatctgcctttagaaagaaacaacagcatggagtttcttttcaaggtcttaaaataaaaatctccaaaaaagggatgctgcttataaaacctttcagagttgtttgaaaaagaagcttatattctggccaagttatgaggctctgagaacaagagcttgagttgcaagcactgcctgtaaagccctcgcatgagaggccag

SEQ ID NO: 7152 - DNA, 554 bp, Homo sapiens
  source 1..554: mol_type = other DNA
tatgtaaatgataatagctaacatttattgaatgcagtttatcatgttaactaacttaaaactcagaacaattgcagagatagatattatcatcatttccatatgtatatccctgtcttatagataaaagcactgatgctttagagaggttatataacttgtccaagctggctggcctatcaactgataataacgcataaaaagctgttacacagtgtctgacacataataaatgtgtgataaataagtgatctataatataaggagcaatcatttttatatatgtccatttccaaatctcattcaaagaaggttaaggtatctgaagtacccttctattaaaattcagactgtatttgctagaacaatttccaattgagcaacgtaaaaatgcatctgcctttagaaagaaacaacagcatggagtttcttttcaaggtcttaaaataaaaatctccaaaaaagggatgctgcttataaaacctttcagagttgtttgaaaaagaagcttatattctggccaagttatgaggctctgagaacaagagcttgag

SEQ ID NO: 7153 - DNA, 495 bp, Homo sapiens
  source 1..495: mol_type = other DNA
ttaagaactgttctaggtatccaggcactgattaggaaattaaggtccagcagctgatcctgggaaattgccaactacaacttttagtacgcttcctcgaaaatgttttggtaaatatcattttatccatttttagtttccttggatgctacccagctagtattaatccaattctgatttcaaagaatcattaaaatgtggcaaacagggaatgattaagtgttaagtgttagatctaaatttcttgaataacacaatagctacttataaggaactctagtattttagtagctttctccatgtacaacctggaaatgtacattaactcattataagactgcctgaatgtgaatgacatatatttagaaatcaaaataaagttttgggaagatcttcaatttaatggaaactagtctacaagagcggggtcccggtgacaccttgtgatgtcagtcacccccagcctgaggttgctgcagcagagtttaaattcct

SEQ ID NO: 7154 - DNA, 668 bp, Homo sapiens
  source 1..668: mol_type = other DNA
taagagaaaaaaagaaaaaaaatgatattcattaatttttgatttctcaagcaaggagaatatgcaaactattaagctagatttccctttgtaaattaaaaaattagtactttagtttatcaatccatttgtggtgttggtttcatgaatcatttcaaaaacaatggatcactcctgctagctctagtcattttgttattctcataggaaaaaaattaaatatgaaaatgaatacagagatttaatttacaaaacaaaatataaaatctgcctctcagtggtatgattctcaaaagttctaacttttatactcagcatcatgttttagcaactatatcttacaaagtctgaccgacttaatcatatcaactttaatttatgagtcaatgaagtatatttcaggaggaaacatcaaatgatattaaaatattgatggttcatcttagtttttctttctttttttagctaaactaatgtaaaattatatctaatgacagcaagctttcctttctttcgacatagtgaaaacttgtataattatgaaatttttaaaaggttaaagcctttgttatttattttaattcaaatccagtatattattatacatattcggtctagaatcacgtttcttgtttattcaccacgttctgacatcaccttggtcggac

SEQ ID NO: 7155 - DNA, 440 bp, Homo sapiens
  source 1..440: mol_type = other DNA
gaggggacaaatgctgtgtcttcacactgcaaaagggactagctagtttcttcttgcccttttataaggtcattaatcccatctcattagacttagtatatgtcactatctaatctatttaactcatttatcttaggaagaccacctaaaacatttttgttaaatgttgctgaatttcacttagataaaattgacatcataaactttctacataaaaggatagcaaaaatgttttccatttctaaacttgttagcctaattagcagttctgaaatcaattttgattatctgacaacatgatgtccaaactgaggtatttatattttgatagtagctttctaccacaaacacatttttagattaaaaacaaattgtttgctagcgctgagtgagccagtgctgattggccattgggaactctaacaaactttaaatttcag

SEQ ID NO: 7156 - DNA, 475 bp, Homo sapiens
  source 1..475: mol_type = other DNA
attttaataacctgttcttttaaaggacattacaacttaaaaatttcataagatacgcagagcatttgcatctaatatgtgctaagcattgctagtttaacatactaaggtaatagccaaggttgcacaggtcagcagtgacacagcggaattcagaaccacggtctggctcctgaagcagcccaacatctagaataaattaccattcttctatttcatatagaattttatattttaatgtcactagtgccatttgtctaagtaacacttgagtagtaaagttttctgaactccttgcttgaacaatagccttcaatcatacaggcaagagtggttgcagatattacctttatgttacttaaaccgaaagaaacaaaaatccattctatttaattttacattaatgttttttaatgatattgtacataagtaatgttgtttttgtttttttttgttttaaccacaaaaccagagg

SEQ ID NO: 7157 - DNA, 303 bp, Homo sapiens
  source 1..303: mol_type = other DNA
tcatatcagggtgatatctggtcagtgctggccgcagggatcctatgacgaatccctgggatccccacaatgtgtggagcgacagctccaggagccctttccctgcaggcgggctggcgggtgagcgattccctcccttcccaggccttcccgggaatggaacgtgggcgcccgcgcccgggctccggttccacttggaacgcggactcgggagccgccgggcgagcgcgcagaccgcgggggcggctccctcgcacctccccgctcagcgcgccgcggcggatgggcgaggcggggcgaggc

SEQ ID NO: 7158 - DNA, 553 bp, Homo sapiens
  source 1..553: mol_type = other DNA
aaactatggtaatattttcttaggccctggggtgcgtcagcgtccccggtgcttcggcgctccggccagtgacggcgctgatcagcccaggcttgtccctgcgtgtcacggcagggtgaccctagccccgagggagggcggtggtaccagtcctgctggcggctcagcgcggcaggacacgtgtgcgctttcagccgggtcgcagggcgcttatcgcggcccggcagtcggggccacgcctcacccccgcccgcgaaccccgacctggggaaacccggggcgctggggaggggccactgcgttcagctctggcggtccacagcccgaagcgcggcttaggccctggatgtccgggtctccccaggcggccacccgccggctcccatcgtgacctccagccgcagcgcctcccacgccggccgccgcgcgaggggagcgctcgggcgcgccgggtgtgtgccgcgcgcgggctgcgtgctgtgcccactcaaaaggttccgggcgcgcaggagggaagaggcagtgcccgccactcccactgagattgagagac

SEQ ID NO: 7159 - DNA, 563 bp, Homo sapiens
  source 1..563: mol_type = other DNA
gaaattaattcaaaagaataattttacccaaatgtttgggcgcatcatgaatatataccttaaaattcttttaaaaagcatgcggtatggtatatttaaaattctttttaaaaaattatgtatagtcaattttcttatctaggattgggtgaaccattaatagttattcctagtgttgatttaaacaacttaaatgatactatgatttttgtttgtaaatgcaaaccagaaaatatctgcatgcaggtactaatttcctaagtgtaaagaataacatttaaactatggtaatattttcattcagttaggccctggggtgcgtcagcgtccccggtgcttcggcgctccggccagtgacggcgctgatcagcccaggcttgtccctgcgtgtcacggcagggtgaccctagccccgagggagggcggtggtaccagtcctgctggcggctcagcgcggcaggacacgtgtgcgctttcagccgggtcgcagggcgcttatcgcggcccggcagtcggggccacgcctcacccccgcccgcgaaccccgacctggggaaacccgg

SEQ ID NO: 7160 - DNA, 441 bp, Homo sapiens
  source 1..441: mol_type = other DNA
ttgagacagagtctcactctgtggcccaggctggagtcgcgagtagctgggattacagccaggctggtttttgtcttaaaatgaagtatgtctatatgggcctttaagggtcttgaaactgacagaaattaattcaaaagaataattttacccaaatgtttgggcgcatcatgaatatataccttaaaattcttttaaaaagcatgcggtatggtatatttaaaattctttttaaaaaattatgtatagtcaattttcttatctaggattgggtgaaccattaatagttattcctagtgttgatttaaacaacttaaatgatactatgatttttgtttgtaaatgcaaaccagaaaatatctgcatgcaggtactaatttcctaagtgtaaagaataacatttaaactatggtaatattttcattcagttaggccctgggg

SEQ ID NO: 7161 - DNA, 469 bp, Homo sapiens
  source 1..469: mol_type = other DNA
ttttgtcttaaaatgaagtatgtctatatgggcctttaagggtcttgaaactgacagaaattaattcaaaagaataattttacccaaatgtttgggcgcatcatgaatatataccttaaaattcttttaaaaagcatgcggtatggtatatttaaaattctttttaaaaaattatgtatagtcaattttcttatctaggattgggtgaaccattaatagttattcctagtgttgatttaaacaacttaaatgatactatgatttttgtttgtaaatgcaaaccagaaaatatctgcatgcaggtactaatttcctaagtgtaaagaataacatttaaactatggtaatattttcattcagttaggccctggggtgcgtcagcgtccccggtgcttcggcgctccggccagtgacggcgctgatcagcccaggcttgtccctgcgtgtcacggcagggtgaccctagccc

SEQ ID NO: 7162 - DNA, 446 bp, Homo sapiens
  source 1..446: mol_type = other DNA
cacagtgaataatcaggatagtgacttaagcaagacaaattcagtaatcggtattttgtgaatctcatgaaatttatcatgacaactctgtaaggaaggtattattgttatcactattttcttaagaagcttttcaaggccataatagaagcacttagtaaatgtcatattttttcttttgacatctatcatgttttcagaatatgaaatgcctatttatcccaaccgtctctatttaaaatcacacacacacacacagagagagagagagagagagagaaatgcctatttagcacagtcttgacttcctattttacttttggtttaggaaagaataacatgaaaagtataaacctaattttggagcaaagccatttgctagaattggtttttcatttcgaaaataaacaaagagaaagatacaaaaatatctctctgacatgtaa

SEQ ID NO: 7163 - DNA, 524 bp, Homo sapiens
  source 1..524: mol_type = other DNA
taaaatgtttcaaatggctaattttatgttatacatattttaccatattaaaataaatttataaaaatagataaatggaatttcttaacaacttcaagattttttaaacgttcatttcatttcaataaatatttacaaaatgcccacagtgaataatcaggatagtgacttaagcaagacaaattcagtaatcggtattttgtgaatctcatgaaatttatcatgacaactctgtaaggaaggtattattgttatcactattttcttaagaagcttttcaaggccataatagaagcacttagtaaatgtcatattttttcttttgacatctatcatgttttcagaatatgaaatgcctatttatcccaaccgtctctatttaaaatcacacacacacacacagagagagagagagagagagagaaatgcctatttagcacagtcttgacttcctattttacttttggtttaggaaagaataacatgaaaagtataaacctaattttggagcaaagccatttgct

SEQ ID NO: 7164 - DNA, 267 bp, Homo sapiens
  source 1..267: mol_type = other DNA
gttagcacatgttatcgagcactgactggtatactgggcacaattcacatagtaagtaacaaattatataatgtgttagaaggtgtcttcgcaaagggagctgccttttcaaaatcaatgcatggcttactgcagcgagcaatcggcttcaccagccagaagcgtctgtggctggtggcactgcctggcaggctgatcttggctggtgctaccagcctggatcccatgcatgccaagagcaagccaggcatgaagctggccactgtg

SEQ ID NO: 7165 - DNA, 406 bp, Homo sapiens
  source 1..406: mol_type = other DNA
ttttaactgttctttgcacactaaaatagaagcccattaaatttaaaatggctgtctcaccgaaaacaattcatcattttattggttccatggtttaaatgccatcttataaagttctcatataacaatcttatctgaagacgtccttcaataaacacagaaatacttgtttaatgaattaatagacattcaagactgcactgtgcactgctgttcaaagacatggcagtgaaagcgctccgcccgctggctaggtaccaagtccggccccacccaccgcgcaagcgcgccccctctttggctggggagctaacctcgggagggcggggcgccgccgcgagccaccactggcacagggtgacgtcgctccgccgcgcagctggaagcctgcgaagtcaaatagcag

SEQ ID NO: 7166 - DNA, 499 bp, Homo sapiens
  source 1..499: mol_type = other DNA
gctgtctcaccgaaaacaattcatcattttattggttccatggtttaaatgccatcttataaagttctcatataacaatcttatctgaagacgtccttcaataaacacagaaatacttgtttaatgaattaatagacattcaagactgcactgtgcactgctgttcaaagacatggcagtgaaagcgctccgcccgctggctaggtaccaagtccggccccacccaccgcgcaagcgcgccccctctttggctggggagctaacctcgggagggcggggcgccgccgcgagccaccactggcacagggtgacgtcgctccgccgcgcagctggaagcctgcgaagtcaaatagcagccgcggggaggctcgttcccatcggcatctgtgactggctgcgatcgagggcccgggcggccggccagccgtctcgccgagtgcggactggccggatctgctgtcagtcagcgggaacagacttctccctctccatctggtca

SEQ ID NO: 7167 - DNA, 689 bp, Homo sapiens
  source 1..689: mol_type = other DNA
gtcgccacgtttccctcgcccgggaggcaacgcggcacccaccccgcagcatcctcgcttccggggcctcgggcaagggtctccagtcccagcccacccaccctgcccgcctcgcgccgcgctggccctccagcctgcggccacattcaaggccgagcgcagtctgggctggaaacccgccgcccggggcgcaggcagcccagctgggccccgcctcaccccgacgagctctgagaactccgagaggccgccggccaagcgccgactcggggggcgggggaacggaaaccgacgtctccccttcgaccaagcaagcagtcaaagcggccactgccttgcctgctggaaattctcgaaaatttttctcccgcagttgaccagatggagagggagaagtctgttcccgctgactgacagcagatccggccagtccgcactcggcgagacggctggccggccgcccgggccctcgatcgcagccagtcacagatgccgatgggaacgagcctccccgcggctgctatttgacttcgcaggcttccagctgcgcggcggagcgacgtcaccctgtgccagtggtggctcgcggcggcgccccgccctcccgaggttagctccccagccaaagagggggcgcgcttgcgcggtgggtggggccggacttggtacctagccagcgggcggagcgc

SEQ ID NO: 7168 - DNA, 364 bp, Homo sapiens
  source 1..364: mol_type = other DNA
ctttaagaacaatgattcaccattcactaattcagtattcacaacaactttgtgaaaggaaaatatcttgggcccccagtcatccctctgttcacagagatagatgcatgttctgattgcctttttggaaaggcttatcagaaactcaaaaaatgtaaccatttatctctcacctatctgtgacattatggaaccaatgtacttcttacatatattgattcatgcctcatgtcttcctaaaatatataaaacaagccccaaccactttgggcaatttttggggttcataactttatagaccataactaacacaaataatgaggacattctatatatttaactgtattttacagagaagctcccc

SEQ ID NO: 7169 - DNA, 276 bp, Homo sapiens
  source 1..276: mol_type = other DNA
cagcagccagatgaatctttaaaaactgaagtcagataatatcacttcatcagagagatcttctgttctctttccctcaggagaatgtaaacgcatgcctgtaatccctgatggtgccactgcactccagcctgagcagcagagtattaaccactctaggtattattctaacactttatgtgcctattaaattatcccgacatattagatttgctgaattgcagtccatatttcgtagatatgatagctgatggcttaggatgtaaactcagtttt

SEQ ID NO: 7170 - DNA, 328 bp, Homo sapiens
  source 1..328: mol_type = other DNA
aatatcacttcatcagagagatcttctgttctctttccctcaggagaatgtaaacgcatgcctgtaatccctgatggtgccactgcactccagcctgagcagcagagtattaaccactctaggtattattctaacactttatgtgcctattaaattatcccgacatattagatttgctgaattgcagtccatatttcgtagatatgatagctgatggcttaggatgtaaactcagttttttcagcacttgaagttcaggcagaggtgacatggggccagggctgcgcccctggggcggttggacagggtgagtctcttgatattcagg

SEQ ID NO: 7171 - DNA, 378 bp, Homo sapiens
  source 1..378: mol_type = other DNA
ctgtggcttacccatatgatagctaccattcaataaatgaattactaattaaacacaatagtatgaatctcaaagcattgtgctaagttaaaaaagccagacatcacttagatatggttccgtttgtatgcattctaaaaaagggttgccaggcacccgggaagcatagctctgcccaatgccggtttcagcccggctggagtgcagtggcgcaatccccgagtagctgggacctgggattacaggcgtgaatcaccgcgcccggccgcggcgcacaacgcttaactgcccgcccgggccctaaaaacaacaacaaacattatgtttcgttttccactggagctgcaggccccgcccccaaacagcacgtggggggcg

SEQ ID NO: 7172 - DNA, 442 bp, Homo sapiens
  source 1..442: mol_type = other DNA
ttcagcagcagcatccggaagctgttaagaaaagatttcaagcctcctattcagtatgatcctagtcataatgagtcagaatttgcattttaacaagattcccaggtgactcatatgcatattcaagtttgaatgatatggatcatatttatcctttaaaaccaagcataaataacttttctttttgtgaaattttgaacaaagttgccagtaagaacgataaagaagaaagttttattattgggattttaaagtatgaagttagccacaactttaaatcattgaggcctagattagaatcatgactattaagatcttacaaaggctttagtctgcatcatgacaaggagtatgagtagcatcaaattactcacataggtctccttcaattttatttataaaatcagaattttccatggtgtgatgttaataagggtgccag

SEQ ID NO: 7173 - DNA, 507 bp, Homo sapiens
  source 1..507: mol_type = other DNA
agacaacattaatggagcattaatttgtgccaggcacttttctaaatgttctgccctacctacaaggtaggtacaattattagtcttatacagataaggaaaatgagcagttaagtcatttgccatcaggccccagctgtaagaaagagatctaacatggtcactttcttggagaaattcactgaatggatcacccactcattgaatggatctttaacagcctccaagctcatttatagaagtaaattagctgtgctttattacgcaaatacttcacaaggttctcactttttttaatgagagagaaaaaagccatgtacatgaaacaaatgagcgctttcaataacttggaggtaaccacgtaggtccaagctctgaggcctggccactggcttccggcggggcactcaccagaggcctctgccctggggctgtcctccggactatagatgaccccgcctactcctcggcagcgtttcctggaggaccagggggcggggcctgccc

SEQ ID NO: 7174 - DNA, 796 bp, Homo sapiens
  source 1..796: mol_type = other DNA
ggtccgcaccgacgtgtcggcgtacacacacacacacacccgtacacacgtgtccgcacacaccctcgcccccggccccgcccaggaggcggacccgggagaggcgagccggcccggcctccgcgaagtgggtggtgccgggccccgcagccctgccggcgctgtcatcgcggacgccgtgcaccgcgtcctcggcgcaaactcctcgcggccgctgaggttggcctcgccagctcccatttcaattgaaagcgtccgcgccggaggtccctggctcgcaattcctcccgggcggcagggcgggagggcggccgagcgcgggcgggaggcgctcccactcgcctttcccggcgcggggctctctgaccggagggcgagcccacgagaacgccagggaggcgtacgcagggtactaagggcgccgcgccccaacctctcgtctctggaggtgcctgcagcccccgccgccggagccacgggaggagccgcagccgcccctccgggagccgcgcgctgactgcagtgccaggcggaacgcggcccagcgcggctgcagctccgccgtacccccctccctggaaccccggcccccgccctgcgcacctcggcagcagccgaaccgcagcttgggactccgactgtcacagcccctctcgccggacccgggtttccccgcaagcctgcgggcggcggaatgcgctgggtgaatggcttcgcaccgggccaatgggcgccgttctgggatgggcccgcgccaatggcggccgccgtggcacgggctggaggcggggcggca

SEQ ID NO: 7175 - DNA, 403 bp, Homo sapiens
  source 1..403: mol_type = other DNA
tatagaaattcttccactgggagagttattcctttggattaaagcagtctgaggttttctgcaaaagattagctgtggatcagatcaggtctaagattacaagattttaagatctggtgaagagcgccggcggctgccgcgtacctccttccccgcctctcccaccgcgcagcgccgcgggccggcgccgcgcttcctacggggagcgtgccgctgtccccgcgccgggccctcgagtcctgtcacctcgggcagcctgcgcctggctctggggcctgggcctctcctgccgccccgcctccagcccgtgccacggcggccgccattggcgcgggcccatcccagaacggcgcccattggcccggtgcgaagccattcacccagcgcattccgccgcccgcag

SEQ ID NO: 7176 - DNA, 796 bp, Homo sapiens
  source 1..796: mol_type = other DNA
cagcccgtgccacggcggccgccattggcgcgggcccatcccagaacggcgcccattggcccggtgcgaagccattcacccagcgcattccgccgcccgcaggcttgcggggaaacccgggtccggcgagaggggctgtgacagtcggagtcccaagctgcggttcggctgctgccgaggtgcgcagggcgggggccggggttccagggaggggggtacggcggagctgcagccgcgctgggccgcgttccgcctggcactgcagtcagcgcgcggctcccggaggggcggctgcggctcctcccgtggctccggcggcgggggctgcaggcacctccagagacgagaggttggggcgcggcgcccttagtaccctgcgtacgcctccctggcgttctcgtgggctcgccctccggtcagagagccccgcgccgggaaaggcgagtgggagcgcctcccgcccgcgctcggccgccctcccgccctgccgcccgggaggaattgcgagccagggacctccggcgcggacgctttcaattgaaatgggagctggcgaggccaacctcagcggccgcgaggagtttgcgccgaggacgcggtgcacggcgtccgcgatgacagcgccggcagggctgcggggcccggcaccacccacttcgcggaggccgggccggctcgcctctcccgggtccgcctcctgggcggggccgggggcgagggtgtgtgcggacacgtgtgtacgggtgtgtgtgtgtgtgtacgccgacacgtcggtgcggaccgacgcgggggtgtc

SEQ ID NO: 7177 - DNA, 565 bp, Homo sapiens
  source 1..565: mol_type = other DNA
taattttttacaactcatgatgtgaaaaaaatatcatgtaaatatatttctgctatttttcttaaaatgtataaaatctatggattaggatttatgttcctaaaaataacaccctggtattctacaccataattaacaaatatttagaagactttatggaaaaactgattttgtgttacctataaaaaaaaataaaaataaaaatgctgttgatgttcatggagaaaaataactgtgtaaacacattcagttttataagaataaaatgttgaaacaattttcattagagtggattctgatcccttaagaacttgggcagagacttagggcacgtatcctccccgtcaccagcgagtgggtctagaggcatgctttccttctagaaaagtctcactccttttaaggaagaaaggggacgcaacataactcttgccttctgctacagaaacctttctgaaaatcttgtctgtggaactgctcagaggaaagtttcaaggaggaggagcgcctttagtgctgcagcagctgctgctctgattggcccggtggttcagctgcttccctg

SEQ ID NO: 7178 - DNA, 425 bp, Homo sapiens
  source 1..425: mol_type = other DNA
gtacatatacaaggaacaagatcatgtcttttgcatggacatgtacaaaaataaaaataggatagtttccttttggcttaggctattttagctattagttcaaatatttgtaaattttaaaatctatcaaattttctagtgacagaaagttattgaaaagtcagttagctaatttttcagactgcaaatcacatatgtagaattatggttgtctagaagtatgttgtttatgtttatcatcagtatatttttataagacaactcatacataattagaagtagtaacggctacataaaatagagcattttcatttaaaaaattttggtagaatttagctggtttctaatgcagttttaaacctttggttctattaatgaaagccaccaggtgactggcagttttcgttaagacccgtgtcacgtga

SEQ ID NO: 7179 - DNA, 555 bp, Homo sapiens
  source 1..555: mol_type = other DNA
ctactttaaaagcgacttaaacctagatgtcacataatcctgtcctcgtgaccaacagataccaaaaacattttctttcaattcatagctacgacaaataatgctttcagtacctcctgaaataagaggtcagggagaagccgtgttagcgagggcctctccccgctgggcgagcttcagagcgcgggacgtctttcctcccgcggagggagcccggattccgcctggacgccggcgaccaggatgtcactgctgcagccagccagccagcgggcggccgcttggcacagggaacgccagtccgccggccccgggcatcgccctgggaccgcctgcgcggcgcccagaccactctcctgaggcaggctggcactggtggcccggcagcggcgagggacgagcggagagggacgagcgtcgccgccggagccgggagagcacgcgcgcgcccccgcagaacgttgtgccggcgagggggcggggcctgcgcgggtgagcgcacgcggcccgggggaggggactccggcgagcgggcgggaggggcgggggcccggc

SEQ ID NO: 7180 - DNA, 306 bp, Homo sapiens
  source 1..306: mol_type = other DNA
tccctttggggagcctaaggaaagagacttcgggatccgcttttccccgggaaacgcgaggatgctcccataaacgggttaaggctgagaacgccccctcgggtggctggcgcgaccatcacacattcatgttaaggataccttaacttttcatgcaactccacttctgaaatgcagtaataacatgctaaatttttaatgccagagctaaaaatgtctgctttgtccaatggttaaatgagtgtacacttaaaagagtctcacactttgaggaattcattagccatggatgtattcatgaaagga

SEQ ID NO: 7181 - DNA, 371 bp, Homo sapiens
  source 1..371: mol_type = other DNA
atctccctttcagaagggacgctggatttgtctcccagattccactgatagattaagagcaaacgaaaacttaaatttcagcgtgcgagggcaaagcgctctcggcggtgcggtgtgagccacctcccggcgctgcctgtctcctccagcagctccccaagggataggctctgcccttggtggtcgaccctcaggccctcggctctcccagggcgactctggtccccggcatcatgtgaccctacttaacgtgaggcgcaaaagcgcccccactttcccgccttgcgcggccaggcaggcggctggagttgatggctcaccccgcgccccctgccccatccccatccgagatagggacgaggagcacgctg

SEQ ID NO: 7182 - DNA, 465 bp, Homo sapiens
  source 1..465: mol_type = other DNA
atatacactaatgcatggctttttcaaaactgatttaaaggtaggtgtaaattacactgcaattttaaagaatcatctaatgatattgtggttatttttaaacagtccttaaattttgtggatgcatactgaatgtttacagctgaaaagatatatataaagcttgaattgcacttttgcatatgtttgaatatttcccataacaaaaagttgaaaatagagtgatcacatgagttaatctcctaatttagtagcaaacaaaaaatataaggaaagtctgcttttccaaaggggaagagtttaaataataaatatttgtgatcttactttcatgcttgaacacatatgcattatcttctatatgtcttttatgtgttttgtatgtttaaatttgattttactcaaatttcagaacccaaatttaactttctataaatataaaaacaattaagaaagcaaaggctt

SEQ ID NO: 7183 - DNA, 592 bp, Homo sapiens
  source 1..592: mol_type = other DNA
tgtgcaaagtctggagactttttcagcagtgaacagcctggagactgtttgtcaacaatgaacaatgtgcttagtctgattcaaacttatgtcacagtcacttcaattcaagacatttatcaatcacctgtcatgtgcaagattggacctttggtattaaaatagcacattcagctcactagagctgactgaagttttcttatgaaacaaattttccatccacttaaagatgctgtataagaaattataaaatattttagctaagtcttggagattttatcaatgacttgtaaatgctctcaggaatgtaatccagggttgcaataatcttgttaatcaaaaagttagagcaggagattattttttttagtttctaaactgggtggaattaaacatttaaatcttaatgtataagatttatctattaggcctattttcagtactggctgaagtattgttaatcaagaagatataataccatcaatatttttgagaaaattatcttagccgtaacattattctgaacactttaatggttgtataacactttttagtaagagctctaggatcagtgccctcagacatcttacct

SEQ ID NO: 7184 - DNA, 553 bp, Homo sapiens
  source 1..553: mol_type = other DNA
ttgctggagaaattaaatgataaatctcatgaaacatcttcagataaatctggttctataattttgtcctacagtaaatgtataaaagcattctatatgatcccattttaatttatttttaggaaaataaaggaagtaaaattctgattatttattccccaggagcaaaatttaaagtgacttcctggtatacctgtctaattccttttctgttattacttataatcattgagattaagtaatgatacagctgaagtgtatttataaaaatagaaagatatacatgtatgtagatagatgttttataattcagagtatatgtactatatgaaaggatagagacactgtaaacaagcttttgattatgtgtatgcatgtggatatacacttgaacaaaatgcagcacagcagataagtatcataaaaacttttctcagtgtctttatgtagtagaacaaaatgttaaaactgtattcagcctatatcaacaaaattttgcgaacctgaaatttctctttgaaataaaagaaagttacttcatattttttggcaa

SEQ ID NO: 7185 - DNA, 329 bp, Homo sapiens
  source 1..329: mol_type = other DNA
gcgcagaattaaatgcactacatttgctgtattgcctgctatatgtaggcaacaatcaaaagtcttttcgatttctaaactggcaaattttctccaggggaccatcagtcaaatgatgtcaaattgagctgtatcttacagaattgattgctgcattaaaggaaagaagctaggtttcttttcttgttactgaggaatgaagacacttgtctggtaattccttcccttacaggaggaagagaaaaatacagtgcatttatttccaggtgcgtggaatccggcggacgcagtgggccgggcaccgccctccaagccgccccgccaggccg

SEQ ID NO: 7186 - DNA, 356 bp, Homo sapiens
  source 1..356: mol_type = other DNA
tatgtaggcaacaatcaaaagtcttttcgatttctaaactggcaaattttctccaggggaccatcagtcaaatgatgtcaaattgagctgtatcttacagaattgattgctgcattaaaggaaagaagctaggtttcttttcttgttactgaggaatgaagacacttgtctggtaattccttcccttacaggaggaagagaaaaatacagtgcatttatttccaggtgcgtggaatccggcggacgcagtgggccgggcaccgccctccaagccgccccgccaggccgcgcttgggcccgccctcctcacagccccggagcgcggcctgccggggaggtggatctcgcgctcccca

SEQ ID NO: 7187 - DNA, 515 bp, Homo sapiens
  source 1..515: mol_type = other DNA
ataaggcctttaactaaggttaaatgaggttataagagtagggccctaattcaatatgattgttgtctttataagaagacaaagaaacacatcttgatcttggacttctagctccaggactttgaaaaaataaatttctgttctttttaatattagtgacagagcagaagttagctgctgcttcttacacattcatctatgtgcatggcgataacctttgcactgataagaaaacaggggcaatgctccttgaatggtttcactattaaaatggccaagaggttaagtgaattttaagaaatttttcatacagaagcatgttgtgaaaataacaatcctgtccagaaattaatttgtgggttaatatgcaggacatattagaataaagtttattgggagaaatgaagatcaactttgattctataaaaattggaaatgaagagattaattactattataaacagtatgcttcaatattcacatgttgaaagactaaccttcaatgtgactatgct

SEQ ID NO: 7188 - DNA, 586 bp, Homo sapiens
  source 1..586: mol_type = other DNA
attccaattataactgagacaatattatgacattaatacctgttgcaatgaggccagattgacataagtcaatcattataagaaaagaagtcacaatgatcaggattttatcttaaggaataagcttgcagaaaatcctttcactggagactgagaggctgtcattcaggacctggaagagagtacccaacttcctcattcggaatttatctacataggttattaagctactcaatgaaatattttgaccaaatgtttatgaaaaatttttctgttttatttaattattctgcttttttattttaatttcaagatcttttctatcctgatagagaagaatttctatcaatagaaaggatttcaggaacctttctctatcctgattcattgtataaaaggtaattagcacgttctctcctttttataactttataattgaaatctcattaaaagctttcaatgtgactaattccaggcaaagactagaaaaagtgcttttttaggttgcatttaacctcgtaaaataaagaaaggaaaaaaaaagcttcaatgtctttttacagtcatgggaaatgggaggaggtgg

SEQ ID NO: 7189 - DNA, 438 bp, Homo sapiens
  source 1..438: mol_type = other DNA
gcttttttaggttgcatttaacctcgtaaaataaagaaaggaaaaaaaaagcttcaatgtctttttacagtcatgggaaatgggaggaggtggttattagagagaagctcttcctctcttgaagctgccaggctcgctccttgcttcctgcatcccgccaggcgaaacgctccaaaagcatcctgcagcctgcggcggcttccctcctctggcccggccccgctgctcgcgcccggcgcaacccccccgccaccgcgccccagcaaaccggctccccgggcccgcctcgccaagctgcgttccgcgcctcacgcagaaagggaatttgcagcggagctgggaccggagacccgcggcccccgcgcagcgatgggtctgatctgagccccagcctctccccctgcccagcagtgacacggctttgcgaaggaggtttcc

SEQ ID NO: 7190 - DNA, 496 bp, Homo sapiens
  source 1..496: mol_type = other DNA
caacaatttattgtacttagtgcagtggagtgatctcggctaactgcaacctccgccttattgtacatttttaaatgactaaaataactggattgtttgaaacacaaaggataaatgattacacattaaaatatctcatgtaccctataaatatgtacacctactatgtacccgcaaacattaaaaattaaaatatttttaaaaaattaattaattaatcaaattccattctaagtttaaatgctttgaagctcagcatcccggggttcttatccgtgggattatacactgaaaaagcttagcacagtattattactattatgctatctacattatattataggtgaaacactacagattataatacatacaatatatactaattgtattatatattgttattttttgtcattatgctatttactattgttctatttaataactctctagataatttaacaggacaagcgcgcctcgacattgtcggctcgcgcag

SEQ ID NO: 7191 - DNA, 487 bp, Homo sapiens
  source 1..487: mol_type = other DNA
cttattgtacatttttaaatgactaaaataactggattgtttgaaacacaaaggataaatgattacacattaaaatatctcatgtaccctataaatatgtacacctactatgtacccgcaaacattaaaaattaaaatatttttaaaaaattaattaattaatcaaattccattctaagtttaaatgctttgaagctcagcatcccggggttcttatccgtgggattatacactgaaaaagcttagcacagtattattactattatgctatctacattatattataggtgaaacactacagattataatacatacaatatatactaattgtattatatattgttattttttgtcattatgctatttactattgttctatttaataactctctagataatttaacaggacaagcgcgcctcgacattgtcggctcgcgcagcctaggctgttacatagcactgaggctacaacgattgaacgttaaaa

SEQ ID NO: 7192 - DNA, 518 bp, Homo sapiens
  source 1..518: mol_type = other DNA
tgtaaacatatttttcaaaattaaaagcactttagaaataagaaatattaaatgattgatatgttgctatcatggataatcctcaggctcatggatcttttcactgagctgtcctaatattatagataaaaataattcctgcactaagaagtgaaacaataaatttctaaaatgtcaggcatttgttactaaattgtaaaaggatcacaaacaagtggaaacttctacaccaggtttactttaaacactttggcttttctgagaaatgagagtaaaatttacagtccttgcaaaaacgtgaactataaattagggttattctatcatcggtcatgacatgctgtttccatgtgcacatctgcaaagatgatttcattacattttttcttattctccaggagccttacatatgcagctataactttgtatacaaatgtggcagtcttcgcaggcttgaactgcctggcatgcatgttttatctaagaaaagaagcactggctcgtgattatcacttact

SEQ ID NO: 7193 - DNA, 522 bp, Homo sapiens
  source 1..522: mol_type = other DNA
tgcttcagttttaaatgttaaattatttaaaattacgtaaaacaaaaaattcatggtctcagttacagtattcaactgttcgatagccacatgtggccagtggctaccgttagggaacggggagctcacggacctcatgaagataagccaattcacagtgtaacagtctagttactttccgtatgttcagtgaacattattcacgttttcttatgaatctattgatttggatttagaaaaataaactgaagaccttcctgacaggtaaacttctgggtctgcacttttcagagcatgtaaagctctttcaatagatagagatttatccaatttaaattcttgtggctcaaaatccgctaagctcccaccgaaactcggtagttgtctttccgcagctgcttcagccagccccagcaagcccgagcgcccggcgccgccgccaccttccccgcccctgcgcggcgcggctgggactggcccagaggcgtggccgggggcggaagttcccgcgggcggtgggga

SEQ ID NO: 7194 - DNA, 463 bp, Homo sapiens
  source 1..463: mol_type = other DNA
gtcaatattttggaggaaaaaaattttacatgaactagcttactttatatttacccacttagaaagtgtttcaacacttaaagacaaatacaaatggaatgggttttctcttttttcgtttaacggtttcaaaaaatatgtagaagggaaatatttcatttcccttggacgctcaactgtatatatttcaagtcaaactgcaggcttaaattttttacaaggtgtgtcaacgttttatcaatttctgaaaacgacattatatcatctagttcttcaaaccaggaggttttctggaaaccttcgcagcggacggggcttgggaagcgcacccctgtacccgggctgcctccggcccgcaccccgccgctcgctccgcactccgcacacaggcggcggcgctggggccgctccaagtgcgttccgctaagtacttggctctcagtctccaatcactagtgggagc

SEQ ID NO: 7195 - DNA, 426 bp, Homo sapiens
  source 1..426: mol_type = other DNA
gaatgcaatgatatatagatttttaataatcttcaagtttttgagatggagtctcactctgtcacccaggctgaagtgccatggtgtgagcctcccgagtagctgggaggctccaaataatcttcaagttttatggatatattttaggttaattcagaaaaaataaatgtatactttaatctattaaatataagaatatagaacatagttctaaacacaaacctgttcatgctgggttttttttccctggagtacagtcctcccgagtagctggaattacagggagccactgctcccagctgcaatggttcccatgggtgaaatccaacatttctttttcagtttttatttgctaagaggaaagaacaataacagactcattgaaaaacatttttttttcgagatgatttcggagttttcagatgc

SEQ ID NO: 7196 - DNA, 335 bp, Homo sapiens
  source 1..335: mol_type = other DNA
aatgaacttacgttgacatatttttttgtgaccaattacttagtcactgcagcctttctcattgagaagcaatattaaaaaaattacaaaactgctttcctgtgtcatttggattcataatgtgtcataattaagttttataaagcttgattgactgacatttagatatgacttttataaggccgaaacaaaggcagtatttcctttcttgacctacctgaggaaagctgtatttcttcagacaaacttaatagcctgatttgggcctcagtttccaggcaagcatccacagctttgtctgagcaaatttataaccattggctctaagtaattag

SEQ ID NO: 7197 - DNA, 554 bp, Homo sapiens
  source 1..554: mol_type = other DNA
ctggcgctgacaaccccaggacagcagccggctggggcagtgcaaaagcttcatgccttctaccggcttcgtcaaccgcgagacccgaagtcgtagaccgagtccagtcctagggaattcggctgaggctttgccggcgcggcgaagggcggcaggctgagctccactggacacagcctagtggcccggggcgcgcccgctgcactcccggcgtccaggtctggcgcaccgcgggaggcaggcgcgctgccactctccgcagccgctcagcgggcaaacccacagctggtacataaggcgggcgggcgtgctcccgcccccggttaccccctacgcctccttggcgagcgccttcgcgcacccgtgcgccctagagcgacagccgggacatctctccgccggcgtgcccacccccacccccggtgtctgtgtgtgttcctcacaggcgaggggacttcggcgtgcggcggagctgcggctgctcctgctgctggggggagcggcggaggtggccgccttgcgcctccctggacttcccaagtgggggcagagca

SEQ ID NO: 7198 - DNA, 230 bp, Homo sapiens
  source 1..230: mol_type = other DNA
ttaaatattgatgaatcagtattggaaccacttaaaaaagttcgggacctaagtagttaccgggaccccaagggcctgccttcttcaaggcgcgccgggttccggggctgctcggtgcgcatgctccgagggctcggcccaggaaggctagagactgggcccgcctcctccccagagactgggcccgcctcctccccaggcttccgggcggagagaagtgggcgggattt

SEQ ID NO: 7199 - DNA, 487 bp, Homo sapiens
  source 1..487: mol_type = other DNA
ttcttacacacactattagaaatttgaaaaacatgttataggactggcgctgacaaccccaggacagcagccggctggggcagtgcaaaagcttcatgccttctaccggcttcgtcaaccgcgagacccgaagtcgtagaccgagtccagtcctagggaattcggctgaggctttgccggcgcggcgaagggcggcaggctgagctccactggacacagcctagtggcccggggcgcgcccgctgcactcccggcgtccaggtctggcgcaccgcgggaggcaggcgcgctgccactctccgcagccgctcagcgggcaaacccacagctggtacataaggcgggcgggcgtgctcccgcccccggttaccccctacgcctccttggcgagcgccttcgcgcacccgtgcgccctagagcgacagccgggacatctctccgccggcgtgcccacccccacccccggtgtctgtgtgtgttcctcaca

SEQ ID NO: 7200 - DNA, 321 bp, Homo sapiens
  source 1..321: mol_type = other DNA
ttacagagtatgaaaactataaaaactttctaagcctctgaggatatttataatctggacagaattcttgctagaacccaaggacaagcaaggtttcttttgcccaaggttcttaaatattgatgaatcagtattggaaccacttaaaaaagttcgggacctaagtagttaccgggaccccaagggcctgccttcttcaaggcgcgccgggttccggggctgctcggtgcgcatgctccgagggctcggcccaggaaggctagagactgggcccgcctcctccccagagactgggcccgcctcctccccaggcttccgggc

SEQ ID NO: 7201 - DNA, 606 bp, Homo sapiens
  source 1..606: mol_type = other DNA
gggaggacgccctcagtgggagagccctgctcaggttctccccgaggccgaggtgggagcgggcggtggccccgggatcaaaggacctccgccggtagctttggcagtgccgcagcctggggaacgtagttcctcccgctttcacagcaggatggagcccgacggcaccccggttaaagggcctttccagagccctccggggaacggaaggccgcgctcctccgggagggagaacgacagctagagcagccttaagtgtcccaatgacacgcctgctatcgagcgccctcccggcggcccctcctcagccagctgcccagcgggcgtcctcaggtgtccccaagaggcgcaggcctagtcgcctacacattccggcctgtgcggcccggtcgtcccgtaaagaaggcaagcccggctctcaggcggccgccatgaagatcctctgccgcggctgcagccggtctagcctcgctcgccacagagggagggggctcgtgggctgcgagtcggggccggagctcttcaggccggctcccgcgcctccgccgcccgcccgctcggagccgcgcccgccgcaggctgcgcccgccagtcccgccccgcccc

SEQ ID NO: 7202 - DNA, 597 bp, Homo sapiens
  source 1..597: mol_type = other DNA
tgcgcctggggaacgtagttcctcccgctttcacagcaggatggagcccgacggcaccccggttaaagggcctttccagagccctccggggaacggaaggccgcgctcctccgggagggagaacgacagctagagcagccttaagtgtcccaatgacacgcctgctatcgagcgccctcccggcggcccctcctcagccagctgcccagcgggcgtcctcaggtgtccccaagaggcgcaggcctagtcgcctacacattccggcctgtgcggcccggtcgtcccgtaaagaaggcaagcccggctctcaggcggccgccatgaagatcctctgccgcggctgcagccggtctagcctcgctcgccacagagggagggggctcgtgggctgcgagtcggggccggagctcttcaggccggctcccgcgcctccgccgcccgcccgctcggagccgcgcccgccgcaggctgcgcccgccagtcccgccccgccccgccccgccccgccccccgccgctcgtccccgccgcggccgcgccgcctgcagcagcaccagctgctcctccccggcggccgccccccgcgggtccctccctg

SEQ ID NO: 7203 - DNA, 343 bp, Homo sapiens
  source 1..343: mol_type = other DNA
acattcatctcaagcttacaagtcgctactattaaaagaaactttgagctcttaattcagacgtttctgtgattactgaatgtaacagttaagcaatagatgatgtaaaaaaattaggtcaaatgtatatatcgttttataaaacatatttgctcttaaatctctcatatctcttcagattaactataaataagttcggtaacaacgttacagggcgcagtttcctgctaaataatttccgtgcaggtacttccccgcccgggatgaggagtctccacgacggggaaaggagctgcagatgcgagcccgcgaggcaggctccgtggtgcccgggcaccggcag

SEQ ID NO: 7204 - DNA, 398 bp, Homo sapiens
  source 1..398: mol_type = other DNA
tcacctttggttcataaataaaaaagctgagacgattaagtcactcgcctaaggagaatgagtcaacgtcaagagtcatagttgacccggccccatcagtccagggcttagtcagcggggcccggagtggctatttccgtaagatttagccctgaggtcttaatctcaggattcgtccctccccctcgtccagccggtggcaagcgggtactgcgggcggttccgtccgtcccctttcgcagaaatggcaagactctgcatcgccgcctctttttgaaactaagagaaaatgaagccttatccgccgcgttgagaaccgcgcaccctacccatcgggtgaccagtcctttttaaaaaaaatttctttaccttaaaaaaaaaaaaaaaaagcgcaacgg

SEQ ID NO: 7205 - DNA, 382 bp, Homo sapiens
  source 1..382: mol_type = other DNA
agaagacctccctggaatccgttgtggattccttcctagagttaggaggcagaccctagggcgaggatcgcatcccgggccagcacataagcgccagtgtggctaccctggaaggggtgtcgggggtggctcgcaggtcctcactcacccaaggagcgaccctcgtccctccagagctgcgccgcccccctacctaccccgcagcgacgttcggggtcagcggcgcttgggtggaaggaggcggctacgtggtgccaccgccgcccgggagcgcccgaccccgtgcgcgcgcgcgcctagccaaggcttgggcggcgggcggagctgcgggcggcgcgggcggaggagcagccggccgggcgggcggagcgagggagggcgc

SEQ ID NO: 7206 - DNA, 460 bp, Homo sapiens
  source 1..460: mol_type = other DNA
acctcaggtgatccgcccgccccaaagggctgtgattacaggcgtgggccactgcgcctggccttcattaatcacttctgatattcaggtaaaccaaaacatatgaacaggcaatggctttgagttctcatatgtgttagtcaactcaagcatccattatgtactcaataataggcacaggcagcctgcacttttcctggtgtcaacattatttaaaagcatgggaaatagtaatgagacagtgtcttcttcattagaaccttaggagtctactagattttgattgttgtgagcataacaataatttcatgaacattaaagccctgaacatttaaaactacaaaaatttaaactttgcttgatctttacatcacctttggttcataaataaaaaagctgagacgattaagtcactcgcctaaggagaatgagtcaacgtcaagagtcatagttgacccgg

SEQ ID NO: 7207 - DNA, 514 bp, Homo sapiens
  source 1..514: mol_type = other DNA
agccttttgtgatatttactgctgaagcaatcaactgggattatacaaaaaaattatttgtattgaatacctgacagttgtgttactattactagcactagggagggcagatgtgaatcccagcccaccgtccaacgcagaggagcgcagcgccctctctagcctcctgcgggtgagacgactgtcttatctgactgtaggcaccgccgcgagagggcggctcctcaccgtcaggcgccggcaggtcgcgttctctgctggccgacgcccgaaggcgccgaatgggggggccctgccgagctcccttacagccccaatgtgcgcgccgccgggaggcttgggcacgcaggcaccgccggcggggggcggggcgaagccggcggggcggggcaccagctgcgcgcgcggggcgggggcggggccggggcggggcgcgctgcgtggtcccggccggccctggctcctccccctcccgcgcccaggccagcggcgggcccagctcctcccccgactc

SEQ ID NO: 7208 - DNA, 340 bp, Homo sapiens
  source 1..340: mol_type = other DNA
gtgatcccaactactcaggaggctgaggcacgagaatcacttgaaaggttgcagtgacccgagatcgcgccactgcactccagcctgggcgacagtgcgagagaaagagtaaaccgacaaatactacattctctctctctacaaaaaactgtccaggatcaggagactttttgttctcctacccttcaggaactgctggaatgggagcttgggaagtttcagcaaactgtctccaagcacacataatgtgtattaggggagggaccggcgccgtgcagcctcgccggcgagtgcaccctggctaggcgctcgcccgtcgctgcgcggcccaccccggatg

SEQ ID NO: 7209 - DNA, 483 bp, Homo sapiens
  source 1..483: mol_type = other DNA
agccagagacccagaaccatcagggctggtttagtagctccttagcagtgactaaataggggccccctgactttttaccaagctgaataaaaatacttcaatattttgataattgatcagctctgaattttctttaaggcaagtacatgaaaagaatttgtatgtaaccacggatgaataaattatgttcaattcatacactggaatattctagagtaatgaaaataagcacagccacaggcaatgtgaatgattctcacatatacactatgattccattcataaaaaggctttgctagattaaactattggatagagaagcttaaataggagtagaaatttcctttacttcataattatttgttaattcatctttatatgggcttttctctattattttatatttttcaataaaagaaaaaagaatttaaaaaatcttggagctcactgggagcaatgaggttcatgaatggtatttattca

SEQ ID NO: 7210 - DNA, 423 bp, Homo sapiens
  source 1..423: mol_type = other DNA
ttccttttatgaataataattgtagctagcatttagtagggtgctcctacctgttaaactctatgatgagtgctttacatagattatatcatttattcactaaacagtcctttaaaatggtgctatattcactaaacagtcctttaaaatggtgctatattcactaaacagtcatttaaaatggtattattcttcttcatcttacaggtaaacatttgcctctggtacagatagaggtaatagcttagtgcctgacacacagaggggcgtatctgattctctatgaagcaccgtttggattcaaagctggaagagaaaatgattaagctttatcactttaacttaatatttaacctaatgaaaacaaaatcttatttgaaattggaaaaatcaatgtattgattgctgacagtctgtgaataa

SEQ ID NO: 7211 - DNA, 429 bp, Homo sapiens
  source 1..429: mol_type = other DNA
ccccatagtatgaataatatttggtgaagactaggtttgaaaaaattcagaaggcatcttttccaaatttcactcataacaatagattgtatttgttattgaaatatagacaaacatttcattgctttaaatgaaccaatgagttaattactgagggcttaagtggactatcaagggatttcagcaattgacagtcccttcaagattgtaatcactgccatctggatctcaaacacctggggactgagtccattttgtaaagctccccagatgaatctaatatgcatttgaatttaaaaattttgaaacttcaaaagagtctgagtagttcttgataaacacctacgcatggcactttatgaattctaatcatcacttaatctatttttgcattttctgaaaacacaggtcaccccaggctctacctgt

SEQ ID NO: 7212 - DNA, 329 bp, Homo sapiens
  source 1..329: mol_type = other DNA
gctttctttcatgaataataattgtagctaacatttaggttacaaggattatttcatttataaacagtcctttaaaatgacgccattattcatcttcatctcacagataaggggttggcctggtcccacaagccatgccagtgcctgacacgcacagtgatcccctttgtctctgctgtaaagacaaagaggctgctctctcgaaaagagaaagtgattacaatttatcactttaacttaatatttaaactaatgaaaacaaaatcttatctagaatttggaagtcaatattttgatttggatgttacacaagcaaacaaaataaatat

SEQ ID NO: 7213 - DNA, 213 bp, Homo sapiens
  source 1..213: mol_type = other DNA
taacactcactgtgaaggtctgcagcttcactcctgaagtcagtgagctgcctctcagcagaggtaagagtctaaagaggagagtgctgtatcaaacacactcctctccatgtggattcaaaattgcagcttgaactctgaataagaaagtaattaaaatgtatcgttttaacttaatatttaaccgaatgatagcaaaatcttatctgaaat

SEQ ID NO: 7214 - DNA, 356 bp, Homo sapiens
  source 1..356: mol_type = other DNA
cacttaacaaaagtaaaatatcctttgtgtaaagttttctatctggtgtaccaaatagatccagaagcttctggagccattgcaacttatattaagaaataatggtctgtaatggttaacagatagccagtatgcaggctggataatttctctaagtgcagacacagaaagtttcacttaactttctacactaagacatccatattgatattttatatcttttcatttatatttaattccagaaaccacatcatctctaaaatcagccatgcctaggcaatgtcccgtttttatatccttcaaaataaggtggataggaatgctttcagcccttttcaatttgcagaccattgcaa

SEQ ID NO: 7215 - DNA, 554 bp, Homo sapiens
  source 1..554: mol_type = other DNA
atactggagttcttcagcactactgctaaagcaatggtgctcaagccaaatcaactggcaatggtttttcctggtggatttgatttggttaatgagttgtagtaacaaattctaattacaaattctgaatttgacataatatatgttaaattggatgtacatttactatgttatattgaaagagagatgtgtggaaaaaatgtatacttatttttgaaaagaaacttttgtttgtatctgaaaaataaactcttagcaaatttctctgggttgttaagagtccaggttctggacttcatagcttgaacctggatcacttaacaaaagtaaaatatcctttgtgtaaagttttctatctggtgtaccaaatagatccagaagcttctggagccattgcaacttatattaagaaataatggtctgtaatggttaacagatagccagtatgcaggctggataatttctctaagtgcagacacagaaagtttcacttaactttctacactaagacatccatattgatattttatatcttttcatttatatttaattcc

SEQ ID NO: 7216 - DNA, 536 bp, Homo sapiens
  source 1..536: mol_type = other DNA
gccaaggtccataatgatgcttcataaagcttccataccaaccctagatggttgaactcttccatgtgaggaagaaatacacatctatcttacttagaacactatttctgatctctgttattagctgtgtaataaagtttctcaactgatacaaagtgaattaccttagaaagtcaattagacaattaaacctttaattcaacaaattaggctctatccttaaattgtctatattgctcttagagattgtaattcagaaattcaaaatcatgtgtattctgaaaagtcttgtgatctaattaacatttcaatattttttcatggctattgaacatgtcatcaagaaactcctaagcatgtatttggattaagctatatttggttatatcataattgttctttaagcagaattgtgggaaaaattataaatttgatttatattgctctctgttttatttaactctattatatgtccaaaattgaggaaagccatttgtggccacatggttttgtcttagatttttctaaggaatgtt

SEQ ID NO: 7217 - DNA, 499 bp, Homo sapiens
  source 1..499: mol_type = other DNA
taaatagaaaatgacaatctacggggttgtatttcatttctctctcagttgacatgatctatatatagcaaaagattatataaggtcaagtattataaacaatgaaatgtcatctgatgttttgcaaaacagaagagtaaagctatggctgttttacttcagccataaaaaagccttacagattctaaatttaaatgcattttattgtgaatctgactcactttttgaatttaattttccacttgagttatgtaaaatcatgtgatatggtaattttctgtataaattaaaaataatataggcaagagatgtttttctctcattttcaacacagaaaaattaggagcctttcttcgttgttttgcattattccttcatccaatactcacaagaatatatgaatgaatacacgtctgcaggtacacacttagcgggttcgaaatggcccagaaaggctttctttctgcaaaggggcgcgtgccatgcagccccctactag

SEQ ID NO: 7218 - DNA, 682 bp, Homo sapiens
  source 1..682: mol_type = other DNA
acagtgttatagctgatacagtgtttcaagtaaaatttaagggcttatggcaagagtgactttagttttgtaactaaagtcaaagaaatttcggctcttttagagaatctcaaattctggatttaattttctattcactgaagcctttaaacatgttcaaatatcttcaaggataatttacttcaaaattctttctatatgagaagccagtcttctattcaagtcacctattagaataaatagaaaatgacaatctacggggttgtatttcatttctctctcagttgacatgatctatatatagcaaaagattatataaggtcaagtattataaacaatgaaatgtcatctgatgttttgcaaaacagaagagtaaagctatggctgttttacttcagccataaaaaagccttacagattctaaatttaaatgcattttattgtgaatctgactcactttttgaatttaattttccacttgagttatgtaaaatcatgtgatatggtaattttctgtataaattaaaaataatataggcaagagatgtttttctctcattttcaacacagaaaaattaggagcctttcttcgttgttttgcattattccttcatccaatactcacaagaatatatgaatgaatacacgtctgcaggtacacacttagcgggttcgaaatggc

SEQ ID NO: 7219 - DNA, 498 bp, Homo sapiens
  source 1..498: mol_type = other DNA
tggccttagccatactagggtatttgctttaattctacagaagttttctaattaatattctgtagcaaaagaactaagatctggatctcttgcctgtttgggaactcagacaaatgtgtgttgtcacagacacaaaattgatctatgtttcatgaaagttctatctactttaacattattttgaagtgatgtggtggtatgaattaacagtttaaatttaaatcctaaaattcagtgtgaattttttataatagcataaaaattcaaagatgtccatacaagaaaaattaaaatttggttaggtttagcagagtttgagaatccttactaccctcccacatagtattgtaatgtgaatataggcagttactattacaggcataatgatgattatgtattaagcagaaagaagtattctcaaaagtgaaaacatttaaagtttcctcattgggtgaaatcattaatagtgagcgaacttaggtctttccccaaagataa

SEQ ID NO: 7220 - DNA, 455 bp, Homo sapiens
  source 1..455: mol_type = other DNA
gactcagtgccctgcaggcctggaattcagccagcgtaaccgaatcatgaggctgcagctctttttagtgaccataatgaaaagtttgcttaaagtgttaagtttaggtcttacagtaaggattctaggagagattcttctattttgaaccaaacaggtcgtgtttcatagtattctattcttatgaaaagttttactaccaaaactcatctgatttggctctccaaagaaaaagaaatgcatagattttgaggcaaatataaggctaccatatgtaccagggagactttgaaatatttccagagtgtccttaattcatgcgaaatgcgtgaaaaatttgaattttatttaagagctgtgaggaaagaataatttcatacttgctagacatcgctataatagattacatctgatttgaattagccttctctcgccccatccaggaaagggacaag

SEQ ID NO: 7221 - DNA, 480 bp, Homo sapiens
  source 1..480: mol_type = other DNA
taatcaaggctccagcacttatgattatgaaactccaattcttatctataaatgggaataatagttgttctttcataatgagcaaaaatatgtaaaggatttaccccgcatgcctaccttggccaggaggagaaacagctggccaccctctgagtattaatctgtggcgtctatggaaagcctgacacaaaatttcaggtagtcagaaaatctgaactgttccttttgaataacatatttatttatcttattatgccactgtgtggatactgaacactttcagggaatgctaagaaactttctctgcagagataaaaataatgatactgagtcattgcctttgttactctttgaattcccatataaagttatcaactaagttctagcaagtatgcctgcttaatatggtttaatgctggtgttgagaaggtaggcaatcactgagttcatctgttaaaaaaatgactgtagtcatattaa

SEQ ID NO: 7222 - DNA, 289 bp, Homo sapiens
  source 1..289: mol_type = other DNA
ccgtgcgtggctcatgcctataaggagtgtatcacctgagggtgaaaccctgtgcagtgatctcaggtcatgccattacacatatgccccattaggtgggcaccagaatgttctgtggaggaaacaataattgtctctgaatcatccctattcggagcattgaggatataacatcaaacttcagggtcgaatttgtggcatctagggtttggccagaggtagctacctaagtttgcatacttcactcctgccagtgcctccaggccagggtggtggtgtttcacttcct

SEQ ID NO: 7223 - DNA, 414 bp, Homo sapiens
  source 1..414: mol_type = other DNA
cttaaaccacacatgtgctctcttaacattattggaataatgtattaacactgctatataaatcatcctaatatatattatgtatgtgtgcaggatagcttcagcaaccctgggtatttgtttctaaaaagtcacattatttcaaagttaaaagggaacttaaaagtgacttagaataactttccttctaatataagaatcttttttaccaataacaatacattccaaaaataagcctggtgtagtggtgcatgcttgttgcagtgaggtgagatcatgccactgcactccagcctgggtaatgataaaaccaatgagaagtcattctgctctttattatcacacatttgtgtcccacaaattaagtcataaggtcataattctcattaatgggattcatgtcttataaaagag

SEQ ID NO: 7224 - DNA, 392 bp, Homo sapiens
  source 1..392: mol_type = other DNA
taaagaagcttttcactcgatgcagcctcaaaccctgggctcaagggatcctcctgcctcagcctcccgagtacctggtgcacgccacgttcggataattcttaattattattattatttgtagagatgttttttcaattattatttattacatgagaccttactaatttttaaaaattctgatgtaaaaaggtcagaaacctgtggacctggtaaatgtcttgtaacaggcccgtgacacaaggcgcaggcgcaagacgcggcccgcggtgggcgggggaggggcggggcgcgtgcggggcgggggggaggggaggggcgcggccgccggacgcgccctcgcagcttccgccgggcccctccggaaatcccgtatcgtagggcgacggcgg

SEQ ID NO: 7225 - DNA, 524 bp, Homo sapiens
  source 1..524: mol_type = other DNA
gtttagttttaacttttattatggaaagttttaagcacacaatgagtattattaaaaagcaaatccttgataagaattattttttacactcattgttcacatttacttttgcctgaaatgtatatattacagtatcctctagtgaaaatcttttagtgataaattttctatttgttggaaaatgtaaattagtgcataactcaagttagcaatttgagaattaaacaggaagtctaaatttctgttactttgttttggtaatctgcagtgtcacatgatatgacaaataaaattatgtcataaataattgaatgattataatctcaagttactagctttaacttaacattctacttctagatggtgattagtgttctgtaaacagttaagtacttctatggtgaatctttttggagaacacacttcataatttgtctgctttaaaactgtgtatgtacgttgatgtaaacaggcatagtgtactttatctttctacagcactattggaaataattatgaaaaat

SEQ ID NO: 7226 - DNA, 585 bp, Homo sapiens
  source 1..585: mol_type = other DNA
acagtttgtcatgtttttttttaaaaaatttgcacatagcaaacaagtcaaaagtttgctttctacacagcgttgcaagctacaaattaaactgctttgtactttggatagctctaacgtgtcccggaagtgctgagactgcttgaggggcccagaggcggaacctccaagtcctcctggcctgagctgcgagggcctcgcctggaggtcacagggcacggcgctaccaatgccggcaatcgggtcccgggcggaacccctccccgcgatgggcagcccggctgctaccgcctcccgggcaggtccgcttcgagcctgctggcgccgtgcgcggaccaccgagtcagctcggacgccccggcccaggaggttggtcctgggccgggacggatgcggatcgcgccctaggggcccgcggggggcggggaggccgccgtgaggaggcggagctgcgaggcccgcccgtccgcccgggccgtcgcagccgctgccgcggtcccctgcgctcctccccgctgccgccgcacgcccccagccggtcccgcctcgcctcctccgcggcggcggcttccgcccttcttagct

SEQ ID NO: 7227 - DNA, 556 bp, Homo sapiens
  source 1..556: mol_type = other DNA
tatgacagtttgtcatgtttttttttaaaaaatttgcacatagcaaacaagtcaaaagtttgctttctacacagcgttgcaagctacaaattaaactgctttgtactttggatagctctaacgtgtcccggaagtgctgagactgcttgaggggcccagaggcggaacctccaagtcctcctggcctgagctgcgagggcctcgcctggaggtcacagggcacggcgctaccaatgccggcaatcgggtcccgggcggaacccctccccgcgatgggcagcccggctgctaccgcctcccgggcaggtccgcttcgagcctgctggcgccgtgcgcggaccaccgagtcagctcggacgccccggcccaggaggttggtcctgggccgggacggatgcggatcgcgccctaggggcccgcggggggcggggaggccgccgtgaggaggcggagctgcgaggcccgcccgtccgcccgggccgtcgcagccgctgccgcggtcccctgcgctcctccccgctgccgccgcacgcccccagccggtcccgcctcgcct

SEQ ID NO: 7228 - DNA, 520 bp, Homo sapiens
  source 1..520: mol_type = other DNA
aagttgttaagtactcagtaacatcattggggatatactatctccattttatcgaagagaagcagggtttcttatgacagtttgtcatgtttttttttaaaaaatttgcacatagcaaacaagtcaaaagtttgctttctacacagcgttgcaagctacaaattaaactgctttgtactttggatagctctaacgtgtcccggaagtgctgagactgcttgaggggcccagaggcggaacctccaagtcctcctggcctgagctgcgagggcctcgcctggaggtcacagggcacggcgctaccaatgccggcaatcgggtcccgggcggaacccctccccgcgatgggcagcccggctgctaccgcctcccgggcaggtccgcttcgagcctgctggcgccgtgcgcggaccaccgagtcagctcggacgccccggcccaggaggttggtcctgggccgggacggatgcggatcgcgccctaggggcccgcggggggcggggaggccgccgtgaggagg

SEQ ID NO: 7229 - DNA, 325 bp, Homo sapiens
  source 1..325: mol_type = other DNA
atttgtcatgtggcaaaaagaaaagttacaacccattgatgtgtagtctccaaaaaatatggtttatgatttgactcctctcactggacgcgttcgcgccacctgtcagacgggaggagggtgtccggggccccggaaagcggctgcgggtcgcaggtctccgcccgagaggcgctgggataccgaggagacttcacgtggtctctagagccctgctaggggacccgggacgctaccgcgcgcccctcccctgacgtgatcgcagccggctggtaactgcgctcctgccggcttgagacgcgtcccgagggcgggtggcagccat

SEQ ID NO: 7230 - DNA, 184 bp, Homo sapiens
  source 1..184: mol_type = other DNA
ttcctgtgcaggaccgcacggagccctcacagggattatctgctgatccccagcagaatataaaactcttaattagcccttaaagcttcccgctgccgggagcagcctgagtgtgaaagcgcggacgctcggagtcgtgcacccggaattgcggtcccagtactccctgtggctaggctcgggc

SEQ ID NO: 7231 - DNA, 430 bp, Homo sapiens
  source 1..430: mol_type = other DNA
aatctacaccgattcattgacaatgttgtccagtaaagcctcatgaggtcattggcacacacggggcttgtacccttatcaccacgtttccagcctggttggcattccagtcttaaaggtgtgatggcatttccattcatgaggtgttataagtaattgttccttattcatcatcaaagttctttagtaaaaaccaggagtgaccaatagacattcacatgtctttgcttaattctattaaaaaagactgaaaaacttctataatctatttaatacaatttttcacttatatccaaaatggctttcaagttggaaagagaaaagttatagctgctaaatgaggcccctttataaccacttcaaagctcaagaaggatctgtttctgttcaaaaccagtcccgacctttctgtcccaaagggagttaagta

SEQ ID NO: 7232 - DNA, 399 bp, Homo sapiens
  source 1..399: mol_type = other DNA
ggtagagcccttctcctcctggccacctgagcagggactggtccgtagaggcggcaggcccgctggtccggcagctggaagcggggaggccgccacctggcgaactccggcgtcggggcgggagcggtgttggcggcggcggcggcggcggcgctcgaggcgagcgcgggcgatcgcggcggcgggacgtctccggcggccgcggcaccagcggcggcgctctgtgtggagaagcaggggcagcggcagcagcaacagcggcagcggcagcagcagcggcagcagcggcggccgcctctccgccgccggggacgccaaggtgcggctggtggcactgacatcggcggccctgccaccacacacgcgcagcccggagcgagtcggcggggctggcggcag

SEQ ID NO: 7233 - DNA, 429 bp, Homo sapiens
  source 1..429: mol_type = other DNA
cggcagctgcgccgcgggcgccgagctcccagcgtgggccacgcacaaggcacgcttgccaaagaggcggtggcgtggtagagcccttctcctcctggccacctgagcagggactggtccgtagaggcggcaggcccgctggtccggcagctggaagcggggaggccgccacctggcgaactccggcgtcggggcgggagcggtgttggcggcggcggcggcggcggcgctcgaggcgagcgcgggcgatcgcggcggcgggacgtctccggcggccgcggcaccagcggcggcgctctgtgtggagaagcaggggcagcggcagcagcaacagcggcagcggcagcagcagcggcagcagcggcggccgcctctccgccgccggggacgccaaggtgcggctggtggcactgacatcggcggccctgc

SEQ ID NO: 7234 - DNA, 350 bp, Homo sapiens
  source 1..350: mol_type = other DNA
cctcggttctcctcggagacccgcagggctgcccgaggtagctccgagttgccctgggtcagcgccccgccgctcggtgtgcacgcctgggtgggacaccctggacagctgcggcagcgacggcagctgcgccgcgggcgccgagctcccagcctcgtgggccacgcacaaggcacgcttgccaaagaggcggtggcgtggtagagcccttctcctcctggccacctgagcagggactggtccgtagaggcggcaggcccgctggtccggcagctggaagcggggaggccgccacctggcgaactccggcgtcggggcgggagcggtgttggcggcggcggcggcggcgg

SEQ ID NO: 7235 - DNA, 552 bp, Homo sapiens
  source 1..552: mol_type = other DNA
ttttgttccattatataaagttcagaaaatcaacataaaattaataatgatgttaaccagataaatacaatacaatctataattgttttcaagttttttggacatttcgcatacttctccaagttttctacattatgttataaagttctaataagttcatttatgtgaaaaaattaactttttttgatacttgatatttatattattactaaaaagcacttcatccgagagaaagtttcaaagaaagccttccttttataggaagaggatttaaactatgtattattaccaaattgatattcaaaaaatatattcaacttcaaaaaacaaaatttagagccataaataattttttactgggtctatgagtaagaaatacattttatatggaattttaaatcacttttcaatttatgaacctagcctagaaagtctgtgtaaaatgaaatattttaaaagttacagtattatctgtatcttcatttctatatgtatgtatctacacttcctctgggcgcccagcagagcggagccctggccttgcgggcatga

SEQ ID NO: 7236 - DNA, 316 bp, Homo sapiens
  source 1..316: mol_type = other DNA
aggaagggccggcttgggcagtgctggctcagctagcccgccaccgcctctttctcctctgattttaagaagtgagaaaaaaaagcaatttcgggaccccgacgggaatgagcagcgcccgcggagggaaggccggcggtcctgcgccccggcgtggacgcgcgcgggagttcatacggaggcggggacagggccctcctccccttatttgtaaagagcgccggagcggatcgcggagtttcaccgcggatggagggtcccctttaaacgcgcaatccccaggactccggaagagcccttttctgttgcaaacccg

SEQ ID NO: 7237 - DNA, 359 bp, Homo sapiens
  source 1..359: mol_type = other DNA
aagtctcaagattagccatctaacagtgaagcatggtttcactttacacttgaaaggaagggccggcttgggcagtgctggctcagctagcccgccaccgcctctttctcctctgattttaagaagtgagaaaaaaaagcaatttcgggaccccgacgggaatgagcagcgcccgcggagggaaggccggcggtcctgcgccccggcgtggacgcgcgcgggagttcatacggaggcggggacagggccctcctccccttatttgtaaagagcgccggagcggatcgcggagtttcaccgcggatggagggtcccctttaaacgcgcaatccccaggactccggaagagcccttttctg

SEQ ID NO: 7238 - DNA, 395 bp, Homo sapiens
  source 1..395: mol_type = other DNA
catcaatcaatatgtgtaagatgtacattgtcttttactcaatagacagtttagatctgcattttttgcataaacgatggagaagagaaagcaatcagatatgcatttgtctcaggtgagcctcagaagtctcaagattagccatctaacagtgaagcatggtttcactttacacttgaaaggaagggccggcttgggcagtgctggctcagctagcccgccaccgcctctttctcctctgattttaagaagtgagaaaaaaaagcaatttcgggaccccgacgggaatgagcagcgcccgcggagggaaggccggcggtcctgcgccccggcgtggacgcgcgcgggagttcatacggaggcggggacagggccctcctccccttatttgtaaa

SEQ ID NO: 7239 - DNA, 586 bp, Homo sapiens
  source 1..586: mol_type = other DNA
gctctaaaatatatatttcggctcaagcctaaagcagctcagatgccagtgaatggtggccactgggaggcctgtcagtgggtgccagtagtccactataattctatccacagtaattatcataaaatactttactgggcacaagtcgtttataaatagacacgcttaaatggaatatacagatgagctttatttttatatctggcatggatccatgccgaccctccagctgccggtgcccttagggtcagcggcactgccaccgccgccgcctccgtgctgcctgcgttccccgaccattgattgggcccggcaggcgcttcctgggggcttccctaccggctccagcccttgggattcgggagcgccctgctaggaagccagagccccgcaggggccgcggcgtccaggccgcctaacgcgcgcccctcgcccggcgccccgaagcggccccgaggggcgggagccgaggcgagcggcaaggccgggccgggggcgcacagcgcccctagaagtgcgggcttcccccacccccctacctcccgcccccgctgcgtgcgcgcgtgttcagtgggaatttccagcc

SEQ ID NO: 7240 - DNA, 610 bp, Homo sapiens
  source 1..610: mol_type = other DNA
ctaaagcagctcagatgccagtgaatggtggccactgggaggcctgtcagtgggtgccagtagtccactataattctatccacagtaattatcataaaatactttactgggcacaagtcgtttataaatagacacgcttaaatggaatatacagatgagctttatttttatatctggcatggatccatgccgaccctccagctgccggtgcccttagggtcagcggcactgccaccgccgccgcctccgtgctgcctgcgttccccgaccattgattgggcccggcaggcgcttcctgggggcttccctaccggctccagcccttgggattcgggagcgccctgctaggaagccagagccccgcaggggccgcggcgtccaggccgcctaacgcgcgcccctcgcccggcgccccgaagcggccccgaggggcgggagccgaggcgagcggcaaggccgggccgggggcgcacagcgcccctagaagtgcgggcttcccccacccccctacctcccgcccccgctgcgtgcgcgcgtgttcagtgggaatttccagccgaggtttcgccaccggagcggcccggcgacgcgctgacagcttcccctgccc

SEQ ID NO: 7241 - DNA, 800 bp, Homo sapiens
  source 1..800: mol_type = other DNA
actgccaccgccgccgcctccgtgctgcctgcgttccccgaccattgattgggcccggcaggcgcttcctgggggcttccctaccggctccagcccttgggattcgggagcgccctgctaggaagccagagccccgcaggggccgcggcgtccaggccgcctaacgcgcgcccctcgcccggcgccccgaagcggccccgaggggcgggagccgaggcgagcggcaaggccgggccgggggcgcacagcgcccctagaagtgcgggcttcccccacccccctacctcccgcccccgctgcgtgcgcgcgtgttcagtgggaatttccagccgaggtttcgccaccggagcggcccggcgacgcgctgacagcttcccctgcccttcccgtcggtcgggccgccagccgccgcagccctcggcctgcacgcagccaccggccccgctcccggagcccagcgccgccgaggccgcagccgcccggccagtaaggcggcgccgccgcccggccaccgcgcgccctgcgcttccctccgcccgcgctgcggccatggcgcggcgctgactggcctggcccggccccgccgcgctcccgctcgccccgacccgcactcgggcccgcccgggctccggcctgccgccgcctcttccttctccagccggcaggcccgcgccgcttaggagggagagcccacccgcgccaggaggccgaacgcggactcgccacccgggtaagccaaactcgggcgagtgggggcccggcaggggacgcgtggcccaagtcctgccgcccagccctcc

SEQ ID NO: 7242 - DNA, 369 bp, Homo sapiens
  source 1..369: mol_type = other DNA
ttatgcaatgtaaaattccgtctcctattgcaaaaatgggactcaggtagaccatttgactacaagacccgaaataagtcaattatgtttactcattttatacttataacaccttgaaaactgattttaaactcagctgcgcgcctagtgcaggttccagaacctcagaaacctccgtggggctttatgaaacaagaaccttctcccagggatattctcgggggctgcagctcccgcacccgcgacgcccggctttcagcgggtgcaggcgcagcctcctcgttcccctcccgcccgcggctgcgcccggagagcgctcagctgacctaggggcggggccggggcggggacctaaagcctcggctactt

SEQ ID NO: 7243 - DNA, 413 bp, Homo sapiens
  source 1..413: mol_type = other DNA
ccccggacgtgggaagcaagccgtctggcttcggcctcacggcctatccgtgagccccgtagggccggggaggcaccagctgccgcgcggggaggaggccgaggccgcagcttgagggaggccccggcccctctgtacgcgtgggtccggcccagtggccggccgggtaagaggggctgggcggcggaagccgcggcctctcctgctggaggaggagggggaatgggcgcgtcctcgcgcctaagccggagcctcagggacagcgcgggcgcgtggtggaggtggctgggcgggcgcgcgcgggagcgcgctggaagggacagaaaccgaaagcagcccggcgtccgtccggagtcgccggtatagcgccgactaggccccggctcctcctctgctgggctccggaccctgcc

SEQ ID NO: 7244 - DNA, 388 bp, Homo sapiens
  source 1..388: mol_type = other DNA
gtggcccgccccagttcgagccggtgccttactgagtcgtctcctcgataccaagatcgcgcagcggctgcccccggacgtgggaagcaagccgtctggcttcggcctcacggcctatccgtgagccccgtagggccggggaggcaccagctgccgcgcggggaggaggccgaggccgcagcttgagggaggccccggcccctctgtacgcgtgggtccggcccagtggccggccgggtaagaggggctgggcggcggaagccgcggcctctcctgctggaggaggagggggaatgggcgcgtcctcgcgcctaagccggagcctcagggacagcgcgggcgcgtggtggaggtggctgggcgggcgcgcgcgggagcgcgctggaag

SEQ ID NO: 7245 - DNA, 215 bp, Homo sapiens
  source 1..215: mol_type = other DNA
cgtgcactagacttcagcacgtgggagcgctgatggagggcaggcgagtaaatactgattgggcgcgtgagacaaggcgtctgcgcgcgcggcagtggcccgccccagttcgagccggtgccttactgagtcgtctcctcgataccaagatcgcgcagcggctgcccccggacgtgggaagcaagccgtctggcttcggcctcacggcctatccg

SEQ ID NO: 7246 - DNA, 219 bp, Homo sapiens
  source 1..219: mol_type = other DNA
taaactctacctaattaactaattagtctcaaagctaaagtttgagaatttaagcgtgcactagacttcagcacgtgggagcgctgatggagggcaggcgagtaaatactgattgggcgcgtgagacaaggcgtctgcgcgcgcggcagtggcccgccccagttcgagccggtgccttactgagtcgtctcctcgataccaagatcgcgcagcggctgc

SEQ ID NO: 7247 - DNA, 352 bp, Homo sapiens
  source 1..352: mol_type = other DNA
ttttcaaattaagtgtatttttaaaacaagtttatttttccaagtaattgaagatctccacttcggtaactggggtcattaaggaatgttaaaaaaccttaagctggtcagtgcttacccacttttaaattcccataaaaattaaggtctttcttttgcctgaaggatactaaactctacctaattaactaattagtctcaaagctaaagtttgagaatttaagcgtgcactagacttcagcacgtgggagcgctgatggagggcaggcgagtaaatactgattgggcgcgtgagacaaggcgtctgcgcgcgcggcagtggcccgccccagttcgagccggtgccttactg

SEQ ID NO: 7248 - DNA, 380 bp, Homo sapiens
  source 1..380: mol_type = other DNA
cttccagcgcgctcccgcgcgcgcccgcccagccacctccaccacgcgcccgcgctgtccctgaggctccggcttaggcgcgaggacgcgcccattccccctcctcctccagcaggagaggccgcggcttccgccgcccagcccctcttacccggccggccactgggccggacccacgcgtacagaggggccggggcctccctcaagctgcggcctcggcctcctccccgcgcggcagctggtgcctccccggccctacggggctcacggataggccgtgaggccgaagccagacggcttgcttcccacgtccgggggcagccgctgcgcgatcttggtatcgaggagacgactcagtaaggcaccggctcgaactgggg

SEQ ID NO: 7249 - DNA, 643 bp, Homo sapiens
  source 1..643: mol_type = other DNA
gttacatatattcactaaatttcataacttaagttaccgcagcgggccccgggaccctcaaatgccacctatgataggtcaattcttactcctaatttcgttactaaataaaacggtcatatacgtgttacgtgtagggtacaacccagccggtagctggggctgcctgttacatgaggccttagataacgtagcccgctttcctggtatcttgccacggaatgacaccggagacaactccgagccctggggcatcaagcacccggagactgcctcacaggcgttccccaggcagctgcgtcggcgcgcgcccaccttcctctgcgcgcggggatcacgtgccaggcgccgagctccgtcccgccccttggccctcttcccccgcttggcgaacgtgcaaggattacctgtgagcctagcgaacccggtaatgctttcagggactgggagccgcttcatatgcagggagctgcacgcaccatcctggccagcggcgtcccccgagccccctccgctctggccaagctgccgcgcctgcgccgggagcggaagcggccggcgggcactggcggcctcggcctgggcggcgggcggggcggcgggccctgggaggagaggtgacctgccgggcgccgattggcgg

SEQ ID NO: 7250 - DNA, 394 bp, Homo sapiens
  source 1..394: mol_type = other DNA
acataaagaaaaccatacataaggctttagattctttttttttttttttccaggctagagtgcagtggttcaagcgattctcctgcctcagtctcccgagtagctgggacaggcacctgccaccattcttttaccactttcccgaaggaaaaggaacctggtttagttaaaatattttaatttttatttttttaagcctggccacttttgaaaggcactttcggttagaaatctccagcatctacagacgttaaaggcgaggaggttccgaggagggcctcgctacccgccagttcccgcgcctcggcagtccgccgcgagcgtacgtcactcgcccgccgccaatcggcgcccggcaggtcacctctcctcccagggcccgccgccccgcccg

SEQ ID NO: 7251 - DNA, 293 bp, Homo sapiens
  source 1..293: mol_type = other DNA
aaaaagataatttcgtatttaagttacccaagaaggaacggtaatttggatcagatcttgtctttctaagaagtttactctattactggaaactttgggactgaaaggccaaagcttctgggtttcatgcggaaaaaaaactcacaaaggttttatactgataacagtatattaagtgtttactttgtacacagcgtccttttaagctcaactgctttttggctaaacgcctctgccggcgcggacagccaaggcccctgcgcggacgtcaccaccctgcccacctgggtggc

SEQ ID NO: 7252 - DNA, 549 bp, Homo sapiens
  source 1..549: mol_type = other DNA
gatggaacctatccaatagaacaagtcttttatccggccatttaattggtccccgcagctgagaagacacttctaagaggtacagctaaaagggggctgcccggcctgcgccgcggagtcccgaggagcctgcgctgtgctcctcctccgggaagactcggcgcctggcgctctctgggtaagctttccgggaagctttcccgggagctcgctggtcctggccccagaagcctgcggacccgcccagggaggataagcagctgaaagaccgcgcggtgccgctccgaggccccgggacgtgggcccatggtcggcctggcgccacctttccgggggaagccacgcgcaccaggcatcgcacgcggctctgcacccgcgccgccggacctgaaacccggcggagggcacacggggctgccgctgcgggccccggaccaacccatgcttactccggagcctgtaccggcgccgacgggtcggacctccctgcgcggtgtcgcccagcgggttcgtgcgaaaggcggggccgactacacgcggtgccgcgcc

SEQ ID NO: 7253 - DNA, 505 bp, Homo sapiens
  source 1..505: mol_type = other DNA
tgtgtttttaaaatcatagaaatgttattgaagaaattataagcctattaaataaatctcactgattgtcatattttagttatcgatttctttttcagtgaaagtgagtaaccaagctgaatatccccctttgattaagaggtacatctagcatttaaaatgtatttaaaccttttgttaataaattgatcacaacactgcactccagcctgggcaacagagcaagactctgtctctaagaaaaaataataataatacaacagtgtgaatgtacctaacactattgaactgtacacttaaaatggttaagatagtaaattttatattctgtatactttaccacaacttttgaagatgaaaaaataatgccctcatccttttgtcacaatatctgtgggttttagtataacacaaacaatttgagtaactttggcaaaagaaccctagttgattattcatctcttgccttcttgaacaagatgcaggtgagcacatacagctgctt

SEQ ID NO: 7254 - DNA, 387 bp, Homo sapiens
  source 1..387: mol_type = other DNA
aaagctaaaagcctttcagaagggcttacttttctatttaagaaggaggccctcctcagaaattcccacctatgctgctgcaaacaaggctatgacttttgttttccagctttgacaagtgaaaaaaggaaaccaatttatacagtacatgtacaagtagcctacagtaaaaggctcctggcattctgccactaaatgtgcattagtgttagaatattctgagcatgaaaaaataaaaatcacaactgtatctcaaacaaaaaggatttttttttttatttctctcggctccagaattttcagtgacctgtccacttggaattcatagttctacctgaattccactagatggcagcacatacatttataaagtgtatggatggagcg

SEQ ID NO: 7255 - DNA, 344 bp, Homo sapiens
  source 1..344: mol_type = other DNA
gttaattacatactattctaaaatagactgaaagacaaaagtttttgtttaagtaaagtttgaaattaaaaaatagggcagtgagttaaaaatctgatttattctttggaactaccagatggacataatagtacttcgagggtctgaagaaccacatttaaagatctaaatggtatttttttttaaagtcttcctgggtacaccaggaaatttatttaaaaccatgccattggagagcattcttcaaactgtgtgctgggctgccgggcggcagggaaaacgtggctcctctgccgaggagaagcgctggcccgcgtgcgaggggagagagagaggagagactc

SEQ ID NO: 7256 - DNA, 350 bp, Homo sapiens
  source 1..350: mol_type = other DNA
cctcttagttaataaaagtaacaaaccaggccaggatgaggtcttgtcaacccattactcaatgagtttttcagtcctctgaggaactcagatttcaactcttgctgttgaaagtttattttaaactgttggtgcagtttctttaaaaggtagtgaaaaatacatgtatctctacctagtttcgtctacaggttccaaacttttataatagtattctggtattccaggaccaccgccgcccgccttgcgtcccccgcgctgctccgcacgtggaatggcccatgacgtcacgaggccacggttttaaatttaaaggcggggcggcctgtgagccctgaagtgccggccgc

SEQ ID NO: 7257 - DNA, 595 bp, Homo sapiens
  source 1..595: mol_type = other DNA
actctgcaatactgtgcactgtataaatgtatgttgtggtcttgagagaactttatttcctggacttgaaaatcccagcactctgggaggtcaggagttccagaccagcctggccaagtcccagctactccggaggcgcagtgagccgagatcgcgccactgcactccagcctgggtgacagagagaggctgtcaactttcaaacagcttagattttaaagtgcattaacaaatgtcattcccacctgaaatgtttaagggaaaatgtactatttccttagtttgtgcaaaatctgaaatctgagtcaactttgtttcaaaatggaataaacaaagtttgattggacccactaaacattcttcttagcaacaatgcgacacttgcaaggagttccctttttcacactcttcaaagaggaaatattccgatttcgtaaaattagggcttcgcttttaaaaggttacacaatataactagtattgacttaagggtactgtgatcaccatgcagtgatccctttactatctgacgtaatatgatacttactatgactcatatgggctttgttcttcatctcatcttcaaataaaaagt

SEQ ID NO: 7258 - DNA, 450 bp, Homo sapiens
  source 1..450: mol_type = other DNA
aactttcaaacagcttagattttaaagtgcattaacaaatgtcattcccacctgaaatgtttaagggaaaatgtactatttccttagtttgtgcaaaatctgaaatctgagtcaactttgtttcaaaatggaataaacaaagtttgattggacccactaaacattcttcttagcaacaatgcgacacttgcaaggagttccctttttcacactcttcaaagaggaaatattccgatttcgtaaaattagggcttcgcttttaaaaggttacacaatataactagtattgacttaagggtactgtgatcaccatgcagtgatccctttactatctgacgtaatatgatacttactatgactcatatgggctttgttcttcatctcatcttcaaataaaaagttgatgattagaaaatccgatccgtcattcggagtcgggtctttaaaaat

SEQ ID NO: 7259 - DNA, 652 bp, Homo sapiens
  source 1..652: mol_type = other DNA
ttataaagatttcattgtgaaaacatgaaatggctgttttcctaataaggtatcaaatataattggatacctgaccaaatatttttaaatgtcttaagaaatgtcaccactgtgcttggcacatggatgaataatgattgtcattcaattagtgactaagagagttggaaagggctatcaatttcaaattggttcctttaagacatttttacgtaagatttgggagaaaagtaaaagagcaccatatgattatgctttactagactcatatttggcctatataattacattagaataaacatatttactgggaaaaaaagtcatgttttcttttttaaaaatgttctaaacagtactgtaatcaatgaatgtgctttgtgtcagacaaaggtctttgtatacaatacattacattttgtataccaatacattacattacacagaagggagtgcctggctttgtatacaatacattacattttgtataccaatacattacattacacagaagggagtgcctggctttgtatacaatacattacgttttgtataccaatacattacattacacatcagggccgttattaacaaccttgaggaaatgtcttgggaaatatttaaataatttttgtttaattataataaggaatct

SEQ ID NO: 7260 - DNA, 562 bp, Homo sapiens
  source 1..562: mol_type = other DNA
gtcgggtctttaaaaatacaggcccctaaagcactaagggcatgccctcggcacgtgcgggtacactccggaggaggtgggtgcgcgcgggggcgtgtgcgcgggaccttcttagatgtcacggggtggagacccgccgaggtccccggggttcccgagggctgcacccttccccgcgctcgccagccctggcccctactccgcgctggtccgggcgcaccactccccccgcgccactgcacggcgtgagggcagcccaggtctccactgcgcgccccgctgtacggccccaggtgccgccggcctttgtgctggacgcccggtgcggggggctaattccctgggagccggggctgagggccccagggcggcggcgcaggccggggcggagcgggaggaggcccggcggtagcggcagtggcagcggcgagagcttgggcggccgccgccgcctcctcgcgagcgccgcgcgcccgggtcccgctcgcatgcaagtcacgtccgccccctcggcgcggccgccccgagacgccggccccgctgagtgccttatgaatattga

SEQ ID NO: 7261 - DNA, 303 bp, Homo sapiens
  source 1..303: mol_type = other DNA
agaatttttcccttgagagatctcaggaaatatgaggaaaaaaaaaaattaatgaaaggcctatcactgcttttctggcactccgtctatgaaagggacagggaagaaactgaaccctgacacggggcttattttcctaagggcgttttcagtaaataattgctgaatgttcaacgcttaaaggcagaaataactttgagtgtgcacagtaatcactgaaaatgattctggcactgactccgtgggtcacctgtgagtaactcgccctggtctgcctccaggcagcagatgccctgagtgcac

SEQ ID NO: 7262 - DNA, 421 bp, Homo sapiens
  source 1..421: mol_type = other DNA
atgacacgtggcagactactggttgttctacaatatccattctcctggatgctggaactacaggcgtgtgtgccaccccgcctggccgatgcgcggtggctacgcctcccaggttattgcaaataaataatctctactgggttaggaaatggccttatggagaaggacagggtctagagcagttcctggcacagagtaatcactcaatattacatcactatactaaaaaatcatgatagtaattcttgacgggataaatgaaggcatgaataaatgtatgaattactcgctgagggcatagtgcgcacaactggtccactggcagggaccaggatcgcagcccgagcgccggggcgggagggatgactccggacggtagggggcaccggcgtgcggcccggccgagcccccaggtagctcc

SEQ ID NO: 7263 - DNA, 425 bp, Homo sapiens
  source 1..425: mol_type = other DNA
accaggtagaaagttgggatgggaagtacgtgtattagcaaacgtttttgaaaccaaagcaactttcatgcaaattaaactttctatagaagttaaaaacaagtcctttggagtaaatgttaagtagtattcacatagaactgctttctgcaatcacccagggcgggagaaaaatcaggacaccacgcagggggtcgcggaggctgagaagccggcggcccgagcgccctctttacctggtcgcagaggcgcggccaggcagggagggtgcgtgagcgtgtcggcgacctgggccgcctgcgccttcccgcccagtccgagctggaattccaaggctgcctctgggagctgctgcccgcagaccacggaccggaaaaagggaagtaacgtcacttcttcggagccggccagtgcgggaaccgttt

SEQ ID NO: 7264 - DNA, 284 bp, Homo sapiens
  source 1..284: mol_type = other DNA
aaggctctaaattgggcattcatatataaatataagtatgtgctttctcaaaaaactacttcgcaagctcttgcaaccccttccaataaacattattttaaagatgcttcaatcctttgatcaaagcatcacccctccgagattcccctagatccctcggaggaagcacagtcctcctctcccacctcgctcctggcgcgggggtctcgagcctccaggaggccaggagcagttcccggtggtcccttcggaaacggttcccgcactggccggctccgaagaag

SEQ ID NO: 7265 - DNA, 499 bp, Homo sapiens
  source 1..499: mol_type = other DNA
gtaaacattgtttttacagataagcttaggtaaaatagaaatacaccaccttctttatcaataatgtagcacacaatatattactaaagctggcattttcttgatattcaagaatttatgacaaggaatcccaaccaggtagaaagttgggatgggaagtacgtgtattagcaaacgtttttgaaaccaaagcaactttcatgcaaattaaactttctatagaagttaaaaacaagtcctttggagtaaatgttaagtagtattcacatagaactgctttctgcaatcacccagggcgggagaaaaatcaggacaccacgcagggggtcgcggaggctgagaagccggcggcccgagcgccctctttacctggtcgcagaggcgcggccaggcagggagggtgcgtgagcgtgtcggcgacctgggccgcctgcgccttcccgcccagtccgagctggaattccaaggctgcctctgggagctgctgcccgcagaccac

SEQ ID NO: 7266 - DNA, 463 bp, Homo sapiens
  source 1..463: mol_type = other DNA
atgtgataattttaaacatgtaaacatagtcatttaaatccatgataataaactgttataacacaactaagtgattcgctgtcatatttaataaacattaagctatgcgggtttttttttctttaggattgctttaagcacactcattactaaaaattgtgtttgtattacacctgaaagtatcgttttgtgaggtctcacttcaaaaataagactgaaaaggtcaatgagatttgagaatcatcatttctttttattttgtgtttttgctttaatttaaacacagctcaaacttgagcattgtttcatcatctgtgatttttaaataaaaataaatactgagtatccaattagcttttctaacaaagaataaatacttggaatgcagatattgaaaccatttagattaaaacaatattgtttgctgtgaaaattcagtaattttatttcatacttctgaagg

SEQ ID NO: 7267 - DNA, 462 bp, Homo sapiens
  source 1..462: mol_type = other DNA
gagcacagaattgcttttaaaaataaaataaaaaggtctgtgaacaagcagctgtgctttttcttggggtacaagaaagcgaatcaattgtggaattgattcgttccaagacccctcccgacagacccagtgtctctcacacaccggagcggccccggagcgcgggaggaccggctgagtgaacgcggcccgaggttgttggaacctgtcacagcacgccgccgtcaggctcgcccgagtctgaggagcggcgcagtgtgtgcgctctcacacacacatcgctgactcgcacccactctctgtgtgagcggccccgagagccctgagcagagcccgggcctccccccgggggcctggaagcttccccagtgaagagccggcgcgggagtttcccgggtaagggatgtttcgcgcgtcacctcggcgtaggtggctaaaccgcgccctcagagccgagatccc

SEQ ID NO: 7268 - DNA, 585 bp, Homo sapiens
  source 1..585: mol_type = other DNA
catgtacatcttaggataatcatgttttcatttgaacacagtcatttagtacaatactttttacaactgaacaatgattacttaaaatggtttctaagtggcaggccatccctagaggggcagtcctgtctgatagagacagaaacagtctgctcatttcttccaaatatttcttttggttagttacaaaataaaaaatatgcctttgccaactctgcgggaaaagcaaactcccagagtttgccttcgctgtaaatgcagactactgctcgcccctgcagtcaccacctgttcgggcggaacctgcggagcgtgcacctctcccagagagggttttctcccaggctggggctcgccctgcttggctaacccccaagagccactgccgtcccgcagcgcccctgcccccgagttgcctgccccgctgggcccccgggaggagcggagcgcgctcacccttcgcccggggctgggagggcggcgagtcgggcgcacgcgcaccccctgcccgcccctggcgcccctccccgcgggcggtgcagctacccctgcagcgcctcccctagctagaagggagcgggaggg

SEQ ID NO: 7269 - DNA, 458 bp, Homo sapiens
  source 1..458: mol_type = other DNA
tttgagacagagtctcactctgtcatcaaggctggagtgcagtggcatgatctcggctcactgcatccttccgagtggctgggattacaggcgcccgggccaggctggtcttgaactcctgacctcaggtgatccacccgcctcgacctcccaaagtgctaggactacaggcgtttattttcaatcagatgtctttatcatcacatagctgaaaataaataaaacactaattagcataatcagtgttctttttccactacctcttcttgaaaattcattcattcaacaaatattttgaagccccctctgtgccctcaaagaacttagagttttaaacgaaagacgccgattttatcatgaataaaatttcacatttcttcaacaggaaaatgatactaattcatttattttatatatacattctctcaagaggttatttttgtctcaaatagatagaa

SEQ ID NO: 7270 - DNA, 255 bp, Homo sapiens
  source 1..255: mol_type = other DNA
ttaaaagtcagctacaagtagacacagatttccgtctgtttataactattcgctcaatgaattaacagtaaatacgcttagggatcgatatttttctgtagctggtcctgctgcgaacggactacccattagcagcgcaggccaggtcctctctcctggagatcgcaatcggcgatccccgagtgagtgaccgccacccgcgtactatagcagaaaggacccaaggggaaggacaccacaagtcggggtctttcc

SEQ ID NO: 7271 - DNA, 339 bp, Homo sapiens
  source 1..339: mol_type = other DNA
tctagattctacgactcaggtgaacctgatttacgatggagacagtacctatcagcatctgaagacatgcggggccaccctgcctctgagtctggggacgctacacagggccccagcgctgtcgctgtggctgctgctgccgctacggcttagtgcaccagacgctgcatttcaggtgctcctacaaaagaggccactcctggaacgccgctgccctttgctcgcgagccaagtcagccaaggttaaccttcgcggaacccggcgaggagcgcaagcctggccttggaaagaccccgacttgtggtgtccttccccttgggtcctttctgctatagtac

SEQ ID NO: 7272 - DNA, 382 bp, Homo sapiens
  source 1..382: mol_type = other DNA
acataggtctgtcaataataaccaacacaattagtttttcttctgtaatccatatctctaaacacttgaatcacaggtcaagtgattcatatagccagttcctcactgactattcaatccacatagtattatgaatatgagtgatgttggaccatactgtttcatcaattctatttttggctgtctctcataaacaagagtaaatgaaacaaacacggaatataaattccatccggatgaatttttgccaatgcaaattctgattttgtaggtctgaggtctgatattttaaattttaataagggacgctggacccggtcccttgtatgaccaaaaatccccaccaggtgggctctcctggggtgcaaattgagaccagtct

SEQ ID NO: 7273 - DNA, 282 bp, Homo sapiens
  source 1..282: mol_type = other DNA
cagctctcctcgcggagtcaggggctgaaggcagcgatcaagtggtgtcagcttgccccactccaaagacccctccaaccgctggagttgttgtcaggaagggagtgagagaaaaattttcactctttgtcactcttgcgagcgtagcgcaagtccgctccctaggcatcgctgcgctggcagcgattcgctgtctcttgtgagtcaggggttcggtccggggacgtctcctgatctttgaaaaggagcacttgcgggcctcctgatcaatgcctcccggcg

SEQ ID NO: 7274 - DNA, 219 bp, Homo sapiens
  source 1..219: mol_type = other DNA
gggctgaccttcgaagacaggatctcaaaggctccctgcctattcgcaaaaacgggccccaaatcgaacaggctcatcttttcagctctcctcgcggagtcaggggctgaaggcagcgatcaagtggtgtcagcttgccccactccaaagacccctccaaccgctggagttgttgtcaggaagggagtgagagaaaaattttcactctttgtcactctt

SEQ ID NO: 7275 - DNA, 456 bp, Homo sapiens
  source 1..456: mol_type = other DNA
atgtcaatttatgttaaaaaatccacttctattggatcttttctatctgattaccatctaattggatgttttatatctaatttatatctatgagatgttttatatctaaaatcttattatctattgtcttatagcttatatatttgaagtgagaaagagaaaccctatgcatttatctttctggatcatccaaccattcaggtatgatgtgacatcatggttccacaaccaatattacactctggggttgtaaaagtctctgaggcaatatgttcatttccataaaaattcatattcatgagaatgcctagattttacctatagttcttttaagataatcacaaatctatggcaaggaatagctgctggtcatgttttgcctgtctaaacagttgggtcaccacattaagtgtgcttagctatttgtaaagctatccacatagctctggaattcac

SEQ ID NO: 7276 - DNA, 619 bp, Homo sapiens
  source 1..619: mol_type = other DNA
cactttcttcaaattttatggagaatgttgaactagagatgatcttttactgtcactttaaattctaaagtttcattattctaggtattagactaatttttgttttttaataataggtcttactaggcctgaaactagaggcttcaaggctagttttggtttaactagtattaggcatatgttataagattagttatatattagttatacgattttctcagtactagtttatgtaagtacggttttttttttaacctgttaaagtataatatacagaaaagttcataaattataagtgtgtatatatctcaatgaacttttagatactggatcaagaaacagagctctaacctcatatattagattttgagctgagttgtgtaaaatcaaacatctagacacatgtatgtttacatatatcttataagtaatacataaatatatatacatatatatccataaatatttgtggatatatgcttttggatgatacatctaaatttgttgagatttcctaccgataatgattttataaaaagcatatgcatttattatccacttactatttctaagtacatagtcataaaagcaaagttacctaaaatgaaacttttattct

SEQ ID NO: 7277 - DNA, 648 bp, Homo sapiens
  source 1..648: mol_type = other DNA
attgatgtcaagaaatcgggcttttattatatctttttaaaaactgtgtcttgaggccaggcgctgtcgctcacgcctggaatcccagcaggaattcgagaccagcctggccctgtagtcccagctactcgggaggctgaggcaggagaatcgctactgcactccagcctgggcgacagagcaagactccgtctcaaaagaaaaaaaattgtgtcttgagtagaattttaataaatcaattcttccctttgcaaagctgtaaaacatttaaaacatttggccagggtagaggccgcgtcagcgtcctcccaatcagcctctgctgagggagtgccgcgcgcggcgagccgcgcactccccttgcctttcttagagatctgcgttagctcagagctaggctcggtgccgcagaggcacctgaggttccacgactgcattccaggccccgccccttcatcgggatctggaaggaggagcgccgtgcgcgcccgcgccggcgcgagcgctgaagctccgcccccagccatttccgaggcgcgccgcatgcgccgcgcaacccaggccacgagcacgggcgcgtgcttaagtcagcgcgcgcccgctccgacgcgaggaggccccgccctccagccccgccccgctcgctgg

SEQ ID NO: 7278 - DNA, 468 bp, Homo sapiens
  source 1..468: mol_type = other DNA
gtagaagtaatcactaatccaggttgagatattaattattgatgtcaagaaatcgggcttttattatatctttttaaaaactgtgtcttgaggccaggcgctgtcgctcacgcctggaatcccagcaggaattcgagaccagcctggccctgtagtcccagctactcgggaggctgaggcaggagaatcgctactgcactccagcctgggcgacagagcaagactccgtctcaaaagaaaaaaaattgtgtcttgagtagaattttaataaatcaattcttccctttgcaaagctgtaaaacatttaaaacatttggccagggtagaggccgcgtcagcgtcctcccaatcagcctctgctgagggagtgccgcgcgcggcgagccgcgcactccccttgcctttcttagagatctgcgttagctcagagctaggctcggtgccgcagaggcacctgaggttccacga

SEQ ID NO: 7279 - DNA, 359 bp, Homo sapiens
  source 1..359: mol_type = other DNA
taatagccacaaatattatttttgttgattatatggacataattatcttgtccagaaggagacattaatgtaaaacttatgtcaagaattttaaagacagcaatcccccttttaaaacttgggccccaaaagcgcagtattcagttaagcaaataactacttacactgtttattttggttacgattccttaagtgagaagtaaatcaattcagtgctgccacctcattagcttggagcaaccttcctaaccttgccaggcaacgctgtgaggtttggaaacccacccagtttccgaaacaggccgggtgcgggggtgggggatcccgttccagccccacccctgaaagttgctgggagt

SEQ ID NO: 7280 - DNA, 448 bp, Homo sapiens
  source 1..448: mol_type = other DNA
ttttaaagacagcaatcccccttttaaaacttgggccccaaaagcgcagtattcagttaagcaaataactacttacactgtttattttggttacgattccttaagtgagaagtaaatcaattcagtgctgccacctcattagcttggagcaaccttcctaaccttgccaggcaacgctgtgaggtttggaaacccacccagtttccgaaacaggccgggtgcgggggtgggggatcccgttccagccccacccctgaaagttgctgggagtggcacccaaagaactttcccgctcagggaggtcagctccaggccctcagcctttcggccgggagccaaactggccacggcagcaggaacgggcactgctgccaccgggccgacgggtcaagagcgcgctgggcgcagggcgcagggagcgggccgcgcgcggcgggcggggagagcg

SEQ ID NO: 7281 - DNA, 451 bp, Homo sapiens
  source 1..451: mol_type = other DNA
aattgtcctattggtttaagccataaactgtggttaccaaaattgaaccctgagacaggtctcagttaatttagaaaggaggtcttgaagacatgtgcccaaggtggtcagagcacatcaatcaacatatgtaagatgaacattgtttgggtttctgattagcctctccaaagaaggcaatcagatatgcatttatctccatgagcagatgtgagatattttcctttcaaaataggaatgaatatgttgtgatcattatcttgatgacaaacatttcgtcccaagatttgttcacacatgatgaatgtgctatgtatatttaatcttaatgaaatcccaaggaaaatattaattttaacactaataacgataaatggggaaaaaaaaaagaaaaaaggttactaattggattttcttctgttccacattctgtgttctagaaccgagttaa

SEQ ID NO: 7282 - DNA, 363 bp, Homo sapiens
  source 1..363: mol_type = other DNA
tatcaggaaagccattatctgagaagataaaataaagtaatactttgtttttaaagtattatacaattcatatctaatatttcaagtgttgtgggcaagcttggctgccaacagcatcagtttagcaggaatagggcgttgaccccattctcccagctcagggcacaggtgctaaatgcactcataaccatgcgtttgtgtttgtcaactgacaaacgagtgataatgggacccggggcgcggcccgccaaccccctccgccaggcagccggcgcgcctccaggttccgcccaggcgtcgctgagtggcggcggcggggagaatgcgcgcggcgcagccaatccgggggcgttcctacacccc

SEQ ID NO: 7283 - DNA, 485 bp, Homo sapiens
  source 1..485: mol_type = other DNA
tgctcagataaactctgctaaacttgtttgaagtttttttgttaacaatatttaaacataaagcaaataaattaataagaatcctatatcactaagttacagtaattagaaagtattcaagatgctttctaatagtattcgttattccaggttcactgcactgatagacgtccaacgtcaagatgggtaactaaaggtcaactctctctttaccttcctatttcccttttaggggaaacaatcattaaaataatcccgagttgattatttggtgacatcaaccaacggtgcactggccagtggctttagacaggtctcaagcccgcgctcactcgggctccggctgctgacagctgcgagcccgcgcgtgtatacccgctcaacgctgggacgttacagccagggccaatgggcagagcgggactcgaggccccgcccccgccttgtggcgtcacggggacgccgggggcgcgcgggctgcaggg

SEQ ID NO: 7284 - DNA, 634 bp, Homo sapiens
  source 1..634: mol_type = other DNA
ctccgggcagaggcatttgggcccgaggcccccgctgtgactccccgagactccgcagtgccctccactgcggagtccccgcgcttgccggcaaaggggcaaacggggcccttctgcccagatttttctcggaaaacaaactactaagtcggcatccggggtaactacagtggagagggtttccgcggagacgcgccgccggaccctcctctgcactttggggaggcgtgctccctccagaaccggcgttctccgcgcgcaaatcccggcgacgcggggtcgcggggtggccgccggggcagcctcgtctagcgcgcgccgcgcagacgcccccggagtcgccagctaccgcagccctcgccgcccagtgcccttcggcctcgggggcgggcgcctgcgtcggtctccgcgaagcgggaaagcgcggcggccgccgggattcgggcgccgcggcagctgctccggctgccggccggcggccccgcgctcgcccgccccgcttccgcccgctggcgcgggtgctcccacagcggagcggagattacagagccgccgggatgccccaactctccggaggaggtggcggcggcgggggggacccggaactctgcgccacggacgagatgatcccctt

SEQ ID NO: 7285 - DNA, 433 bp, Homo sapiens
  source 1..433: mol_type = other DNA
atcttcctccctctgccagagccagggagggagagtgggtgcggcataagcagcgcgccccgcctcccctccagcgggcagccaaggagagctagaggcgggttcagcgccggcgagcagtggggaggcgcagccgctcacctgcggggcagggcgcggaggagggacccgggctgcgcgctctcgggccgaggaaccaggacgcgcccggagcctcgcacgcggccaagctcggggcgtcccctcccctcggccgggcgaactcaaggggcgcagctctttgctttgacagagctggccggcggaggcgtgcagagcggcgagccggcgagccaggcctccgggcagaggcatttgggcccgaggcccccgctgtgactccccgagactccgcagtgccctccactgcggagtccccgcgcttgccggcaaa

SEQ ID NO: 7286 - DNA, 357 bp, Homo sapiens
  source 1..357: mol_type = other DNA
tgaaagatatattgtttaaaaagcaataattaaaatctagtccagagcatctatcaatgtggtgtccatcacagcggcagcggtttcatcttcctccctctgccagagccagggagggagagtgggtgcggcataagcagcgcgccccgcctcccctccagcgggcagccaaggagagctagaggcgggttcagcgccggcgagcagtggggaggcgcagccgctcacctgcggggcagggcgcggaggagggacccgggctgcgcgctctcgggccgaggaaccaggacgcgcccggagcctcgcacgcggccaagctcggggcgtcccctcccctcggccgggcgaactcaaggg

SEQ ID NO: 7287 - DNA, 229 bp, Homo sapiens
  source 1..229: mol_type = other DNA
cccacacactgcggtgtgtgtctctgaacagaatgaaagatatattgtttaaaaagcaataattaaaatctagtccagagcatctatcaatgtggtgtccatcacagcggcagcggtttcatcttcctccctctgccagagccagggagggagagtgggtgcggcataagcagcgcgccccgcctcccctccagcgggcagccaaggagagctagaggcgggttcagcg

SEQ ID NO: 7288 - DNA, 509 bp, Homo sapiens
  source 1..509: mol_type = other DNA
aagattaaaaacttaaaggccccttttagaattgtcttttacagcccaggcaaagagttctttacttttttagaggtcatgaatccctttgacaaggtgatgcttaatgtaaaattttacatactgttttaaaggttaaactttaccacccatgctttgtacataatcatatttactgatcatgacataacatggcacggtagttcctaatatcttccttttagagatttaagggcttgctcaaagtaacatagctaataattacatggattaaaatcccaatttgtttgtaaagcttgtgcgaaggttcttgaaggtccctggtccttgaaggtcccttaaccataaatgtcaagagttgggatttaaacccaggtctaacgccagagctggcgccctttagattaaaagtgcagtgttctgcgtggccttgacacagacagctagtgtgaatccccgcccacagaggggcggcacgttggttgccccacgtcggagaggtgcgtcgg

SEQ ID NO: 7289 - DNA, 325 bp, Homo sapiens
  source 1..325: mol_type = other DNA
ttttggccatgttgacatttgtgatccaggctggatgtttaaaaaaaattggtaacatattactttagcaactattattaattcttattattaccacgcggcttttcctaacccttgaaaaaacctctaatataaaaggcatttatatccaaaagtgggaaccgggagcgccccctgtctatatatccattagaaaaatgtagagtacattatcacaatgtaagtttaattagattaaataatttacaacactttattcatatcatttatttgttttatttagttgtcctttcctcgcgcacgcgcacttgttagggagggcggg

SEQ ID NO: 7290 - DNA, 379 bp, Homo sapiens
  source 1..379: mol_type = other DNA
gatcgagactatcctggtcccagctactcgggattgcgccactgcactccagcctgggtgacagatttctacctgtgcacatatttagcttcagatatgatctgtgtatataatcattagaacagtttccccgttcattaaattgaagactgaacaagataagtcatgtgaatgtgttttgtcattgttaaaggagatgtttgaaacactgcatatatcatcactgccagtatttctcgttaggacgcgtccttgtgctgaaggttacctttgcgcagtgacgggtagggccgagccggcctggcaggacagggtggtggcgaatgagctgctagcccggcgacctgcccgcggccccggcgggggaggaggaggggct

SEQ ID NO: 7291 - DNA, 621 bp, Homo sapiens
  source 1..621: mol_type = other DNA
tccagtgagtaggagataaagtttaaagtttgtcttcttatcagtgggaaaagttctcaataatgcaattcttactgagattcttgtgtttatcagagaaatgtttcctctttctttgccaaggaattatatattcccaacagacatggcgcttgaatgctatatttcaagggtgggtggtcagtcgtcgcctgagctccgaacatcaacccgcgcagtaatgctgggcccagcctcgccgcggccgatccagcctctgccctaggtggaagcgggccacccggtcccttcacccactgaggcccagtcctttcgcctcaacacgaaggcacctggccgggccggagcagcagccgcggggccggcactggggccacggaaccccgggccagactcaggcctgggccagctcggctccggcctgcagggggcgctgcggcggcaccggcgcgaggcccgcgcgtgcggggagcgaccccaggtgtaagtcccggggcgtggggcgcgtgggtcaaggcggagcgacccaggatccccgcgcccgcggcggccgccgagtggcagcgctggactcgcggagaagcttgggtacctgagccgcggtcccgggtgacaccctca

SEQ ID NO: 7292 - DNA, 632 bp, Homo sapiens
  source 1..632: mol_type = other DNA
tgaaggagcccagttaaatttgaattcagataaacaccaaataatttagtatatcccagatatttcatttttaaaataataaatgtgacccatgcaatatttgggacatacttcactatttgtatctaaaattcaagtttaactgggcatcctatattttatctaacaaccctactgtaattggttttttggtttgctttcaaaaataagtagtctcaaaacaaagcaagcttcttcaattaaaaacgtgcttcaaaagagaagccaattctgtgggagatactttcccaaaaaactcgggtttgaggggtaggcccgggctgcccgcctcacaccgcactcgccagcgagcaggggcccggcaccgcagcccggggcagaggccttaggtgggagaggcctcggccgacccgcttcaatccgtcttctccaagctcggtggcatccccgtctgggttggatggcgaagacggccgagttttgaaatctagagctctcttctgctggagaaggagggggccctcgacctcgggctcccgctctcgggctcccgctttttttttttttttttggtcggaggaaagaaaacagcctgagcccgcccaagctggagccgcggcgcgctgagcgag

SEQ ID NO: 7293 - DNA, 447 bp, Homo sapiens
  source 1..447: mol_type = other DNA
agcaataaggctgtttagctttatagcaagaagcctagcttaacttaatcatgtttgcttttgatttaaagtgacaggctcttcctttcatttggacacattaatttccccttcctttatgagaaaacaattgcaataatattaaagattactgcaatgaaaaattttgaaatattgcgagagtaccaaaatgtgactgtaatgagtccgagctcacacatgtgtccccccgggtggcaactggcatgtccccagggcacggttagtcccagcgggcctggaggcgaagaccgcgtacctctccctgcccccgcgctcttggtccccgcgggctccggagcgactgggaggagcccgatccacgggagcccgggcggcgcgcaatcagaaccaactggccccacgctcgggggcagggggcggggccgccgaggaagggccgagggc

SEQ ID NO: 7294 - DNA, 430 bp, Homo sapiens
  source 1..430: mol_type = other DNA
gatcttactgtaaaattcttggaaactgctgtgatactaagataaccagatatttacaactgatacaaagtactactgcaatagttattaacgtcactgtaactatcaagttacaatagaaaaacaatgacttccttaagatttattttactttttactgtatttaagtttttccggaaagtctaaactagccaaccgcggccacagcagatctggaggaccgctctgcgagctgacagccggctggacctctcgcagcgctctctgcgagggggcacaggctgtgctgagccccgactggtcaggttaggccaccgggcaggcctgggtactttttaaggtccgggtgccgcggagaccacgtgggcatggaggccccgcccccgtttcccgccccggcgcgtcccgcccctcccgtgcgccgctgacg

SEQ ID NO: 7295 - DNA, 436 bp, Homo sapiens
  source 1..436: mol_type = other DNA
gagtttcccagaacccttgtaggtcagatccttctgtgtctgccttagctacagaaaatggccaggggcactgtgacaggtcactgtgtcagcatttctgctatcacagatttatttcataaatagataaaccctgaagaatacttgtttttaaaatttcttgtactccaaaaatacaatttgatcacaagagttttaaatgtattttctagtcttcaaccttaagtttaaaaaattatatttttactgtacaaaaaaaaaaccaaaaaattgcttccaatataatttctgtcttccctggaatacagaattgagtcattgcaaaatctctctggatttcagccaaattctttcagagttcaaaagtacaaagctctttaggaggtttgttcttttgaaacattttttcagaggttaaaaattaaatttcaaaaga

SEQ ID NO: 7296 - DNA, 362 bp, Homo sapiens
  source 1..362: mol_type = other DNA
agggtaggagctgtagttaggagccactcctggagttatgagtttcccagaacccttgtaggtcagatccttctgtgtctgccttagctacagaaaatggccaggggcactgtgacaggtcactgtgtcagcatttctgctatcacagatttatttcataaatagataaaccctgaagaatacttgtttttaaaatttcttgtactccaaaaatacaatttgatcacaagagttttaaatgtattttctagtcttcaaccttaagtttaaaaaattatatttttactgtacaaaaaaaaaaccaaaaaattgcttccaatataatttctgtcttccctggaatacagaattgagtcattgca

SEQ ID NO: 7297 - DNA, 303 bp, Homo sapiens
  source 1..303: mol_type = other DNA
tacaaaggtattttaaaatcccatttacaataaccctctgaataaagactccaaccaaatttaataaatgggaagtcattacctttatttcctggtacaaaagataaaaatgatggtttggttttctataagacagcatagtttctttaaaattacacacacacatgcattgcttttcttcctttaattagttctgaggcgcccagatcgcggctcagaagcctcagagacctgtccgcacagttccctctgggagagaaggcggatcattgccgcagcacttccgggacgtcgtgctgcaaa

SEQ ID NO: 7298 - DNA, 344 bp, Homo sapiens
  source 1..344: mol_type = other DNA
aagactccaaccaaatttaataaatgggaagtcattacctttatttcctggtacaaaagataaaaatgatggtttggttttctataagacagcatagtttctttaaaattacacacacacatgcattgcttttcttcctttaattagttctgaggcgcccagatcgcggctcagaagcctcagagacctgtccgcacagttccctctgggagagaaggcggatcattgccgcagcacttccgggacgtcgtgctgcaaaggacgtggttttggcaaaccagttattcaagtttctggtctttaaaaaactcgtggcggtacggtaaccgaggaggttccagcgc

SEQ ID NO: 7299 - DNA, 563 bp, Homo sapiens
  source 1..563: mol_type = other DNA
tcagattttaataatgttaatggcataaagaatatgggaaaaaaggtaatagggataccttattattctaacaaaacatgctcaggttggttttcaggttgtaatgtgataatccagaatatttttattctgtactttacaatatcagtgattgaattcagatactctggcaaagtatacaatgattactatcatcagataatattaattactcatgtgcatatcaagagttgatcatattatatccatgctatgaaatacatagctactaataaattagactttattagattctgggtttattaacttggatattataatacagccttatgggaaaacaagttgcattatatatatacatttgtacttatttttttccctcatttttatttacaagaagaaagtggaggaaggagactacttctttgtcactaatatttaaattgttaagaaaaaaaaaacaacccaattaaatttgttaagggagggcctctatgaaaaggcccttctttgaggtctctaagtggaaatgattggtcctaaaaaatctttccataaagcag

SEQ ID NO: 7300 - DNA, 268 bp, Homo sapiens
  source 1..268: mol_type = other DNA
aatgaaagtccattttccaggatggagtaaactgacagaaatttccatcctgaagccagttcttattttctatcacagagatgtgaaaaaaaaaaagcctcatgctgaaagaaaaggtgtttggaaagaataatctttcaaattccgctataaactatacaggagaaagagagtgaactatctttactattgctcatgtgaatgatcaattattatcaatccaaactatcaacagtgctgcttattattgatttatttaaaaagcaaa

SEQ ID NO: 7301 - DNA, 348 bp, Homo sapiens
  source 1..348: mol_type = other DNA
ggctcactcataacttgctttcaagccttgtcctttcgtaaatagtcattgcaaagacaaagaaggtgtatttaacaaacttgccactggttgtggttcatccattggcaaaaccaggtacatggagatgttacacagtctttgtaactttcactaactgtgtagatgttaagattttctaagatttaagtttgtttaaacattcgaagagccttgggttaaggcatacccctgaggagtgagcaaatggaaaaggcatttcacattttatagtagctcttcttgaaataagaatcacatttgactaaagagcttcttgaaaaaagtgctataaggtaatataatagc

SEQ ID NO: 7302 - DNA, 441 bp, Homo sapiens
  source 1..441: mol_type = other DNA
agaatctttggcagtgtcaatgtatacattaatttgctaatcaactaggctagccctttaatctatatattgtactggattttaaaaattatttctttgacagagtctccctctgtaggctggagtgcagtggcagaattttggctcactgcaacctcctcagcctcctgagtagctgaggttacaggtgttgaactcctgacctcaggtgatccgcccacctcggcatctaaattagaaggggaattttctggtccaatatccacctaatttttaaaagcagggctccttattattttgtaaagtttacaattacatcattagatacttccttttaatagtttttcctcttggaggctgagggcccagtaggggtcaacgttctacctacaagtacagcaagtaaagccaaatttctcatgcatgcaaataaagtttttg

SEQ ID NO: 7303 - DNA, 352 bp, Homo sapiens
  source 1..352: mol_type = other DNA
aatttttaaaagcagggctccttattattttgtaaagtttacaattacatcattagatacttccttttaatagtttttcctcttggaggctgagggcccagtaggggtcaacgttctacctacaagtacagcaagtaaagccaaatttctcatgcatgcaaataaagtttttgcagggcctgggttttcactggtgatctcaaccccggagttttgctctcgggtccacgcgccgcggggatgcgccctgggttgggcttaggggatctggatgacctccaggccccccccgggcggagagaggtcgcgctctttcgcacactccctcgccaagggtaatttctcaaatcgc

SEQ ID NO: 7304 - DNA, 360 bp, Homo sapiens
  source 1..360: mol_type = other DNA
cctggcgctcagacaacgtgggttcaaaccccagttctgctagaccttgagcaatagcttaacgtaaatatgaagttcattgagatttttcttcctgagcttgtcattcagaaacaaaatgatagaattttcacatcaaaactgcagagacaagtaggccttcttccccagctgaactgatttaggtttacctggctatgctttccaaatctaattcgacaaatatttactgagtacctaggtggtccttgaatcaccccaattaaaagaaaacacttagcttctttagcaagctatctgataaaatagctgaaagattttctgaaagctgctgacggagctttggcgagggctcatctc

SEQ ID NO: 7305 - DNA, 400 bp, Homo sapiens
  source 1..400: mol_type = other DNA
ggctttatggatttaaatctgattgataataaagtaaacaagagagtcgaatttaaactgtacaaggaatttgaaagatctaggatatgtgtcttaatcaacgttaagtagaatggataagctttcagcattttgaaagactaataagcatcacagagaacgtgatcgactttttattcttgtataaatccagagtgaaccaccaaacagttgttcgtttaaagtcaaggtaattttcttttgagcattcacttgacaacccagtgcgcacggcgaggcagtagcccggccccgcactgctgataggtgcaggcaggacagtccctccaccgcggctcggggcgtcctgattgggccgcggcggagtgacgtctcggcaccaggaagcccgcctctgatg

SEQ ID NO: 7306 - DNA, 316 bp, Homo sapiens
  source 1..316: mol_type = other DNA
tctagactctatgagcgtctcactgggtcagtgcgtggccgtgcccacctgtgcgccgacactctcagcatgcctggtccacccgccttgacctcgggcgcggtgtcccagctaagctgggcccagcgtcccggccttccccagctgacaagcctagctgcaggcctgaaaacattggctccccccggcgctcgcccgggcgctgtgctcgctcctggatcgccagccgcgcagccgggctcggccggccgcccgcgcgccactgtgcagtggagtttggtggaatctctgctgacgtcacgtcactccccacacg

SEQ ID NO: 7307 - DNA, 300 bp, Homo sapiens
  source 1..300: mol_type = other DNA
tgctgaaatcagttcagaagtaaggcacacttttcgagtgagaatatgccctgtaatttcacaaaatgtggacttgagggaaactctctcccccattttaaaaaatgagatatctgacccattctagactctatgagcgtctgcactgggtcagtgcgtggccgtgcccacctgtgcgccgacactctcagcatgcctggtccacccgccttgacctcgggcgcggtgtcccagctaagctgggcccagcgtcccggccttccccagctgacaagcctagctgcaggcctgaaaacattg

SEQ ID NO: 7308 - DNA, 288 bp, Homo sapiens
  source 1..288: mol_type = other DNA
caggggtactctgctggagagtgtaactgggtgcatgtgtgtgtttctctctcacatacaaacccacacacaagtgcagtggtgtgatctctgctcactgcagcctcgactcgctgagacgatcctcccacctcagcctcctctatttttagtagagatggggttgcccaggctggtctccatacgcagtttcttttatatagaatctctcttcccctgtacggctccgccccgacggccgggggttgggcgagccagtgacaggaggggccgggctggtacttcagg

SEQ ID NO: 7309 - DNA, 309 bp, Homo sapiens
  source 1..309: mol_type = other DNA
aatgagttcagagaacattttatcatcaataaaaactttctaaaatgtaacaatttttctaggtttaattaaacaggctaaaaacttgctgggcagcatgcttggatctgatttatgcaccattattacgtttccgcgttcaaagtctttgatacaaagttcgaaggctgagccttagccatgccacgcccagcgtgctccggacgaggatggcaccgaggtagcgcgcccaattggggcgcgggcgagcaggggcctgggcgcgctgggggcggggccagggtgctcggctcgcggggactggcctcc

SEQ ID NO: 7310 - DNA, 400 bp, Homo sapiens
  source 1..400: mol_type = other DNA
ggtggtcatgcatgccaaccagatttctcatgctttaagaagtctattttttaaaacaggattgaccaaactctgaatatattctcaagaaagagtatgtccctcctgtctaaccctgctcaacaggatcaccctgaagtggattaatggctgcggaaatccgcagtgaggctctgggaaattccacctttcaatctgaaatctggggggtctaggaccaaggacctcggcactccagggagcccagggcccctcagaaaggtctcgcttggccaccgagagcacaactgctctggagccacactgcataaatggcattcgtttttgttttctgattagaaaaacgttgaaaagaattttcctcatttatgtaaatattctcatattttataaaacaggg

SEQ ID NO: 7311 - DNA, 233 bp, Homo sapiens
  source 1..233: mol_type = other DNA
caactaacttttgtatttttagtagagagcactgattaatcccgcctctgcgggaggcagaggttgcagtgagccgagatggcgccactgcactcggagctcgtgcatgccacgcactggcttgcttggttggaggagaaggcgcggtccgggtcggtgtaccgcgcaccaaaccctgccaggctgggtacctggtgagaaaggcgccagctgccggggcggagcctgaaaac

SEQ ID NO: 7312 - DNA, 651 bp, Homo sapiens
  source 1..651: mol_type = other DNA
ctgtgtttacataaataaatagagatagaattttgttatagcaatgccatttggttatttaaacttctaaggtcatatattaaacattacatagcgatctatcacacaaaaaaaatgtgttttaagtgatctgttgtaaacaattgacttgaaaatgtatcaaatgactattaataaaacctattattccttcactctagaggaaacttctttaacccagcaggctcaaaaaggattgagaaaattaaaatattgtttatgtcaataacttttccaataaaatatattttgacatttagaaatcttaggtacttttgatttttttgtcaaaatttcgagttgcagatttcagttgttccatggaaggacaatgtccactgtgtaactcaataagacacttttcactgtcaaactagtcagcctaatcagatatgtgtctctgtgataacaagctcacttctaagacagatgtgcatctgtcttttgctaacagatttcaacaatgtcatattcattgtttcggctctaagaggactctccattcttagtctaaataataagtttttcttgcactttcattaggagaaggaacttttctgtagtaataagtcccggaattgaattacacaaccatattctgagacagtcaca

SEQ ID NO: 7313 - DNA, 458 bp, Homo sapiens
  source 1..458: mol_type = other DNA
cgaggtgtcaaatgaatccattttaaaatcgtttactatttgatacaacccctaagaggctttgccaagaggcccggcagcaccacagggctccgggagttcccatcacccgggagttaggagggccggcagcgccgggtgcggtgcctgcgcgcgcgccgggcggggggagcctcggcggcagcgaggacgaaggcgggggcggtagcacgggtccccccatccgcccccagcgctcgggcccctaatgagctgctgaaagggagcgggctccggtgcgcgtggctcgcaggcctcccggagtccagggcgccctgattggccagctgcgcctcgcgacctccattcattaataaattagcggcacgctccagccagcggcggcgacaacagccgcagcttgagcctctgcggccgctgcggcttcgccagctccggccgcagcccggagctccaac

SEQ ID NO: 7314 - DNA, 225 bp, Homo sapiens
  source 1..225: mol_type = other DNA
atgtatgtgcatatgtatttatttatgaggcctaggctggcctctagctaggactacagttgtgtgccactgcactcaaatttaaattatttggttggggaaggcccatcccaatctggtcagctccaaagaagcaacattaagatgtatcatttcttagactgtagaattctttacagaggatttctggaccagaagtatattgtcccagtacaattttggcca

SEQ ID NO: 7315 - DNA, 233 bp, Homo sapiens
  source 1..233: mol_type = other DNA
atttccttattaaattttcaaggcccaggttaaattgcaaacgaagaagatgataattttagaatataaatcctcacgttggcacccgtacttccgcaaggacgccgtcataggccgggcgcgccccacgcgtgcgcatagataactaggcgacgggcccggaggcagtgcgcgctccacctacgtcacaggcgaggtggttccaggcgcggccggctgagatcctcatctgg

SEQ ID NO: 7316 - DNA, 469 bp, Homo sapiens
  source 1..469: mol_type = other DNA
aagattaatctccaaataagtttttaaagacctgtgataattatatacatacatacatacacacagatatacgtacatacacacatatacatacatatacattgtgctactatatgtacggacgcaatatatatacataaaactcggtgttctcagtaaagtatgagccattattcatttaaatactagatatttttcctttttttttaaacaaggagtattttttgaacctaaacctgaatagttcggataacaaagttttggaatcatgaactcaacattgttagaaccataatcctgtcaccaaatgacaatggagacttgatccttcaagcagtccgagtagctgtgactgccttaaggagcagagtctcattcctaggaaatccagatgaggatctcagccggccgcgcctggaaccacctcgcctgtgacgtaggtggagcgcgcactgcctccgggcccgtc

SEQ ID NO: 7317 - DNA, 405 bp, Homo sapiens
  source 1..405: mol_type = other DNA
agacaagacaccaagtcatttgtgtgtgtagtatttcgtaatttctcctgaggaaattatatgaagagacgcagcctctctcagtggcccaggctgcagtgcagtggcgcgatcccggctcactgtactcttgagtagctgggactaccaggctggtcttttaataggtacatgcacgttttcctgagaagctaatccatataattaagttttcaaaagaagtgtgccacaacaggttaagaatcattgttctggtaactcacctcaacacgtagtgatttccttattaaattttcaaggcccaggttaaattgcaaacgaagaagatgataattttagaatataaatcctcacgttggcacccgtacttccgcaaggacgccgtcataggccgggcgcgcccca

SEQ ID NO: 7318 - DNA, 234 bp, Homo sapiens
  source 1..234: mol_type = other DNA
gaaccataatcctgtcaccaaatgacaatggagacttgatccttcaagcagtccgagtagctgtgactgccttaaggagcagagtctcattcctaggaaatccagatgaggatctcagccggccgcgcctggaaccacctcgcctgtgacgtaggtggagcgcgcactgcctccgggcccgtcgcctagttatctatgcgcacgcgtggggcgcgcccggcctatgacggcgtc

SEQ ID NO: 7319 - DNA, 502 bp, Homo sapiens
  source 1..502: mol_type = other DNA
gttttttttaaagaagccatgctagctttttcgctcctataaaaagtaaatagggaaatatctaaatatatacattcacaatgatttctttaaacacatattcaaaatatttcctaggttctaaagacatttagcaaaataagaatattcagattaaatgttttaagattgccaattaaatttttgagtgtctgaagtattttaatttataaaagtaaaattttagcattaattccttaactagtaacatttactaaatcagtcaattccttagtatttacttgaatcaaaaagaatttctaagtagaaagcaatctatttatttacatacatttaacatgtagatgcttcttcatatcaaacaagcagataggagattttctttttctttttcttttttttttttaagaggaagatataatggttttagctgttaacattgacatctgtatacttcaaaaaaattaaaataacaaaaggcccttgtaatgattctctgaga

SEQ ID NO: 7320 - DNA, 556 bp, Homo sapiens
  source 1..556: mol_type = other DNA
actcctgccacagcccttgcgcaaaggtctgcaaaacatggtccgtcttttaagttcttcacagagctacaaaagaggtgcttccttggtgagggatggggccaagtccctaccctggacggtagctgggctttcgggttgaggtcaattcccccttatcaatagggagtagtgcctcccgagggaacgtccgccagtgatgcgggagcgcccgcggaggagcctccttctccccacccacctcccgaactccggcagtcagtggtgcatatagacatatttctgggagctgtccatgagctcatggctctcctggcgatagcggcagcggctagggaagcagcctcctttctcccggcgccgccgctagaataagcccggcagctcgcactttcagagcacacgcgccgggcgcggcgctgggaaggggcagctgcttgcccagccccgcggccaaggtcgcgtccgaccccggcccgccgcggccccgagtccgccggccgggatgtaggtggcgcgggagggacttcggctgggcgagcagagggcacagccg

SEQ ID NO: 7321 - DNA, 555 bp, Homo sapiens
  source 1..555: mol_type = other DNA
atgtgttaccatttatcctaatgaaattaagataaaacctgattttttttaccagccttagaacattttataaggatccttgataaggctcttacttccttgtcttatcacagaagtagaattagaatccaccattttgataatctgtttttggactgggtatatagtaggtgatcaataaatgattattgaatgaatgaatgtactatatgtgaatcctctcaaaatagaattattgtgtatttacctcactgagattgccctcaatattttatgacttaaacatatatatatgtatatatgtatatatagatatatataaactcttatataaaagatgatctatgaacccacgatcttggcagtagcttattcctcagttacttcccatatatctgatacatttaggctgcaacaaattttcttgcttatttttcccttcttttagaacagaagaaaccagaaaaaaaatattttgtgagaaaacaacagttccttacgtctggctgatctgatgtcagagcagatcatgtggtgctctgtgggcagctggga

SEQ ID NO: 7322 - DNA, 421 bp, Homo sapiens
  source 1..421: mol_type = other DNA
ttaaaaaattccagaactttatagtatactaggttaagaaaacttttgagataagttataaaatattgcaactccattagttttttatgtttttattactgatagtgtcttagatatttaacaagccttgattaactgcctttaatgtgccatggattatgcttggttctgggaaatttacattgtcacaggtatactgtcagattctcaaggctttatgacatgagtgtagtttcaaaagattatattttaaaccaagtgaatgacatctgaaaaacatagctttcttatattcactttaggatattaataaccaatcggctaaatgtacctcttcaggttcagagacacattctagaatgttacagttttggttgaatcagattaacagttgtggcagctgctgccatggcaacgtcac

SEQ ID NO: 7323 - DNA, 443 bp, Homo sapiens
  source 1..443: mol_type = other DNA
tggcccgggaaccggcctggagaagtccctgctgcccggcgcccaaaacaggggcgtgggcttccgcgacccagggcggctgccccgggccatcctcgagttgcccgctcagtcagccccagattgaggcagccttgcagaagaggcttcgcctgagccgagcgctctttctctcgccgcgccgtcttgaagccgcgcgggctcgtgagcagcgcgaggccgccaaggtgcctcgcttcgccggagccgctgccgcccgccggagggaagccggcctcgggcgcgcacgctcgtcggagccccggcgcgccccgcgcctgagcctgctgacagcggccgctgggctcaggctgtccgctctgggctccgcggcctcggccccgctgcgtttcgcaactgcttgccactcgactgtggggaggagaccccacgccaccctttct

SEQ ID NO: 7324 - DNA, 346 bp, Homo sapiens
  source 1..346: mol_type = other DNA
tatgactctagtaaaatcaagagtattttcacaaccaagataagtttttacaatggttttcctccacatggtaaaaaaacactggcttctttaatgcaggaatgcagactggcttcttgaaggagttcctctccataaaacttaaaaatttgtcatcgttactgaaaagaggaaagagtgtcatacgcattttgtttccctccagaagctagaaaaagtttgcagctccggtagcccaggcggatcccccggaatcccgctgggctggggctcgagcgtccttttcccccaccccctcttcccgggggagctcaggaagaaagtaccgttctgtgagctaaataag

SEQ ID NO: 7325 - DNA, 448 bp, Homo sapiens
  source 1..448: mol_type = other DNA
tgtatatgtgtgtatgtatcagtatatagaatactatggttagcacatggtaagtattccatacattttggcacagaacatggatacttcttgtgctatcaataggcccattaagcctagggccctacctacatatttggtgacttaatttacagaattgctaaactcacatttctgatcaaagttcccatttcacaaagttttgcctgggaacagaaataaatggctaaatgaaacctagatttatgtttcagtcaattgagagaatctgacatgttaggtattcagtaagtaactgttgaataaattctatagagactatatatgactctagtaaaatcaagagtattttcacaaccaagataagtttttacaatggttttcctccacatggtaaaaaaacactggcttctttaatgcaggaatgcagactggcttcttgaaggag

SEQ ID NO: 7326 - DNA, 605 bp, Homo sapiens
  source 1..605: mol_type = other DNA
agaaatccaccaggagttgctgtaggaatgctttgtgtataagaaatctgttatttagcaggcttggagacactttaagtaatataaacttaaaaaaaaaaaaaagcatgacttatttattgggagtataccataatttaaacatgtaaaagtcataaattagaaaaacaaattattaagtcgaatatccttctctggacaaatgtatcttcataattacaaaattaaacatatgtataaaattattatttttataatattaaacattggcacaaaaatcaaagacaactaaattgcccaccttttgatattctattgatggagcagcagtatttggatgagtaataaatgaaacattcacaatttataagtcattttatatttaccctatcaaatttatttcttgtcttacatacaggaagtcaatattctgtaataatcaacatttaggcattgctgtaaagaaattttacaaatgtaataagattccaaatcagttgatcttaaagtaagaaaattattttaagggaatgacttaatcacatcatcactttaagaagtttctctagcatgaaaagaattcatggcaccattgctggcttcaa

SEQ ID NO: 7327 - DNA, 417 bp, Homo sapiens
  source 1..417: mol_type = other DNA
gattttacaataacagcagtgtatattagttttttaatttatcattaactgataacatatacagtaaaatataatttccgttttcttatctaagggcaaaggacagaatgaatggcatttttgatttccaacgtttaaacgcataacgttcgttatatagacatatctcatatatatatgagatatatatatataaaatatcttacgcacatgcattctcggttttcatgaaacactcggcctctcaggtctgaggcaccacagaggtcaagacgccaacttggcaaggttatgctgctggcaaaggcagattcaggcaaatcatgaatggccctttcagcaggagcctgagaggagcaagagagccagaattgaagcctgggttggcggcagtgcaggtaccgagccgccttgatg

SEQ ID NO: 7328 - DNA, 488 bp, Homo sapiens
  source 1..488: mol_type = other DNA
actcggcctctcaggtctgaggcaccacagaggtcaagacgccaacttggcaaggttatgctgctggcaaaggcagattcaggcaaatcatgaatggccctttcagcaggagcctgagaggagcaagagagccagaattgaagcctgggttggcggcagtgcaggtaccgagccgccttgatggcggggccacgtgcgttgtcagagttcgcaactcgagcgcccagagggctcgcgtggccaacgcgctgccccttgcccagcctgcgagcgcgtggtacgaaggcgcgtctgcatccatgccccagcccggggagctggaggcgctcgctgctaggctgagcgcgtggcggcccgtgtcgtgccccgctgagccaagtgcggaagggcagcggcgcgctccgactctgctcgccgcacgcagggcggggcgcggctggggggcggggggcctggccgcccgctgggagctgcggacgagcaggcgc

SEQ ID NO: 7329 - DNA, 401 bp, Homo sapiens
  source 1..401: mol_type = other DNA
cctccaatcctgtgtaacaaagttttgaaattaacgacgctaagtttctaccttgttgaaacgtagatactgatactttgtgtttctttcaataatagcatggtactaaaattaactttgcaacactagtaacaatttgtaattaaaaaattatttgattgatttgttatgtgttccatcaaaaaccagaaaacttaccagttttgtttatcaggtagattaataaaaaggtcactggaagatttaaataaataattagagtgtaacacatagtaaaagcttgataatattagatattatttttgccattctctaaaacatacagtccaattaatattgtttgaatgaatgaattttagattcctgtcttcctggagacagaccaattcactcatttttaa

SEQ ID NO: 7330 - DNA, 562 bp, Homo sapiens
  source 1..562: mol_type = other DNA
tatcttattccactaaattaaatggtagaaactaatacctgaaagcactttacttttacttttacatatatcctaatgaataagtttaaagaactttacataatgtatataaaagtacttgataatatctttatgtgtttacacgaattaatagaaaacaaagagcaggtaattttcaacttatattgccacgagaaaagaacttttccataataatccagtagtttaccttaattactaaaacaattcatggtctaaaatgctgttattaacttcaggactatttttgtgtttaactggcacacatttacagcagaaaatctcaaatttcataggaaatagtcgaactgtacaatgaaagattatgcaaatcttcatgtgagcggaatgcagcccatcgctgaattagggaatgtattcatgtgtaacatcccactgactggatgacatcacaacagctccaggtccttgaaagtcttgaggatgattagctgaaggaattggctgtttctgccaatcataatcactagcaacagcagagcaggagcagctggtattccgg

SEQ ID NO: 7331 - DNA, 556 bp, Homo sapiens
  source 1..556: mol_type = other DNA
aaaagcttgtagttctgttctgcaacctatctatcttattccactaaattaaatggtagaaactaatacctgaaagcactttacttttacttttacatatatcctaatgaataagtttaaagaactttacataatgtatataaaagtacttgataatatctttatgtgtttacacgaattaatagaaaacaaagagcaggtaattttcaacttatattgccacgagaaaagaacttttccataataatccagtagtttaccttaattactaaaacaattcatggtctaaaatgctgttattaacttcaggactatttttgtgtttaactggcacacatttacagcagaaaatctcaaatttcataggaaatagtcgaactgtacaatgaaagattatgcaaatcttcatgtgagcggaatgcagcccatcgctgaattagggaatgtattcatgtgtaacatcccactgactggatgacatcacaacagctccaggtccttgaaagtcttgaggatgattagctgaaggaattggctgtttctgccaatcataatc

SEQ ID NO: 7332 - DNA, 538 bp, Homo sapiens
  source 1..538: mol_type = other DNA
ggaaggaaaaaaaaaagtcccagaatggtggtttttttctgtttttctatcactggccagacctgagctgtgggtcttagtagccacttaatacaattcacatgttagtggaaccaaatgaaatttttaaaaatatatatcattcgattcacacttctaatcaaactagccgccctggtccagtgccaacggcaggagcaccacaggaagggaccgcgcgggtgcgccccacccttccagcgtcgcctctcatccttggcggccgccgccaacccgccgggaggggcggtcggaactggcaggccggggcggaacccccggggtctccttgtcgaggcccgggcagccagatcctcagggccggtccgggcgggagcccggtcgatggaggcggctcccgtcctcagctcccgctccctccccttccccggggcgggcgcgcgcgggccgggagctgggaggcggcggctcccgcccgggaggcggtggcgagggcggcggaggcgcggccgggcgggtcccagggccgtggttctcc

SEQ ID NO: 7333 - DNA, 556 bp, Homo sapiens
  source 1..556: mol_type = other DNA
tcttctctggttagagaggaaatttggtattaagagagcctcactgaatttaagcacggtgatatcaagctgaataaaacgtggtcttctaaatccatccatactttggtaaagatttcagggccggtgccagatttgggagccgccaacgccgggctgtgctggtgctgcatgctggcaaggggcagccaagaccgtgctccgcgcgggcaccctcgggctcggtcccagcagctggcagtgccgtgcgggcggactgcggtgggcctggcaggggccgagcgtaggtccggagcagcttgcgcggccggcgcccgcccccagggggcagagttcccgggctcgtgcctgcgccgctacctggggctcaggcccaaccgctccccgcttccgccggccggggctcggctgagctccagatttccccacccgcggccgccgccaggggacaggagccgaggcgcggcagggcaccagcggcggggagggggctgggggattcgagggacgcggcagccccgcccccgccccctcctcttctccgctccaagcccga

SEQ ID NO: 7334 - DNA, 664 bp, Homo sapiens
  source 1..664: mol_type = other DNA
agctgtgacatcatgggcaggttacttcacctctaaaacacaatttcagtacctatgtaaatgtttattaatattagctgcattactattgttattctaatatttccttcagggtgccttataggaaatcttgatgatgtgttgacatttataactgatccaactttgttaagtgatctgttgattttcaaaatttaaaatacagtttcctgatcagtcagcaatcataggttgaattcggagcagaattcaaccacaactgtcagttctgtactgctgatcaagacagttgtgtaactctctgacatgcaggctagtgtgcttgttctgagagtaccctactgaccatgcaaaagtcttcaattttctatgtatttttgtgcaagcatttcacgaacatattcatcactatactgaaatgtttacatgttgatcttgtttaaaagtgttttcatctcatttctttttgaaaaatttgaaaaattactgggaaaaaactttcagacattagacaaataatattgttaataatatttcataagagttatgataaagtctcagcaaaggcttcccctgtcaattccaaagattttcttgacattttgtatttgtctacatccaactatgttatataacattgtgattttgttatctaatcatgtat

SEQ ID NO: 7335 - DNA, 497 bp, Homo sapiens
  source 1..497: mol_type = other DNA
aatactaaaacatacagctccagtaactttttttttttaagattctaagccaacagacagtgaagcttcaaaattgtcagagtctctggagaggcaaatgaataggcttaacagaagtcctcttctctggttagagaggaaatttggtattaagagagcctcactgaatttaagcacggtgatatcaagctgaataaaacgtggtcttctaaatccatccatactttggtaaagatttcagggccggtgccagatttgggagccgccaacgccgggctgtgctggtgctgcatgctggcaaggggcagccaagaccgtgctccgcgcgggcaccctcgggctcggtcccagcagctggcagtgccgtgcgggcggactgcggtgggcctggcaggggccgagcgtaggtccggagcagcttgcgcggccggcgcccgcccccagggggcagagttcccgggctcgtgcctgcgccgctacctggggctcaggcccaa

SEQ ID NO: 7336 - DNA, 342 bp, Homo sapiens
  source 1..342: mol_type = other DNA
gcaacatgatgatccttgggttattttcagttaagacaaatgtacaagcacatgcgtgaaggtaaataaaatattaaaccgctatgtgcaaggtgctatttatcctttcaatcacagctctgtatgactcccatatgacaaaactggccaaggccactcgaggttcaatcctaggctggcttaagtttgtgttctgttaaaaaaaaaaaaattaaaggttatctggcaattttttaaacgtctgtggaatcaattggggccctggagacccctgtggcgcaacagatcccttactgggtcccttccaagtggcgtcacatcgggacttccgggccaagcgag

SEQ ID NO: 7337 - DNA, 416 bp, Homo sapiens
  source 1..416: mol_type = other DNA
ccttttgttcttttatttgctacaatttaagataagagatcagtgatacctgctaagacttagaatctgtctatattcaagaaataacatttcaaattaaaaatttgaagcctaaaatttgtgatttgattttgtttccatattaaactataagtttccaaaataaaagcaaccatgtaaaaatattatgagatcatttccttctcctgggaaggggggcaaaggccttctggtccactctcccacttagcagagagagacgtggcagcctgagcgctcagccagttccctctgaactggtcctcagaggaatctcaagatatagttgccatttttaccatgaatatttctaacatttccttccttcaaaaaaggaaattaagtgtgggggcgggtaaaaaatgcccacgcccacc

SEQ ID NO: 7338 - DNA, 427 bp, Homo sapiens
  source 1..427: mol_type = other DNA
tcaagtggctttcttgtagctgcatgttaaaaacaacaacaccgggctggtttttactttgtaagtttgactttctatttagcagtgaaagaggtaagctccagatctcatataggttgcctttatttctgtttctcacaggacggtgagctaaacgtagtgcattgcacgggtacgtctgcgtgtacacgtgcaacggccgtatgtaacggtagtgcagtacctgaactattagttatttaagtaatacgtaatgaatgaagagagaatgaatgaacgcgctcccctccttcctgcggggacgttaaaggcttggtcgctcggccgctcgcaggctcagcccggtggccccgccccgcggcggccggtggctgtgcgcgtgcgcaggcgggagcgcggcggctggtccaagcccggcgctgggggc

SEQ ID NO: 7339 - DNA, 389 bp, Homo sapiens
  source 1..389: mol_type = other DNA
aactaatctatcaaacatagcttagcctaatttaccttaaatgtgctcagaacacttgtattagcctaaagttgggcaaaagcagcacagtacactgtatattacagggtgtttagcaacttactaaaaaatcaaaattcaaaattcaaagtatgatttttattaactgtatcacttttgtggaatcttcctaaattgaggacattttgtaatcattttcaagatgtttgtattaaaataagttaaatatactgtttaacccaaagaaaacatcttgagaacaagatctagctgcaatttggctgaggaggggccccacttcaaaacaggaaaacagcatgatctgttgcttttgtacttttgcaggaaaacgtttgtttcacttcaat

SEQ ID NO: 7340 - DNA, 538 bp, Homo sapiens
  source 1..538: mol_type = other DNA
gtatgtttttatatgttatggaaaacaaaagtattataggaaaattaaaatgtcctttttgtacatttttggcagattgtattcagatttaaaacatttaaatatttggaatatacaaaatctgcttttatattggaccaatgaataatagatgtaattataagaatgtagtttccaggagaaaaattcatattcattttctctcctaaatatatggttcagaaaggtacttttcagagctggaggtttattaacaaaaagtttgtgctttcttttgtttcctcttataggaataattcagcagaatgcagacagaaaagtagtaatttaactcattttaactcttttttgtctatccattcataaatgtggcaagtctcaaaacatttatttgagagaatctaatcctctagtagttgaattatgtcctttactatttacagaattattaaatgtaagtttttcaatcatacttataccattaactgcttggatttaatctgttagttgctttcctttcctcgaaggtgggccgagc

SEQ ID NO: 7341 - DNA, 613 bp, Homo sapiens
  source 1..613: mol_type = other DNA
gttccaagagaacttatttatgtccactgaaatttgaatttcacataattttcatgtgtcacaaaatattaaaaaaaatttcaaccatgtaaaacttaaatgccactttgtattcaagttcttagtacagtatccagtttatagtaggtgtttaataaacgtttgttgaataagtaaaacttgcacagctaacctgagtcaatctgagttaggtgatgtagtatacttacagcatgatatttgagatatcaaaaaagtaattctagaagcaccttgggtattacttgaactctattagtatttaaaatagtccaggatttggccacttcaatttttttttttttaaataaagcttcttcaagctgttttcagctttggaaccagaaacctccaaactttgtaagttacataaatgcttagtacatcataaccttcaaaaggttgccaattagaagaaatcttaagcattgtcaggaaattccttctctctatatatagccttatgcgttgctttctttcccttttaaagttggaacatagaacataaaaccccagtacgtcggcattgtgaggtccttgtgtatggttacctgggaaactaagttaattacat

SEQ ID NO: 7342 - DNA, 552 bp, Homo sapiens
  source 1..552: mol_type = other DNA
agattgtattcagatttaaaacatttaaatatttggaatatacaaaatctgcttttatattggaccaatgaataatagatgtaattataagaatgtagtttccaggagaaaaattcatattcattttctctcctaaatatatggttcagaaaggtacttttcagagctggaggtttattaacaaaaagtttgtgctttcttttgtttcctcttataggaataattcagcagaatgcagacagaaaagtagtaatttaactcattttaactcttttttgtctatccattcataaatgtggcaagtctcaaaacatttatttgagagaatctaatcctctagtagttgaattatgtcctttactatttacagaattattaaatgtaagtttttcaatcatacttataccattaactgcttggatttaatctgttagttgctttcctttcctcgaaggtgggccgagctcgcagcaggcggctggggcggcggctggggcagcggctgcagcagcggcggacgctctgcattacccagtcttgcgtcctcggcag

SEQ ID NO: 7343 - DNA, 799 bp, Homo sapiens
  source 1..799: mol_type = other DNA
tttgttcaatgaaaatggccatagccaaatggccaagaataactatgcagaaatattgcttgtcataaattatatatcctaataatatgataatgatatgcaactgttgagtgcattatataacctcttataaatgaatttcttcactttcaatttgaatagagttaaaaacttatcaattacaaagttgttatgaagaagataatcagaattacccagcttgaagaaagtcatttaattcagtgtcttatttctatgcaaatcacaacttattaaagacaaagtttatattaaattacatataatatacacattgcacgtatataaacacacaaatactttcgcagtggaaatctactcttaaatactgttatttaggaataaagagttaaggaggattctataatattgaaataaccaaaatgttctatgaaacaaatagatgaattagagttgtgtattcagaaaaatgaaaaaccatttcctgtcattcaggaagaaggggtcatcttattctagtgcataaatgtagttaaaccaaagtgaactggctatatttctaaaattagctcttctatgagaccatcaaaatccatgtttgaaaaaaaatccttcatattttcacttattttgctttgattactcaaagaaagaaaagctggtatctgagatctattccaaatgttcaaatctgagcaacttaattccaaacttagttattttttttaaccagaaatactggtctagaatagaaatttgcagctggcacaactgatctggtcttgtcagtataaatgac

SEQ ID NO: 7344 - DNA, 487 bp, Homo sapiens
  source 1..487: mol_type = other DNA
agagtcctgatagtaaaaggaatacagtatctattttcattttggaaaccaaaattaacataatgattatttttgacaggcaaacctttcaaatcttgtcaggcctgcaaatgacattgtaaagactggtcaactttgcagggactggtctctgtaggcccttcaaaaagcatgacccagttatgagtctcagcaatggttcatttcaaaatgcttcctgagttcattactgcctatattgttcattttaattatgaaaaatctatcattctgattcatgcatgtgtctctacctcaattaacatgtaacataagagctagatgtttaaaagtgtttaaaatcccttttggctaacagaaagtgctcactaaaaactttgtccatgtccctgttcctccctttcgccaggaagatatgagtagctaaagtatttggtgctatatatagccagttgatgtcagctgaatgccagtctcttcagaaaag

SEQ ID NO: 7345 - DNA, 476 bp, Homo sapiens
  source 1..476: mol_type = other DNA
agatagcaaaatggagtataaaatatataatacagcgtctgcttttttctaaatccttgttgacattgttaaaaatcattttacgtggaagataatgttattataattagcctgcattcgtatgttttggccatttattaggtattttatacatggtttatgattctccctatgattttgattatagatgatgaaactgatagatttttaatgattgaggtaaactttatatcactatcagggtatggattccatccttgtcaagagtgagcagattgagccctaaatttttcctcctatatgatgctaccatataggcagtcagtgtagtactgacactgacctacctgccagatggtaggaaattgtcctatactggaacactggagcttcctttaataaatatttgatgaaaacttaaccatgcaattctataatatcaattttaaataagtgtaggcctcatttaagtgact

SEQ ID NO: 7346 - DNA, 351 bp, Homo sapiens
  source 1..351: mol_type = other DNA
tcaaataaacttttagaagtgcctctgggtttactgaaatccattacaccagctttggaatgagttccaaaaccttcttactattcctaagaaaggtttattcaaaatcaatttaacttaaaattaaccaggtcaacagacttattaaagctatctcaggtaacacctaacctaagtgggtctcgcgcgatctcgcgcctccgaggccatcaaatccccgcgggaatagaattccgcaggtcccctcggcgtaaggcggagcccgctccgaggggcgggctcgaggcggggacgggacctgcgcaggtgtatgcgcatgctccgctcacagggtcgggctctgggcggcgg

SEQ ID NO: 7347 - DNA, 219 bp, Homo sapiens
  source 1..219: mol_type = other DNA
attttctgaacaattcaggaatcataatgtagtctcgctctgttgcccaggctggagtgcaatagtggcacgacccgagtaactgggattacaggcgcctgcgcctgctgggattacaggggggcgcggccggaggagtccatcacctgactggactgggcctttcagacttagtgaaggcggcgcggcattccggaacccggggcgcggcgcactgcg

SEQ ID NO: 7348 - DNA, 608 bp, Homo sapiens
  source 1..608: mol_type = other DNA
aataatagactcattttagtaataaacatcttaagactagtaattaaaactctttactttggcctgctggcaggaaaggatggtgaccttttaattaatggcacagctaaaacttctctcatcaatgagcacttattgtgtgtcatgcatacaaagtgccaggatatttataagacatattagaaaacgaatcttattaactttaacttttcaactgtatttcatcataaagtcttactttacaagataattgctgttgtgaaaaagggaaaggtcaggtctcatttcccagatgttatttgatatatgctataaattatattacctccaacatagtctgtttgaacttagaaaaacaatcttcagacggcatgcattctaattcttgaaataagtatgcccacaaactgtaatttaagacagaataggtatgcttctcatgttttaattcagttgaatttcagaagatctcaggaatgtacagaacgagaattaagaattaattaataagaattaattaattgcttgacatagttaggtgatttcctgaactttaagcttccacatcacagtatgaagttggttctaagataagaaatataataaat

SEQ ID NO: 7349 - DNA, 626 bp, Homo sapiens
  source 1..626: mol_type = other DNA
tcgtattctcctagaagacagttctgagacatatgttataaggctttcaaaggtcctgtcacatgtagctatggccagatctgtactgcactgcatgtaagccttgctttattgaatatacttagctatagaactattaattatagtgttgtttaaattataaaaaattgagaagaacttaaatgagaaaaatgaagtcaattctataatatcaatgaaattgaatattttgcagctcttaaaagagatctagtagacaaatatttaatgacttggaaaaatgtttctaatacatttagtataaaaagctagtttctaaaagaatctacccttttttgggtaaacacatgtgtgcataacaacaattgttaatacgttttatctctggttgatatgaacatttcctatttatttttacatatttgttaaattttatgtatttgttaagtggtgcattttctatgtaccatttaaatggtcaaatattatttaaaagaaagtcaggcataaaggaatgtctttcactcacggcgtgttgaaaggcctttggagtctgaaaggcctttgatcatcaagccagtgttttgtagaacagtaaccaggctctacacgttactcttcctgtt

SEQ ID NO: 7350 - DNA, 338 bp, Homo sapiens
  source 1..338: mol_type = other DNA
ctccgaggcgcgcggtgccaaccatggagcgggccggccccagcttcgggcagcagcgacagcagcagcagccccagcagcagaagcagcagcagaggggaagaggacccacggaagacccggggctgatttctcgggaacatgattatcccccgtcccccctcgccctggccctggctgggcggggaagctggggtgaaccttggaaggctgtgccgccaaaagtagagctcgcgcaggggaggcgccgcctggagcggaccccaaggggcagcgcagaccccagaggccagctctttctggtccagagccaagcgccggggcggcccttgcggagg

SEQ ID NO: 7351 - DNA, 642 bp, Homo sapiens
  source 1..642: mol_type = other DNA
gtgttaattccaatttaattaaaatgatgcattaatttaaaattgggataactggttgccgactgcacctgggttgcgccagtgctctcggatcatgcacaaagcattggaaattatttgtttgctttttctttttatgcatataaaggcacttaagttataattattgctgttatcattaacattaagcacggcaagttaccccacccgcagtggtccgtggctggaccgctttaagtcactgagcgggctgggctctgaaggaggtcggtcccgctcctcccagacccaagcgtagggctagggctagcgcgctccccagaagtcggcttggagcgcaccccagcggccgcgcggcctccttccagccgccgccacttggcttccggagagctcgccgggcgctgccgctgccgccgccgccgccgcctcctgggaaccaggggactgactgccggaccccgggtggggggggcgcagcagctgcgcctggccccgcccaccacacctgggcgcccgtagaaccgcgcggggcggggcggggcaggaggctggcctggcgctccggccgctttgtcgaaagccggcccgactggagcaggagggtctcgaggccgagtcctgttcttctgagggacggac

SEQ ID NO: 7352 - DNA, 598 bp, Homo sapiens
  source 1..598: mol_type = other DNA
gccttaaattcttgccaagagtatttagaaggaagttgtcagaagtatatcagctaactcatttttttttgctaatggtgtcattcacacattgtgcaacccataattccagatttaattctaccaaaaaatataggtcattgcaaaatgccatattaaaactgaccaattccttttttaaagaagcaagatagggattggacaaaaaggctgagccatttttaatggagtgttaattccaatttaattaaaatgatgcattaatttaaaattgggataactggttgccgactgcacctgggttgcgccagtgctctcggatcatgcacaaagcattggaaattatttgtttgctttttctttttatgcatataaaggcacttaagttataattattgctgttatcattaacattaagcacggcaagttaccccacccgcagtggtccgtggctggaccgctttaagtcactgagcgggctgggctctgaaggaggtcggtcccgctcctcccagacccaagcgtagggctagggctagcgcgctccccagaagtcggcttggagcgcaccccagcggccgcgcggcctccttccagc

SEQ ID NO: 7353 - DNA, 611 bp, Homo sapiens
  source 1..611: mol_type = other DNA
aatattgaagtcttgttctagctctgagtcaagtctgtacttcttgactttctgaaaaaattatcatgcaattaactctacaataagtttttcacgtctagaaaatgttgtggctattaaagaaacatgtgcccaaaattaagtaattccaggatttcattaaggcttgaacatgccttaggctaggtgtaagaagaaattattagaaattataattttctatatttattttttgctcagtttaaactatggcactaaaatgattcaaaatattctctattaattctactaagataaaattaatgcatcttacacaacgcagtgtatgaacaattcatagtaagttgtaaaacttagggtcattttgtttaaatggctaaatattttattttaaatgtctcaactacacttagaagcaaatatgagacattatttcctgtagtatttttcccaaagctagagtttgttttaataagacaaaggttaaacactgcagtgaattatgtctgcaccaatgtgcaaacaccttttgcaaatttttgaagtctgatatttattatgtcatgtctgaaaaagagatcattgtgccatggccttagactattgaaaag

SEQ ID NO: 7354 - DNA, 478 bp, Homo sapiens
  source 1..478: mol_type = other DNA
atagaaaactaatataacgtccggcagacatgaaagtttttcaggcgtcattttacaaatatcttcctagctgctttaagaataatttttttttcaaacttgacatgaacattaattgtgcaatatctccttaataattctcacccttttcaatgaaaagtcactgagcttggtgagtcaagattcactgaaatatttgtcctgccccctaagggtgggcagggtggacagaacgcagcctggacttccggctggcctctgaggagggccctaagcccaggacaggggaaaagctgcgttctttacgaattcccaaagcatctagcggatgggccacttcgcgagcagctggcgaacagttcctttcagtttgaaagtatctttgaaacgagagtgcgaccaggtccaccaactgcgcctgcgcgaaccggccgctcccgcgagcgtggggcaaggctcgtcgcgcctgcgcaaagga

SEQ ID NO: 7355 - DNA, 409 bp, Homo sapiens
  source 1..409: mol_type = other DNA
aaataggtgttttatagaaaactaatataacgtccggcagacatgaaagtttttcaggcgtcattttacaaatatcttcctagctgctttaagaataatttttttttcaaacttgacatgaacattaattgtgcaatatctccttaataattctcacccttttcaatgaaaagtcactgagcttggtgagtcaagattcactgaaatatttgtcctgccccctaagggtgggcagggtggacagaacgcagcctggacttccggctggcctctgaggagggccctaagcccaggacaggggaaaagctgcgttctttacgaattcccaaagcatctagcggatgggccacttcgcgagcagctggcgaacagttcctttcagtttgaaagtatctttgaaacgagagtg

SEQ ID NO: 7356 - DNA, 414 bp, Homo sapiens
  source 1..414: mol_type = other DNA
gcagatatcactatctgactgagtcttacttaatcaggtcctaaaaggtctagctgacacacagctggcctctggccaacagctggcaaataggtgttttatagaaaactaatataacgtccggcagacatgaaagtttttcaggcgtcattttacaaatatcttcctagctgctttaagaataatttttttttcaaacttgacatgaacattaattgtgcaatatctccttaataattctcacccttttcaatgaaaagtcactgagcttggtgagtcaagattcactgaaatatttgtcctgccccctaagggtgggcagggtggacagaacgcagcctggacttccggctggcctctgaggagggccctaagcccaggacaggggaaaagctgcgttctttacgaattccc

SEQ ID NO: 7357 - DNA, 506 bp, Homo sapiens
  source 1..506: mol_type = other DNA
caggcttttaaaggtccttaaaaacactaaaacaagacttgtgactttattgcattgttgtgactccgtatgtctgaaaatccgtaatacgtctaatgattatcaagcagagaagtataagaacttcccagaggttatgttaccataaaatatctagtttctagtgcttaaaacattaaattgtttgcaacatatttttccgtacgttaatcaacatactacaagggaacgcacgccgccgcgccggggctaggggtgctgacggcccgcgcagctcgcgggcctccgggtttgaggccctggggtcagccctgctccgggcttcgcgcccgggcgcgggtcagagccgccaacttcgggccaatcagcgagcggcgtcccggcgcccgcagcgcccaggcccgcgccccccgcgcccccgcagcaggaatggcaggaacggatccgggccgagcccgacccgggacgaggaggggctgagccgcgggggatcctggaagggattc

SEQ ID NO: 7358 - DNA, 431 bp, Homo sapiens
  source 1..431: mol_type = other DNA
gtgcttttaatggtttatgagaacatcaattaagaacatcaggcttttaaaggtccttaaaaacactaaaacaagacttgtgactttattgcattgttgtgactccgtatgtctgaaaatccgtaatacgtctaatgattatcaagcagagaagtataagaacttcccagaggttatgttaccataaaatatctagtttctagtgcttaaaacattaaattgtttgcaacatatttttccgtacgttaatcaacatactacaagggaacgcacgccgccgcgccggggctaggggtgctgacggcccgcgcagctcgcgggcctccgggtttgaggccctggggtcagccctgctccgggcttcgcgcccgggcgcgggtcagagccgccaacttcgggccaatcagcgagcggcgtcccggcgcccgcag

SEQ ID NO: 7359 - DNA, 376 bp, Homo sapiens
  source 1..376: mol_type = other DNA
gctttttcaattgttaaaacagctgctgagtttcaatcggaggaggctcggtctgcgccgagggggaagcgctccctggtgggacatgaatgcacagtttgcacactctgcacccagcagcgtgtccctcgcgatgccgcccgcgagggtcctgtgtgtgtgcgtgcgcgctggcgcgcagcgggagctccccacttccagccgcgagagagtggagcctgagcagcgcacccgccacggccgctgccgccccgtgcgcccggctctcccagcaccccgcgcggcgctccagccaggcgcctgtgcgactagcggcggccggcgaagcccgcgccagccccgcgggtcgctgcggcatcctcccgccgcccagccc

SEQ ID NO: 7360 - DNA, 462 bp, Homo sapiens
  source 1..462: mol_type = other DNA
aatgtgggacactcttaggctttatcctatatatatgtgaatatctcgtaggcaggttaatgaagttaaatgattgaccataaattcttttctctgtcaaataattaaagtgaaaatgattctccatgagaagatttcacttcaaatgagtcatggagacaatctggacttgatttatagaaaagacagacttaaacttgagacaagtttaacctttctgccaatatagaagattagatttgcaaacaatgcccattttctttacaatgaattattttcccttttatttctataagaattagtggcacttatattattatgtattatgaattatgtatgactcattaagttgccagaaaatctcgcctttagggaatcaaaaagtcaacagttacctaattgctctgggaaatacaatgaatttatggagaacttcctcctccagtgggagaaactgccagt

SEQ ID NO: 7361 - DNA, 381 bp, Homo sapiens
  source 1..381: mol_type = other DNA
aatttcattgtggcaataacagaactagtgttttcaatactgacactatatcttaataaataattatatattattagaacttatataaaaccaggtttgctggaaatcaggttctcagttgcaaaaatgagatcaccaaatcattcggtacttaggttgctaattaggtaactttttatcataattacctagtcgctttttcaattgttaaaacagctgctgagtttcaatcggaggaggctcggtctgcgccgagggggaagcgctccctggtgggacatgaatgcacagtttgcacactctgcacccagcagcgtgtccctcgcgatgccgcccgcgagggtcctgtgtgtgtgcgtgcgcgctggcgcgcagcgggag

SEQ ID NO: 7362 - DNA, 471 bp, Homo sapiens
  source 1..471: mol_type = other DNA
tgaaaagtagtcaatctctttaaaaattaaatatacacattacagattcaataatcaaaacttttggcatttcctatagaaaggaaaactgtacatgattctttatagcagctttatttttaatagctcaaaatggtaatcaaccaaaatgttctacttgatggattatcaaaaggcagcatattgtatgatttcccttacgtaatgttctgacaaaagttaagagagaacaacactgtacctgtgtttgtattgttccgtagttaaataagatgtaatgaatgaactatattttaactatcttaattatttttcaatacagaaaataatttaaaataagccctatttgccctgactggggccatgccctgagaaaggcgctgggcggcagcaagggaagtcttccctcgccctgagggtgcggggaagcggcgttggcgccactgaagctgggtgtgagggaggcgtcac

SEQ ID NO: 7363 - DNA, 452 bp, Homo sapiens
  source 1..452: mol_type = other DNA
atatattttatgttgaaccaatatgaggcattgctcaaatttaagtcatattaaagttctaggctagttttgaaaacagctgattggaagcagaggttttcaaatctatgggaaacggccctcctttcacgttttttcggttcctgcggtcacagagggcagggaggctcagctccccaggcccttcccgcggcgcgaggacaagaggtctccggggccctcgggggagcggcgcctcctcctggttccagcagctctgcggccgctccccacccaggcccgcgagaccagcgggacagtccgcgccgcgggagaccaactgggacgagccgcgacccacgcaggcgcgctgaggccggggcaggggcgggcccggctggcgcggccggcctgcggttggggccctggcgggggtgggacgggccaagccgggcagggccggggtggggccg

SEQ ID NO: 7364 - DNA, 578 bp, Homo sapiens
  source 1..578: mol_type = other DNA
aaataaactgaatttgaggccaatatttgaaatctttgtgctatataacttctgaaatacattgtattagaaaagtacactccttggaacttttaaatcatttacaaaacaccagtcccgacccctggaagactgagctgttacctcttctggcgtccgtgcccgcggaagttcgctcctagggaagtcgctcgcgtcctcaagagcacctgagaggatctcggcttggcgcgtttcctcggagccgggggaggcaaagcacggaccccggagtcggcgcccatagcgggacgccctcgcgaggggcgggagtgcgggaggtgggtgtgcgggcggcgcgctcgccctccagctgcagcccgcgccgagcgcgcagggccagcgagcgccggcgcctccagcatggagtgggtgctcttcgtggtcatcaagcagctgaagaactccgtggccaacacggccggggcgctccagcccgggcgcctctcggtgcaccgcgagccttggggcttctcccgagagcaagcggtgtgacccgagtgcgggcactggcgggagggcaccgagctgcgcgggcg

SEQ ID NO: 7365 - DNA, 311 bp, Homo sapiens
  source 1..311: mol_type = other DNA
aataatatgcaaacacttaaatagtgcttattcaggcactgttctaaacattttatgtatatattaactcatttttattcctcagaataaatagtagttaatgatagccttaaaatttgaaccctggcagtgaacactttttaaaactactatttggtctatgataagaaataaacggtgcatttactttcagtccacagtagtagtaacatcgttagttactacgtgataataatttctatcactctcatggttattttaagtatccttttcttctgcactttatgagaaaagaaagccgcagtagctgc

SEQ ID NO: 7366 - DNA, 498 bp, Homo sapiens
  source 1..498: mol_type = other DNA
attcagctgaaggcagacctggctgacagaaactgtgagtgcagtaatagatacactgaacagcttttaaagctgcgcgatatgggctttgggtcacgtcaaccagatacagaaaggctttagggactcaagaaacactttgagtaaacttgttttcctcttttcaccaaataaactgaatttgaggccaatatttgaaatctttgtgctatataacttctgaaatacattgtattagaaaagtacactccttggaacttttaaatcatttacaaaacaccagtcccgacccctggaagactgagctgttacctcttctggcgtccgtgcccgcggaagttcgctcctagggaagtcgctcgcgtcctcaagagcacctgagaggatctcggcttggcgcgtttcctcggagccgggggaggcaaagcacggaccccggagtcggcgcccatagcgggacgccctcgcgaggggcgggagtgcgggaggtgggtgtgc

SEQ ID NO: 7367 - DNA, 430 bp, Homo sapiens
  source 1..430: mol_type = other DNA
atcccgcagcgaagtggatcctccacctctacacaagcattcagctgaaggcagacctggctgacagaaactgtgagtgcagtaatagatacactgaacagcttttaaagctgcgcgatatgggctttgggtcacgtcaaccagatacagaaaggctttagggactcaagaaacactttgagtaaacttgttttcctcttttcaccaaataaactgaatttgaggccaatatttgaaatctttgtgctatataacttctgaaatacattgtattagaaaagtacactccttggaacttttaaatcatttacaaaacaccagtcccgacccctggaagactgagctgttacctcttctggcgtccgtgcccgcggaagttcgctcctagggaagtcgctcgcgtcctcaagagcacctgagaggatctcgg

SEQ ID NO: 7368 - DNA, 604 bp, Homo sapiens
  source 1..604: mol_type = other DNA
gaattttttagaaaacagtgcttcttaatgatatgctattatacttattagttatgtgcaagctttgtatattcttatatttatatataaatataaaaatttgttaaaggcacgtatagttaagagagttttattttaataaggtcatattgtttttactatgtttaaaaaactttacttctgaaaggaacataattatatctaggtcactagtgttttttgttggttgccacagcttggggaaaaatagaaaaaaattaatgactgtatttgaatattttgtaatgcactgctatttattatatatatcaacagtagttcaaggtgccatcttaaattaattgcatcttcattaggaaaaataaaaagcataaaacacaatttctggttactatgaacctaaatgttaagatgacattacagtcttgacacttgagtactgtattactatgtgagctccgtgttaaataatttatgcacattatttaatcctaacaaccatatgactgtagttattagtccctattaacacataaattttagacctttgagttgtcgccttgaatgacgtcaaggccgcgagcgctttcattggtccatttca

SEQ ID NO: 7369 - DNA, 511 bp, Homo sapiens
  source 1..511: mol_type = other DNA
attagatgtataaatgctattgcttctttcaacatatagacttgccaatttaatacacaatattttatttactttttaagaattaaattcaaaggagctacattttcttgtgttttgcttaaatttgggaagaattgttcctctaaaaagtacagtataattggatacagttaaataaattttatctcatcagacttgctagaaagttatttaaaaggaccaagagactccttgatttgaattctaaaatgcaatttttgtgagtgtgttttaaaaagaagactgcatttcgctgaaaaatcttccttggaaagtatataaatcttattagacgcctttgagagtcattaaaagggaaggtacttaaacctccgtaggttcaaccaagtaagttggctgcaggaaaattaacaagccagtggatttccttttcccttccttaggaaacttgtttctgtagatgcaaaaagggcagagaaagagagtggggaggggaagtttctctttcttt

SEQ ID NO: 7370 - DNA, 286 bp, Homo sapiens
  source 1..286: mol_type = other DNA
atatacacgcatgtttatagcagtggataaagaaaatgtagtatatatacaccattgaatactcgaaataatatcttttggcactgcatgttcagttattgtaaaaagcaaatggtctttgtgctcctcaacggtttttaagagtcttgtaaataagtcctaaggccaaaagtctatccaatgtcagagtgaaatcggtcagaatctagcagcttatctagtttccggtggagccaagactgcgcgggccttcatcttcttccaggagccgcagcgtactgacgtc

SEQ ID NO: 7371 - DNA, 495 bp, Homo sapiens
  source 1..495: mol_type = other DNA
atctgcttggatgtttcatggagacttcaaactcaacatattaaaaatggccttattcttaccagttttaacttgttctgccttagtaaatggcactactacatcagttgctgaagtcagaaatactggggttatgtataacttagaggcacctggtgtattttgttggacaagtttttaaaggatgtgaaagaaaaaaaaccttttttattgtgttttaagctacctcaaaattttttggaactattttattataaaattgtagattttcttttacttgtaaagtacatgattaaaattactaaaaggatttttattgatatttgtttttatgcttaaattttatgatgtatagaaaatggtaatctttttagtatccctacagaaatttcaggaaacagccctgtgtctcctaataagagtcttactgctgctttctatggggacaagcagcctgtaacagttcagtatcgatcaatggattctgctgctgag

SEQ ID NO: 7372 - DNA, 628 bp, Homo sapiens
  source 1..628: mol_type = other DNA
aaattagaagtatatatccgtacaattgttcagccagtttgtgcactgtactgaggatatcctagtcttctgactaaaaacaagatcatatttcataacgattattgttacattcacatacaaagtctattataaaactagcatcagtagagtatttaacaatcgcaccctttaaaaaatgtacaatagacattaagagacttaaacagatatataatcattttaaattaaaatagcgttaaacagtacctcaagctcaataagcattttaagtattctaatcttagtatttctctagctgacatgtaagaagcaatctatcttattgtatgcaattagctcattgtgtggataaaaatacacttcctgttttatcaacaaatctaaacatttattcttttaatatgctattcacatgttcagtgtagttttatgacaaagaaaattttctgagttacttttgtatcggaaaaactgttgcgttaattgcatgaattagagccacctacatccattcagtcagtctttgggggttgttttttcagacaggtaaagtctttgaaaatatgtgtaatatgtaaaacattttgacacccccataatatttttccagaattaacagtataaa

SEQ ID NO: 7373 - DNA, 525 bp, Homo sapiens
  source 1..525: mol_type = other DNA
gtaccactgcagtccagcctggacaacagagtggtctctaaaaaaacagagtgtctctaaaaaaacaaaaaccaacctttgttaattatgaacaagtttaatatgagcataaatttttttaaggttctgaactatctaaatatctaaatacagtccctccgtgtactgtatatgcgggtttttcatcccaaatactgtattttcaatccatgtttggcggaaaaaaattcatatgttaattggaccagcacagttcaaacctgtgcctcaaatatttaggtttttaaaaatgatagcattttgtttatacattttgatttttatatcatgcttctgtttaaaaagctaggacaatgaacacaaaatctgatcaatatatgtagacagaaatggaaattaaatgtaacttttgaaatccaaggtgaaatttcttaacttttatactttatttctttctgtttaaaaaaaatgtttcttaagtttatttgaacatttcaatattatttctatttaaaacttttcttt

SEQ ID NO: 7374 - DNA, 518 bp, Homo sapiens
  source 1..518: mol_type = other DNA
taccctaagagaaaacgaatcatttatgggtatattttatactcatttaattgatgtattatatagaagagatggacattagataatttttaaaatattttctatcaactcccttagaatcatttgtgatattaataaatcagattgttaaataacatgacttagtaaagatgctttggtgaacagttggaagcaaattctattttaaacccttgaaacttggtaagaacctaaaatattcttgctaatttggaaaatacctctttatttaaaatttcctaaaaggtagcctctcctcctacttttatgatggaatactggatgattttagtcaaaagacatagttattaccataagaaaaaatgttgccatcttactcattatcaaagtgcccttatgactgtcagagagaaaaagagatcaaagtgtttttgtttactttttaactgtttattatacatacttcttctcttgtcaaagatgcagatggggcattactcttacctctccctgaagga

SEQ ID NO: 7375 - DNA, 546 bp, Homo sapiens
  source 1..546: mol_type = other DNA
aggtcagcaggcctgtgtttcagtcctataaacacaattaaaatgcttaacaagatatcgttttgctaaagactttatattaagctttcagaagactacttttaaagaaagccttaaagattgccacaaataatatggtttttaaaatgatttagaattagaaataatttcagaaccttcttttacatcgatggttccagacccatcaatatcaaataaattaaaggcgtctttaatttcttgtggtagttagatgcctgtaatacacacacatatgggtgaaagataaattatataactataattgatgataaactatattaaagtacctatttcctactataaaatgagttgctgccaggggcagccttccttgctctggcggaaaaacttcggccccggccccggtccccagccggcagccggcgctctcagccgggacctcccggcgtcacctcccgcagcggttgctaaggccgctctcaccgacctctctcatccaatggacagaaaaaaaggcctttaaaccagccctttctcagcccc

SEQ ID NO: 7376 - DNA, 544 bp, Homo sapiens
  source 1..544: mol_type = other DNA
ttttattctacatgaaaatattccttggcttttctttgaggaaaaatcattttcattactgagttataaaattgttaaaagactgaagtctgctagaaaggatgtccagtgatctttacttttatttttcctgatataaaggattaaatttccttattagtaaaatgaaagatttggaactattgtagtcatttgtactagttgaaatcagccataactatgaatgcattccttatgctttctctgtgtaaaaataaaatcaaaccaagatcctacttaatttgtctgtgtgtgtgcccacacaagtgttgtttacctactgctacctaaggaagacacttggtaacttggttaatatgccaggaaaatattatgtagactttgcagatggtaaaatttaggatgcagttaatcaagatttctctaattcttaagttctcaataataactgcagaatgtgctggagctggccggaacagcctgggctctgttccaggccttcccacggacagcacaggatcccagtgtgtcatgtgaccctgaa

SEQ ID NO: 7377 - DNA, 383 bp, Homo sapiens
  source 1..383: mol_type = other DNA
acattatgtgttgcacacagtaggtactcaatacatgcaagttttctgaatagatattttcactgaaaattaccaaaatgcaattaacttcaattttacatttgggatttacagaaaataactctctcttaatgcgcttcgatcgcgataaggatttatccttagtaaaggaaaccttttcgttttagcatttaattttaaagttttcaaagcctccgttttgaaacgagtttaaacttttaaaagttgagcccagggaatgccaaagccctgccgcggcctccgacgcgcgccccccgcccctcgcctctcccccgcccccgactgaggccgggctccccgccggactgaaccgccgaactcagaggccggccccagaaaat

SEQ ID NO: 7378 - DNA, 294 bp, Homo sapiens
  source 1..294: mol_type = other DNA
tttcaagtgcaacttaaaaattcaaaataatttacaggcggctacgttagtgggcgggcagaagtcagcgagggtccgcccctgcgccgtaatcccctgagtggagcgcagcagtgcacagcgtgagcgttttcaaaaccagcagtctttgaaacagctgtaacggcagttccaggaacggaactgccacttagattgtaaatgaaaaacgtggaccacttcgcggtctccttggcatagctctgcagagtggtaaccccagctcaactctcggccgcgatctccgctctggag

SEQ ID NO: 7379 - DNA, 282 bp, Homo sapiens
  source 1..282: mol_type = other DNA
gagctatatatactgctaacactagtgtgcagttactagcagttattaaatatcataaccaatgctatcatcactcctaaagaggataagtatcttatgaacaattttgcaattaaatgtgtcgttaatgttaaatgagacaaagcgtttcaagtgcaacttaaaaattcaaaataatttacaggcggctacgttagtgggcgggcagaagtcagcgagggtccgcccctgcgccgtaatcccctgagtggagcgcagcagtgcacagcgtgagcgttttca

SEQ ID NO: 7380 - DNA, 570 bp, Homo sapiens
  source 1..570: mol_type = other DNA
acaggtccaggtcacgcgtgccttcttttcattagaaaagctctggagccccgggagcccttcgtcccaggcgcacttgccctgcaagcccttctggaaggcggcagcgtccaggcggtccagcgcatcgagccgcgccaggcgcaccgagatgcccccgaatctgtccagctcgccctgcagatcgcacgctccaactggcggattccgcacgtaaccctgtgcgcccgaggcccagcggtaacccgccgaaggcccggggccgtaggttcgggcaagcatcgcgcgccagcggccccagctcagtggctgccgcaatgacccctccgcgctccagagcggagatcgcggccgagagttgagctggggttaccactctgcagagctatgccaaggagaccgcgaagtggtccacgtttttcatttacaatctaagtggcagttccgttcctggaactgccgttacagctgtttcaaagactgctggttttgaaaacgctcacgctgtgcactgctgcgctccactcaggggattacggcgcaggggcggaccctcgctgacttctgccc

SEQ ID NO: 7381 - DNA, 527 bp, Homo sapiens
  source 1..527: mol_type = other DNA
ttaggtggcttttaaaagtttctacggaaccttcaattccacaataaatgcctaaaatcccatagtttgtaagaaagtagaaatcaagtttcctacttaaagtgttttttttccagtcatatcagctattactaagaattataaaacttcttgataaattttttctattctaattaattgacttttagctaattaaaaaatatacgggtttgtattttttgcaaaattatacaactatattacaaaattgaaagaatttggttttttctccatgtgcttgatttttgggaaatcatataacaagccaaaatttcacctttattacatatgcttatattacactttaggtttcacatattctgaactttgttgtaaataggaactgtaatgttatataatcatctttttgtgtcaataattcaacttaagagtagagtccaccaatccttttaattgagatctgaagattgctaactaaatccgaatgtattcctcaactgcatttgcagcctgttccaggttttcgg

SEQ ID NO: 7382 - DNA, 555 bp, Homo sapiens
  source 1..555: mol_type = other DNA
ctgtaggcgcgcgggcggggctcgctcggcgcggcaggtgcggactcggcggcgctgctgcccgagccaggactccgggagaggaggggaggggagggacgacctcgctcggcgcggcccctcccgccgctccctgccccctgggggccgcggcttctgggggctcaaggtctgcggctgcggaacgtaacccgattacccggagcggcggcgcggtggcccaggttgtcctctcggagagcccttcacgcccaagggggatttcaggcggctctggggatgtccccggaggccctctttggatgtgtgtaggcacatccccggaattcgccggccgcaactttcttctggtttggaggcactgccactttaaaagtggtaatcccagcacttgggggggccgaggcgcgctgatcacctgaggtcaggagttcgagacccgcgcgactgtagtcacagctactcgagagactgaggcgggagacccgcttgtcgcccctcctcctaccacagagagagggagaaagaacttgttttcattcataactttttcct

SEQ ID NO: 7383 - DNA, 435 bp, Homo sapiens
  source 1..435: mol_type = other DNA
cccttaaaggggaaaaatatcgatctgattcctagtaacgtttttcttcttttaaagaaacgatgcatgccaccacaatatttttaaaaacttaagcttaaatattattttatttatttctactttctcgtatctattcccagactgaaaagcaaaataaaactttattaggtttcctttgacctttgcaacaggaaaagatctccctcttttcaaagggctgccattattattgttgttgaaaccctaaggtttgggctactggcacctgcctttcctatagtaggaagtccaaagtgcccttgggaggcctcctgccccctagtcacctggaaggtgggggagagggatcacactgtatggcagctctatcccttgcataaagagagggttaaagcaaatctgcactgtgcattcccagacaggcttttttgg

SEQ ID NO: 7384 - DNA, 483 bp, Homo sapiens
  source 1..483: mol_type = other DNA
acagccctccgggaggctgaagtgattagcatcccgccgtcggggctgcttcagctccggcccaatggggctggggcgaggtggagaagggctcgcggagccctagctccaccgcagtccaaccttcggccccggccggcgagagggagagcgctgacaggcgccgtccggagctgcggagggcgtcactacagcccagcgccgacttcgccgcctccgctgccaactgtgaaggaggagtgggcttctgactggggccgccggagaacgaccccccctggcatggtgaggggagggcgactcggggaccgcacgctgtttctgcccgtcggcaggcgccccggcagaggtgaaaaatgccgaggagccctggctgttgtttgtgccggaccacgggcttgaagccgcaacaggggcggcggcggcggcggctgcaggaggggaagcgctcccgggtacgggagccagagcgcgaacgctagc

SEQ ID NO: 7385 - DNA, 505 bp, Homo sapiens
  source 1..505: mol_type = other DNA
cttttcacttttacaaattttataaatttgcatcctttctcagagtagatatctaatagttgacatgtaaccattagtaagatgcataacttctctaaagcttagtttccttatttaatatagagaaaatatttacttcatagtatgtgaatgctcagcattgtatatgaataaagtgagcagagccaaggctgacttcaatgctagctgttatttttgtacttaaaaaatacttgatataggtattcataaataacaggtagattttacctgtttacacttccaactttaataatgagaacacttaattagattataaaattttgagttagaaaatgaacatgaagttgattccacaggattgccactcattttgtttgcaattgcgaaacataaggaaaggtaaagtgcggtttccttcacctcgaagcccagtgcatctccgcctgttttaacaggagagcgtacctgccaccaattgcagctaaggattggtggtcacatg

SEQ ID NO: 7386 - DNA, 295 bp, Homo sapiens
  source 1..295: mol_type = other DNA
acttggcccaaagttttgggaatttttgaaaagtttgtgaactactcttctagttagaattacttcaaacactagaattacctggagaatttaaatactgatgccaggcctcactttgctctggatattatcaatttaaatacaatatgaaaaagcgtaagactgtcttttttaagatgccaagctgctccgctcgtagaagtgcgcaggcgtcaccgcgcatccaggagccacgtgtcaggagtcacgtgtcaggtgtcacgtgtcaggcgtcacgtggctggaggccgtggag

SEQ ID NO: 7387 - DNA, 574 bp, Homo sapiens
  source 1..574: mol_type = other DNA
gctggcacacttaaaggtcactttcctgtaaaactggtttccagagacaaggttgacagaagtttgacttttgatatttcaaatcctgctgatgaaaaaagaaaagtctgtcccgggctcggcagctcccccggggctggacagggcggagcggcggacgtcggacaatgcgcgccacctcacagagccgggcgcggcgggcctccagccacaaggggagggcgccgggctgcacatgggcccctcggggaggcgaggcctgcgggcgagcccttctgagggcagggggtgagggggcggcgcccgccagccaggacagcatcctgccgccgcgcaaagccccgggccggccggtcgcctgcctctcacctagcccgaccgcccgacgtcctactgccgagcgagggcgagcaagccaatgtgcctagcctcctttcagcttcttgggcagccgttgcccgagtgctgacggaagcggccgaagtccgggcccggagctggctcgggcgcggagcggaggctcgcgcgcctcccgggcagccgagcgcgcaggcgcaggtcccagtaaccgccg

SEQ ID NO: 7388 - DNA, 634 bp, Homo sapiens
  source 1..634: mol_type = other DNA
aaacccatgacatgttttctaaaaatgtcatcttccttgtgacgaaaggagctggtcattgctaggcaggtgctgtaccgtttcagcagcaggctctgctgagtgacattttgcaaggctgaggcccccgtaggcgcaggcgccgttggggtgcgcatccggggacctgcaggttacaagcagcagctggaagccacctctacctttcacggggggaagggactgcccgcgcgctcgcccccattatgcccagctccgcgtccccggtccctgcctccaggcgcgtacacggcgcgctaagaggcgcggggagctcttagcgcacctactacttaaccggaccggctacttactggccgccaggtggaagcctgcgatcgagctggccgggcctcccagcaccgccgctcagctccggtaacctttccaggaaagcagggcggcgcggcagtttggacacgccccgagctctcctgggctctcagtccccgtcaggatgggaggcgcgtgccgagggaggaggctgaggacacagcctcctttccgcctatgacctcggggcgttccgcctacgtctgaccgtcaggtgcgcacgttcacgccacccgggatgggagaaagcaggtgtcgcgag

SEQ ID NO: 7389 - DNA, 475 bp, Homo sapiens
  source 1..475: mol_type = other DNA
acgcaggcggatcacctgaggtcaggagaccaggcgtacctgtaaatcccagctacccgggagacgcagtgagccgagatcgagtcactgcactccagcctgggcacagcttaataacttttgatccatacaaattatgtgtatgagagatctaactgtaaattattatacaaatgacattataatattaaatacttaggagtttgccaaaataaagaatggagttcgttttcttaaggtaccgtacacattaactacagttataacactatcaagtcttaaacgcttgacattttaaaatagttttaaaccctttccggaattagaagtggtatttcggaccagaagttcttccgagagtgggcccgagacagcctcccgccgcttccggcccttggccccgaagtctagaaccctgggccggccgcaaaggaaggtctgccgcgcatgcgcgccccggcgcagcctatccgga

SEQ ID NO: 7390 - DNA, 649 bp, Homo sapiens
  source 1..649: mol_type = other DNA
gaggctcgggccgcacaggagcccacggagtgggtgggaggctcaggcatggcgggctgcaggtcccgagccctgccccgcgggaaggcagctaaggcccggcgagaaatcgagcgcagcgccagtgggctggcactgctgggggacccagcacaccctccgcagccgctggcccgggtgctaagcccctcattgcccggggccggcagggccggcctgctgctcccagtgcggggcccgccaagcccacgcccactcggaactccagctggcccgcaagcgcggcgcgcagccccggttcccgctcacgcccctgcaagctgagggagccggctcccaccttggccagcccagaaaggggctcccacagtgcagcggtggctcccgcaagggctgtgaggactgccagcacgctgtcacctctcagcttgggtgctgcaacaggcaaagcagcagcctggcacggtgcgctcccaccgcgctggaacccctctggcagcgagggtttgtcccagtgcgggtgacgcccgaggggtccctccaccaggatccgctcacctgcttccaggtgtgtctcgcgacacctgctttctcccatcccgggtggcgtgaacgtgcgcacctgacggtcagacgtaggcggaacgcc

SEQ ID NO: 7391 - DNA, 599 bp, Homo sapiens
  source 1..599: mol_type = other DNA
ggtgctaagcccctcattgcccggggccggcagggccggcctgctgctcccagtgcggggcccgccaagcccacgcccactcggaactccagctggcccgcaagcgcggcgcgcagccccggttcccgctcacgcccctgcaagctgagggagccggctcccaccttggccagcccagaaaggggctcccacagtgcagcggtggctcccgcaagggctgtgaggactgccagcacgctgtcacctctcagcttgggtgctgcaacaggcaaagcagcagcctggcacggtgcgctcccaccgcgctggaacccctctggcagcgagggtttgtcccagtgcgggtgacgcccgaggggtccctccaccaggatccgctcacctgcttccaggtgtgtctcgcgacacctgctttctcccatcccgggtggcgtgaacgtgcgcacctgacggtcagacgtaggcggaacgccccgaggtcataggcggaaaggaggctgtgtcctcagcctcctccctcggcacgcgcctcccatcctgacggggactgagagcccaggagagctcggggcgtgtccaaactgccgcgccgccctgct

SEQ ID NO: 7392 - DNA, 466 bp, Homo sapiens
  source 1..466: mol_type = other DNA
tcactctcaggctggagtgcagtggcgtgatctcggctcactgcagcctccgggttcaagggattctcctgcctcagcctcccgagtagctgggactatgcctcgtgatccgcccgccttggcctcccaaggtgctgggatataggacctagcatagggtaaatgctcataaatattaatttaaaaaaattaagtttggtttccaacttttccacacagagtgactctgggttaacttgtcggatacttgtgatcaaatgaaattacatgacaatgtatctggcgctaataaaacggtaatttatgagtctagtgaaaacccatgacatgttttctaaaaatgtcatcttccttgtgacgaaaggagctggtcattgctaggcaggtgctgtaccgtttcagcagcaggctctgctgagtgacattttgcaaggctgaggcccccgtaggcgcaggcgccgttggg

SEQ ID NO: 7393 - DNA, 397 bp, Homo sapiens
  source 1..397: mol_type = other DNA
tgattcaaggaataatgagactctaaatcctttaaaattccaaacccagcggggagtggctgctcggtgccagccgacaaaagcgacggcgccctcgcgtcctccgccaggcgtccagcccggacctgcccccgcggccgccaaggcgcacgtgaagctcccgggcggggggagcgggacgcgaacgcaggcctgcgattccagggcgcacgcgcagagcctggagactgggcggggcgtgcctcccgcaggggttacgaacgaaaggcgagcgcgtggcgctcaggagcccgcgcacgcgctgtggtctcgccccgcccatgagcgtccgcgcccggctcgtctacttgcacgcgtgcgcggccagcggcccccagatgggcggggccggccgtgg

SEQ ID NO: 7394 - DNA, 569 bp, Homo sapiens
  source 1..569: mol_type = other DNA
gaatataggtggaagtacaatccccttttaattgcagaaaacaagaaaacccttattgtttatagctgttatgtatgaataggttattagccttaggaaaattatttgtgccgaatacggcttttgagtaagcaaaaaatattaacgtcaagttgaatgtaattgagatttattatcaaaacgtctttgtacaagaaaaaacctattgggaatatggttaatttgtaattaagtgctatttacccaaattaaagaaacaaaaaattttaaaagccggcgaaatactatttaatttacgggcaaaggtttcctaaacagttaccgagaggtaactcccccttcatctgggacgtggctcaagattacaggtgatcgcggtgccccgaggcgccaggaggcaactttcacctgggggaggcgccgggcgccagcgggccaagcggccgggccgcggagcccacttcacttgggagctgccccaggccgggggtcgacaccgcgtcccctcccttagcgacccagctttagggcctaagggcaaatcgagcgctcggtcctcccagcgccat

SEQ ID NO: 7395 - DNA, 721 bp, Homo sapiens
  source 1..721: mol_type = other DNA
gatttattatcaaaacgtctttgtacaagaaaaaacctattgggaatatggttaatttgtaattaagtgctatttacccaaattaaagaaacaaaaaattttaaaagccggcgaaatactatttaatttacgggcaaaggtttcctaaacagttaccgagaggtaactcccccttcatctgggacgtggctcaagattacaggtgatcgcggtgccccgaggcgccaggaggcaactttcacctgggggaggcgccgggcgccagcgggccaagcggccgggccgcggagcccacttcacttgggagctgccccaggccgggggtcgacaccgcgtcccctcccttagcgacccagctttagggcctaagggcaaatcgagcgctcggtcctcccagcgccatgtgcgcggcccgcccaggcccttggccgccgtcgccgcgggggcaggccgcgagccagccgcgagccacagaggcctggtgcgcgctccgcccctgagcctgcagtcggggcggcctcagccagtgagccgggagtcgtccccttcgtcctccctcgcactcggagggcagctggggcggggcagaccctcgggccgggcggcacccgggcgggcgaatccgtcagctcccgcgggaggcccggcgagagaaggacccggtgagtagccacgtcacgctcctcagggaggccccgccccgtgctctcgggccgcccct

SEQ ID NO: 7396 - DNA, 561 bp, Homo sapiens
  source 1..561: mol_type = other DNA
agaattacaaaattatccttattctcaaagtaaaatattttcctagcatctaaataattttaagagttttttattttgcagatttgactgatgaattagctcagaagttatttgatgtttcagaaataacttcagcagcaatggttcatttaacaaaacaccaagattttatcctgttgttaaagaaaaacaaccaggaatataaggcttgcattttgtatcctttaacattacagaatgaaacgttttagtttctatcacattgaaaaatgtgtgttataacttgtaatatttcacttaaaaatcatactttaccatagtgatattttctctggttaggaaatccaagggtcagggctgcagtgagccatgatcatgccactgcactccacaaacaaaaaccttttttacaattggatagtgtaattaataatgaagaatcacactaagctgcacttcatttcatctttgtgtcacaaacctaccaaaggactttatttattaagttttgtaactgtgacttcatatgatttcacaatgtgttatctacagtatgaaaat

SEQ ID NO: 7397 - DNA, 297 bp, Homo sapiens
  source 1..297: mol_type = other DNA
aatagcccagttctggtcaataagatactgtatacagctcttcttaaccttaaggtgactcaaaagtgttccatattgaaggatagagtaagggctcagcaatatggcttataagttgtttttgcacctctccagaactaaaaaaaaaaaaatttacatatttcaatgattttcttaaaaatcaaaagaatatttcatacctgaaattatattaaaaattcaatgtccatagttttactgaagacagctacactcattcaagaaatgtttgtcaaacgagttcgtcaaacgagttga

SEQ ID NO: 7398 - DNA, 503 bp, Homo sapiens
  source 1..503: mol_type = other DNA
gaaaggctggaatgcagtgcttaccgcaacccttgcggttcaagtgattctcctgcctcagcttcccgagtagctggaattacaggcggggtttcactactaaaccccatgatccggattacaggcgtggcgcctgaaaatgtttcttataaagatcatgcgacttgaaatatttaacatcattttaaccgttctacatataggatctgttttgcaaacatgacgctgttgtttataaaaatgaaatatgatgctaattcaaattttatcttgttatatggactaaatattacatggaattgtgataagagcatacatctgctttaaaactatacaatttcttttctagtgcccaagtagatttgctctgggctcaagcagttattaaaccccggcgctgtctctgatagctgcagtttgcattccaagcatgagcacagtgctggggcaggagcagctgctctgactggcaaagagaactgaaggagttcccttccctttgt

SEQ ID NO: 7399 - DNA, 413 bp, Homo sapiens
  source 1..413: mol_type = other DNA
gaagttgaatgtcatatacccctctatttccctagatgaatccatgaaagaaatgaaaaagcaagcttgtcttctgcagaaaatctgaatctccgatgactgatctgatactagtctgcaattctagttttagcattagtaacataaagtggtgtcaatttataaataatatcttctaatgaattaatgctcatttgcaatgatcacttccatacaaatttaggtaaagatgttattcagaattggattctctctatttaaaaatgtcttaatagccatattttaatctacgtaattttaaactattctgaaagaatccatttctttgcgagcccccactggcgcaggctgagccggctgcggctagggctgcgcgagggaccgagccccagcgccgcgggctccccgcatgc

SEQ ID NO: 7400 - DNA, 283 bp, Homo sapiens
  source 1..283: mol_type = other DNA
aatcatcaattaaacgcgtttaggaagaagcccagtttttttttttttagaaagccaaagtgcaatttgtccaaacataggtgtgccttgtaaagtgtaaaaccccttaaattgcaaattgcaacctttggcaccatctgcaaattgtgggcgggactgcaagttgcagagcccttcagtgcctgtcggaacggtcccatttgctggagaaatccttcccgctcccccccgcccgccttcgggcaggaggcggggctgaggacgcggctgctgctcaagtggc

SEQ ID NO: 7401 - DNA, 487 bp, Homo sapiens
  source 1..487: mol_type = other DNA
ttgtcttctgaatctccgatgactgatctgatactagtctgcaattctagttttagcattagtaacataaagtggtgtcaatttataaataatatcttctaatgaattaatgctcatttgcaatgatcacttccatacaaatttaggtaaagatgttattcagaattggattctctctatttaaaaatgtcttaatagccatattttaatctacgtaattttaaactattctgaaagaatccatttctttgcgagcccccactggcgcaggctgagccggctgcggctagggctgcgcgagggaccgagccccagcgccgcgggctccccgcatgctccgtgcgcgagtgcccggtgtgtgcgcgccggcgagagcaggggcccgcccggctccccgcccgccgcggcccgaactcatgcagctccgagcgagcgagcggcgcccagcccagcgcctcggccgaacccctccgcagcaggtacgcgc

SEQ ID NO: 7402 - DNA, 545 bp, Homo sapiens
  source 1..545: mol_type = other DNA
ttcatatagtaaattcatatttgtactggaacatattttaataataatcgtgtaatagttaatatttgtttaacacaatgtatcagatactattctaaatcctttacatattttaatattcatttaatctttccgtggcaaaagagccagcagttgctgtcacttcaatatattttggaatacatttccctccccaaattaaattcttggaggtaaaaactgtcagctgttcttccatagtgtctggtacataatagaaacaggagttcaataaacatctttttaataaatggccagagagctgtgcccctagattttaaatgcacacttggaaactcctgctggccattagccttctaatctagtagaattctgtgtaagctacaagtactaccacacggttctggtcaacgacgacgatattaaacattgtatatgaagtctcaaaagacagagagcttgctgaaaacaaaactaagccaacgctcggttggttgtcaagcgctccagcgccccagacgagtccctggccctggtgagagact

SEQ ID NO: 7403 - DNA, 646 bp, Homo sapiens
  source 1..646: mol_type = other DNA
agctgcatctatgacatgcctgtttagtgaaactttacttcagtccataaaaatacaatttattaaaagcacaaaactagtggctagcttcaagttaacatttttgttgctttcctctaatgttaaatgattttttttaaaaaaatacgttttaagtccagacaaaattaattttcaaaaatgaaaattgtaatctatccacaaatgtaagttttaccgttttgttttttgcaaaaaaaagtaccttttatctttccttatatttgaggaaacaagcttatctttgaagaagtagctgctgaatttgcaagatcttttgagtacttctaactacacgctttattactacacagttaaatatttaaacaacagttgtctcctttgtctacctccagaggtacagccttggtgggacagtctggcgcttagtatattagtggcctcactacctggagacactgtcccaccagtttggccgccgcgccaagccggtggctcagcccgcagccagccaatagcgtgctaggactctaggacgcgcgatggcgtaagctccaacgcccgcgtgatgacgcaagaggcgccaccgtctccaaggagtggtccggggcaccggtttagggcgggccgagtggacttccgctgc

SEQ ID NO: 7404 - DNA, 484 bp, Homo sapiens
  source 1..484: mol_type = other DNA
atctttttaataaatggccagagagctgtgcccctagattttaaatgcacacttggaaactcctgctggccattagccttctaatctagtagaattctgtgtaagctacaagtactaccacacggttctggtcaacgacgacgatattaaacattgtatatgaagtctcaaaagacagagagcttgctgaaaacaaaactaagccaacgctcggttggttgtcaagcgctccagcgccccagacgagtccctggccctggtgagagactcccgcgggtcactctgggtctcgtcgggccacctaggaggcctgagagcggcgttctacgcggccccaggccagcagcggaagtccactcggcccgccctaaaccggtgccccggaccactccttggagacggtggcgcctcttgcgtcatcacgcgggcgttggagcttacgccatcgcgcgtcctagagtcctagcacgctattggctggctg

SEQ ID NO: 7405 - DNA, 514 bp, Homo sapiens
  source 1..514: mol_type = other DNA
gaattttaatggagtattttcaacataagtttcatcattaggaaacaaaattgtgatgatttcacttatccttaaattaaatatcttcagtggatgttcatgaaaagtatctattagtataaattgaatacatttaatgtttttatatgacttttctgcaataaagaaaacccctaaagttgtatagattgaaaattagtgacatttcactaacattcatttggttgatcaattgacattgagcacccagtactatgtgcaaagctggcaagtgcctgagttgagatttgaacccaggcagtatggttctaatttcacaattgttaactgctatgaacatgcctccccaggaatatagtataatatagtttatagctggtataatataatttatagtttttgcttagcctttagttgtattaaatgaaatatttctgtacatgttatattgtaatcttaatgatttacagttgattttcaaattattgcacagtatttatctttcctagaaaaa

SEQ ID NO: 7406 - DNA, 448 bp, Homo sapiens
  source 1..448: mol_type = other DNA
tcccagccgctgcgtggcacttggccgcacaaggcgcaggggcgctttgcagcgcttggcggtgctgtgtgccggatgccccagagcccggcgttaggatggcgggcttgtagcaactcctcagttgatgaacgcgcttttaaaatagggtcccttaattaggtaacccttgccaattagtatttccatgatgcgtattagggaaaataccttaaaggaaaaggagaggatatcgcagctgttgctattatgttttcgcatttgctgatgcaaacatccccattacctgcggctggggactgggaactttccgcggcattgtccccagccagcgcctcgggacctgcggggctctcacactcaccccggccgctcgggcgagagttctgtcccgccccgcccggctgccgcgtgacgtgtctgtttggcggccagtttggccaatcat

SEQ ID NO: 7407 - DNA, 475 bp, Homo sapiens
  source 1..475: mol_type = other DNA
tattcactgcaaagactagccatgtatagatagtgccttttggtagaaattggcatgcgataaataggatttttttgaagtacaggacaaagaaatattacaaacaatcatacaaggtagaactatattgttaattagttccaaattctgaggtgttcccttaagtcttgctaattaagagaaatgaagagtgcaagatagccctttttttatcttcaaagaataaagatgaaagaaaacagaaaatgaaacctctttacttgctccgttctttaaaaacagagccccaagaaaatctgcttgtgctcctggaattagaagcaagttttcaaattgtattaaattcctccaccaacaaaacgcacttagaggtattttaagttaaactagcacttaaggacgaccagaagttgatttaaagtttaggaacagggaaggactggctcccatctcctccccaagcgattcaacacac

SEQ ID NO: 7408 - DNA, 654 bp, Homo sapiens
  source 1..654: mol_type = other DNA
actattgcaaagtaaatattttaatttagcttacatttttaatgcattttaaatttataataataacaatagtttatataatgtggaaaaaagtcatacataatatcattactttctataatatatacatatttttatgtaattgtaattgtgtaattttgaacttagaaattttttttggtaattcaaaggaacaacatgacaatgaaggatatgtatcttttacatagttcaaaaaaatcacctagtgctaatgagaatcagaaaatgactattttctggagcacatgatttaaaatactggtttattatgagtagtaagaaataattttatcttttaatgttacagaagtataaagtgtagaatctttaattttgtaaatattggatttgactgtattgccttataaaaaactcaaaataaaaaaatcattacacaaattatgaaattcaaactgtgttgttataaacaatgtagctttaggatacattctactcacaaaacagtcgcatgtaaaatgtttttatacacgcattaaagaaaaagaaactccttaaaatgaagtaactatttcctgtttcatctaaaaagcttaggtcgagcacaagctcctcctgtttttttctttttttaaaaaaaagagctgagtaatg

SEQ ID NO: 7409 - DNA, 587 bp, Homo sapiens
  source 1..587: mol_type = other DNA
attatgtttaaatttattaaaatcggtattcattcacaaaggttagatatcagcattaaaaagaagtataaactaaaaacatttctcctacttttacacctgtctgctcaatttctatgcagagattttacataattatctttatgcacacacacacacaattattcttttgttacttaatatcagatatgttatattttagaaatttacctataccactacattacgagattaaaacaaatttttaaagctggttagtatttcattttatatttgataattatttaactattccctaaacttttgctatcataaactctgatttacatatatttttgctgaatcatttggcaacaaattacatatgtatttcacatgcatctctgaaagataatgacattctcctgtgcagtcacaattttattgtcacatctaagaaaattaataattccatatataaattaaaatacaattcttattcatattttttcaattttccaaaatatattgtatatatgtaaaaatctggggttcaatcaagtttgacaaactgcatactgagtttttgaaaattccaggccaggccc

SEQ ID NO: 7410 - DNA, 325 bp, Homo sapiens
  source 1..325: mol_type = other DNA
ttaaagcacagccctgaccatgtctttgctcagcttcacttttgaggaaaagaacgctgttttaatcatcgaacgcatcacactgccgagggggtcggaggcggacgccttaggccgtctgccactctgacagacacgtgtcccctgggccacagccctggaactgtctcgggattcccagcctgtgggcgatctagccccgcttccttttaaaacaggaacgccgggtcgagggagcctggcgtggccgcgcagtggccgggtcccgcggattcccctccagccccgctttgtcagcgcgcagcgctcgccgggcgccctgcag

SEQ ID NO: 7411 - DNA, 567 bp, Homo sapiens
  source 1..567: mol_type = other DNA
tttgtttcaaacaatttatgtattattaaattctgaaaccaaatcagtaaatttatagtcattaaattggcgatttatctcccttgtccattgtattttaatatgtatttgtaattaggttagttttcagcaagaattacttttttttgaagtaaatgacaatataaatttgtttccaagtgagaatttcagtagttggaaactccttattttccaagtaatgctttcagaatatgttagtgcagatgtttcaagtgaactggttacatgttgctccaggaagaaaatacttccgcagagcgtgaaatgtgcccgaggggctgtgtcctcgcgcggctcccggagccgtttcccagcctcaggtgtctctcgccgcaggctgcggccgctctctggagcaagcgtccggggatcgcgttgccagctgcggcggccgccacagccacagccgccgccgccgccgccgccgcccctgcccctgccgcccctgcccctgccgttaggtggtggggtttctcagcccggcggcgggaggcgggccggcctcggcttcctgtcggaggacgc

SEQ ID NO: 7412 - DNA, 532 bp, Homo sapiens
  source 1..532: mol_type = other DNA
tttaattcggatcataaaaattgtcaccttgttattttaaatttgtaatgccagatctttttgtttattcagcaaatacttattgagcacttactctgtgtgcagacaactttagcataaccctttgtttcaaacaatttatgtattattaaattctgaaaccaaatcagtaaatttatagtcattaaattggcgatttatctcccttgtccattgtattttaatatgtatttgtaattaggttagttttcagcaagaattacttttttttgaagtaaatgacaatataaatttgtttccaagtgagaatttcagtagttggaaactccttattttccaagtaatgctttcagaatatgttagtgcagatgtttcaagtgaactggttacatgttgctccaggaagaaaatacttccgcagagcgtgaaatgtgcccgaggggctgtgtcctcgcgcggctcccggagccgtttcccagcctcaggtgtctctcgccgcaggctgcggccgctctctggagcaagcgtccgg

SEQ ID NO: 7413 - DNA, 539 bp, Homo sapiens
  source 1..539: mol_type = other DNA
tttaaatctggagcctcctgcagagctggtgaataccgcgccaggtgccaggtccatcgcggcgaggctgcaggagccctggaggggagcaaaaggagccccgcgcgcaccggacaggctgtgctctttgttaaagaaacaaatacagaaaacgccgcggccccacggcaccgtgtcattggcttttgtcacttgaaggcgcgtgagagtgccccgctcgggctaccagaagcgtgcagccactgctgggttttcgttttcgaattcgcaggcacttgggccaaaattgcggaccgcgcaaggagcgacaatggctaggtgcgagtgcccgcagctccccgggcagctccaaggggccgcccgccgcgctccgcagctgcgcgctgggcccagccacccgacagccagcaaacgccggcaccaaccgccgcgcggccgggctgttgggcgggtggtcgcccggcctggcggcgccgaggggcgcgaggctggcggggcggtgcgccacgtgcgtcaccggccggggcggggccggcgtc

SEQ ID NO: 7414 - DNA, 645 bp, Homo sapiens
  source 1..645: mol_type = other DNA
tgcccgcagctccccgggcagctccaaggggccgcccgccgcgctccgcagctgcgcgctgggcccagccacccgacagccagcaaacgccggcaccaaccgccgcgcggccgggctgttgggcgggtggtcgcccggcctggcggcgccgaggggcgcgaggctggcggggcggtgcgccacgtgcgtcaccggccggggcggggccggcgtcgcgctcctgcccgaacccccacctttcactaagccaaggctgaggagtgggaagaccgggctaggagtttttgcaaaacctcgcccccctgtaactgtcagactgcccgactgtggggccgtctccggagaagggcgagggcctgcgggggccgcgtgcggtcccggccggcgggggaaagccggcgggcgctgcaggtgcacgcgcggccccatcggcctcacacgcctgccccgtgcggcagagccccctgcaccaatccggggctggagtggtggtgggggcccgagggcggcggggccccgcggggtataaatagccggcccgcgtttgacaggcgctgcggtgactggcggtgccgcccccgcccccccgccgcgtggggaggggaggagcactctgactccagtgtcctggtggaggcggcagga

SEQ ID NO: 7415 - DNA, 277 bp, Homo sapiens
  source 1..277: mol_type = other DNA
gacggaaaactaataatttagtatttttagttgatgtgtcgagtagctgggagaaatattaatttcacataatatacagtgtttttgatattttaaagtcgttttaacagagaaattcacatctatccttccctctcctaggaaagctaacggaatgcaggatcagattacatcggtcagctctagagacctcaggtggtgaggactacaaaggtctccccacctcccgggggccgcggaggcggggctggatgaaggtcgacgtgcctcctccggg

SEQ ID NO: 7416 - DNA, 353 bp, Homo sapiens
  source 1..353: mol_type = other DNA
cattcccacccaccacctggtggtggcatttgctaaagggaataattgccacctccctcagagggttgcagaaaattaaaagagataatagatgtgaaagtgctttataatctttcaagtaaagagtaatcatttagacaatgttataaacgtaataaattattggtttccatattcaaagacggaaaactaataatttagtatttttagttgatgtgtcgagtagctgggagaaatattaatttcacataatatacagtgtttttgatattttaaagtcgttttaacagagaaattcacatctatccttccctctcctaggaaagctaacggaatgcaggatcagattacat

SEQ ID NO: 7417 - DNA, 431 bp, Homo sapiens
  source 1..431: mol_type = other DNA
tctgttacctataaatatttttactggtctttagacatcagattgaactgaattgaatgtacaaagatctggcttgcaagataaaacctattcctcagaacgatgtctttaataggcaaaaccaaataaattgtttactactaccagacccctataggttttatgttacagatgtaaaacttaggtatagagaggttaagtaacttcacatgttaagagatcttttcaactgtaaaatataatatgtcaccttgctttaagcttcattgaggcttataacctgatacattaatgcacatgtaggaaaattttaataaacctcttgatgaaggacagagaataggtaaactcttttttcttttaatttgacgcccccacggagctctgctgcagagccctcgagtcccgcacttccggccgccaggtggcgc

SEQ ID NO: 7418 - DNA, 538 bp, Homo sapiens
  source 1..538: mol_type = other DNA
ccacaccaaccgggccgcgactcctgccggtgtcgcccacttgcccgccaaaggccgggcctcttctcccccagatcggggagaatgagaaccccgggaggtcggggcctagtccggaaccagggcctctggtccctggcgcgcgggccataggggtcccgggcgggagtggctcagtgcccgccgggccgaggttaggggtgacaggcccggttaccggcgggcgggaggctcacggccggcatcgttccggctgctcccgctgctcccgccaccacccggctcggtcagtcagtttgtccgaccgccgccgctgccgttccgccaccaggcctcgggtgtcgccgcgttgccctacccgtcggcggcggacgcggagggttttcccacccgggtcacgcttcacgccctcctctgggtttcggagcttgccgggaaacctggaggctggcctgcctgtggaggccgggagggtcggggcaggccccgcccatcatttcagtgcgtggtaccctcgaagcgcccgcggagctacggg

SEQ ID NO: 7419 - DNA, 391 bp, Homo sapiens
  source 1..391: mol_type = other DNA
tggctcatataacttgaaaatttttagatcaatggaatgccactttgaaaaagttttacggcagctgttaatgaaatgacttacattttactcgagtaagaactagtttgaagccagctccaggcagtgcaaatatgtcacttcggatctgactaacgggctgttaacaagtctccactgcggtgaattttagcactttgggctcaaacgatgatcacacagtgtgcgagactcccgtagctccgcgggcgcttcgagggtaccacgcactgaaatgatgggcggggcctgccccgaccctcccggcctccacaggcaggccagcctccaggtttcccggcaagctccgaaacccagaggagggcgtgaagcgtgacccgggtgggaaaac

SEQ ID NO: 7420 - DNA, 577 bp, Homo sapiens
  source 1..577: mol_type = other DNA
ataaatataagtaaaggtttatcttttcagtttcatttttttcaaaataaagaattgtgaaaaagagattaaagataaattgctattctaaacttatgttacacaattagtctttttaagggtttaaaagtaacttttttcctaaaactattttacttctaatgtttttcaaaatgaattcactaaatctttgtaaaatcaaagttagttcaaatggatgattattcatttctagaaaaactgaatccccagagttgttctacttttcaaacaggtgaaataaattataactgcgggggaaaaacacacatcccaaattttaaaagtcttaaatttggcaaatacagttaattctatcatatgtgttaattataaggctacaggacatattttacaatgtaaacagtccctgcaaacatcaatgcatttatggtttaaaaaaatacaaactgcacacatttgaaccgtagggaataagtcgttaatatacttcagtgtataagaaaagtctctgcaacgtttcaactaaagactcaacttgcaatgggccccacctcccgagaagagtgacggggtg

SEQ ID NO: 7421 - DNA, 481 bp, Homo sapiens
  source 1..481: mol_type = other DNA
agtccttgactttcccaatggcatattcatctgctcaaacagatgtcaccaaaacaaaacaaacttttaacaaaaagcaatgtttgcatatttggggccttttgtatgacaatattgcacgtttcctcagaaaaattcacggagattctttttccttaggtagacaaagacaacctctaagtgcgctcagttaatcgcgcctagtaactaccagttggggatgcctagtgctctccggtgggcggtctcgaactccagcctgctctccggcagcccatccaagtgcgccccgcacagggcaagctttcggcgaggaccccaactcccgcagttcacagaggcggcggcggtgagcgcagccgatgccacatcctcagcggcgcgagatacgtcgatgccggaaccgacccgacgccggagccgtcggctccgtccttaaaaggcggctctgcggccctctcgcgagagagtgcccgtcgga

SEQ ID NO: 7422 - DNA, 582 bp, Homo sapiens
  source 1..582: mol_type = other DNA
ttggggatgcctagtgctctccggtgggcggtctcgaactccagcctgctctccggcagcccatccaagtgcgccccgcacagggcaagctttcggcgaggaccccaactcccgcagttcacagaggcggcggcggtgagcgcagccgatgccacatcctcagcggcgcgagatacgtcgatgccggaaccgacccgacgccggagccgtcggctccgtccttaaaaggcggctctgcggccctctcgcgagagagtgcccgtcggaggttgcgcggcttcctccagagggcgggaggctgggtcagtcagggcgctgggcccagcctctctgcaggctggccttccgcgctgccgtgaagcccccgacaggtcccacgcctgcctaggtagaccggcgccagcccgagtgacgcctggcgtgtggccgcgggcaggcggctccgtgcggcggggcgggcgggtgccacacctgtgcgggcaagggcggggcgggaaggtgcgcaggcgcgctcggggctggtgggcggtggctcctgggaagttgcgcagccgaactggccggctgggcgcgcgctcttgc

SEQ ID NO: 7423 - DNA, 539 bp, Homo sapiens
  source 1..539: mol_type = other DNA
gcaaggaggaacctgccgagccttcggtgcggcttgtttcctgcctgacagagaggggagtgggggcgctggggtggacccgccatcctgcggaatccgggccagataacagcccccggcgggaccgcgaggacacctgcgctcccttgcgtgtcgcactcgtgcagctcccggtggcgacgggagagcgtcagaaacgcttcgggaacacggacagtgcacttcaagttgctcccggcacaacgggaggtcgggagctcggagcccctacgggcggtccaagtgtccgcgagaagcccgcagcgcccaggaccgcgttgagcgctcggggcgcgccaagccgcgggttggctgggacgcggaatacgcgcggccccggagcgcctttcgttttaaggagccttactgcgcaccggcgctcagcagcggcagcggccaaggcggcacaccggagcctccgaggcgaacgacggctgctgccgcagcagctgaaggccagtagggggaggcagtgcgagccagccccgactgctcctcct

SEQ ID NO: 7424 - DNA, 408 bp, Homo sapiens
  source 1..408: mol_type = other DNA
tgttctctttttcatagaggaaaagctgactttattgatcagaaaacaaaatggaattactttttttttgctccgttcttggcgggtgcccagagcggcacccggtaattccacggtactatttacagtcgccctttaccgccacctgtaagaggcagcccacttgaggagaaagaggcgcgccagacggagggtccttccttccgcaaggaggaacctgccgagccttcggtgcggcttgtttcctgcctgacagagaggggagtgggggcgctggggtggacccgccatcctgcggaatccgggccagataacagcccccggcgggaccgcgaggacacctgcgctcccttgcgtgtcgcactcgtgcagctcccggtggcgacgggagagcgtcagaaacgcttc

SEQ ID NO: 7425 - DNA, 214 bp, Homo sapiens
  source 1..214: mol_type = other DNA
cattaattgcgcaattgattagatcactcagtagatcaaatttttcatgctaaagcatctggttaattaggttttatcacgattaaaaaaaaaaaagcccattcttagactggtttgcagaccacggtcagccaatcttaggtgacctgaagcctacctcaaatactattgtttttatagcttaaaaagaaatagttcaacgtggtacggcgtg

SEQ ID NO: 7426 - DNA, 304 bp, Homo sapiens
  source 1..304: mol_type = other DNA
ctttgcaataaggtattttttaattaaggtatgtacattgtttctccagtgcaatactattgcacacaatagactacagtatagttacttttatatgtactagaaaaccaacaaatttttgtgattcaacccactcactttttacagtaatgaagcactacatcacatcaggcccgagacagggatctaattaaatttatgtatttatgtatttatttgagaggctggagtacaatggttgtatttttgatagaaacaaggtttcccggtctcgtctaattaaatttaatacagtaaggcatgt

SEQ ID NO: 7427 - DNA, 305 bp, Homo sapiens
  source 1..305: mol_type = other DNA
gccagaatctgcagattctccttggcggccggtttatttttttaaaaatggctgggcaccccactccatgtcttaaaaaaaaaaagtatgattattatcagagtctctaggtgacactggcttaaattagcatttaaaatgtcaacaggattaagtaagtagttccttctcactttttccacaggaggtgagaaaggtctcatggcactgcggctggagggctggtcccacagtgagctacagccctgcccgctggccgtgggagaggctcccagccccataaagatctgtgaccggcagcccca

SEQ ID NO: 7428 - DNA, 290 bp, Homo sapiens
  source 1..290: mol_type = other DNA
gccagaatctgcagattctccttggcggccggtttatttttttaaaaatggctgggcaccccactccatgtcttaaaaaaaaaaagtatgattattatcagagtctctaggtgacactggcttaaattagcatttaaaatgtcaacaggattaagtaagtagttccttctcactttttccacaggaggtgagaaaggtctcatggcactgcggctggagggctggtcccacagtgagctacagccctgcccgctggccgtgggagaggctcccagccccataaagatctg

SEQ ID NO: 7429 - DNA, 450 bp, Homo sapiens
  source 1..450: mol_type = other DNA
ttgctcaattaaactcagttaaatgtaatttgtctagggttttccttttaacagatctaagtgcttctttaattagaaacaaatattccacaacagattgtgtgaatcaaaccacaaaacgtgagtctgaaggttcaagatcttcatggtacaggcatacttggaaatataaagaaatatgcatgcttggtaagtaagataatatgaattgagcaaatgtgactcccatgggctgttttaaaatttagagctaattacttaatctaaagctaatatttctgaaggaagtttttttcaatctgataatcataccaccataggcagtttatttaagaaaacacattaattaaaacatcaacgttgtaattaatattcacaatcacagatgatgcagaatcgctgagctctgaggccccacagcgttccagcctgactgtgctctgaggaccc

SEQ ID NO: 7430 - DNA, 635 bp, Homo sapiens
  source 1..635: mol_type = other DNA
ccattttaattgtacttattgtgaattcattgaaatggaaagaaatatatccagcaataaagtaggcctgttatttttgcttgttacgaaggaccttaattactgctgtcattagcacctagtgttcaaaacagtctgtttaaatgtactgctttatttttttccaagggtaagtaaaacaataattgacttagtaacaacaatcattatgtacagtgagttaaatattacacatttttgatgcctatttctatttatttacctagacttggaacaagtgtccgtaagtagcgctgttactagcgcagacttattacctgggttttaaaaacaagtcactcatttgcctttttctttaactgtaaagcttcaatgtttctgcctggtcatgcacagttctgcaatataatgcataaatgtataacgcttgatactttcctaccaggcgcgtccccgcgcacgcgcgcgcgcatacacagagccgacggcgccgggcgccgaggcgacggagacgggagccgggtgctggtgcgtgccgcgcccgctcctgccgggtgagagtccgggccgggttttgcgccgtgtccgcgggcctgtctcacggcctccagccgccgccgctgccgtgtttactg

SEQ ID NO: 7431 - DNA, 269 bp, Homo sapiens
  source 1..269: mol_type = other DNA
acataaggcttgtctctacagcttaggaggctgtgccaaagccaaaataataatgtattaccttgagcaagaaatgtgttgggtattttctcaattctaaaatattaaatggccacgcactacatttataagctttccgatttcggaaataagaaaaatatgaaaaagtctgaattctcaggtttcctgatagacctgatgagccgcttcaccagcgccgcttaaggtcccgcccacagcgacttctcacggcgcacgttctgtgggcg

SEQ ID NO: 7432 - DNA, 651 bp, Homo sapiens
  source 1..651: mol_type = other DNA
gattgaaactcttcaagtcttagactcacaagtcaattaaatgttgttaattaatcttccaataaaattaaattgttataccaaattcaaagtcaagatttactataaaatattaagtagtaaaattaatattgatccaatatataaacttgtgattgcataatcatagcataaactacgtttatgctaagatttatttcaatgtgtttgaaacagagagatttacatctgtttacatgttgtgtaacttcgagcaagttgccatcagtttcatcacctgggttgccacgaaggttaaaccacaataaatgttagcagctcttattaatagtgttgttcgagagaaaaagaacatattgttttatatacaatgtatttattaacacttaacgcatctgtatttgtcatatacacataatcaccatgactgcagatctgttaacatctagaactctggagaatgtgcacttattactggacgttgttcataaatatgatttacataaaattcagggggaattcctcctgggctaacccgggagcggggtccaggccacaaccggccggcggcggcacaggctccatgtgcggctccccctggaggcggttgagcccctcggagcaggagcgcgtaccgcctcccgcccgcca

SEQ ID NO: 7433 - DNA, 617 bp, Homo sapiens
  source 1..617: mol_type = other DNA
ttgttatggggtataatattgttacaaagtatctcaaacaaaatgtctttttaaccagtaaattttaaccaaagtcaaaagtttagaaatgctggtcttaattagtgattgaaactcttcaagtcttagactcacaagtcaattaaatgttgttaattaatcttccaataaaattaaattgttataccaaattcaaagtcaagatttactataaaatattaagtagtaaaattaatattgatccaatatataaacttgtgattgcataatcatagcataaactacgtttatgctaagatttatttcaatgtgtttgaaacagagagatttacatctgtttacatgttgtgtaacttcgagcaagttgccatcagtttcatcacctgggttgccacgaaggttaaaccacaataaatgttagcagctcttattaatagtgttgttcgagagaaaaagaacatattgttttatatacaatgtatttattaacacttaacgcatctgtatttgtcatatacacataatcaccatgactgcagatctgttaacatctagaactctggagaatgtgcacttattactggacgttgttcataaatatgatttacataaaattc

SEQ ID NO: 7434 - DNA, 457 bp, Homo sapiens
  source 1..457: mol_type = other DNA
aggtctttgttgaccacactgtatgatttagtagcatctgacatattaaatattacaatcaacaaatacttgttgaattaagaaacttactgcttgaggtttttaaaaagtaatcacgaaattactttttcaacaaaaacaacagttagggaataaacatttgataaattaacttttagacctatagtattataggataaagtccaaactttggagttattcataattacttcacagaattaagattcaatgcagatgaaagcgcttttgtaactaaggcactataagttaccctcagcgcagcgctaggaggcgctactccggcgcggggcggggctcctggccgccgttgccagggaaaccgtctgggcgtccagcccgctgggccactcagctcgacctctctccagcgttagcaataggtggagcgcgggcgggcagtggccctgggaaggcg

SEQ ID NO: 7435 - DNA, 488 bp, Homo sapiens
  source 1..488: mol_type = other DNA
tttaaaagttttttgttttcttaagttttcacaagaataaacattgaaaataaaatgtaagttagcagggagatttcagacctgggctagctctggaaccacattttacactgttgaaatcccaggttcagagttggtaagctggagagctgcacaaatctaattagaaggttgacatcttctctcaaaaagtgatgaaacgaaacgctctttttgacaagttcagccaagtctgaaagagtgccccgctcttccttctgggagagctccagctaggcagaacctttcaccaagcgtgcgggggcgcgggtgctgaccgccgcggtgcgccctccctccgacgtgcggtgtgcggggcgcagacaaccagcggccggcccagggctttcggggatgggagggacccggtgctcccggacacgcccccggcaggtcccacgcccgggtcttctgagacctcgcgcggcccagcccgggagcggcccagc

SEQ ID NO: 7436 - DNA, 550 bp, Homo sapiens
  source 1..550: mol_type = other DNA
cgtttacgagaggcacatacatttgctaaatgtaacgctcaggtcgaggggtcgcttcctctttgtcgccgattgagttgaatttgagacccgacaggggtcggtccccaagcccgccccgcccgcggcaagtgcgtgcccaggcgcagccaccggcgagatcaggagcgcagcgcccgcagcctgagggaaccggcgcagggcagcagcggctgcagctggattcgcgcgccccagcgctcagtggcggcggccgggacaccctgggcagcaccccgcagcaatcgtgcccgtccccgccggggctggagggcgcagggccgccaccctgcaagttcgtgggcccccggccaccctgccgggcgagagcaggacgctcggcagcaggactcctccgcaagccccgcgggccctctgttcccgcgccccccgggcgcccaagaagcaggggaaggggccagcgccatccgctcgcccggaatccggtccccgcggcggctgcgcgtcccggccgcggcccctccggcccgggagtgagcagcagcaggag

SEQ ID NO: 7437 - DNA, 747 bp, Homo sapiens
  source 1..747: mol_type = other DNA
tttaattacaatggcgcatgacttgctgcgttggcttccgaccccgggtctctaaccgagctccaggtctggaaccttgaaacacttttcctgggaaaaggggtggcgctatcccatagagcgtcacgcacccacgcaggctggcggcgtcctccctgctgggatgggcgtcgggcccagtgcttggcacacggtccccaggagcttcccccgaaggttcccccgaagccagccacagctgctcagctcggcgcgcggagcccgcggtggtaccgagtccgcacaaacccggacccgctccaaggatgggcttccctagtggcgcctgcggccccgacacggcgcgttaaggcgcggcgacttcgggagctcagacgggaggggctctggagctccagtcggcgccgcgggagcagcagcgccggagcccagcttggccctgaccgcggggccgaatccgctcgggtggcccttagccctgcctggcgctgagccggatcccgggactgagctcctcccgctcctcccgccgccgtgggccgggagccgggctgcagagtgccaggccgggcgtctgcggccgcgggctctcgcggggcggcgacgccgcggggaggatgctgcttgccgcgcccgcgtcctcaccgtcctcccgggccgcctgctggggctttgttgtggcccggacgccgcgggccaccccctgaagtcgcctgccgccgccgccgccgcacctagcggacgggc

SEQ ID NO: 7438 - DNA, 422 bp, Homo sapiens
  source 1..422: mol_type = other DNA
agaaccatcaaacaaatatttttagagtctgctgtactacagttttaagaacactacactagggggactgtactgtctgctgactactgtatttctcttcttacagagtgacaaaacacctattctataagaaaacgaatgttagatgtttgcttccgaagcccattgttatacccatcttaacagaatggttgggccctaccacagatctactgaaccagaaactttgtggcagtcggtctgagttttaaaactaaagatttatagccactgccctaggtattccagaggtagctttggaaggacctcaataccaaaccgtttacgagaggcacatacatttgctaaatgtaacgctcaggtcgaggggtcgcttcctctttgtcgccgattgagttgaatttgagacccgacaggggtcg

SEQ ID NO: 7439 - DNA, 525 bp, Homo sapiens
  source 1..525: mol_type = other DNA
tagggctgcgtgggagcccaccgcagggggctcaggcatggcaggctgcaggtcccgagcactgccccgggggaggtggctgatgcaggccgtccggcagtgttgggggacccagcgcctcctccgcagctgctggccagggtgctaagcccctcactgcccggggcggtggcgccagcctgcagctccgagtgcactgcctgccaggtgggccggtgggcctgccgagccagcgcccacccagaacttgcactggcccgtgatcgccaggcgcaccctccacacctccctgcaagcagagggagcaggctctggcctcagccagcccagagaggggctcccatagggcagcggccggctgaagggctcctcaacgaggccaagggagaggctgccagcatgttttcattgtaattcccaattcatgagatttggccatcatggtggcggttgcagtgagccaagatcatccccacactccagcctgagcgacagagtgagactctgtctcaaaaaaaaaaaaag

SEQ ID NO: 7440 - DNA, 346 bp, Homo sapiens
  source 1..346: mol_type = other DNA
gttacaactttcatcagtaatgatattaatgacagtggcattgactgttattgctaagtaaaattgattctttgaaaatagcaaaattggctatcaaaatctaagagaaggcctctttggtccaaataaagaggcttttatctcctgcagaacccagcttggtcggctatcagaattcaacatgaatttgctgtttgagtcaattgatccagttttagatttctcctttttctaaaaaagtaaaactgagggggccatcctctgcttaggaatggggcattcccaacagaggtgggcggctcccgtcctatgacgtcagccgtaaggcgctgctgtcgtaaaagga

SEQ ID NO: 7441 - DNA, 533 bp, Homo sapiens
  source 1..533: mol_type = other DNA
caatgtattgctatggactggtcttgaaatccattgacaccatcacaagaaaattcaacatgacatcgtcatgaacagaaatggatgatggcttcatattcttaaatataatttccaactatggtgaaattttgaatggttgtaaaaactgtttatctagagtttgatgtaattctcatcaaaaagtccatcagtaattatttcaaatataaaactgatatcaaaaaattgagttaatgaaaataaactcaaatttttcataaaaatatgaaattatattatacggaactttatgtacatggaaagtgaataatttctattatttttctatttgatatttatcatatttatgtaattaaaaacataattaaattttaaactaaattaaactgcatgactctgaaaatttggaaagcaccgtacaagagggattttcagtgatattctgcaaagtactttccatcaaatgggaccatgtgtgatattttacagctgccacccgggtgaccaagaggccggtctagagatgcgcg

SEQ ID NO: 7442 - DNA, 418 bp, Homo sapiens
  source 1..418: mol_type = other DNA
ccatcaaatgggaccatgtgtgatattttacagctgccacccgggtgaccaagaggccggtctagagatgcgcgccagcccagcccgggtctccaggttcagctgcggaagcttcccacatggtgtgcaggtgtcccggcaggtagaggaggagcttgcgcttgccctgcaagttctgcgccccaggccccggcagggacggactggggcagtcagtcatccaggagccgccgccacccgccccacccccagtctccgcgggaggtccaggggttgggactccgggtggcaggcgcccgggggaatcccagctgactcgctcactgccttcgaagtccggcgccccccgggagggaactgggtggccgcaccctcccggctgcggtggctgtcgccccccaccctgcagccaggacag

SEQ ID NO: 7443 - DNA, 482 bp, Homo sapiens
  source 1..482: mol_type = other DNA
taaactcaaatttttcataaaaatatgaaattatattatacggaactttatgtacatggaaagtgaataatttctattatttttctatttgatatttatcatatttatgtaattaaaaacataattaaattttaaactaaattaaactgcatgactctgaaaatttggaaagcaccgtacaagagggattttcagtgatattctgcaaagtactttccatcaaatgggaccatgtgtgatattttacagctgccacccgggtgaccaagaggccggtctagagatgcgcgccagcccagcccgggtctccaggttcagctgcggaagcttcccacatggtgtgcaggtgtcccggcaggtagaggaggagcttgcgcttgccctgcaagttctgcgccccaggccccggcagggacggactggggcagtcagtcatccaggagccgccgccacccgccccacccccagtctccgcgggaggt

SEQ ID NO: 7444 - DNA, 174 bp, Homo sapiens
  source 1..174: mol_type = other DNA
gtcgactagtttgcacctgcccagagtctagcttgcctagctaagagaggtacacttatccagccatctggatgtttctccagacaacaggtggctgtgctctccgcctttcacacagaagtaggacagtgggtggggtcactcaccctgtggttactcaccctgtcaggaggc

SEQ ID NO: 7445 - DNA, 373 bp, Homo sapiens
  source 1..373: mol_type = other DNA
tccgggaagccaactgtctagtattgtcagctgcgtaacattagatatttttgtatttaattaggctaagtgtctgatttacaacacctgtcatggtgctttaatagacccaatgactattattagaataaaaatactgttctacttgcaaacctcaattactggaaaaaaatttgaagaataattttcacatatgcttgttttttgtctagtcatatgcaaactagatcaagaaattaatgctttgcccagattaaaagtttaataaaacaagtatttacaaagatgaacatttgacatgaatgcccttctttgtttgccttatttcactgaaactaaacattggtctgggtttgaattctagctccaacac

SEQ ID NO: 7446 - DNA, 560 bp, Homo sapiens
  source 1..560: mol_type = other DNA
agtcagccaggcgtggtggctcacgcctgcatttgtagtcccagctactccagaggctgaggcaggaagaaactttaacaagtcatgtaacctttctccttcaatgtttccatttataaaatgcatatctagacaagtgaaataattttgtgaattaatttcttcctcaaaagtatttttttaatctcaagtatcttttaaaacagtattatattttattcttccataacaaaaatcagtgagtagagaattttataattattaatttggtcttctaccacattgaataaaaaaattaaattatgatcttttgcagaagtgtaaattatactattagtgagtttagctctaacatatattttctgttatatttaaattcatgatatggatttggcagtaattccctgtggaaaaaacaaatgataataaaaaggtcttttaattttcaccaaaatgacagtcaagattttatcaacctatgtgagactggttttttaaaaattagtagttgtgatggttaatattgagtgtcaacttgactgcattgaaggatgcctggg

SEQ ID NO: 7447 - DNA, 555 bp, Homo sapiens
  source 1..555: mol_type = other DNA
cagtcacccgccgcgacgtgggaactggcggtgggtggccgagggctgctctaagctggtctcctcagcccgacctctgcccggggcaagggggaggaggggccagcgcggctgcagactggggtccagcaggcgtgaatggatgcctagacgcaggcagtgaccctcggtctagggactgcgctgccataggccgcccccgcagcagcgtggcggcctcgggtcccccctcgtcgcggtagcggtgatcccacagcccagtctgggtgggcgacccagcgggcagagggggtaatttcggggtgggcagccgggccaccatctccgctctatcagtagcgggaagcgagcagcgccagttgcgcgactgtcgctgccacggccgcctctactcggtcgctggccggagagccagccgcgctggtgacaacttctctggggcgcgcgcggggctggtagcggccgaagccagaggctgggggagctgctggagcctcgcgaagccgcggccggcgccctgcgccgtcgccgccgcctgctatcagccccgggtac

SEQ ID NO: 7448 - DNA, 407 bp, Homo sapiens
  source 1..407: mol_type = other DNA
attttaaatgacctatttctttaaagttttactatattaaccaagcctgaagcaggctacagttaggcaatattttccaatataaaattcttactgtgaatcttcggaatttggcatgaaacagaacaagcatgattgcacctgttcaacatatacaataagttttgtggtatcaaagtacccttgtatgacacaggtataaaaatattttgattctaattacttcaataaggcagacttctcaatccgagtcgcagccatctgcgcagcgtccgccggggacgctccgcgcggaagaccgcctgtgactcgacacactctccagtgacgcggccgtcgccgcacctgcgcggcggggcgggaaggagactcccagcgccggggggaggaggggcggtccttccgga

SEQ ID NO: 7449 - DNA, 566 bp, Homo sapiens
  source 1..566: mol_type = other DNA
ctgatctcgagcacagcacaagctccgagctggcaccgggctcccaagccccggtgcctctgccctagccgaggcctctgcggtcttcccgggcgaggagccgattgggggccgccggacggcggaggaccctgctcctgcttctccggcggagtttcacgggatctggggccgagccgctcaggacctgccgcgagccccggggtgggggaggcggcggggggacgggacagcgggatccctcccaggagccaagccgccaagcgcctcgttcctctgctgctccccgccctcttcggcggccgcgagagcggacccaccctccggctgcgacctccctgcgcccgccgctcagaaacgccccgcgcttcgctgccaagcggtctgtgacccgggaccagccccgcgcccgctgcccgtaggcggctcgcggcttcccctttcctcggcgttcaccgagcgccgcgaagtgacccaccctcccccgaggagagggaaggaggcgggcaccgcgaagcgctctggggaggtcttgtccctagggggcggagcgcaaaggacagaag

SEQ ID NO: 7450 - DNA, 382 bp, Homo sapiens
  source 1..382: mol_type = other DNA
ccagagaccagccctggccagccctgggtccggggaccggcaggatggcctgatctcgagcacagcacaagctccgagctggcaccgggctcccaagccccggtgcctctgccctagccgaggcctctgcggtcttcccgggcgaggagccgattgggggccgccggacggcggaggaccctgctcctgcttctccggcggagtttcacgggatctggggccgagccgctcaggacctgccgcgagccccggggtgggggaggcggcggggggacgggacagcgggatccctcccaggagccaagccgccaagcgcctcgttcctctgctgctccccgccctcttcggcggccgcgagagcggacccaccctccggctgcga

SEQ ID NO: 7451 - DNA, 406 bp, Homo sapiens
  source 1..406: mol_type = other DNA
agcattcatatgtaaaatgactggttaaaatctcccttgcattaagcaagttactgaaaccttcagaatctagttttcatctgtaatataggaataatgatgataatgcttatatcaccaatcttttgcccttgccttcaaatccaggccctgatgtctgcaggtggttcagcccttggcctctgtagcccaagagccagtgttctaagtcagtttccttatctgtaaactgagactaatggcatttacctaattgggtcgttggagatcaagtaccttaattgatataaagtgaccgttttttaaaatcgtgtggaatgactataggcattataaagactaacagtacttggccagtttctttaacaggagatggctttgcttttagaagagcatatattacttt

SEQ ID NO: 7452 - DNA, 536 bp, Homo sapiens
  source 1..536: mol_type = other DNA
aaggggatcccttctgtttggaattcaactttactcaacaaacatttagagaatactgtactgggcaggtaatctactgtagtatgcagattcgttatcaaacagactacaatgtatttaaattttgtaggaagctgcattgaaggctgcctaaggcagtatacaaaatcagtgctgaatatttgttaacacttaaggagaatgtacgttttaacgttatttgcttaactttggcatataaattcagaagaaatatcatttaactctgtgcctaaggaggtatttaaaaaagaaaaaagaaaaaaatcacactaacggactttttttttttttctaacaacaaaaaaccgtgagaccataacgtcgtcaaggctgtggcgtcacgcctctaagcggatacggcagaagttttggggcgcaaaacccagacaagttttccggtagtgccgccacctgccaagcagcagggagcgctccctggaggtcccgcccactcttctctcccgagccggctagagatctgggcgcatgcgcgc

SEQ ID NO: 7453 - DNA, 432 bp, Homo sapiens
  source 1..432: mol_type = other DNA
cctaaggcagtatacaaaatcagtgctgaatatttgttaacacttaaggagaatgtacgttttaacgttatttgcttaactttggcatataaattcagaagaaatatcatttaactctgtgcctaaggaggtatttaaaaaagaaaaaagaaaaaaatcacactaacggactttttttttttttctaacaacaaaaaaccgtgagaccataacgtcgtcaaggctgtggcgtcacgcctctaagcggatacggcagaagttttggggcgcaaaacccagacaagttttccggtagtgccgccacctgccaagcagcagggagcgctccctggaggtcccgcccactcttctctcccgagccggctagagatctgggcgcatgcgcgcggaggaggcggcgaagcgttttcccacctcgtcgacgtgattccc

SEQ ID NO: 7454 - DNA, 541 bp, Homo sapiens
  source 1..541: mol_type = other DNA
atctgcaaacattagcttcataaatgatttttttaaaccacactttgggtaaatatgtaagtatgatatatgtggcaaattgcttacatagcaaattgattttctgggtcaggcaggaaagactttcacaaaaatcttacaggaagtccatacctttcattttaacctactttaatgataaggtattcatttatgcttacttagcaaggtatatttcactcttcagttcaaactctattttcactgaaagatttgttgcatctcatgtattgctgtgtgactcaccatgagtttgggagtctttcagaacctcagaacactcaaatgatttaaatttctcaaatatgttcatttcacatataggaagtcactttcatctggaccaccgggtcttgacattagaaatgcccagctgatgcaaagttaatatcacaagtagccacctgttccttgcagtgaaaattgtactcgcttaacaattgcatcatttaaaatgcctcccctgcctatcagctgatgatggccctagcaggctaaggcc

SEQ ID NO: 7455 - DNA, 522 bp, Homo sapiens
  source 1..522: mol_type = other DNA
ctgcaaacattaacttcataaatgatttttttaaaccacactttgggtaaatatgtaagtatgatatatgtggcaaattgcttacatagcaaattgattttctgggtcaggcaggaaagactttcacaaaaatcttacaggaagtacctttcattttaacctactttaatgataaggtattcatttatgcttacttagcaaggtatatttcactcttcagttcaaactctattttcactgaaagatttgttgcatctcatgtctcttacattgctgtgtgactcaccatgagtttgggagtcttgcagaacctcagaacactcaaatgatttaaatttctcaaatatgttcatttcacatataggaagtcactttcatttggaccaccgggtcttgacattagaaatgagcccagtaacttatgcaaagttaatatcacaagtagccacctgttccttgcagtgaaaattgttattgcatcatttaaaatgcctcccctgcctatcagctgatgatggggcc

SEQ ID NO: 7456 - DNA, 452 bp, Homo sapiens
  source 1..452: mol_type = other DNA
ctgcaaacattagcttcataaatgatttttttaaaccacactttgggtaaatatgtatgtatgttatatgtggcaaattgctcacatagcaaattgattttctgggtcaggcaggaaagactttcacaaaaatcttacaggaagattcatttatgcttacttagcaaggtatatttcattcaaactctcttttcactgaaagatctgttgcatagtttgggagtctttcagaacctcagaacactcaaatgatttaaatttctcaaatacattcatttcacatataggaagtcactttcatttggaccactgggtcttgacattagaagccctggcccaaagttaatatcacaagtagcaacctgttccttgcagtgaaaattttacttaccacgcttaacaattgcatcatttaaaatgcctcccctgcctatcagctgatgatggaggtc

SEQ ID NO: 7457 - DNA, 664 bp, Homo sapiens
  source 1..664: mol_type = other DNA
tgtgttcccagatggtaccagcggggcccggcttattcccgaacacatgtggccgacttgggcttggcctgtggcccgacacaccgccccactccgcgcacacgcgtctgtgccacttcagtggcttgcacgagtcagaccccaagaaagatctttgaggacttgagcttcacggggagacaaaggggcccaaaagctccctctcaccctcccacggggcgaggggcgggccggggggctgaggtggggatggccctggaaggggtccctcccttcccacctccggccgcctttagcccaggcagtgcggagggggaggagcctgcgggctgcagcagccgggcagtcccggaatctccggactgcgtccctgccccaagcccgccgggaacccgggccgtggacgcccccacccgggggccgcggcgaggcgggcgcgcggggttcagcaccctcgaggctggttccgaaggctcgcggccctccccctccgtccgccgccgtcgcggctagccgcccctccccgccgcagcagggaggccgccggggcccgggggacgcgctcgcgcgggggccgccccctccccttccctccaccctgggcgggggcgcgcgagaagcggtgacgtcaaggggcgcgctgtggcagcacctccccgcgcgc

SEQ ID NO: 7458 - DNA, 524 bp, Homo sapiens
  source 1..524: mol_type = other DNA
ggccgcctttagcccaggcagtgcggagggggaggagcctgcgggctgcagcagccgggcagtcccggaatctccggactgcgtccctgccccaagcccgccgggaacccgggccgtggacgcccccacccgggggccgcggcgaggcgggcgcgcggggttcagcaccctcgaggctggttccgaaggctcgcggccctccccctccgtccgccgccgtcgcggctagccgcccctccccgccgcagcagggaggccgccggggcccgggggacgcgctcgcgcgggggccgccccctccccttccctccaccctgggcgggggcgcgcgagaagcggtgacgtcaaggggcgcgctgtggcagcacctccccgcgcgcagaagctgcagccgccggcagaggagacctcagcatcagagcccagcgctggccctgcctccgcctgccccgccgccgccgtcgccgtagctgcgccctagtgcccctgctgggcagtggcgttcccccccatcctcccgcgcc

SEQ ID NO: 7459 - DNA, 318 bp, Homo sapiens
  source 1..318: mol_type = other DNA
cctcttacctttaagtcaataggctaaaaaactatcagagatccattaggacatctcttaatattactatgtgcagaaatgaggactgtaactgtttttgttaaaaacatgtttatgcatgtatagacttgtactaagaaaatatcttcattttatttccttttcctttatcaagtgacgtaagatttacagacttcacatcagcatttaagtattgttaacttcatgtatgtactatgttaggcataattatgacccaatattgtctttatatgaagattatgtaggatctcagcagatacatacatctgagtcact

SEQ ID NO: 7460 - DNA, 413 bp, Homo sapiens
  source 1..413: mol_type = other DNA
aagacatcaaccttgatctcaatgagtaggatttctactgggaaccagtcatagctgcgtacacgctgttctgagaaaagcaattcgacttcatggcggcaagatgccatgactcattccccaaatatgcacatgtgacaatatatccaccctcgcgggtgtggcaggcaacagcggcgacagccgggtcggctggaggggaagaccgaggcgcccccaagctctcggcgtcgcccgcgctccatcagttccagctgtcccgcaggaaccgctgccacgcgctgctgctgcagatggcagcaggggagcacagaggccaaatcagctcttgcccggccaccggccaaaatggcggtgcccagccgccgcacgcgcaagccataggacgtagtgcgcgcgcgcgacatagagcg

SEQ ID NO: 7461 - DNA, 398 bp, Homo sapiens
  source 1..398: mol_type = other DNA
acatcttttgttaattttactaagtctattcatatgtgaaaaaacacttcaattaaaactgctttggtagcgcagttactgctactgaacattgttatatatgctattcaaaataggtgcaatagttctgtaaacgctcaataagtaatttactgaatgaataaacagatgaataggttcagttatgaactagttgtcacttgcctgcaagttaggtgaatgtttacctaaaaaaagatagaaatgccgtgtcggcaccagactctgttggtcctactgacacctccagcgttaggctgcttgccgaaactcagattctcggcacctccagcagctggcttcgccaacggcgttgaaccgctctatgtcgcgcgcgcgcactacgtcctatggcttgc

SEQ ID NO: 7462 - DNA, 640 bp, Homo sapiens
  source 1..640: mol_type = other DNA
attagttcctatgattaaccatgtatttaaataaggacaccagatgttgtatcttagcaaaataaaattttggtgcaacagaagcatgttctaaagcataatttaccctgccattcaacgtcggagggtgggaagttgagctctcgcactggtggaagccatggtcagcatgttatcaagcaatttacaagatgaattttttaagggggtgtctctgtaaatgtctttggcaaagccttcatcttgtagtacgtgagctgtactactaatagcaatcagcagtccacggttgacgtgcggagccgacactgcgccgccgtgtccctggcaactccacgccagcccggcgcgcgcgattcccgcggcgcagcggcagggttggcgggtggcgcgcgcaggtcgccccacatcggccggcggagcccctcggcctgctcgcggacgcggcgccagtgcagcgcgaagccggcttggggcggtggcggtggcggcggcgcgcccgcgctgtagggacttgtagtccgcgcgcctcccgggcacctcccccgggtaggccggccagcgcgtccccgcccgccgcaagccgacttcctgcggctgccctctccgctgtcgggccgaaagcgaggtgctgttctct

SEQ ID NO: 7463 - DNA, 488 bp, Homo sapiens
  source 1..488: mol_type = other DNA
ttttaaaaagaatatccaaatttttattatcatttaaggaaataatttgcacaatgggcaaaatcaaattttattgcatacataataatattaatagttatcatttaagactactaggactgtttgagaccagcctggccaaaatgggtcccagctactcgagaggttgaggcaagagaattgcttgacgtctcaaaattaaataaatgccatttttgatttttttaaaaattaacgactttaaaatgacagtttatccaatcaaggtcatatactgcatttcattgtcatgctttttttttaatagcttgaggtaaaattcacataccaaatgattgacccatttaaagtgtgcaatttaatggcttttggtatatgcacagagttgtgcaaccatcaccagaaactagttttagaacaatttttatgtggaagaatacaatgtgtagcatgcatcagtatcatacctgtatggatactttatacta

SEQ ID NO: 7464 - DNA, 542 bp, Homo sapiens
  source 1..542: mol_type = other DNA
aggaatttaattagaagacatattctgatatactttttttttttgcttcatgtgaaatttattcctcaaaaaaaaatcattttttctaaacgtaactcaacattatagtaattatgcaagattttatgcagcttcaagagttagccaagagaaaagttgactcttgcaagaagatattgtatctccttatggcatgccattatttggagcaacaaggctggaagttgacacaaaacgcatctgttgactcagggtttgtataaccacgtggttttatatccaattcaaggtaactgtcaacatgcactccacgtttatagaacgattgccgccacactgttttttctccaggaagaaacggggcgtggggctgccggtagaagggggtggctccggccgctcccccgcgccgtcctccggccccggccgcgctgcgctcacgccggccgggccgggaatttggagaggatccctggtcgcgcggcagcggcggcggcgcgcgggtgagcggcgctgaggagtggaggctgggcagctccgac

SEQ ID NO: 7465 - DNA, 670 bp, Homo sapiens
  source 1..670: mol_type = other DNA
gctgaggagtggaggctgggcagctccgactccctgacgccagccgagcggctcaacccgggccgaggctcggggagcggagagtggcgcagcgcccggccgtccggacccgggccgcgagaccccgctcgcccggccactcgtgctcccacacggacgggcgcgccgccaaccccctcggcgccccgggctttccagcgccgccgccgccgtctctgcacgcgtggggccgccgcggtcgtgctgggctgggggcgcgggcagcggcgggaagggggctctttctgcgcggggcgggccgcgaccccccccccccatgatggcgcctcccgtctgctcggaggagcgaacctgctaccgcccagcccgccgggctggaagcccagttcccgggcccccgagcctcggctcccgggcctgaccgcgctgggatctccccggccgcgctcccccgtgctgccgccgggccgaggcccgttcgcgtggcccgcggacccattgtgtcccccgcgccggcggggcgacccctgcgggagctggaggacgaccgctggcgctgctctccaaggcgcctggtggagcgggtctcgcgggcgggggaccccggcgccccgggcccctccacatcccgcagccccagcaagcctctttggggcaaggtttggcggcg

SEQ ID NO: 7466 - DNA, 391 bp, Homo sapiens
  source 1..391: mol_type = other DNA
cgggcggctcacgagctgtagtcccagctactcggagtgagactccgtctcaaaaaaaaaagatccttatctaatttcgtagtggttcaaactttagtgtgaatctgcatacatctgtgttcaaggatgagtctactgaatacaaacatgtatccataacataaagtttctaccctagtggtattttatatattgtttttattagaagaaaaagtgtaaattccacttcgcagtagagtagtagttccattattcgggttactctgaatattctcttttaagtttatttagtaagaaaactttcacccatttgtactaccaaaaactctgattatgtgtaggctttcaaattttactacttcagtattttagttatatatcgaactggcta

SEQ ID NO: 7467 - DNA, 503 bp, Homo sapiens
  source 1..503: mol_type = other DNA
ggcgcgcccctcggcgccccgggctttccagcgccgccgccgccgtctctgcacgcgtggggccgccgcggtcgtgctgggctgggggcgcgggcagcggcgggaagggggctctttctgcgcggggcgggccgcgaccccccccccccatgatggcgcctcccgtctgctcggaggagcgaacctgctaccgcccagcccgccgggctggaagcccagttcccgggcccccgagcctcggctcccgggcctgaccgcgctgggatctccccggccgcgctcccccgtgctgccgccgggccgaggcccgttcgcgtggcccgcggacccattgtgtcccccgcgccggcggggcgacccctgcgggagctggaggacgaccgctggcgctgctctccaaggcgcctggtggagcgggtctcgcgggcgggggaccccggcgccccgggcccctccacatcccgcagccccagcaagcctctttggggcaaggtttggcggcg

SEQ ID NO: 7468 - DNA, 201 bp, Homo sapiens
  source 1..201: mol_type = other DNA
ataaacaaaagaaagtgaagagagaaatttatttcctttttaaaagtcagtaaaataatgaactaatcgttgtttaaagagtgagaaaaactttttccccctagatttccgccctgggagtgtgtgtgtgtgacagagagaagctgtgctgccgccgccgctgccggctcggagacagaaggggtttcccttgatctcaca

SEQ ID NO: 7469 - DNA, 224 bp, Homo sapiens
  source 1..224: mol_type = other DNA
atatacctgcagtatatagcgtggacactcttattgatttaccatatgataaacaaaagaaagtgaagagagaaatttatttcctttttaaaagtcagtaaaataatgaactaatcgttgtttaaagagtgagaaaaactttttccccctagatttccgccctgggagtgtgtgtgtgtgacagagagaagctgtgctgccgccgccgctgccggctcggagac

SEQ ID NO: 7470 - DNA, 370 bp, Homo sapiens
  source 1..370: mol_type = other DNA
tgactcatgacatataatgtattctgctaagttcaaagtttcctcttacaaagagagttttatgaaacaactcttcttcagaccatttttatttcaattatagtagcaggttttggagtttaaatcattaacaacctctgatcagtcaagagaaagtatgtatcagttaatgaaaactgctatattgggctcataaacttcatatacctgcagtatatagcagtggacactcttattgatttaccatatgataaacaaaagaaagtgaagagagaaatttatttcctttttaaaagtcagtaaaataatgaactaatcgttgtttaaagagtgagaaaaactttttccccctagatttccgccctgggag

SEQ ID NO: 7471 - DNA, 252 bp, Homo sapiens
  source 1..252: mol_type = other DNA
aagtatgtatcagttaatgaaaactgctatattgggctcataaacttcatatacctgcagtatatagcagtggacactcttattgatttaccatatgataaacaaaagaaagtgaagagagaaatttatttcctttttaaaagtcagtaaaataatgaactaatcgttgtttaaagagtgagaaaaactttttccccctagatttccgccctgggagtgtgtgtgtgtgacagagagaagctgtgctgccgc

SEQ ID NO: 7472 - DNA, 740 bp, Homo sapiens
  source 1..740: mol_type = other DNA
tgaacttttatagaaggatataaggaagtctctattctttaacaaatcatatccagttgttttcttgatatcaatcaaaagttcatttcttctgcctttaaccaaaagaagtttacaagggaggaactctttatcttcgaaaaaaattttgcatcttagattttataacacctaatggggttaaggatctgtgttgaaagatcttatcactctgtgtatagtgttacaaatcataaatataattaaagtataagttttcaactgatttctttttccctttcaattccattaatagaaagagtattgagaattcatgcaaaatttccaataggaactagtaatgtaacacaattaatgtcattataatttggagttacttgagtgattttgattatttttgtatcaattaacattgccatggaaacagtctcttaaaatggcttaagtcttcacacatttaatcaatatccagaggtagatttaaagacttgaggtgtttcatttatttatttatttgctttaaactattcaaggacgttaaacagtaaattccagtttcctatgacttcaagttattttttacacttctgtaaataaatccccaaaagatcacttctagtttcctggaatttaggaactccactgcaccaattttgctactagacaaaccaggaaggctttttcggccccagcgggctgccgtagcagagaagagcactgattggctgaggcagaaaagt

SEQ ID NO: 7473 - DNA, 402 bp, Homo sapiens
  source 1..402: mol_type = other DNA
gcaggcgagcgacctggcgaggtcgggcccaccttccttgggttgtagcggacgccggcaagcaggggtccagcgaacgtgggcatctgcccggcgccgggcccaccagcgagccactttcccgcgcggacacctctaactccggcagctcaggctgggaactcggagatccagagtggcctcccctccccgcgcatacgtcagcgctagcgtcgtggaagctccgcgggaggctctccatggaaaggacagtcagtgaggcagaaggtccgcagggcccatccggcggccagcctcccttgccggatcgcccacgttgtcggcctgagcatctgcacctgcgagcccgcggccagaggcgctgggggcgtttgtgcgctcagtgagactttcctcgctcca

SEQ ID NO: 7474 - DNA, 564 bp, Homo sapiens
  source 1..564: mol_type = other DNA
taggtcagccctgggggcgagccagagcgggcacccgcgcgcccaggggcttgccagcgcagaccccactccgcccgcgagtagcttagtcagatctgccccgatccctgcagccctccccagtcccggagacaggtgtgggccgcagagggaaggggatccggaccaaatgcccacccgcaggcgagcgacctggcgaggtcgggcccaccttccttgggttgtagcggacgccggcaagcaggggtccagcgaacgtgggcatctgcccggcgccgggcccaccagcgagccactttcccgcgcggacacctctaactccggcagctcaggctgggaactcggagatccagagtggcctcccctccccgcgcatacgtcagcgctagcgtcgtggaagctccgcgggaggctctccatggaaaggacagtcagtgaggcagaaggtccgcagggcccatccggcggccagcctcccttgccggatcgcccacgttgtcggcctgagcatctgcacctgcgagcccgcggccagaggcgctgggggcgtttgtgcgctcagtg

SEQ ID NO: 7475 - DNA, 362 bp, Homo sapiens
  source 1..362: mol_type = other DNA
cgcatgcgcacagacgacccgagcctgctccgcagccctgcagcccctccgaccccatgtctctttggcaccaggcacccgccgggccgtggggggctcgtagccgaacgccgacctccgctcgtattgggctgggagttcagagccgcgcgcagaacccgggttggccgcaacgtctgtgttctcagcggtggccgggaacctgggatcagggtcacctgagctaagaggcactcttacctacccaacgctggcttggagtttctttttccggtgagacagagacccggcagaggtaggcactgcccggccagccgcgggacgctgcgaagagccggcgtttcctggcaagggtaactcgc

SEQ ID NO: 7476 - DNA, 400 bp, Homo sapiens
  source 1..400: mol_type = other DNA
acagtgctcattgaatgtataatgtaaacatacttggaaataatttagtaatttgttacagcaaatgattgtactctaaatagaatcgatttatggttaatagaatgattcgtgtgagccttgccccatatatatatgagggaatgagcaaggaatttcacttccttgcactcatgtctgagagaagagatggttaatacgatgatatttatttagtgtaaatataaaaccctgagtttcagattctctgaaagttcaaaattgaattgtcttttcccatcaatcctgtggacaaaagagaaatgattctgaaagcagccctgcttgtctgggggccccgcccccccaagcccgaagagtctgggagctgccccaatcccgaggcccggtttagcctaac

SEQ ID NO: 7477 - DNA, 204 bp, Homo sapiens
  source 1..204: mol_type = other DNA
cacaagtctttgtggagagacagctgcagcactctagcagtgcactgaaggactccaaggcaggccttccctgaggagaccacccactttctgtgaacacccgtgggccctggctctgtgtccagttgttccgtcacagatcaaatctttcaggaaggaaataaaagactcctgcccttcagggcctggaagggggcggcagct

SEQ ID NO: 7478 - DNA, 189 bp, Homo sapiens
  source 1..189: mol_type = other DNA
agctgcagcactctagcagtgcactgaaggactccaaggcaggccttccctgaggagaccacccactttctgtgaacacccgtgggccctggctctgtgtccagttgttccgtcacagatcaaatctttcaggaaggaaataaaagactcctgcccttcagggcctggaagggggcggcagcttcgtgc

SEQ ID NO: 7479 - DNA, 572 bp, Homo sapiens
  source 1..572: mol_type = other DNA
taactagctcagtgagcctgggcaaatttatcagccacttgacttttttatctgtaaagtggaaaaatgcctacctctcaaaatttttgtgcagaacaacttacataatgtaggtaatgaacttagtacagtgcctgaaaattacaattacaatataaaacgcatttgtatatgtaattgagtagtagatatttgtttactctattggtttagctaaaggctttaagcatatgaaactcctttgtcagatggaatgtcaactttttaaaacttaaatgagtgcaaatttttaacacaagttccaaatgtagaagggacattccctatttgcggttaattctaaaatgaagctacctttagaatgatccttctgtaggatccagactagcccctagattctagcaactgacagaaaactaggtggaggttccttgtctttgcgggcttctgtatccactctagattgaataggggatgttttgtgtagagatgggccttctcccttacccaagctttctttaaactggaataacgccagcatccggcgcaaagtcggatggggcgggcccagt

SEQ ID NO: 7480 - DNA, 497 bp, Homo sapiens
  source 1..497: mol_type = other DNA
gtttttgagaattaatgcaaaatgctcgatttaagatattatccattaatgaatttgaaaatggggacaaaaataacttttcagccgtgagtttcgaatctgtatcttatgtggaaaaactttgtattaatgtaaacactatacagtgataagaagctcatcttataactgaacagataggtggtcagatagctggttgtgtgacctccagcaagtcatttgaaatgcctgtgaaagcatttcctctaccaccaggtcttgaaattttgtgcatcacgatccaaaatgtcttaagcatcatcacaaatgcttgaccgtccctcatgagcgggtggcgcttcgcgctgcctgggtctgtacaacagggtcttgcagtcgaaagccacacatttcaggtcctggtcgctcctgcgggaatgggcagcagtgacgtgcccacgtcgggcgcgctgacgttcgcgtagcgtgcgccgctggccaggtgcgcaacgtcacgg

SEQ ID NO: 7481 - DNA, 428 bp, Homo sapiens
  source 1..428: mol_type = other DNA
aggtatacattttaatactttaaaatgcctaacttttgtttcataacacacaaaataggctttttgagggcactgacataaaatttttagaataataaatttaatgtgctgaacacaacagaaacaacttttctgtggtttacaactaagttatttagtgtcgatctcaagcggagaccctgtgcgagttcgttcccagctcgggataaatgagttaatcatctcctgcgactgctccttctcggtcccggtcgggttccgtgcagcggggagccgactgtgagtcaccccggccccgggagcccaaagccgcggggcgaaattctagccccagggacgagcgggagcgcgggcccggccgggtggcgcctcggggagtgtctgccgcgcgggggccgggcggggcggggccgcgggcgctcagagct

SEQ ID NO: 7482 - DNA, 557 bp, Homo sapiens
  source 1..557: mol_type = other DNA
ctcgagggtcgggtgaagcccacccagagtcctccccgcgcgcggacgctgttgggcggcgccagggtctgggctgcagctcacctggagctgcaggtggagacgcggaaaaaccgacttcttccagatatcctggggtcggtcagaaggagaggggggcagcgtgcggaggccgcctgatgtagccaccgcccggcaccccaagctcccgccgcggctgcggctttaaggaagctgccgagtccaggctgtcgcccgcctggtgactgacagccaagaagcccgcctgacccgtgcggcgtggagccttgcttctcttcgggccaataggaaggtgacccgcttttaaaagggccagccctccagctggcccactctcagcccctccgcgcccggggtgtcattgggcccgggagacgggagccaacttcaggctgctcggaagcccgtgcagtcagtcacctgggtgcaagagcgttgctgcctcgggctctcccgctgcagggagagcggcactcgctggccggaccccggccgaggcaggtgtgtaggggcgc

SEQ ID NO: 7483 - DNA, 514 bp, Homo sapiens
  source 1..514: mol_type = other DNA
aacgtgaatatcctcgatggtaagcttgctttcaaattgaactagtggaaaaatccaatactaaagtaaaggaagtagaggagcagctcttgaccctgcctgtgtttaaagggtttttccagcacggttaaaacaactaaattcaaatcgagtgaacgtgactcgagggtcgggtgaagcccacccagagtcctccccgcgcgcggacgctgttgggcggcgccagggtctgggctgcagctcacctggagctgcaggtggagacgcggaaaaaccgacttcttccagatatcctggggtcggtcagaaggagaggggggcagcgtgcggaggccgcctgatgtagccaccgcccggcaccccaagctcccgccgcggctgcggctttaaggaagctgccgagtccaggctgtcgcccgcctggtgactgacagccaagaagcccgcctgacccgtgcggcgtggagccttgcttctcttcgggccaataggaaggtgacccgcttttaaaagg

SEQ ID NO: 7484 - DNA, 527 bp, Homo sapiens
  source 1..527: mol_type = other DNA
aggaagtagaggagcagctcttgaccctgcctgtgtttaaagggtttttccagcacggttaaaacaactaaattcaaatcgagtgaacgtgactcgagggtcgggtgaagcccacccagagtcctccccgcgcgcggacgctgttgggcggcgccagggtctgggctgcagctcacctggagctgcaggtggagacgcggaaaaaccgacttcttccagatatcctggggtcggtcagaaggagaggggggcagcgtgcggaggccgcctgatgtagccaccgcccggcaccccaagctcccgccgcggctgcggctttaaggaagctgccgagtccaggctgtcgcccgcctggtgactgacagccaagaagcccgcctgacccgtgcggcgtggagccttgcttctcttcgggccaataggaaggtgacccgcttttaaaagggccagccctccagctggcccactctcagcccctccgcgcccggggtgtcattgggcccgggagacgggagccaacttcaggc

SEQ ID NO: 7485 - DNA, 566 bp, Homo sapiens
  source 1..566: mol_type = other DNA
actgagtcaaaagggaccacagcaggggagccggttaactggtagtgacactccaatcttccatctaagggtgtgtgtaacggtgcgggggaagagtctgcctcgcacacgcgcgtgaacacgcgcgcacacacatgcacacgcatacatatctccggggaggctccgcagaggggcagcgggcgcgggagaatcccgggatccgggttcacccatccatgtcccctgccgcgtgcccgcgcgccgccggccgcccgcctgccgggcccagtcgcccgcgtctgcgtaggtgtctgcccgagcgggcacgagggcgcgggggcgcgccaggagacgcgggggcgcgcggcgcgccgcgagcggaggaggaggggtcccggctctcggccccttcctcggcttgccccgccgagccgcctccgcgggcgtctgagccgccgtcagagcgaggggaccggtcgcgaccgcagcgccccagccagctccccgcacgcctccgcgcacagacgcccgctccctcctcggcgcccccccacggcgggggtggggcagaggcgcggcgagcc

SEQ ID NO: 7486 - DNA, 845 bp, Homo sapiens
  source 1..845: mol_type = other DNA
ctgccgcgtgcccgcgcgccgccggccgcccgcctgccgggcccagtcgcccgcgtctgcgtaggtgtctgcccgagcgggcacgagggcgcgggggcgcgccaggagacgcgggggcgcgcggcgcgccgcgagcggaggaggaggggtcccggctctcggccccttcctcggcttgccccgccgagccgcctccgcgggcgtctgagccgccgtcagagcgaggggaccggtcgcgaccgcagcgccccagccagctccccgcacgcctccgcgcacagacgcccgctccctcctcggcgcccccccacggcgggggtggggcagaggcgcggcgagccaggagcaggaaaagaaaacttttccctcccgccccccgcgcgaggtccccagccctcgcctccccccgcaggtgggaactgcacctgaagccgggcgcgaggtcagggccggacttggccgtagtgggagggcggctgccggcgcccctgcccgtttcccacccgcgggtggccggacgcggtgccgcctcctcccgctcgtgagggcgtgacccggggaggggggcgcaggctccccctgcgaccgccccctcacacacgcgctcggccgccggagctgtcaccggccacccagggcccggggagggggcgcggagagtggcgctgcggagcggcgggcgcgggatcctcctgccggacttcccggctcccagggacgccgctgtcaacgccgagcggacgcgcagccccgggagaggggcccgccagaggcccggccgccgccgctgggggcgggcgggtgcccgcgtccccctctgcgcgatttggcgccgctgcctcgcc

SEQ ID NO: 7487 - DNA, 223 bp, Homo sapiens
  source 1..223: mol_type = other DNA
ttgatcctttcaaaaaaccagttcctggattcattaattttttgaagggcatttaatgctataaattccattattattgtgtgggagttcttttaaatcttacatgttaaaagtagagtctttctcctatgtgacataggcaggatgataataatagccaattatctaatacatcacaaataagtattctgattctagaattcttctgatgcccaaagaagac

SEQ ID NO: 7488 - DNA, 491 bp, Homo sapiens
  source 1..491: mol_type = other DNA
ggtggggcgcaccaacttcacagatgctaaaaaaaagcaactatgcctttcttcctgaaagccaaattgggatcaaacatatttgagctttatttttcctaataacaaaatgcaagtaactagtatttctcttaagtcttgaaaagatgtttttattgttgaatagacactacatgataggcctcttaggtaagaagcctttgttagggcatcccagtgacagaaacaatgatcattcattcaaagttactgaacgtaccatattagcgaatctgcaatgaggctgttttctcaaaggattttctaataaagcaacaaatcttttttaaaaaaaatgaatggtgtgccaggcggaggagcgcgcgtcgcggctgcgcccattaacgcgcggcgccgggcaggagccgtcaggcgggcggggctgcccgggacccgcaggagctgctcctcccgcgccggcgctcggcccccctccgcggtttggcatcccc

SEQ ID NO: 7489 - DNA, 734 bp, Homo sapiens
  source 1..734: mol_type = other DNA
caggcggaggagcgcgcgtcgcggctgcgcccattaacgcgcggcgccgggcaggagccgtcaggcgggcggggctgcccgggacccgcaggagctgctcctcccgcgccggcgctcggcccccctccgcggtttggcatccccggggccgggaagcctcctccagcgctgacagcctgtcggcggcggagggaggccgccagtgggccgggcctgaccgctgccgctagggccgcgctccagggaaggaaggggccagacacggccctctcagccccgaacggcgcgcgctgcccggcgggcgggatccgggcgcggccgaggcggcggcgctgcaccccgggcctgggcccgcgcgactcccccgggggcctctcccacgctcccctcggcgctcccgggagcgctcggcagacgcccgagctttgtgggcgcccgcgggcccagcgcgagcctcgggcggcccaactttgcctctcccggtcggctcccgagcgggacttgtgaggcgtgggcgcttgcgggggcgtggggctccccggcaggcgggaggcacggagcaagtcgcactggacaatgacctgggcagctcggcgctgcggacaagctgagggcgcgggcgggtcggctcctccgcggctcctcggccccacctgcgcggagagggcgggatgccagagccaggtgtcccggcgcgttaagggccctcgcagtcagacgtccctgcaccggcg

SEQ ID NO: 7490 - DNA, 167 bp, Homo sapiens
  source 1..167: mol_type = other DNA
ttagatgtctgcagtttttaagtgccaaagtaaatttaaaaataaaagcgaaacattcagtggttcattcttagtgtattcctcaccctcccccaaatggaaggtgcaggagcgaagtacaactcagtccgccgtgcacttggacaaaatccgttttagtgtgacga

SEQ ID NO: 7491 - DNA, 524 bp, Homo sapiens
  source 1..524: mol_type = other DNA
gccaaattgggatcaaacatatttgagctttatttttcctaataacaaaatgcaagtaactagtatttctcttaagtcttgaaaagatgtttttattgttgaatagacactacatgataggcctcttaggtaagaagcctttgttagggcatcccagtgacagaaacaatgatcattcattcaaagttactgaacgtaccatattagcgaatctgcaatgaggctgttttctcaaaggattttctaataaagcaacaaatcttttttaaaaaaaatgaatggtgtgccaggcggaggagcgcgcgtcgcggctgcgcccattaacgcgcggcgccgggcaggagccgtcaggcgggcggggctgcccgggacccgcaggagctgctcctcccgcgccggcgctcggcccccctccgcggtttggcatccccggggccgggaagcctcctccagcgctgacagcctgtcggcggcggagggaggccgccagtgggccgggcctgaccgctgccgctagggccgcg

SEQ ID NO: 7492 - DNA, 692 bp, Homo sapiens
  source 1..692: mol_type = other DNA
cgtctccgccgagagcggcgggcgggcaacagctgaaagcagccaggggtggggactcctcgctcccattggggcagcctcactggctccagcgccgtcacctctctggctcgtagaggtgcctcaggtgtcagcgcgtgttccctccgcgccaagagaccctacggtaagcacctcccgaggtccgagagtgggagaggggaaagtgtaggccctcggacggaagggtctctcctcgccgggccgggtacacacctggtgctaccagagcagcgcgcctagtgcagccggaagccccagcccagcactccggctggctcggggcccccttggctgtccgcgcgtcgtcaccgcgcccccgccgcgcggctgcctccgccttcgcgccctcccgccccgcgcactcgcgctcgcgcacgcgcacgccgcgcccggcagcactcggcgctgtcatggcggccgggagcagcttcagtgggcacacgacagccgcgcgacccgtggcggggcgagctgtggcagtagcatcctcaccactcgcagcagcctcagccgcggcgcccgtagcgccagcagcggctgcttttgcaaaggctgagcggccaggaagccatggagttctgtgcagccgcggactcccggggagctcaggtgcctgagagaggtgcttcactcctcccactgggccgagc

SEQ ID NO: 7493 - DNA, 595 bp, Homo sapiens
  source 1..595: mol_type = other DNA
ggagctaggcgtatttttaaaaaggccctttgacctcaaaggatacacgtgggtgaaaaaccaccttcctctaaatttatttttaatataatttacaggaatcctctgcgcgcggcagctgcaaagcaaggaatctttccctggcggcagctgccgaggtatcccagtggaaatctccaagtctccgccgagagcggcgggcgggcaacagctgaaagcagccaggggtggggactcctcgctcccattggggcagcctcactggctccagcgccgtcacctctctggctcgtagaggtgcctcaggtgtcagcgcgtgttccctccgcgccaagagaccctacggtaagcacctcccgaggtccgagagtgggagaggggaaagtgtaggccctcggacggaagggtctctcctcgccgggccgggtacacacctggtgctaccagagcagcgcgcctagtgcagccggaagccccagcccagcactccggctggctcggggcccccttggctgtccgcgcgtcgtcaccgcgcccccgccgcgcggctgcctccgccttcgcgccctcccgccccgcgcactcgcgctcgcgc

SEQ ID NO: 7494 - DNA, 367 bp, Homo sapiens
  source 1..367: mol_type = other DNA
cccatttcaattatttaaaaaaaataaaataaaagaaatatatttagaaaaaagtaatcccaacactgggacgccacagcctgcttaaccccagctactcaggaggctgaggcaggagagtcaacatattcaaagatatttatagaaaactcaatgaaaaatgtgtatcagataaacacaaattagcaatcaatgaataaattgagagtggccatgacctccaggagattccctgtgggtaagagaaggcaagattcttgggattcctcctttccttaaccaccccatatggcccctggggagggaggggtccctggctagggctccacccccaggcctgtgcccacgaacctaggtgaggacacgc

SEQ ID NO: 7495 - DNA, 487 bp, Homo sapiens
  source 1..487: mol_type = other DNA
tactaactctttggctttgaaaaacatttcttttttattatgaactcattcagaaagaattgttacatacgtttaactgtgtaaatctagaagttttagagtatgtttcataatcctcttattctgttctaacagcaataaaattaaggaaaaactaaaagcattcctgtcttaatctttacgattaaattctatcttgttagcattaattcagaagatactatagaaaactgtattttgataatattccataggattttttcttaaccatttatttttaattcttaagcatatagtggaggaaaaattgtcaaaaaagacaacctgtgggttttatggttctcttgtactcaatgttaagagagtcacttttgaaaagtaggatcagcaagttgtgacgatcaaaaattttatatagagagcacattatatctaattactggagaaacattgaagcttctgccaaccatgattcatggaatgattt

SEQ ID NO: 7496 - DNA, 246 bp, Homo sapiens
  source 1..246: mol_type = other DNA
agccaccactttaagtcttcgagacgctgctaccattgcactccagcctgggcaacagagcgagactctaattctgaatattgggcatttggcacaatcatgcataagtgcccgttaaatgctaaccgttattacttcacttaagaaacagggtttcaccatgttagccaggttagtgacgtcaggtgattactttactgatcaataaacagttcagagcagttaggatgctggtcatggccaggc

SEQ ID NO: 7497 - DNA, 320 bp, Homo sapiens
  source 1..320: mol_type = other DNA
actcctgagctcaggcgatccgcccgcctgtctggctgtgtggcccaggctagtcaggtgtgagccaacgagttcggtctcactctattttaaaaaaaccttttaatcaatatataacagacatatagaaaccctgttgaaaccggcatttgaatcagatccgctgactgactccaaagccaatgtgtcaggccaccgacgcccagcgcagcctccagtgagcccgcggcatgccgcgcggcctccccacacacgatggaagagtggcgctctctactgtcccggaattcttgaggccggaaacggcgcgccccgccccc

SEQ ID NO: 7498 - DNA, 348 bp, Homo sapiens
  source 1..348: mol_type = other DNA
tattcaacaaatatttttaaggaacctacttagtggctaaatgactattctagactgtgtttgctcctagcatataaggaggtttctgatactggccaataataaaaaggaggttaaaatgtacatgaacattcaatctaggtgcttaaacatagcacttactacctatatggaagtatcttctgcagtaaatgcaaataagtatttgttgcattaacgcacaaattgctgagtgtcaaggtcatttacttccccttgcaaggttaactgggttataaaatcccggcccaggcttcgaatcacaatgctcgccgggaatagtagtcttccgcttcccagggagcctcg

SEQ ID NO: 7499 - DNA, 708 bp, Homo sapiens
  source 1..708: mol_type = other DNA
tctggagaaacttacttcgaatagtggtaactataggcacacaatttacttgtaaaattaactagaaccttaataatggatcttataaatatctagatttgccaggaaaaatgttgcctaaactttggcatctttattatgtaaaatgcctttttaatgataagcaatatagattgtcaaaataattttggagatagaagtctagtgcctcctgtttactccagattaaattagcaaataaaagtaagcctctccagccagcacagtgtttgctcttttggggataaaatagccttttggccaaactttacacacttaggtagtactagtttgttaatcttacaaagatattcttatgattagtaagaattgatgaagtgtatggcaatttccctgaaaattactatgttttaaaggattgaaatggaaaagcataggcaatgtttttattaaatcaataccaaaatacgcagtttgaaatataacttagattacataatttctgcaaatgctggtttactttattgtcagtcaaccccagagtatattaattccgtatgaaaatatatcctattttcaaaatgtttctgaaaagacttatttgtggaaatgttccttgctatttaaaactcttcaaaaatgcaggttttacaaaatacaaaaataacctcttgaaagtttgaaagcgtgtgggggcggtctctgctg

SEQ ID NO: 7500 - DNA, 609 bp, Homo sapiens
  source 1..609: mol_type = other DNA
aatcattatctactatctgttaggaatatggattatagtataaagattaattaacacttgcacaaatggttaatttagggaaatatttgacttcatctccagactttatcttaggccgtggagaaccattgaaggtggctagttactataattatcccatcatagattactttataaataaatacactttttacatgtctttaatcatgctttcaagtataatcaataagtttttcagaattaaagattgacaattgaaaactctggtacaaagattaatctgaagtgtgtattaatagctattagagaaccagagtatacagtatttaatgtctagtgagtatgaatagtgctcattataatatatctaaggtagaacaaacatacatatgtgtgtgtgttttttttaaaccatacgtaaacacagttcaaaaaattcaaaacaaaatttgtaacagaattcaaaacattcctaaaatattaatgctgacatttggataaggaagacttaatagatactcaagatacaatgtttgttttttttattttatttttgtaagtaaaaatttactttcactttctaggaaacactcttagattagttagtcc

SEQ ID NO: 7501 - DNA, 441 bp, Homo sapiens
  source 1..441: mol_type = other DNA
ttaggcctgtatactagacacaacctttctgtattgttttgtctgagaacttgattgtcaagtaagaaggaaggaaggtgagatgcagattcacccctacctccacctattctcctttggaaatggaccttgaaaagatcatttctctgcagaacataaccttaaggtgtgggtgtggcatccacctccatctatcacttggagttattaaaattttataaaaattcaataaaatttaaattccatcagcaagttcaaatgctcagtggccaatgtggctgatactgagttctacaggacagcttcttcctagggtctaggcagccccggagccagagtgagaatgcgtgtggtccaggacccctcccagtcccagacgacatctgagcaagggactctgttgccccggggagaaccagtgcttcaacagcaacttctctt

SEQ ID NO: 7502 - DNA, 486 bp, Homo sapiens
  source 1..486: mol_type = other DNA
gcgaggatgggtatgtattacaactcatttttacaatgcactgcagcgtgagagaggcattcattcattcattcattcatcaaacatttgctcgacacgttatccaacgctgggtctcaccccacgccacgggaagggtggggcgctctctccctggagcaggtgcagatcaaactcctcgatcagtcaccttcgggtggtgcgcgcagctgcctgaagacgcggcctgggcctcctccttcctcccaaaggagcagtccccacggccgccctcgggtcaggggtaagatcgggcggcagcttaggctcgactcggctcctccctcagttctgacgcggccgtagaggcggcagcggcggtggcggctgcgagtcccgcggcccgaggcgcacccacccgctcgagcgtcatcagagcgcgccagaggcgcccagggcgggtgcgtcatcggcaggcgccgctctcctcccgcccctctctctgga

SEQ ID NO: 7503 - DNA, 474 bp, Homo sapiens
  source 1..474: mol_type = other DNA
gccacgctttcgcaccactgagctctctcgaattgtgtttccgtgacagaacaatgatctatagagctcagggatgccgggcccgggggtctagcctttctgaagggagagggctccccaggcacgggggcagcgcgaggcagcgcccgcattccgtctgctctctccggttagcgtggaggtgaggtacatctacctccaccctcccggcaccagctcacggtctgttgggggggtcggaggcctcctggagacggcgcccttccgcaagctcccagctctagccggtgcctctggccccgcgcgcattaggtcgctgccagaaaattacccgggcaacgacaccgccggagtcccggatgagggaggggcgtagcccgcctcccggagaagggcggagggatcctcgtgggaggtgcgctgacaccaccgagacgtggccgggcaaggccggattgcgtccagggccaggga

SEQ ID NO: 7504 - DNA, 368 bp, Homo sapiens
  source 1..368: mol_type = other DNA
tctctcagagggactgtcactatctcccttcctcccactgcgggagagaggaagctgcaagcctgaaggtggcccactccgacactttgtcaagaaaggtccggattctggatcctgcaaagttcggaacggtgaacccgtaggcaacgtcggaaaccttccccttcccccacgcacctcggctgctcgggggcggggagcaactgcagtcgtccctggccctggacgcaatccggccttgcccggccacgtctcggtggtgtcagcgcacctcccacgaggatccctccgcccttctccgggaggcgggctacgcccctccctcatccgggactccggcggtgtcgttgcccgggtaattttctggc

SEQ ID NO: 7505 - DNA, 453 bp, Homo sapiens
  source 1..453: mol_type = other DNA
ctcgaattgtgtttccgtgacagaacaatgatctatagagctcagggatgccgggcccgggggtctagcctttctgaagggagagggctccccaggcacgggggcagcgcgaggcagcgcccgcattccgtctgctctctccggttagcgtggaggtgaggtacatctacctccaccctcccggcaccagctcacggtctgttgggggggtcggaggcctcctggagacggcgcccttccgcaagctcccagctctagccggtgcctctggccccgcgcgcattaggtcgctgccagaaaattacccgggcaacgacaccgccggagtcccggatgagggaggggcgtagcccgcctcccggagaagggcggagggatcctcgtgggaggtgcgctgacaccaccgagacgtggccgggcaaggccggattgcgtccagggccagggacgact

SEQ ID NO: 7506 - DNA, 364 bp, Homo sapiens
  source 1..364: mol_type = other DNA
acattttcttattccttaagattttaagattttcttaattggtcttcatgcaccatcaatggccaagaaatgggctccaaggcttgaccaaggaggtcaggaattctgtcctggggagtcaaaggtagcgatgacttcatccccgtagagggaagtagaaaaaaaaaatgtgattaaatcgattcccctgtttctttgaggcctggcaaaatttttgaggggtctttttacgctttaatacaacctaaaggtttctgttaccatcatcattgagaattaaaaaacctttgcgaagctctagcgcagccgttcgcccaagtgctgctagctctccagggagaagtgcgcgcgtgtatataagagt

SEQ ID NO: 7507 - DNA, 538 bp, Homo sapiens
  source 1..538: mol_type = other DNA
ggaagtagaaaaaaaaaatgtgattaaatcgattcccctgtttctttgaggcctggcaaaatttttgaggggtctttttacgctttaatacaacctaaaggtttctgttaccatcatcattgagaattaaaaaacctttgcgaagctctagcgcagccgttcgcccaagtgctgctagctctccagggagaagtgcgcgcgtgtatataagagtgtgtgcgcgcccgtgtgcacaagagagggtgcctgggaggctgtcgcaaaggctcctttgtgaaaggcactccccgaggacacctggctcttctgggcagcccagcccccggcctagccccgcaccagccttcgggtgcgggaagcagtgtgccccgaggcgtctcccccggggccccgcgcaggtgaaggtgagcgcgtggcggtgacgaggggcggagcaggaaagggcgcgctgcccttcccggccggccaggagcagcgaggccgcagctttgttacctgaggctgccgctgcgccccgccccgccctgccccctcgcgc

SEQ ID NO: 7508 - DNA, 274 bp, Homo sapiens
  source 1..274: mol_type = other DNA
atatctcttgcagtgagctgagatcacactactgcactccatcccagcactttaattcaccaggtgtggtggtgcattcctgtaattccagctactcaggaggtctcaataaataaataaataaataaataaataaaataaagatgtgatcagatagtatattcaataaaataagcatgtcatcaaactaactttcttggcctaatgcaacataaatatctgtggctttaaaaatacatattattatgtgtgcagtctacaaacactttcctga

SEQ ID NO: 7509 - DNA, 398 bp, Homo sapiens
  source 1..398: mol_type = other DNA
ttcccagctattcgggaagctgagactcgagaatcacctgagcaccactgcactccagcctatgtgaacatttaaatgtttaataaatatgcatagtttcataagcatcatggcctgatgatgcaagactgtatttgaaacaattcttgaatttctgtgcacgagatcatctatagccaaatgccagctagtgctctgtcagtgcaaaataactgtttaaatagtatcttaaggaggtagggaagggcgagcgacgcagtccctcgcctgcgatagccacgatttaaaacaggttcttcttagaaggcctagtgctaaggaacaggctctccggagtttcccgggaaaccaccccccgcagaggcaggtgcggctggctgggcctcgcggggaagggc

SEQ ID NO: 7510 - DNA, 459 bp, Homo sapiens
  source 1..459: mol_type = other DNA
gatttaaaacaggttcttcttagaaggcctagtgctaaggaacaggctctccggagtttcccgggaaaccaccccccgcagaggcaggtgcggctggctgggcctcgcggggaagggctgggcggagtcggggcactcggggcctggggcgtggtcgccgggctgccgtgcgctcggatcagtctttttatacatatatatatgtgtgtatatatatatatatatatatacacacatatatatatgttataaaattctaacttcggtggagtactttactttgatattccacttgcaaaacagaaccactgattccttcctgcttgacaagattgatttggaaatggtccaagcgcttctgaaagagccttttgcatttgaaatgcatgttaggttaactggaaaggcgctgcacagtcacttcagcggcggcgtcgctggggctgaggccgggtgact

SEQ ID NO: 7511 - DNA, 616 bp, Homo sapiens
  source 1..616: mol_type = other DNA
gatgcccagttttttaaaataaacattattagcaatccctttgaaactaataactaaccaaggaataggatgcaatactgttccctgcgtttattgttgtagaaaaaggaacggttgtgaattctactctgatatgtaagattttttattctaaattattatttgtaatatggagacctaatcactatcatattgatcatttttacattatttataccttttacaactaagtttaatgacttggcaggaaattaagttatgttatttgtcaagtttctcaacttttaactgaaaacttcatgatcagaagaagaacaaggttgaatcaaaatatgtaccatatgatttttctctgaatcattagaaccacaaaaagcaaagaaatgtcattgcatgatttgactttgtttgtttgttttttgcatttaaaaaaattatgatatgtgtttaaagctacttgagacatctaaggaaatcaggtctctctttctaacgagcaagtgtgtgctctcacactcacgcaaagctcttctctaaatgtgaacttttcatattgaggtaccatcccggctgcgttgcacggagactgcgagctcagcggcccagcacgctgctg

SEQ ID NO: 7512 - DNA, 354 bp, Homo sapiens
  source 1..354: mol_type = other DNA
tctcctgcctcagcctcccgagtagctgggattgtacaggcgttaacaccatagaataattttcaaaataattgaattctgagttaaaatttttcagcacccgttgtttccttcttttttaaaacctaagggaaaaacaaacagacggcaagtccggaaggatggaggcagcgtttcccatatttctgcggcgccaagaaaacacagccccggccccaggcccgcgccccttcccccgccggcggctcggatgggtcgctaggggtcgctgcgcgccgcgcgggcgaggaccggcctctttcccccacctcgctgctccgcccccgcggcgtagtcggcgcccgcccctctccc

SEQ ID NO: 7513 - DNA, 505 bp, Homo sapiens
  source 1..505: mol_type = other DNA
agattttggacttgttagttataggcatcaaaacctggaactaggaaatgtatttccacgtattacttccattatcctactaatgttagaaaaattttgcaatatgattccatttgcagggtctttgaagctataaccccacctgtcaggacctggacagtgtccacagagggtgccgggcgcactaccgccacgcggcgctgaggtctgcctctcctgcataactggcagtgtgggccgtccccgcggagcccagccgaggaaagcgcccgggccccgcagagtgcgcgctgcggggcgggcccgcggccatgtgctccgcgccggggcggggcacccgcgggttcgcattgtgcggcgcacacgcgctcagagcaagcggcgcgcccgggtctggagctgcagcagctgcggcagcggcgggggtggtgcggcgcggggcggggcggggcggggcggggcggggcggggcggcacgggggcgggcccggggcgaggcagctgg

SEQ ID NO: 7514 - DNA, 375 bp, Homo sapiens
  source 1..375: mol_type = other DNA
agcctgaacctcccgggctccggcgatcctccagcctcaacctcctgagtagctggggctacaggcccagctcacttttgtatattttatagagatggggctgcttggccagcactctgagttttataaattgtactttggtctgttcacctcctttgtaggtgttgacaaatacgagggcttgcctaaacgttccagcttgttctcaaccttgaagccaggcttaggcctaagttgcttgcgtcgcaggggccctgcatggcctggagcagcataggggccaagatggttcatcatctttggaggaagcacagataactgaggaaagtctgtatccctctgagggagaggaaactctctctctctcttctccgg

SEQ ID NO: 7515 - DNA, 346 bp, Homo sapiens
  source 1..346: mol_type = other DNA
cagaacagtgccctgggggcccatactccagctttccagagcgcacagctgcgtttctacagaataacaagcccattttattagtatttcgttttccatgtaaagttctgctcatacgaatatatttataattctgattgccgaggcggcctcgggcgggcaggtcccgggctccatcacacaagcccgggccccggcggcacgcggggctaggcgcgttcccgccagtacctggtcgcgaggccgctcgcggggtgccctgcgtgccccccactcccgcagcccgcgccctgctcgctcactgtgggggcgcagcggccaattcccttccagcaagcgcgtgagg

SEQ ID NO: 7516 - DNA, 423 bp, Homo sapiens
  source 1..423: mol_type = other DNA
cgctgagggcttgcggggtgtcagccaccagggctttctgctctcagtcagcatcgtcagacatcctggaagtgtagtgtggtttgcaccatgtgtgccacaggacgggagtccctctcgccaaatggagatttggcaccccaaagtgatgttggctcagcgcgagccaagagtcgatggagggggaggccgcggagaggccgctcctctcacctccccgcacttggccaagcccaggcagacgccccgcctgcgcgtcccccacccgcgccctgctgcagagcgcggctcgctgccctcgtgtgcgccgcatcacacggcagtcggagcaggagtcgcgcggtccctggcgcccggagacacagtggggaaccaccgccccgcccccggagcagcggacagggccgcagacctcccttcccc

SEQ ID NO: 7517 - DNA, 394 bp, Homo sapiens
  source 1..394: mol_type = other DNA
accttaatgtttttaatgaatttagtaaaatgtttgtctatttaagtttgtaaatgcctaagtccatccatttttttttttacatagaaaaataattgggtagggtcaaggatatgtataaataaaaatggctaaagtctccaattgtgtcttctaccagctttggcattgttgaagccaaaaaaaaaaatctattagcagaaaataaatatggggttttgttataactacatgtcaaaattttccaaattaaaacgttcacttaacaagtgtttactggactgtttaacgttctccaggagtctccggctttcagcctcgagactccgccctagaggcggtcccgaggagggagacccgcctcctggcgcgtgcgcagagcttgcatcacatc

SEQ ID NO: 7518 - DNA, 710 bp, Homo sapiens
  source 1..710: mol_type = other DNA
tcaatcttgtaggagttattaatcctgatgacaagagagataaattttgtggcttgtgatgggcctcatttagtctgtgagcatactaatagatgtatgaagacttcaccagtgttaaaataacattgtttttataaatcatatgatataaactatataacaataaaatagaatgttaaacatgtatttaatcatcatcataattttgattcagaaatctataatttattagttatcttaataatgtttagaatttgttgaacattttaccttatgtgaattaaggacaaaatattaaagctattcagcacaaaaaaagggtctttctgatggaatttgttattttgttattttgattaatgtctaaaacaaaagataaacacattatgatataacattactattgattttaatggccccttttgaaatagaattatgtcattgtcagaaaacataagcatttatggtatatcattaatgagtcacgattcaaatttactaagcttagatttgtcttcccatcattttgtccaattaaatgaattgaagaaatttaatgtttctaaactagaccaacaaagaataatagttgtatgacaagtaaataagcttgatatggttcagccaaaagtgaaccaaaaattaaatattaactaaggaaaggtaaccatttctgaagtcattcctagcagaggactcagatatatata

SEQ ID NO: 7519 - DNA, 446 bp, Homo sapiens
  source 1..446: mol_type = other DNA
gtaatactccattgtgtatatatatatatacacattttctttatctactcatccatcatttcatatctcggctattgtcaatatagctacaatgaacatgggaagatcctgatttcatttcctttggaaatacactcagaaatgagaaaacaggaaataaatggtatttttcatggcactttatgatctcccataattcactgagtatttcctatgtgacagtcactgttctgagagatttacaagaattaactcatttattcttcataaaagcatggggtagcttatcagcatccttattttataaatgaggaaactgagctgtcatcttaatattttaaatagagaaaagtaatatgttctaaataaacttatagaaagccttcaggccagcttatccccaaagttatttataaagtgaaatattgttgcaacagcttatagga

SEQ ID NO: 7520 - DNA, 391 bp, Homo sapiens
  source 1..391: mol_type = other DNA
atttcatcaaaacttataataagcttattaataatagtcgcccagtgataaatctcaataggcagtgatgacagacatgttttcccaaacaggatgctgtaagggccaaacagaaatgatggccttagatacaagggaggtctctgagatgaaccacaggaacaatgaagtgggctcctggctcttttctctgtggcagagggtgccatagctcaaactcatgtatttccagggtcattcattcctgggaatagtgaactgtcagtctccttaaaaataataatgttaactgatccctaggctaaaataatagtgttaactgatccctaagctaagaaagttcttttggtaattcaggtgaccatgtactggaagaagccttctggtaagg

SEQ ID NO: 7521 - DNA, 419 bp, Homo sapiens
  source 1..419: mol_type = other DNA
tgcctccctaagttcaatccaggaagagagtaacctggaaaaaaatatttgcagtggtcctgatgtccgcagcaggccttgcttcagggccctggagaaacagaaataggagagcacttaggggccttctcaaacgccagaatttggaaaagattatttggcacaaactccgaaaaagtggagaggctgtgagccagccaccctccttgctctgcgcacaggatgacaggagctgggaacctcaaggtaggtgagcctgccaagacgcgggtccgggactcggctggggcgcagatggagcccgcccggtagggggtgtgcggagccctgttttctgggctccggcccccagcccagcccagccgccgcaggagcgctcggccagtaggtgtctctgctcctcgggcggccttgagcag

SEQ ID NO: 7522 - DNA, 579 bp, Homo sapiens
  source 1..579: mol_type = other DNA
gactgacctcttagaaactttcacagttaacagttattacatggctagtaacatacatgcacacataccacttgtgtatatatatataattatgtagaaaatacctgtggtatttaatactttttttgcaaattgaataggtatttttattggcatgtctaggccattattttaaaaaaaatcatctttaagttacatgaagaataatttaaaaaataaatatttatagagtagcatagctacaaacaaatttcattaaatttttgttttaaaatgtagacatactttaaatttgacaaaaactcataaaaataaatttgatcagactttcaggagaatttcttattagctttggctaaattattattgatgaaatgtacagaaaaatagaaaatatcaactgataatagataatcttttgaaagtattaaatgagaatacaagaaaacatgagtgaaattcacctctctcactggccaatgttaagcaacgaatatgatttttctccaattttacttatccagaaaataaaaatcttaaatttaaatgtattgcagcttttgcatcatgacattcaaa

SEQ ID NO: 7523 - DNA, 392 bp, Homo sapiens
  source 1..392: mol_type = other DNA
tggaagcttcgtactcaacggccacaggtgcctaggagcgcagagaggcctcgggttcatcaccggcgcgcagggactggactcgcgggtagcgacccccccaacccccccacgcctgtaatccccaggagttcgagaccagcctggccaacaccagcctggccaacatggtgagcgctttgggaggcggaggttgcagtgagcccagatcgcgccaccgccctcctttgcaaagtaaatgcaatctctttgcgaagtgccaggaactcgccccagtcccgacaggtgcaggaccttctggagctgggagtcggcccgcccccctcccaaagaaaccgggatcccgcgtcctccccgccgctagcgcagcgcgccagcggcgcccaatcagt

SEQ ID NO: 7524 - DNA, 407 bp, Homo sapiens
  source 1..407: mol_type = other DNA
tcactgttgtagtatatttaaaaattaaaaatatactttaacaaaatttaaattggtagacattcattagttccttgaatatatggagaaataagttccttgttaattagagaatcaacatgagctaggttctttattgtctaatattccatgaatctaatattatctatacataaatagttggtttaatttcgagctgtcttcaaaggaagcaaaactgaagttatgcataccaacaaccctatctgtgaaagttggttttactagcaccggatatatgtggttgttttgcgccaaactagcagtttacaaaaagaaccattacgatgcatctatgtttaatgcacctaggaccttcatttagtcactccaagcactttgactatgattggatgaggcaccactcc

SEQ ID NO: 7525 - DNA, 486 bp, Homo sapiens
  source 1..486: mol_type = other DNA
catcctcccctgagcagtgtacactgtacccaaggttgagtcctcacatcttagctcccactaatgagtgagaacatatgatatttgtggtatgtgtgtgtatatatatgtatatatatgtgtgtgtgtgtatatatgtgtgtatatatatgtatatatgtgtgtgtgtgtatatggtgtgtgtatatatatgtatatatcacattgcaattggctataaacatgcatgtgcaaatgtcttttttgtatggatcaaatggtagatctacttttagttctttaaggaagcacactagtttacattcccactagcagtataaaagtgacaacatctattattttttgatttttttgcatttcctgcaggcatttttaaagcactccagaggaaaagcatggctttatgccatatattgtctcacttataccacaaaattttggtacacctccaattttaatttcatggttaagaaggcataaagatta

SEQ ID NO: 7526 - DNA, 436 bp, Homo sapiens
  source 1..436: mol_type = other DNA
ccagcctgggaggctctgggcattagcggcgctcctagtggcacgagtggcttgagagctcaacaggttagggaaattgctgatcatgggcagcaggatctggctagaggagcaccagcgcactgcgccccagccctgggcgagggtgcggaggatttgcgattggaagttgtggaattttctcagcccctacgaggcgcggggattctccagccccggccctgctcgcctgccttgctagggaccgcagtccctcagccgcagctgggtctgtccgccccgcggggcggatttggtgaagtcggcctcaagtccaggaggtctgtcttcgccgggccagctctcgcggaaccttgggtggcacagtaggtgacagcagcagctgcaggtggtggctggggacccgcgagggggcgcccctctgggtgagcgggct

SEQ ID NO: 7527 - DNA, 401 bp, Homo sapiens
  source 1..401: mol_type = other DNA
tttgaaaagcccaggctgctttgttttataaacaattgtgggcataattctatattaactgaagattaatttcaggttacactgtaaaaatgccttacaaatactattagcatttgagaagcctttaattaacatcttggagaatatgtattacctttttaaacagataaatattttttttcattttagagtagcggaatctaatcttaatctaatcttttaggagtatatttcagagaaatttttcagaaatgacaatgcatgtaaagacttaggtttaatagggttcctgggaggaaccagcctgggaggctctgggcattagcggcgctcctagtggcacgagtggcttgagagctcaacaggttagggaaattgctgatcatgggcagcaggatctg

SEQ ID NO: 7528 - DNA, 483 bp, Homo sapiens
  source 1..483: mol_type = other DNA
tttaattactagtcaatgaattcattcagataattcaactaggattaagctttttaaaaattaaaaatagtaaaaattcatattattttaaagactttcaataaacgtttttggtttttatttgctttaagaatttcctatgcgaattaaatgatgttgattttgtttactttagtagcacatgctggaataagattactcactaagtataaatacaattccaggcactcttccaagtgttccacttgtattatttcattcaattttacagcaactttcaggtagtacacttttgttttcccccagaaatgtgctttatttgcaacacgtgcagataaggacccttactctccaggaaggtgatgtcacttccttcgtctgggtggttgccccagcgacacgttgggccgaagagcggtgttgggtacccagacccggcggtggggaagtcacttcctcccgaagacgctgtttcctagcaac

SEQ ID NO: 7529 - DNA, 347 bp, Homo sapiens
  source 1..347: mol_type = other DNA
tacatctgaagttctaaatattcttagtacaaatgtcctactgatctaagagatcctgattctgattaatgttcactatgaggcaagcacaaattgaaaatggatcacataaagatcatgattaattgttaattcacaatggatggatttttttaagtcagaacatctgcaaatgagtagattggcttcaaatctgagatgtcaacttccccagcagaaatgttggagtttttaactgtggaaaactacagtttttccacaccagtgcatagtggagaagacactgcagagaccaggactcagttcccctgccctagtctgagcctagtgggtgggactcagctcag

SEQ ID NO: 7530 - DNA, 304 bp, Homo sapiens
  source 1..304: mol_type = other DNA
aattgaaaatggatcacataaagatcatgattaattgttaattcacaatggatggatttttttaagtcagaacatctgcaaatgagtagattggcttcaaatctgagatgtcaacttccccagcagaaatgttggagtttttaactgtggaaaactacagtttttccacaccagtgcatagtggagaagacactgcagagaccaggactcagttcccctgccctagtctgagcctagtgggtgggactcagctcagcagcctggaggagcttagagaccccagccgggcgtgatctcaccatgg

SEQ ID NO: 7531 - DNA, 368 bp, Homo sapiens
  source 1..368: mol_type = other DNA
catctgcaaatgagtagattggcttcaaatctgagatgtcaacttccccagcagaaatgttggagtttttaactgtggaaaactacagtttttccacaccagtgcatagtggagaagacactgcagagaccaggactcagttcccctgccctagtctgagcctagtgggtgggactcagctcagcagcctggaggagcttagagaccccagccgggcgtgatctcaccatggagcgggcgatacagtttccgaggcacgccgcgtcccgcctagcctgttgaacaggacccaagcgtaagtgccgctgccgcgagtgcccagggtgcactcgcgcggggaccgacaggtgccactgcagggtcccctc

SEQ ID NO: 7532 - DNA, 456 bp, Homo sapiens
  source 1..456: mol_type = other DNA
ctgcagagaccaggactcagttcccctgccctagtctgagcctagtgggtgggactcagctcagcagcctggaggagcttagagaccccagccgggcgtgatctcaccatggagcgggcgatacagtttccgaggcacgccgcgtcccgcctagcctgttgaacaggacccaagcgtaagtgccgctgccgcgagtgcccagggtgcactcgcgcggggaccgacaggtgccactgcagggtcccctcgcagtgcggatttgcgaggcgcgccctggagctgctagagatccggaagcgccaccaagtaagtggtcgctgcatccccacgcgggtcggggttcttcagacaggcggtccctcttccgggacccccgcccagccctgggaagccagcatcgggttcccacgctggggaggacgcccgaggggccggcccagggcccgggggacccgc

SEQ ID NO: 7533 - DNA, 537 bp, Homo sapiens
  source 1..537: mol_type = other DNA
cagcctggaggagcttagagaccccagccgggcgtgatctcaccatggagcgggcgatacagtttccgaggcacgccgcgtcccgcctagcctgttgaacaggacccaagcgtaagtgccgctgccgcgagtgcccagggtgcactcgcgcggggaccgacaggtgccactgcagggtcccctcgcagtgcggatttgcgaggcgcgccctggagctgctagagatccggaagcgccaccaagtaagtggtcgctgcatccccacgcgggtcggggttcttcagacaggcggtccctcttccgggacccccgcccagccctgggaagccagcatcgggttcccacgctggggaggacgcccgaggggccggcccagggcccgggggacccgcggcgcccgagggaggagcacagacgggggtgggcgccgagcagcgccgcgccggctgctgagctcgcggggccgggccgtgagaacgcgcggggcgcgccggggccgctggtctcccacggccagggcgcctgggccccagagcc

SEQ ID NO: 7534 - DNA, 451 bp, Homo sapiens
  source 1..451: mol_type = other DNA
ttcgtctgttgctaagaaacagcaacagaggcccgctctagagggttacaaactcctacagtttagtaaagggcaggactggatttaacataacgtccaccaaactacattactgaaaatttttggtgcttcactcaactagtctcattgactagaagtgaaaatatgtttttctcaatattaccagctttaaatttgcctattccttttaaggtctgtccattgcaaaatacatttagtgggtccacaagagctgcatttcctctgccatggcctcaaatgaaggccttgtcaccaggttccctccctggggagcaccgaccagccccctgcggctcgactcgccattggctggatgctgcctccccggcccggttgcgctgtagccgctgccgccgggggctgcctccccggctcccggtgcagacaccatggtaagtgctctcagccg

SEQ ID NO: 7535 - DNA, 354 bp, Homo sapiens
  source 1..354: mol_type = other DNA
ttcgtctgttgctaagaaacagcaacagaggcccgctctagagggttacaaactcctacagtttagtaaagggcaggactggatttaacataacgtccaccaaactacattactgaaaatttttggtgcttcactcaactagtctcattgactagaagtgaaaatatgtttttctcaatattaccagctttaaatttgcctattccttttaaggtctgtccattgcaaaatacatttagtgggtccacaagagctgcatttcctctgccatggcctcaaatgaaggccttgtcaccaggttccctccctggggagcaccgaccagccccctgcggctcgactcgccattggctg

SEQ ID NO: 7536 - DNA, 624 bp, Homo sapiens
  source 1..624: mol_type = other DNA
ggaataggttgtttgttgatgaatgaaaaaaattaaaatatcctcttgtgttaaattgtttttcttttggaaggactatactacaagaaaggcaatcaagttttctcttttctatctttccttatctaactgcttgaaagaggaaattgtattccatacccctgatatcataaggctgagctaatgaaattggattgattcaccatgggagtaaatgcaatgtgaaacagtgcagtaacggaacttattactttgattatatttgaagaatagaaaacaacaaagtgctattgttgagataaaaacctttgttcctgataaattccacaatgctgaagttttggtgacttgcagcaaaatactttggatacaatgtgccaatagttagaataatgaaaacttataattatctggaagacagataccaacatctagattctattagcttcttttgcaagacatttaagcaaaatttgatgcctaagaagtctttgacccattgtgcaattaatcttgtatttgcacatgtagtttcattatctggatgacacctaatggatcttcaagattcaatttaaaggtatatagttgttaaaaatgcatttttagctaaattagaactgc

SEQ ID NO: 7537 - DNA, 554 bp, Homo sapiens
  source 1..554: mol_type = other DNA
aatttaaccctaaagaagagctctttaatggagaaattcatatatcatgaaatttatcctattcctgaaatcctagtttgaacttatagtgctgagtttacaagtttccaaatatatgcaaaatatacgtaatcatactgatgattaatctaacaagcaatcactgaattctgtcaagagatgatgccctttatgcacaataatgcacattcttccatttattattcaatataataaattctaacaattttccaaaagtgttcatataaaaaataatcagactttatgttttagtaagttgtttgtttttaatcatttatattatttctgttagaaacagcttctgttactaagaaagaataaaaaaaaatttattccagctgcgttttgatttgaagttgaataaagacaaaggtaatttgataggaagtgtccctttaactgtgagaaaatggtttcctaatgtttcagattatgtgctttatgaggcaaaacatagcaacacaaacatttaaattgcttccatgttttacaatgctgtattttatataaag

SEQ ID NO: 7538 - DNA, 441 bp, Homo sapiens
  source 1..441: mol_type = other DNA
ttagattaataaatgatgtttcaaggaagaatatttttatcactgacactgtatagaattattgagacaaagtctcactctccagcgagtctcctgcctcagcctccctagtagctgttttaaaattctatataggattggtaccacagatgaatagtaaactgataatgttcatttaaattccaatacaatgtgttgagagcttaactgctgattattacatgatatttaggtcagattaaatttcagtttttggtctagaagctgtaagaatattcaaatttgagagaatacatatttgttttttacaagctcatcatcttatgtatcctaatactatgccaaatgttttcttgggattgaataaatgtaatttttttgttactttgaatataaaagcagaaccactctaaagtttacagaggttcagttctgtaccaa

SEQ ID NO: 7539 - DNA, 355 bp, Homo sapiens
  source 1..355: mol_type = other DNA
tcttcacaatttatgaacaagggaacttcattttcagtttacacggaaccctgcaaattatgtacttgctttgccttcaagagttttgaaagatccaaaaactgtgtatgcttttcacatctgtacaattttgttacgtatttataaacatctgctgtcagaacacagggcaggccaggtggctcacacctgctgtagtcccaggtactccggaggctgaggcaggaggcacttgaatcgaggctgcagtgagacctgatctcaacacacacaaaagaatgactctcaggcttctttttttctaagattttcagtctccttccgcccctcgagcccaggctgggaggagccgagg

SEQ ID NO: 7540 - DNA, 688 bp, Homo sapiens
  source 1..688: mol_type = other DNA
cagcgagtcccgcagcaccccctgtctgcgcagcacctgttgacagccagtgggcggccaagcccgctcgcgcggacgcgtcccagggctgcccctcccagaggcgctgacccccgcccgccccatcggccgcctgcgggagagccgctgagccgcccccgctcgccaggcgcgcgctccgcccgggctcggcccacggcccccacctcctgtctgccgcccggcggggggaaggtagagaaggggaggggacaagccggatcctcccggccgccccggccttccctcttcaccccgtgcggagacgccgcgcgtagccccgaggttagcgcggagcccgaggcgtggacggggaacaaccggagccccgcggtgaccccgagcggccgaattgccccaggtgccggaatccgtgctgcggcgctccgaacccggggccaactgcgctccgggctgaggagcgggagccccgcggcctctctccgcctgcgcccgggccgccgtcggcccggagccccccggccccgctccggcgccccggcccgtgggacccgccgcggcgccctcgccttgtttcttccccctcccccttcgggggtggggggtggggcgggggagaggcgccgacttggcttccagtctggctgcgggcacgaactgacaggtgctcccagcaacttgctgggga

SEQ ID NO: 7541 - DNA, 730 bp, Homo sapiens
  source 1..730: mol_type = other DNA
aactctggccaagggtcctagcaaagaccttaggagctgcaggaagttctttcccacttactagggaaagcaggggccgccttggccgcgttcctctgggtcttgcccacagcgagtcccgcagcaccccctgtctgcgcagcacctgttgacagccagtgggcggccaagcccgctcgcgcggacgcgtcccagggctgcccctcccagaggcgctgacccccgcccgccccatcggccgcctgcgggagagccgctgagccgcccccgctcgccaggcgcgcgctccgcccgggctcggcccacggcccccacctcctgtctgccgcccggcggggggaaggtagagaaggggaggggacaagccggatcctcccggccgccccggccttccctcttcaccccgtgcggagacgccgcgcgtagccccgaggttagcgcggagcccgaggcgtggacggggaacaaccggagccccgcggtgaccccgagcggccgaattgccccaggtgccggaatccgtgctgcggcgctccgaacccggggccaactgcgctccgggctgaggagcgggagccccgcggcctctctccgcctgcgcccgggccgccgtcggcccggagccccccggccccgctccggcgccccggcccgtgggacccgccgcggcgccctcgccttgtttcttccccctcccccttcgggggtggggggtggggcgggggagagg

SEQ ID NO: 7542 - DNA, 500 bp, Homo sapiens
  source 1..500: mol_type = other DNA
gaagagatttcagttctttctcgacttggtgaatgtaaacagttgcaggaattcagtaaatatagtacttgttaaatggatgctggaaattggaggaaagcctttgaattcatttcccttaactctggccaagggtcctagcaaagaccttaggagctgcaggaagttctttcccacttactagggaaagcaggggccgccttggccgcgttcctctgggtcttgcccacagcgagtcccgcagcaccccctgtctgcgcagcacctgttgacagccagtgggcggccaagcccgctcgcgcggacgcgtcccagggctgcccctcccagaggcgctgacccccgcccgccccatcggccgcctgcgggagagccgctgagccgcccccgctcgccaggcgcgcgctccgcccgggctcggcccacggcccccacctcctgtctgccgcccggcggggggaaggtagagaaggggaggggacaagccggatcctcccggc

SEQ ID NO: 7543 - DNA, 520 bp, Homo sapiens
  source 1..520: mol_type = other DNA
ttaataggatagccttatctgttatctaaggggatgaggacaacagtattttgctcttataaggcagagaccctgtctggttcagatatgcaaaaatcactaattttgaatctctggtaaatttctttcaagatctgtaactctaagtaaatctcttaatataactgagtttcagattcttcatctacagaaggggatgacaagttttgcaactgtcaagttctgtacacatgttaattatgtaacagatgttaaacatagtattacctgtatgactatattgtcagtaattttgaccaatttaagcttgctcagaaagttcaggcttttagaaacccggagattaagctggatgtctgggttggaaatgacagaaaatgtgttttgttcgctttggtcaaaagctgacccccaactcctttagtcccctaaggagtgaggggggtacagcccgcggtcgccaggttcccccgcggcccgcgctgtccccgctgcggccccgaccgcggcgcgccacggc

SEQ ID NO: 7544 - DNA, 488 bp, Homo sapiens
  source 1..488: mol_type = other DNA
tttcgaaacccccggccctctaccagagtctcttgctttcatgcataaagcaaggtctaaagatgggattttcatgcaaaatatttaaaagattccatcttgatctcttgtgccttaagcatttaaagaactccctggatcctggctacatcccatgaagcccaagtgcacaattttggaatatttcctaaaaatcaaaattatttgtgcaattcggcttctacacagcagccggagatcagctttgctgcatttggtccaggttggagcatctccgcagcagctgcaacagccgcacgaaggtagctccgggcggggagcgaggcgctgtcctcggtgctgaaaggccgaggcgcgcggtgggcgcgacagccccggagacccgaggtctcgcggagggacagcggctacgggccccgagctgtgctttctcagcgccgcgcacgcgacgcgtccacggtggtgcggggtgccgggcgccgtgcggg

SEQ ID NO: 7545 - DNA, 532 bp, Homo sapiens
  source 1..532: mol_type = other DNA
accagagtctcttgctttcatgcataaagcaaggtctaaagatgggattttcatgcaaaatatttaaaagattccatcttgatctcttgtgccttaagcatttaaagaactccctggatcctggctacatcccatgaagcccaagtgcacaattttggaatatttcctaaaaatcaaaattatttgtgcaattcggcttctacacagcagccggagatcagctttgctgcatttggtccaggttggagcatctccgcagcagctgcaacagccgcacgaaggtagctccgggcggggagcgaggcgctgtcctcggtgctgaaaggccgaggcgcgcggtgggcgcgacagccccggagacccgaggtctcgcggagggacagcggctacgggccccgagctgtgctttctcagcgccgcgcacgcgacgcgtccacggtggtgcggggtgccgggcgccgtgcgggggagggggcgcgcgctcccgcctcctgccgcgagtcgcgcacgcgcgcccgggactgcctgcccc

SEQ ID NO: 7546 - DNA, 392 bp, Homo sapiens
  source 1..392: mol_type = other DNA
tgcattgtaaaatatagtatttttaggattatacaccatatgctaactgttgcaccgtgcaattgcacactatacttctctttccagaactggtggaattgtgcggctgctccaccaagatagcaaacattctcgatcttttgaacttcatgagactgacatttctgagtctgttaagtggaaatttatttgaatgaaaactgattctctttcttttttccgaatttaaaattaaagtttattttgttaactattgtttttaaaagctttgtatctcttaaaaccatgcatttccaagttttgctttgcaatcagtagttttcaagggagcttttaaagctgaactaaatgtttgaaatgtggaacactcttgaccatgaaatatgttcatt

SEQ ID NO: 7547 - DNA, 342 bp, Homo sapiens
  source 1..342: mol_type = other DNA
gcaagaagttcacattttctatcaagaaaataattctgtgtgtgataaaattgttttgatgcctgaattctcacaaagtttagccaaaatatccaggtacttccaggctactgtcaatattggcagacttttagtgctgaaataacagcccgattataatttttgtcatgcattgtaaaatatagtatttttaggattatacaccatatgctaactgttgcaccgtgcaattgcacactatacttctctttccagaactggtggaattgtgcggctgctccaccaagatagcaaacattctcgatcttttgaacttcatgagactgacatttctgagtctgt

SEQ ID NO: 7548 - DNA, 385 bp, Homo sapiens
  source 1..385: mol_type = other DNA
atagtgtagcctccacgaatccctattgtggctatagcagtagtcaacgaaatttactaactctctccatgaaaaaaatagctagaggagatgtctgcttattataactggcctctgccaaaggctggtcagttattcctttgactgtggaaataataagatggtttccttgcaagaagttcacattttctatcaagaaaataattctgtgtgtgataaaattgttttgatgcctgaattctcacaaagtttagccaaaatatccaggtacttccaggctactgtcaatattggcagacttttagtgctgaaataacagcccgattataatttttgtcatgcattgtaaaatatagtatttttaggattatacaccatatgctaa

SEQ ID NO: 7549 - DNA, 400 bp, Homo sapiens
  source 1..400: mol_type = other DNA
gtgcagtaaactcaattgggctaagacaaaccacatattttttaaatgtctcctttaagcaaatgtacaaagtagtctaattttaccaaaagatgcttatagcataaaactttctatgctgtaaacatagcttgaaatcagaaaaaattactgtccttaaaatgaaaaaaaatatacacacagagttggggttttttcactttactaaagctcaggctgtgcttattacaatagaacagtgatcaaaactacagctttttttcctcctttataatatgaccaaacaaaccttgtttccttttcactgagaaacagagaaaaaattagatgagatgatgcaatctgcttacagcctaaatcaggatgaaccaaggcatgatgtgtgacttcagatgtgaag

SEQ ID NO: 7550 - DNA, 444 bp, Homo sapiens
  source 1..444: mol_type = other DNA
tccttaagtgaaaaagctttgctgctttaattctttaaatgaaaaaggcagaacttccttctaggaaatgtcatattttccataaatagcacttcctcagagaaggcttctttgaactttaaagtttgcatcctttggtgtatgcgaacccacatgaagagatccctcactttgggagggcgaggcgggcggatcacctgaggtcaggaggctactcaacaaagaattagtgattacaagtgaaatcttgtaatgtcacaagaaatgttaatgaatgaatttcttaataccaagtggaaaaattcacttgagataatcttttacaatggtgtgaaattcctcagacttttgttttatccataaactgcacaaataatacctccctctgtgacacttagagagggtgacatgctgagagtttcctgaataatcacctcttgaaaa

SEQ ID NO: 7551 - DNA, 415 bp, Homo sapiens
  source 1..415: mol_type = other DNA
ccctcactttgggagggcgaggcgggcggatcacctgaggtcaggaggctactcaacaaagaattagtgattacaagtgaaatcttgtaatgtcacaagaaatgttaatgaatgaatttcttaataccaagtggaaaaattcacttgagataatcttttacaatggtgtgaaattcctcagacttttgttttatccataaactgcacaaataatacctccctctgtgacacttagagagggtgacatgctgagagtttcctgaataatcacctcttgaaaaaaggcgttccccaacctgctgtcctatgaaggcctctaggtcagagcaccctgggaacgggagtctgggtcacgggtgctagagccctcccctctccgagtcaggctccggctccacactggcacgtagtgggc

SEQ ID NO: 7552 - DNA, 321 bp, Homo sapiens
  source 1..321: mol_type = other DNA
ccaactgggtgagatcctctaacagggtttgtcaggcaccctgtacaggaatgatcctactggcatcaggttggtgcctcttggggtccgagatcccagatgaagaagaaggcatccatctttgctgttcttcagcctttcatattgttttatgaaaccaggcctgggcttgcctgacctaagcctgcaatggcctaaccggttatgttacctatagattccagacattgtatggaaaggctctgtaatgcagcggacccctttagagttgtgagcccttaaaagggacacttaagacaggagtcttgcccgcgggaagcg

SEQ ID NO: 7553 - DNA, 379 bp, Homo sapiens
  source 1..379: mol_type = other DNA
ttgttccagaaattcattagcaagttgaaatgcagtctacagaaatgttcattgcattttcatacttttggtccaataataaaaatcatcatatgaatgactgacactttgctgcatacatattttgctccagaaaagcaaggacatccactgacatgtcatggtctaattcacaagttcaaaaggattttaagttgttttattcctttgtattcttcaatatcctattgttcgaattcccaaactcaaacagtttataaacgattgctgtagttagacaaggcattttgtcattaggggaaaaaatatgtttttgcttatgagatatctctagctcaagtgtgtgtgtgtgcacgcgcacgcgtgcgtgtgtgtaaag

SEQ ID NO: 7554 - DNA, 515 bp, Homo sapiens
  source 1..515: mol_type = other DNA
tcccttgagcccaggagtttggggctgcaagaccctgtctcaaaaaaaaatttttttaatgatatgacaaaatatgaattcaacttatactgtaacttaacaacccataggatcagattctatataatgtagggatacatcagtcctaagctaaggggctggagtgcagtgtgcaatctcggctcactgcaacctaagcgattctcacgcctcagcctcccgagtagctgggactacaggcatgtagcctcccaaagtgtggggattatgatttagcaagaaagccatagcaataatttaagtgacttctttttgtcacattaattatgagagtcccaagttctaataataacatgattgccgttatctgtaagaagaatcggaatagataacccatccgatgtttccatccttgagactgttatctgtaaccccttctggaaggaggaaacagaaaaagcttaagaaaaaaatatattttatacaggaaaaatgtgtttgtagaatcattttaa

SEQ ID NO: 7555 - DNA, 314 bp, Homo sapiens
  source 1..314: mol_type = other DNA
aaaaactgggcaaatacgatttttttttttccatttccaacagaggtttgaagattagaaccaggaagggcgtgttgacaagtttggggcaaccgggaggaagcgcccccaggaggctgtcggacacaacaggaggactgtccgctgctcgcggcgggcgctggacctctaggccgcggggggcgccatcacctgccgctgcgccggcgccatggatgacgcaacggccagccgaggcttccgggtcagccggggagcggtgagccacagcgcggccagagggccccgaaaagaaacgtctttgtggtccgggg

SEQ ID NO: 7556 - DNA, 374 bp, Homo sapiens
  source 1..374: mol_type = other DNA
ctggctccagatacacttgggtgacttggtcaacatatgaatgttaaccatgatgtgacagatcagacttcaatttctttagactgaactaaaaactgggcaaatacgatttttttttttccatttccaacagaggtttgaagattagaaccaggaagggcgtgttgacaagtttggggcaaccgggaggaagcgcccccaggaggctgtcggacacaacaggaggactgtccgctgctcgcggcgggcgctggacctctaggccgcggggggcgccatcacctgccgctgcgccggcgccatggatgacgcaacggccagccgaggcttccgggtcagccggggagcggtgagccacagcgcggccagagggc

SEQ ID NO: 7557 - DNA, 396 bp, Homo sapiens
  source 1..396: mol_type = other DNA
caacaggcagcgcagagctgcgtggcttcgggttacagggggaaccctcagagaggggtggcactttagctgctggcatcccccccgcttcccgcccgcacgctctggggcgcagaagggccggtcgtcccgggtcatgggggttgggggaccgattccctagcctcgcgagccccgccgccgccggtcttcccagaggcgccgaggggggacgcggtcccgacaccacactcacgtcgaccagctggtccaccgttgggccgcctcggaactggccagcccaaactcactgggccgcccggggaagatgctgcacctgcaactcctcagggtcggccatggggaagggttgggaccgcggaatccccccggaccacaaagacgtttcttttcggg

SEQ ID NO: 7558 - DNA, 338 bp, Homo sapiens
  source 1..338: mol_type = other DNA
ctgaccggattacaggcttgactggctccagatacacttgggtgacttggtcaacatatgaatgttaaccatgatgtgacagatcagacttcaatttctttagactgaactaaaaactgggcaaatacgatttttttttttccatttccaacagaggtttgaagattagaaccaggaagggcgtgttgacaagtttggggcaaccgggaggaagcgcccccaggaggctgtcggacacaacaggaggactgtccgctgctcgcggcgggcgctggacctctaggccgcggggggcgccatcacctgccgctgcgccggcgccatggatgacgcaacgg

SEQ ID NO: 7559 - DNA, 446 bp, Homo sapiens
  source 1..446: mol_type = other DNA
agggggaaccctcagagaggggtggcactttagctgctggcatcccccccgcttcccgcccgcacgctctggggcgcagaagggccggtcgtcccgggtcatgggggttgggggaccgattccctagcctcgcgagccccgccgccgccggtcttcccagaggcgccgaggggggacgcggtcccgacaccacactcacgtcgaccagctggtccaccgttgggccgcctcggaactggccagcccaaactcactgggccgcccggggaagatgctgcacctgcaactcctcagggtcggccatggggaagggttgggaccgcggaatccccccggaccacaaagacgtttcttttcggggccctctggccgcgctgtggctcaccgctccccggctgacccggaagcctcggctggccgttgcgtcatccatggcgccggcgcag

SEQ ID NO: 7560 - DNA, 476 bp, Homo sapiens
  source 1..476: mol_type = other DNA
gcactttagctgctggcatcccccccgcttcccgcccgcacgctctggggcgcagaagggccggtcgtcccgggtcatgggggttgggggaccgattccctagcctcgcgagccccgccgccgccggtcttcccagaggcgccgaggggggacgcggtcccgacaccacactcacgtcgaccagctggtccaccgttgggccgcctcggaactggccagcccaaactcactgggccgcccggggaagatgctgcacctgcaactcctcagggtcggccatggggaagggttgggaccgcggaatccccccggaccacaaagacgtttcttttcggggccctctggccgcgctgtggctcaccgctccccggctgacccggaagcctcggctggccgttgcgtcatccatggcgccggcgcagcggcaggtgatggcgccccccgcggcctagaggtccagcgcccgccgcgagcag

SEQ ID NO: 7561 - DNA, 436 bp, Homo sapiens
  source 1..436: mol_type = other DNA
atattgtgtaaaaagtaaatgttttacacagatccccataagggaaaagtgggctatagtaatacagtatttttttgttttctctgtcacccagtctggagtacagtggcgcgatctcggttcactgcaaccgccgcctcccgggttcaagcgattctcctgcctcagcctcccgagtagctgggaacaggcaagcaccaccacgcccgggtgatttcgtttagtctaagccttaccacttacattgtaatgtgaagatcaaattgtaacgacatggcaacccaacttggtggcagagctgacgctggcatggggttgactccaaagctctctacgccacgagggcacgcggttcgctgcacggagtcgctcaggctctttgaaacaccgcgcgggggagcggggcggtgccggaagtcaggccatggcttccgct

SEQ ID NO: 7562 - DNA, 525 bp, Homo sapiens
  source 1..525: mol_type = other DNA
tagagccctgcaccatatgccttgattgactgttaaatatgtattaggaaaaacaatcccttgctataaaatatcttaagtttctaaatctatgttatttcaaatgcaacttcttatataaacagtttaaatgtgctatgtgattcaaatcacatgctcgctgtgcgaaagaacccaggctccgtgggaaccccacgccactcgcggagctgcgccccggcggccgccctcgcccctcgggcccctttaagtgccgcgcctgcccccgtccgcgtcccccgcgtgcccggagtactgggccgcccgcccgctcctggccgcacctcccacctcccgcctcccgccggggttacgtgagcccggggcgggcggccgccgggccaatggccgccgccggggccgccgcgctcctcccgcgccgccgccgccgccgtggggctgcgggctcctcccgcaggagataactgtcagcgcgcgaggcggtggcgggccggctcagtcatatgaccggcagccggcggctcc

SEQ ID NO: 7563 - DNA, 534 bp, Homo sapiens
  source 1..534: mol_type = other DNA
ttacttttgcaccaacctagtacaaaggtgcatttaaaagttttaggaatccattaatgttttcttcaccaaattccaggactaagaaaaggaaaagaattggggcaatcccttggggatcttgatttttatttctaataaaagaaaaatgttttcttcgtgaacccacagaatcatattgattctgtagcattgttctcctttttcagatgaagaatattagtgtcagaagtcaaaattgagcttgtattaaagcaaggatatatattgcagagtaagacctgtcagctgacactggctcacatgagagccattaagagggtggtcaataaccttgcagctaggtcttgtgaccaattaattgactactacataatctccagctagggtgcacagatggagtgagtcagtccaagctgctaagaacaaaagtaggacttgtctatgtttgtgacttcctaaattattggcaggcttaatttacgtaacaaatgaatgttccacctttttttttttttaaacctttgaaagggg

SEQ ID NO: 7564 - DNA, 304 bp, Homo sapiens
  source 1..304: mol_type = other DNA
agtcagcaatcaatggattccatccctgcaagatcactagaactgcattgagtgtgagccttgcaggttaagagacagactacagtgtcttgctttctgcaggaagcagcaatgccgtttgtttcctaagaggaattttttatttagaaaaggaagctttctatccaggaaatgagtaagcacaataatgtaattatattggtgtattgcattcagactcatgatttagacatcattaaattaaatgtcctcatctgccaaagagatcactggtcaccactctgtcagcatttagcagctaggg

SEQ ID NO: 7565 - DNA, 383 bp, Homo sapiens
  source 1..383: mol_type = other DNA
gaaaccagaaaattctgatctcttcctcagatttcagtctcatagtctcatcttacgaaacagtgctaagtatgatatagacatcaccataacatgaacaacacagcaaaattttgtccattactgctctctttgctttggagaaaggaaaatggaatagttgtagttacatttttgaaaaaatggttaataccctatctatcgacagatggatctattgatggataaacttcatttaactttcatgaagttactagcgtcttggcttcaagcagaattgaatggttcaggctggagtgcagtggcgcggttcagtgctgggattacgagcgtgagccacggcgcctgcccccgcgagcgccgtcgcgccgtcgcgccacata

SEQ ID NO: 7566 - DNA, 515 bp, Homo sapiens
  source 1..515: mol_type = other DNA
ctgagagaattgctaaaggctatgtaaagcttccagcatagcccatctttcatagaaatattgatatagtagacataataaatattgcataaccttcataattttggcagtggaagttgaagctgataactttcactttttattaaagtctatacagtttgaggatttgtttaaatcatgagaatgttataggaacgcatatgaagtataatatatactatggagcactcgtatttttttccttaagtagaaatgatggttagcgctgcaagctttcgcagcagcgactccctccagaggctccgtgaaccaagaatggttgaatagattcattctatgagctgtgcccgcagcgatcttagagtgcgcagaaagtcaaagcgtttagtttctactggactggttgagaatacatcctgaagcccagtcaagggggcggcccctcacctctcggcgagtggtgggggcggggcacccccgggttgagtggcagcagctcctgcctagggaggagg

SEQ ID NO: 7567 - DNA, 370 bp, Homo sapiens
  source 1..370: mol_type = other DNA
tctttattagaaagacttcttatttttaacaattttatttggaagaagttctactcatttgcatctttacaactttgacttttgaaactagaatagaatctcatcgggcaccatgatggcataatgttcagtactgtagtactaatcacttaatgcattttctcagtgggtaaaggtcttctctttgttcacttataaagtgaggaaaacaaattctcggcactggcgtttaaagaaaatattagtgccattattgtggcgaatttctggcgctcgagctctccatttcaagcctcgggaaactgccctgccttccccggagtcgaggactgtggctactcgcgggacgccgtcacgtgatccgggatga

SEQ ID NO: 7568 - DNA, 436 bp, Homo sapiens
  source 1..436: mol_type = other DNA
ctctctctctctctctctcacagacacacacacacacagcgcgggaacagaaggacaggttttctcttcttctctattgaatatagtcttgagcagcgttgatctgccactccttggagtggggaaaactcttccttacttcaaagaggtgcaaaggaagagcagtgttttgtcttgaagcttgttctcaggaatactaagaacttactggaccggcaaaactcgatttgcccatcaagttaacttggtcggcctgggacccgaggccagggtgaagggacgacatcccggggccctgtggcttctccctagagcgcccaaacagcggcgtaggtctgggacgcccccggcccccggctttggaagaggctggcgcggagcaggcgccttcagggtctcgggggtccccggaacagtcacgtgttctcgagacgcc

SEQ ID NO: 7569 - DNA, 268 bp, Homo sapiens
  source 1..268: mol_type = other DNA
agcctgcttccacgcagtggagtagtgtactttcatttaaaataaatctctgctcaattatttgtgctcaattatcacttctaaaagaggactttatagagaccaccatgtgtaaaacagcttttcttaatttttattagagtacttatattatttgaaataatatttttacatagtatccccagtaccaggcacacagtaggcattcaataaatagtttttgaatgattacattgtctacgggcggacggatcacctgagatcaggt

SEQ ID NO: 7570 - DNA, 503 bp, Homo sapiens
  source 1..503: mol_type = other DNA
ggaacagaaggacaggttttctcttcttctctattgaatatagtcttgagcagcgttgatctgccactccttggagtggggaaaactcttccttacttcaaagaggtgcaaaggaagagcagtgttttgtcttgaagcttgttctcaggaatactaagaacttactggaccggcaaaactcgatttgcccatcaagttaacttggtcggcctgggacccgaggccagggtgaagggacgacatcccggggccctgtggcttctccctagagcgcccaaacagcggcgtaggtctgggacgcccccggcccccggctttggaagaggctggcgcggagcaggcgccttcagggtctcgggggtccccggaacagtcacgtgttctcgagacgccggtcctgctcccgctgctgccgccaccgccggggtgcaggagcgatcgcgctgggccgcgctcccgggagcccagggcctgcagcggccggggcgccccgaggtacgggc

SEQ ID NO: 7571 - DNA, 315 bp, Homo sapiens
  source 1..315: mol_type = other DNA
taaaacagcttttcttaatttttattagagtacttatattatttgaaataatatttttacatagtatccccagtaccaggcacacagtaggcattcaataaatagtttttgaatgattacattgtctacgggcggacggatcacctgagatcaggttgccgtgcaagagctccggggagccaacaccgagcggcccttttgagagggtcccagcccctgagatgcgggagcccgcaagagggaacctcttgtctgctcttggggccggaagcgtgtagcgtctccacccgggctcctcagcaccaggcagagttc

SEQ ID NO: 7572 - DNA, 320 bp, Homo sapiens
  source 1..320: mol_type = other DNA
agtaggcattcaataaatagtttttgaatgattacattgtctacgggcggacggatcacctgagatcaggttgccgtgcaagagctccggggagccaacaccgagcggcccttttgagagggtcccagcccctgagatgcgggagcccgcaagagggaacctcttgtctgctcttggggccggaagcgtgtagcgtctccacccgggctcctcagcaccaggcagagttcagcctcccgccgcaagctcccttccgccgctcccggcgagcacgcaggtctggctgtccgttgggctagagcttaagaacggggaccggt

SEQ ID NO: 7573 - DNA, 713 bp, Homo sapiens
  source 1..713: mol_type = other DNA
ggcctgaatctggacccagatctccacccatagtggagccagatacctggtccagatctcagcgtgtaacatgtatgtaattatagtatttactacaaagatttattgtgagcattaatgaatatatggaaacactgataagcacatattattcactcaaaactgttagttattattactttccacttgtgagattattgtagaattaaagagacacatagaaaattatccctacattctagttttttatttatcatcataacctatattaaatacaacaggttaaagtcaaagactttagtgaaatgcactcaactttatgctaatcttattttcagacttagtatggttatagggttaaaagatatgaatagtgttgcaagggatatattttattagtttcattaatgaaattttaatagcaataaattcaggcttttaaatattacaaagtattttcaaatatctcatcttgatgttagcttcaggaagtatctagcaacctaatggctgtttgattagacttctcagactattattatccttgtcacataatagtgcttatcatagattcatttgtttccaaagcaaattgagctattccactcaaatgattacagtaaatagaatagaaacttgtggaatcatcttcccagcaaaatagcgcagcatctcagctgttccaggttcctcaaataagttttacttttgca

SEQ ID NO: 7574 - DNA, 452 bp, Homo sapiens
  source 1..452: mol_type = other DNA
acactagaaatactattttccttgctcattaaaaacataaatgtctcagaaagtaaaaaattattcctctaaacctagttagatactttggttttaggtataatctgacagaacagatacaacctggaaaattcataattcatgatgataccaataaaagatagatttagctttttacaggagatctcaccaaaatatactttaaacctagtctatagattctgtattcacaaattatcaacgtgagcatcagataagatcctaccttcttactaggaagatccatatacttgaatattatcagtccctttattataatatttgtaaatattggggcctaaaacgtgcggccgtgggttcgaggtttataacagggcgccctctgatgttgaatttgaagaactggaattcttatcaatctcagacttaccaaagttaaagttgagaaagct

SEQ ID NO: 7575 - DNA, 262 bp, Homo sapiens
  source 1..262: mol_type = other DNA
ctgtttccatgaaaagagcggaatcttcaaaaatactcaggctgtttgtctattcctctaataaaacttctattgatgttatatagaatcttgagcaaaagatttggcatcgcaccttttatgagtttcaataaaccttgtgatttaaatagtttcatcattgatgacagtctttgggtgaggccacaagagagtcgcttctcgagtgtatcacaaacggcaaagagctggatattccgatttccactggatgacatcatgg

SEQ ID NO: 7576 - DNA, 282 bp, Homo sapiens
  source 1..282: mol_type = other DNA
tgggttctactccctttttatttttcccagctgaactaaaagtagaaactaaaaagaaataagatctccttattgtaggcccctgtagtcccagctactcaggaggctgaaggttgcagtgagctgagatcacaccactgcactccatcataaactatggttgaaaattgtttatcaaactgttatcactaaagacattaaagtgactgtcagccaaagcacaaagaaaaagtaaataactacgtttcattacagtttcctgtttcgatccttcacaaggga

SEQ ID NO: 7577 - DNA, 569 bp, Homo sapiens
  source 1..569: mol_type = other DNA
taactagacaggcagggaaatttacagattgacttataaaatcaagacaaattgtgcattaaattcaaacctcaaacaaattacacatgctttagagctacattttacctaaaatatgttcgatatggatgttataaatggaatttattatacttacataataagtatagtcatttccatttataacagctgtatctgatatataagggagcacttgaaaaaaagacaaggctagactgtttttgtgttttctgaattcaggagatgaactaagacttaaatttttttaaaatcctggacatttgcagatgaaaataatctgttacttttaaaactgcactttacaaaatattaatataaatgtatatgttttgcagatttatttcaaaacattctaaattccaaaaatctttactgttacaaacccagtgaattaggcaagagttcgttctttgcagtaagtttggtaaagataaagcatttcagcacatgttctgccacaaagcatttgggactcttatgttagagcttcagaattccttctgaaaaagacaaaagagagacttcat

SEQ ID NO: 7578 - DNA, 575 bp, Homo sapiens
  source 1..575: mol_type = other DNA
aatcatgctttagagctacattttacctaaaatatgttcgatatggatgttataaatggaatttattatacttacataataagtatagtcatttccatttataacagctgtatctgatatataagggagcacttgaaaaaaagacaaggctagactgtttttgtgttttctgaattcaggagatgaactaagacttaaatttttttaaaatcctggacatttgcagatgaaaataatctgttacttttaaaactgcactttacaaaatattaatataaatgtatatgttttgcagatttatttcaaaacattctaaattccaaaaatctttactgttacaaacccagtgaattaggcaagagttcgttctttgcagtaagtttggtaaagataaagcatttcagcacatgttctgccacaaagcatttgggactcttatgttagagcttcagaattccttctgaaaaagacaaaagagagacttcatatccagattgaatttaagtcatagtacacttccactaaagttatagcatgcttgaatggtttatttcaccaatatttgcttatggaaa

SEQ ID NO: 7579 - DNA, 270 bp, Homo sapiens
  source 1..270: mol_type = other DNA
ccccagagagattccgtctcttattaaaagaaaaaaaaatcatttctaaaatattttgtagacgcagtccttgaagactttgaccgtggaattgatccaaaatgtcacttcctcaggtaaacgaatcccacagggtgggagagatccacccactcactctccactccctcaccatctgggaggggacgctgtgcttaaatgccagttggggccaacggggccctgatcacggaagagggcgcccccacagagcatgcgcaggccaccgcg

SEQ ID NO: 7580 - DNA, 409 bp, Homo sapiens
  source 1..409: mol_type = other DNA
caggcctgtaatcctagctactcagggggctggctgggagccgagattgcaccactgcattccagcctgggcgacagagcgagactccgtctccgcaatgtatgagtgtatatattctaactgatatcacatttttacaatcatgagctttttagaaaatgtcattgaagttttttctctttttgaaattcaattttaaaagaaacaaggggccgtaagcattccgaactgctttgtttccgagaaagtaaatatttcttggcgcaccgaggggctgcggccagaagccccaggaaccgaggtggttcaggcggtagccaccgcccacagtccaggtcttctgggccggcacacccctcccaccatctcagccaatcggagctaagggggcggggatcgggccagccgg

SEQ ID NO: 7581 - DNA, 387 bp, Homo sapiens
  source 1..387: mol_type = other DNA
tgggccccacccccagagtttctctctaacaagttcgcaggtgctactgcttccagcgggcatacttggagaaccaccattgctttgagaggccggacagctccacaagcagaaagacttggttttgctgtcacagccgcagcactaaaaccttcccttcccatctcccccggcgatccagagacccgctgtgggcggccgccgcccgcgtcccggcctgcgggccagcgtctgggcacgcccgccccgcacccggctggcgcccgcccgcccgcctccagaagcagaagcggcagcggcagcggcagcagcagcagcaggagggcgccgagggaggggtactcggccgccgcgggaggccgcatcgcagtcccgtcacagcgtcgg

SEQ ID NO: 7582 - DNA, 272 bp, Homo sapiens
  source 1..272: mol_type = other DNA
ctaatcataattttgatgaccagcgccatttgagattccatcaatatgaaagaattgttaaaactcctttctgtttctgtctatttaattataaatacaagtaggtttttattttcatttggttctgtccaggattaaacctaattcaagaactcgttatagaaatagcctgagctttaagtcaaagaaagacttgtttattaattcattcaatgtgcaaatatttgaatcctttttaattctcatataattaaaaattgtcgttggactat

SEQ ID NO: 7583 - DNA, 551 bp, Homo sapiens
  source 1..551: mol_type = other DNA
gttaagtgaaagttttagtatattatcacatctgtacagttttattattaaaccccagtacacaatattttaatgttgagagatggtgtaaactgaggtcaaggtcctgggacatctgcaaaatgacgataatcgcatttgaaattctccgttttcaaaatgcaggaatttattaaaggtcaacatagattttaagactcatctatacgctacacaggtcacattgtcctgggacggcggccggcgcgacactctcccccgcacagcgcaggctctcactgggaatctgccgggaccgcagttgccaaggcgactccgcgctgcagggcgaggcggccatccgtctgtgcccgccccctcacgccgtggcgcgctctcacgcttccccgcctccgggcgctccgcggtgccgaccattggctgcggagccaatggctgggaccgccaggagctcgttcgcgcgagtcaaatcaccgcgccgagaaggcggggcgggagctctcgccgacaggacgggccgcctggcccacccggctccacccccaagccag

SEQ ID NO: 7584 - DNA, 463 bp, Homo sapiens
  source 1..463: mol_type = other DNA
cttttatttattgatccaataagatgacttaaatatctaactccttttccacgtaaaagtttttattatgtgcaatgcattgttaaacaggtgaagaatccaatggattatttattaatttagtttagagtaacatacattgctccaggaatataaatcccgactaaggggtggatatttaaagctgtaaatgattttttatttttacaatagctttgcaaaagttaacaggatttaatcttaatgccaaactaaaccacagccatatgacattgccagaatctaggaatgtgcataaatacaattaaggacagtatctacaaattggaagaaaggcacttaatgttctgatttccagcaattctaataaatgaaaacccaacccttgggtttgtgttttgactcttgatacaattatgaaaggtccctttaaaaggctccactctcaatgacagtaacgttc

SEQ ID NO: 7585 - DNA, 253 bp, Homo sapiens
  source 1..253: mol_type = other DNA
tcccaatcatggaagcttctcacctattttggaaactacttgcagatgtggggaaacctcgggtagttcttagcaaaactttgttggttaggagaccaacagtagtctgtttattttcttacctctaaggttaaacagcagcaaaggaaaatcatctattaattgctgtttgcgtacacagatacataatatattcatttttatctttggtaaaatataaatggaattggtttgtttgttccggatcctgacc

SEQ ID NO: 7586 - DNA, 475 bp, Homo sapiens
  source 1..475: mol_type = other DNA
ccaatggattatttattaatttagtttagagtaacatacattgctccaggaatataaatcccgactaaggggtggatatttaaagctgtaaatgattttttatttttacaatagctttgcaaaagttaacaggatttaatcttaatgccaaactaaaccacagccatatgacattgccagaatctaggaatgtgcataaatacaattaaggacagtatctacaaattggaagaaaggcacttaatgttctgatttccagcaattctaataaatgaaaacccaacccttgggtttgtgttttgactcttgatacaattatgaaaggtccctttaaaaggctccactctcaatgacagtaacgttcccgaaccccggtgcgtcgtcccggacgctttggctgttgacgtggttccgagccagcagctcccctgggctccgcggccagtagtgcagcccgtggagccgcggctttgcc

SEQ ID NO: 7587 - DNA, 195 bp, Homo sapiens
  source 1..195: mol_type = other DNA
ggtagttcttagcaaaactttgttggttaggagaccaacagtagtctgtttattttcttacctctaaggttaaacagcagcaaaggaaaatcatctattaattgctgtttgcgtacacagatacataatatattcatttttatctttggtaaaatataaatggaattggtttgtttgttccggatcctgaccgca

SEQ ID NO: 7588 - DNA, 408 bp, Homo sapiens
  source 1..408: mol_type = other DNA
actttgttggttaggagaccaacagtagtctgtttattttcttacctctaaggttaaacagcagcaaaggaaaatcatctattaattgctgtttgcgtacacagatacataatatattcatttttatctttggtaaaatataaatggaattggtttgtttgttccggatcctgaccgcatcggagctgcggcggcggctttgggctcaggcggcggcggctcgcgctcggccgcggagtcctggcagcagcggggacgcggcgcgggagtccgagctctggtggcagctgagcccgcggggcgccgctcgccgagccgcggccgcgggaagttcggcagccagaaggacgacctggcaggctgcgagcgccagcgccgccagagccgagtttgcctgcgccctccccg

SEQ ID NO: 7589 - DNA, 381 bp, Homo sapiens
  source 1..381: mol_type = other DNA
cttccagtttatttagaatatgtagaaacgacatggaaagccaaatattttgtcataaatggaagtttggaatacaaaattggtgttcgggcttcaaaactgtcttatctaaaataaagctgccagggagtttttataaaggacctttaacatgaaagtttgctgtcgggctcacagcaaactttaaattttctgaaattaaacagatctcccaagaccttgtggatagaagtccaggtattcttatttattaatgcataaagttcgcgaacatgagaacctcttctggaggggagtccggagccaactgtagctgggatccgcgccgggcgcagggagctgagtggacggctcgagacggcggcgcgtgcagcagctcca

SEQ ID NO: 7590 - DNA, 728 bp, Homo sapiens
  source 1..728: mol_type = other DNA
gtgtgtgtgtattacataaatacatactgcctcaatcagaattatttctagacctatggatgctgtatttggttctttcaataaaggattatttgctcctaattcttattcaaagtattttaaaatttttataaatgaacactatattgttcaataaatagcaagtagcagtaaaataatataatacagattcattttgttatttttggaatcatatatgaatgtatctagatagtttccaacactatattgaactttacaggtttttctaaaatttatttccttaaaatgcaatagttaatattaaaattacatatatataaatataggaaaattaagtgcaaaaatgatggtgaatatatttctccaaagacttttattggtggataatgaattcttttctaaatatatttaaaataatttttttttaatttgtgtatttttattagaggcatgagccaccaggcccagcccctaaatacattattttttaatataagagcagataaacagtagttgaaatattcttttaaaattgtatggatacacatagaacctagcacaacaattaagcagaaaataaatgattaactttatgggtaatcaacttagctttccataagtcatcagctttttcaaaagattacattttatgtgtcttaaatcaacatacaactaatgcaataattctgcctactcacctatgactgataactaagtataaatac

SEQ ID NO: 7591 - DNA, 714 bp, Homo sapiens
  source 1..714: mol_type = other DNA
aaatggagaaattttccagatgcgagatgcttgcgtaaggaaatatacatatgtgaatatattttacacatataagaactttataacacattaaatattccagtttatgtattttgaagaattatctaagacattcttacatttaacataggattcactgaggaccaattaactcattaggtaaaattagtcattctctagacaatcaagttaagcaaattttccaggaaaataattacaagtctctatgaggtgaatgttttcattaagacaggaaagtgtcccacattttaattcaggggcatttaaatttcacattcccgtaatctactacaaaatcagatttttatacatttcaaaagtagaaagggtaactattttcactttcaaaaaggtataatgccttaagttctattgcgttatgtagtatatgacattgtgtgtcaagaaaatgttgcggacagtctctctattgcattcaaaacaagacttttctgaagggaatgaagtcagaactttcactaaaatgttaaaatgatagaatgcataattctgaattttgagaatcagagaatgtgaaatgactctcaatcctgtttttcaattttggactaaagatttttaaaaaatagtcctgtgcttatgttaccattaggtgacagaattctttggcagacggtttattgacaaagaaatgtcaacaggtggactatt

SEQ ID NO: 7592 - DNA, 508 bp, Homo sapiens
  source 1..508: mol_type = other DNA
tatttccaatatatgaatgcatatttatagcattaatgaaatcaatttcatcaatttgaggcacaaataaatgtgaccattctgcattttcaatttattttttaatgattcttggatgaaagtaccaattacagtaatcatcagcttctcataacagaaactcaaagttcatgtattgttacatactttcttttttctttttgcatacaagtagaagcagcaagatcattgtggggtttcagattccattttatcaatttctaaattctaactagtttcattttatttttaattgacgcataataattgtatatatttttggggtacaatgtgacgtttcaatacatgtatacattgtgtgatgatcaaatcaggataattagcccaaaaactttactatttctttgtgatgagaatattcaaaattctctcttctagctattttgaaatatgcattattgttaactatacttcttaagattctgattgaagggaaggatgctttcca

SEQ ID NO: 7593 - DNA, 656 bp, Homo sapiens
  source 1..656: mol_type = other DNA
tcacaaattttctaacatcagaaaagaaaaaatatttagatattaaactgaatcaaatgtcccatttccaagttaactggggaaaagctttctcttcttgctatctatgtttgttatttaaaagatcaaaatattaaactcttgctatatctatttgtcatttgaaagatcaaaatattaaatgattgtgaaacattttttgcaactgtaagagggttgatacttttcctgaatattattcattcaacattcatttatttctttgacaaatatttaagagatgctcatgatgtcctaggcattgatacttatttaatactattatagacaaggcctttaatacataccatagtcatatatcaatttttaattagcaatatgaaataagagaacatcaatttaaattttcagttactgaatttactattttagggtaatctagcacatgaccaaaataagaagagcttccatttggattatcactttttctacttggagtcacatactgtactttaaattgattaagaacatgttaaaggtccagaagaatgtgtttaaatcctacgtttatcagatccataaatatagttccttctatgttaagtggctttatttctaagaacccagccctcggtcctgggggtgcttcccagccc

SEQ ID NO: 7594 - DNA, 414 bp, Homo sapiens
  source 1..414: mol_type = other DNA
agggctaagcccacaatctgtcacaaattttgcatagaatattaattctggaacgtgaaaacacttctacagaagttcctgtgtagatgagactcagggcctctttttttattacacagaacccagtaaactaattaatggaaatctaaaaattatccttcctcttcttagaaaagaaatatactgcatgatgatttgtattgcctaaaaaacttaaattctttcccgtcgttccaggaaagcccgatttgtagcttggctgccccaggaaggggcctgggaagcctccctaacctgggggccgcgtcccagagctgcgagccacgcctccgcccgccgcgccgccggactcaagggcggcgggtgaaggctcggagcctcctgagtcacccggcgggcgaggtataaagcccg

SEQ ID NO: 7595 - DNA, 309 bp, Homo sapiens
  source 1..309: mol_type = other DNA
gggctcattaattcaacaaatatttttggagcaagtcctgtggcccaggctctgtgttagactctgggagtaattttatgtcgtaacaccaaatgttgagtactcatcagtcactgcttctactgcagcaagtgaccttggccttttctatcccaaggcacaagcagagggcttgacctcacccagaaaacaggcggaatctggggggaaatgtacactcaggatctgcccatggtcaaattctgactcttaaccagtatattggagatcagaattctctagttcacttcttgaggagagagattatct

SEQ ID NO: 7596 - DNA, 435 bp, Homo sapiens
  source 1..435: mol_type = other DNA
atacttttctgaatctagtaaaataatattgtatcagaaatgctttctgtttacactataattgtaacaaacattgaattttttagcttattaatttcagatcttgcaagactattcaatcattcagttaaaacctcctgctggatgatgtagggcattcatcttcacgacacccttcgcgatgaatggtaatcgtcttggtttgccagggaaagcccagcgtcttgacaaccctgtcagttccgaacaaaccgggtcgattggtcaccggggctcgaatcccgactgatatgacccagcggggacagaggatccccctcagtgccaccaccgagcagcgcgcctgcgccagttgctctcaccgccggcggggagctctcgtcgtgcgtgatgacgtcgacgcggcgacgtcgagctcttcctccttcacggcgt

SEQ ID NO: 7597 - DNA, 612 bp, Homo sapiens
  source 1..612: mol_type = other DNA
ctcaagattgggcacccccgttgaaaagtatcatattaatcagttgatgattaaattgcactggggtttatgtacacaattttaaacttgtcatttaaaacagtaatgcaatgcaggaacattaaattcctcatctcttagcttatcagcctaacaatgtgctctcttccaggaaagagcaaagttgattggctgtaaaagaccacgtgtctatacacttacagattataaacctgtgactgttcactcactgctgtatccaggagtagaccctcattaaatactcattgagcggaagagatttgcctaaaagccgaactctgatttttatcaaccaagcttaaaagcagtttagtaaattaataaatttggtttaaatttttcccctcagtatcttctcctcagtgtttatcatttatcctgatgaataaagtagttaatgtagatcttgagaggcagacctggcagtcatgctttcatatactgataacctcaatctatttattggtaacacatatatattgttttgtggttttgactttgactttaaaacaatgacaacgcagttgtattttcagagacattttaagaccattattttattaaaattca

SEQ ID NO: 7598 - DNA, 490 bp, Homo sapiens
  source 1..490: mol_type = other DNA
tctgaatgggattaggacaggccgttcagaaatgtgttctgccctgaagggcgcttttctctttttggttgggcaaaattaaacagttctatttttaataacagcgaagaaacatatgtatttaatattgtcttaaacgctaaagtggcttaaaaaagggaatttagttggatataaaagtaaatttcaggtagaggaaactttcaatggcctctgtcagcttctcctatgagttgaagactttattaaggccttaagaaattatgttccttatccttcataaatccttattatgtaaatccctaggtttaggaacccacattccaaagccatgactctagagcaaagtctgaaatggatgttacatgagtcattttaagggatgcacacaactatgaacatttctgaagattttttctcagtaaagtagataaagatggatgaatcagccttgtttgccagcatacgttttgcaagcgatgtttgctgg

SEQ ID NO: 7599 - DNA, 632 bp, Homo sapiens
  source 1..632: mol_type = other DNA
ctgcgatgatggcagccacccaggctcagaggcgcctctcagcgtgctttgcctgaggtcagacctccccacttagggcagggataacagagcccccgagcctgggttggaagtccggtgcggacaggtggccgcggcactgtcccccaaagcgcagcgggatcggttcccgccagggctgctcccgccgcctccgcggacccagcccctcccgcgccgcgactcgcccagcctggggaggaagggtccgtccagggctcccagccccgccggggggaggaggaggcggcgggaccctgtcccggggcttcttcctgcttcctcagggagaaggcgtccgtccccgagccttcccctcgtagtcccctgggggccccgcccccctcaggccgccgccccaatcccgcccccgggctccggcggggtactgggcgcaggtcacctcagcgcgggaggccggcgcggcggcgggtggctccgagaggtgccgcgcccgctcccggggaaggcgctgtggcgcggggccgcccccttgcgccccgggcgccggctgcgtcccggcctcctcctcctcttcctccgccctccttggctgggaaagtgggaggcggcggcgggaggagtctcccggt

SEQ ID NO: 7600 - DNA, 323 bp, Homo sapiens
  source 1..323: mol_type = other DNA
tcacttcactttgatgtacaaaaggatgtgggtagaactacaattgtgcatgttgcagcgccatcgtctgggctagggcttagactgctgtacatcatacagacaagtaatttatacatacattagatgtaaaggtgtagaaaaccccatacagctttttaaaaatatctcaagacttaaacattcttctgtttcaaccatccaagatataataggaaaagacttgctttttaaagcaaaattgctctttaaaatgtggctttcatgtaaaataaaaaagtccctccacgcgctgacgtcacacgccagcgccggtgacgcgc

SEQ ID NO: 7601 - DNA, 393 bp, Homo sapiens
  source 1..393: mol_type = other DNA
ccaggctattagcatgctactgcgaacacgggatcaggtttactgaattctgtgacctatatcttttctccaaacattcaatttccaagcagtatttttgaaaatgcgtgatggctaaatcccgcacgtcacctataagcacagggggcttttggtaggaacctgtgctcgtcgacgtctgcgtgacgctgggaacggccagcgaggtggccgcctcgcgcgcgtgagtgactgacgtgagctaatcgctaatgacaggcttcacagccccggcggccctcagagccaggcgccgcccaataggcgccgacgctactcagcgagtggccgttgggacggccggacgctgaacggccgttcacgtcaacgtagtgacgtcacgcgtcgacgctg

SEQ ID NO: 7602 - DNA, 378 bp, Homo sapiens
  source 1..378: mol_type = other DNA
ttattttcaacctagaactgtgctcagccagaataaaattttatgtgcataggaattatcaggatgctgaggccgctggttcagggacttttatttccttcttggagacaatcgaatgaatttaatattttaagtaaatataaatgaagaactctagtagacacctgaagaggaaggttggaccactctaaggattcagattcagtagtctggggggtctctggagcgaccctggaagatgctccagaaagcctagatgcagagctccttgcacgcgcccagcacgggagtgggcggggcctcaacgcgtccggtgccaggtctcagggggcggggaatgggcggagcctttcccctaaccggcgctcggaagcggcc

SEQ ID NO: 7603 - DNA, 435 bp, Homo sapiens
  source 1..435: mol_type = other DNA
agtttcggaaaatcattttatcttaattgccctgaaaaaagaatagaggctaatgctgtatatctccttaggagctaagtgaagttgcctactataaagcttcttcctttaagtcaaaatattacatattatgaatcgcgtttaattagaactattcaaatacccatttactgaaatttgcccaaagtcctgctattattaagtggctatgactaggcctgtaatcccagcactttgggaggccaaggcaggcagcctgtggtggcacgtgcctgtaattccagctgcgttgcagtgagcagagatcacgccactgcactacagcctgggcgacagagtgagactctgtctcaattttaaaaagtgttggttcctacagccacttcctccaggacaagtcagaaggcagtgatgtcacacttgtgaatcagaggt

SEQ ID NO: 7604 - DNA, 657 bp, Homo sapiens
  source 1..657: mol_type = other DNA
gggggaaggagcctggtcccgccccatgagagtctctgttctcttttaaaattaaaaaaaaaaaaaaaaaaagggaaacttctgtaggtacttaataattttagagtactctactttttaattaaaaaatcaacttatggttcattagaaaaaacgtggaaattacaaataatatttttaaagaaaatgaaaaaaaaattgaacggcccgctgactttgctttaagagacgtttaagacttacagcgcagtcgcccgggaaggcctgagaagcttgttcccatttagcgccccaggatgggaccctaagaagccttttcctgggtgtccttgaacacgcgtgcgatgcgacgcccacagaagagagtcccgcgctgccgcggaggccctgggcctgcgggtgtggggctctgggggccgccgaggcccggcccagaggctgagcggactgaatgcgggactccccggcaactacagcctccggtggctcctccgcggggccgctccgcagcaccgactggctcgcgccgcaccgcccgccccgctgcccccgcccgcggctgccgcgaaaacccggcggctacacccgcgcctccgcgccgcccggcgagccgcactgggcatgctcggccccggccggcccaggctcctgtaggtg

SEQ ID NO: 7605 - DNA, 461 bp, Homo sapiens
  source 1..461: mol_type = other DNA
tccatttcagtactgtcttctctaaatgagaattaaatactgcggaatattttaatagtggggacacaaatgtcataattattgtaaagaatgcttattaaatacttaaaaacaaagaaaatttacgtttctcaaaaggacagctgaaaaattccttataaaactaatgttaaaatatgatatctcatttcaatctttttgggggaaaatttgaggcccttggcatgggcgacctgcccacgcgtgacggctacatcaaccttgggcaaccagatgcagccgcgtgcggcagcctggcactgcccggagcatgctcagtcgggtcctgacccacttctgcaggtccgacctcggggcgtggggtcagactcctcgcctgacccggcggcggaacatgcccagtctggctgccggagccgccgggagcgtcaatgtggaaagtccacctttccgggttttcg

SEQ ID NO: 7606 - DNA, 615 bp, Homo sapiens
  source 1..615: mol_type = other DNA
catttcaacatgcttttaaaattcctattaaagcagcaaggaagtctcattggaactagcagcgaggaaggctcattggaactagcagcaaggagctgaaaaaacagccgctgcttcacatacattcatcatggattaatcaattttgtctttttgctggctgactgaagtcagggagaaacatgttggtaacagatctgagacttaaggccaaagtctgaatgatatttcagaccaaccaactggactgatggttttaaaatgccttcctccaggattctccagcatgaggttcttcctgcaacttccagcagataattcaacaaaatgtattggcatctcttgtgtgccagaaactttactagattatttcataaaagaaacataatttcttaagaaattaggtccaaataaagaaacctacttagttatgacatatgttccacattgggagcatatttatccatgaaatcattcctggaatgaaggatagaaataatatttattatttggggaagcatcatactaaaaaaggtccaatggttgaatcaagtcaaaattgtgacatcatctaaagtagactttagtgtcaacattgtgacaatctgcacatgg

SEQ ID NO: 7607 - DNA, 583 bp, Homo sapiens
  source 1..583: mol_type = other DNA
aataatcatctaggaagtactcagtaaatttgtgctgaatgaatgaatctgttcattcattttaataaccattaaagaattttttaaagtcaaagagaggttgtctgaaattttgtaagaaaaaaattcttatttaacgaaaggtcagaaattcaatgtgagggtagacactaaaattgaagagactcagagtgatttttcaaaaatttttgtcagaactccatcgcatagccatcacagtcccagcgcgggaacgagggtggggccgctcccggctgggcgcagctcgggagccccctgcagtggacccaagtcgccgccagatggttcccgagcacccggtcccctcggtcagcccctgggctagcctctgggccggcgcctaggccggccaacgcggacgccgggttgcggtgattcccagcgattggcctggggctgcaagcgcctcgcgcctgggctaccccgcgccctgcgctctgagggcgatgatccgggacggggaggcgcgcgccgcgggcggccataggccacggcgcggggcgggagggggcgcggcgaggcccgcggcggggcaaaaccg

SEQ ID NO: 7608 - DNA, 542 bp, Homo sapiens
  source 1..542: mol_type = other DNA
cgcaggctgagggagccggctccggcctccgctatcccaggaaggggctcccacagtgcagcggcgggctgaagggcccctcaagcgcggtcagagtgagcgctgaggccgggctgcgagggctgccagcaggctgtcacctctgctgctagcacaaagatctcagctgctgccaggacctagacctattaggtaaacttaaaaaataatcatctaggaagtactcagtaaatttgtgctgaatgaatgaatctgttcattcattttaataaccattaaagaattttttaaagtcaaagagaggttgtctgaaattttgtaagaaaaaaattcttatttaacgaaaggtcagaaattcaatgtgagggtagacactaaaattgaagagactcagagtgatttttcaaaaatttttgtcagaactccatcgcatagccatcacagtcccagcgcgggaacgagggtggggccgctcccggctgggcgcagctcgggagccccctgcagtggacccaagtcgccgccagatggttcccgagcac

SEQ ID NO: 7609 - DNA, 171 bp, Homo sapiens
  source 1..171: mol_type = other DNA
aatgggatttcaactacttgaagtctctgaacgcagaagcattagggtgcgtggtctccacggcctcaggagagaaactgcacacctatccaagcgggttaccgctggtggctgaggcagcctgctgctgattggtccattttacagagagccaattggcctgtttacaaa

SEQ ID NO: 7610 - DNA, 616 bp, Homo sapiens
  source 1..616: mol_type = other DNA
attcagcctgcattgcatgcatgcatgtctgtaagagtgcccagtgcacggtgctgggcacgctgtcccttggggctgcgaggacaggtagccctcgcagtgacaaggcgcgcagcggggtggccctgccgaatcttaaccggggccccgggccgccttgggtctccacggtgtcctccagaagctgctgcctgagaactctgagcctacctggcctgaacggcggaacgcgcggctcgggggatcccctctccctgggaccggccctgtcccgggtcgcctccacctcccgcagccgccgcgccccggctcgccgcgctcccgccggcaccatggaggaattcctgggacaaccgcctgcagccggcgacttttccccaggaatctctggcctggcgcgggtgagatgacgggcgtcccagattacccggaaaagccctggcaggtaaagagaggacccgcgcaggctgggagctcccactcctctcgcgtccggggcgtctggaggccgggaggcattgcccacccccgccaggcggcccgccctcccctcctgggctccgggctgccgcacgtggcagacaccagcgacgtctccgcggaaggcaggcgccgg

SEQ ID NO: 7611 - DNA, 333 bp, Homo sapiens
  source 1..333: mol_type = other DNA
gttaccatcttaaaattaggatagcctctgtaatcctatgagaccagcctggtgagccaagatcgcaccactgcactctactccagcctgggtgacagagtgagagactccgtctaaaaaacttaggataaaatcttaaaacgttttgttcgacttaaatttaaattagcagtttaggatatagtacactgataatgtaattacatacattctgctataaaggcatagacatctttatcaatatcctttactgtgtaatttagataaatccgtggtccttggatttgaaacttcataagacgacagcctttcttttcattagctcaggaggag

SEQ ID NO: 7612 - DNA, 266 bp, Homo sapiens
  source 1..266: mol_type = other DNA
actgtgtaatttagataaatccgtggtccttggatttgaaacttcataagacgacagcctttcttttcattagctcaggaggagccacgtggagctgctgcagcagcagcggtagtcccacttcctggttggcttcctgaaagcctctcgacaaggggctcaggcggcgggccacgggatccctattgtccataattacaataaaagtttggggatctgaaagctttaaggagctggctctgcggtggccgccagaggggaccggt

SEQ ID NO: 7613 - DNA, 513 bp, Homo sapiens
  source 1..513: mol_type = other DNA
cgacctgggcgacccaccgaacctgctaggctggggcgtggttagcctccgtggcaacagaaccaatcagatcgtcaagttgccgtcacgccggagccccgtgagggaagcgtctccgttgggtccggccgcctctactcggtctcggcgcagtggctctcggggtctgacccggcgagcggcatttggggtgcgggccgggccggcgggcagtcggaggaggcggaaactgcccctgaccgggcccggttctgggagtttcggagtcaccggactcggtgaagggcgggcggcggcgtctcgggccccgggagccacttgctgggctgagccgcggccgctcgggccgggaggaagggtgtgcgccggggcgcgggcgggggcgcgggcggccgcccttgggaggacgccctcgggaggaggggggggagcggatttgggcgggaagcggagccccgccagcgcccgccctggcagctgcgggctccgcgccgaccccccgtcaggtggacg

SEQ ID NO: 7614 - DNA, 401 bp, Homo sapiens
  source 1..401: mol_type = other DNA
actcggggcttggaattccggacccggtaggagggggcggggccgggggagaaggcgccgcctccgccccttcgggacccggagggtgccctttcccagtatttgtcacccgagacaaagagggggaggagccttctgagggaaactccctcggcgggaagcatcttactttcagaacgttttttaacaccctacgggacgcgggaacggttccctcccggccccccgcgcacccaggagccaacgctgcagggctgagccaggatcgagcagtacattcctctcctgaccggttctaacgggtctgggagttaacgacctgggcgacccaccgaacctgctaggctggggcgtggttagcctccgtggcaacagaaccaatcagatcgtcaagttgccgt

SEQ ID NO: 7615 - DNA, 481 bp, Homo sapiens
  source 1..481: mol_type = other DNA
cccccctcctcccgagggcgtcctcccaagggcggccgcccgcgcccccgcccgcgccccggcgcacacccttcctcccggcccgagcggccgcggctcagcccagcaagtggctcccggggcccgagacgccgccgcccgcccttcaccgagtccggtgactccgaaactcccagaaccgggcccggtcaggggcagtttccgcctcctccgactgcccgccggcccggcccgcaccccaaatgccgctcgccgggtcagaccccgagagccactgcgccgagaccgagtagaggcggccggacccaacggagacgcttccctcacggggctccggcgtgacggcaacttgacgatctgattggttctgttgccacggaggctaaccacgccccagcctagcaggttcggtgggtcgcccaggtcgttaactcccagacccgttagaaccggtcaggagaggaatgtactgctcgatcct

SEQ ID NO: 7616 - DNA, 335 bp, Homo sapiens
  source 1..335: mol_type = other DNA
ccactcttttgtgggaaacccaaaccaagtcctgagctaacatccgacaggtccccctcacaaacgccttgcgggggggtgggggggcgtttctaaacacttgcatgttcttacaagggaaatggccgcctcctgaggtggagtacggaccagttgacaacagggctcttctcctcaaacggttttggagaagcctgagtcctgaaaagcgcgtgcgcgcctgtgtgctgccggcgtttgggcgcgcctgcttgtatgtatgtgttcgcgggcgcgcgcgtgtgtacgtgtgtgtgcgcgcgtacgcgtgtatgttcctgcgcgcttgcggggac

SEQ ID NO: 7617 - DNA, 579 bp, Homo sapiens
  source 1..579: mol_type = other DNA
agaatgttataaactaaggtttttgattaacaaaattctgggacccttaaataaaaggaaatacatttttttctgtttgaaaaactgccactttatttttttgtggtaaaacatacataacataaaagttaccacaatgttggacaaccattatccatttcctaggaaaatacattttttttaagatcttttttattagtaaacctagataaacaactgctggttttcaaatactattatgacaaccatttactgaaaaattaagacaaaatatttaaatttcttgaaacagtcagcagcttgcttttatgcgattctcaatttttaaaaactatcacagcgaaggccaggccagccaaagacagggcagccgccggctccgagctcccggcgcaccgctgcagggtgcggcgtgggggccgagacactcggggcttggaattccggacccggtaggagggggcggggccgggggagaaggcgccgcctccgccccttcgggacccggagggtgccctttcccagtatttgtcacccgagacaaagagggggaggagccttctgagggaaactccctcg

SEQ ID NO: 7618 - DNA, 642 bp, Homo sapiens
  source 1..642: mol_type = other DNA
ccaaaacatttaaacatatataaaaatttttaatgtgcacttcaatattctttttgaaaatttcttgtagtaagtccagaaataaaaaaaaagtccagctgatatatacttacagcacatctcaattcatatgctaaagttagagttcataaaatttaagttggaaaaacagattcatatatctgagttgttgcaaacacacttaaaagtattccaacaattgaatcgagcatcaggtttttggtttttgtttaattcaaattcaattaacgatttacgtaatatttaaattgttgaactcaaacgcacagatacaatggatacctttgattttctgcaaaggcgcgtctgtaatcccagctactcgggaggctgaggcatgcaggatcgcgccactgcactgcactccatcaaagaaaaaaaaatcatttatcactaaatttactcactactgcctaaaatatattttaaaacgtatttgtgtttaagcagcatatatcttttgataaataatgacgcatggtagctaactagtaaagatgcagctttcatattagtccccgcaagcgcgcaggaacatacacgcgtacgcgcgcacacacacgtacacacgcgcgcgcccgcgaacacatacatacaagc

SEQ ID NO: 7619 - DNA, 288 bp, Homo sapiens
  source 1..288: mol_type = other DNA
cttctccaaaaccgtttgaggagaagagccctgttgtcaactggtccgtactccacctcaggaggcggccatttcccttgtaagaacatgcaagtgtttagaaacgcccccccacccccccgcaaggcgtttgtgagggggacctgtcggatgttagctcaggacttggtttgggtttcccacaaaagagtggcctccgtccctcatggcgcggggtcagggcggagctcagactctgcagcagggggcgcgtcgcgcttgcgcaggtcccggggccggagggaggcg

SEQ ID NO: 7620 - DNA, 495 bp, Homo sapiens
  source 1..495: mol_type = other DNA
cattcatcttcacgataaaaacaatttttttagcatggcatatgaggtaattcatcaattttttggttttagccaaatcgaattttttaaaaacctaaacaacagttaacagatgctagaattccagtatagtttgctgaaaacagaataaaatttcttttgtgcttttatttctaaggcacagaatttccattgactactaatgagtctttggtaacagatctagtgaaaggggaagaggtgcgcagctagccattccccactttcctcttctctctctctctctctctcacacacagacacacaaacacacacacttttcttaagggaaaaatcactctgtgttcttttaaaatccctcactattttggaacaaactgaacacttccaaaggaggcagtccttgcagccttgtcactcccctcctccccacagtcctggctggagcagcgagtctgtcgcaaaggttcatttgtaaagaagctccttccaccc

SEQ ID NO: 7621 - DNA, 447 bp, Homo sapiens
  source 1..447: mol_type = other DNA
aataaaggatcagtaaatgctagtattctttttttgtgaggagtctagaattcaagaactatggattcaattctgtttctaaatctgcatacattcctaatctataaaatgaggcatctgtctaaaaggtggtgctgtttagttttaacaccaggtggcgctaaataacaactaaatgtaaaaagacaaaggctctgtgtgtgtgtgtctgtctttcttcttatgtgtatattcttataaagcagagatggttcctcagaaaccatcactctgagggagagggccccaggagccgggggatagccccagctttctaggtttgactttgaaatttggtttcaaacttttacaattaaaataatttatttttattatttttaagagacggggtcccactctgttgcccaggctggagtgcagtgatgcaatcatagctccctgcagcct

SEQ ID NO: 7622 - DNA, 743 bp, Homo sapiens
  source 1..743: mol_type = other DNA
tttaaaaatattattggttgtacattccatggggaatgttttttaaaatccagatgatcagaaaatttccagccctctgctttttatgtagagatatatatgtcccttgtcctaatattaggtccaaatttggaagaggaaactagagaaattagttgatagccaaatttatttttttcctgagcaaggtgactagattatgtttgctgagtcaaatagaatattgacatacttcaaatgaagtaaatgaacataacatttccgtattacaaaattttacattttaaaaattgtgtagtattcaaattgatatctaattttataattcactatagttttacagctttcagtgtgaagtacattactttgtcaactattatatggctgaatgctgaaatgtcattatcagatgatccacatacttcagatgcagtatcagaaaaaagactgagttaagcatttggactctttctttaagtttttgtcagatatttatcaggcctgacataacactaacactgtgttggtttcataactctgtatgaggtttcaatcctaattctgccattttctgaacagtaatgaaaggacttggactctcactctttctgtagactgaaaaattgttggttaggaattcttcacttggattcccttcctagaatggaatgtaacatattccagccgacactaaatatatcatgattaatttgacaaaattgcttaggacaaatttatgtacc

SEQ ID NO: 7623 - DNA, 333 bp, Homo sapiens
  source 1..333: mol_type = other DNA
tgcactgactcagggtcagtgagaatgaatccaacctttgtaaaaagatggaagccaatggccactgacgccagtgcagagttgccttcaagacattttgtctttaggataaactgccaggcctttttaatcacccaaagtcataactgtctctgaaattattcattaaagtcattttcagggattctcacaggatgactcttttacgtttatgatcttgtgagagcaatgacatgtggaatccaacggccctggtgctcccggcgcggtcagctgagctcaggcgcgcagaggctgtgccctctggtgctgtcagcagtgacagatcccaga

SEQ ID NO: 7624 - DNA, 349 bp, Homo sapiens
  source 1..349: mol_type = other DNA
gcagaatgcccagctgcctgacactgcaggcggctgacttctttgtttaaaaaaattttccaatgtaggatttgacgttaaaatcagggctctgccccagaccgctgtgcaggcccagcgtctgtgtgtgtgtgtgtgtgtgtgcgcgcgcgcaaaccccttctcagcttgggaagcaatttgaaaaactgcagagtgggggccccgctcccaattgcctgggcactgacagcaaagggcttttccaggccgagacagcaagctccagctttcgggatgggttagccagcaggcccaggcatctaggaagggtggacctctgggtcagggagcgcagcaaggtggttct

SEQ ID NO: 7625 - DNA, 427 bp, Homo sapiens
  source 1..427: mol_type = other DNA
agatgcccgcttttatgagggaggcaggaatgcagagatatatttatatgtttgttcataaaaactggaaaatacggaggactcagcctgtaaacgccgctcctcgtccctgctggggcaaagagcgccagctcccagccgcgcctttgtgggggcccccaccgcccgtcacgaggctcccggcgcccctgcataaaattgtaagaggctgcctggttttctttctttctttcttttcaaccagaaaagagagcagaaaatattttaatagtgaagcatctgttaaacacttgcattatcctctgactgataaaaaaagtttttttaacccttttaattatcttatggttatgaggaggagaggacctcggcaagccgagagctcgaggcgccgcccctgccgccccgggattggcgtgaggagcct

SEQ ID NO: 7626 - DNA, 668 bp, Homo sapiens
  source 1..668: mol_type = other DNA
gaactccgatttagttgttctgaatgactttatttgctccagaaaagctatttaaaggcaattctagctctaggaattttctaatacatttgtacatgaggaagtcaatatatgtgacagacaaatgtagtcttctggtgtcttttcccaggtacttctgaagaatccatagggatttgtggagaagaattagaaaatttctctaaattacaatttttaatttaaggcaacaacaaaactaaatagtctactgttaccgagctatttatcatctaatttacatttctgaattagacttcagggcctatgttacattttattacagtctacaatgtaagtgtagactggcaagaattaaactaaaagcctgtttcccagctgtttttaactaaagtccgtgctctgatcagagctgtatttaataccataagtccacataattataatttgtaagagtattaaggacatcagtaacttttaaatcttaccacgtgaaaaatgattatgtcacatatggacttttctgaaactttgtctatcaaaatttgcacttataattttccagctattcttagtaattttagtaggttttaatgagaagttttaattctgataaatgaatgcttcatgaaaaatgggttactttttaaatgtcacccttattacat

SEQ ID NO: 7627 - DNA, 569 bp, Homo sapiens
  source 1..569: mol_type = other DNA
aaactgataatatttgttggggggtaatttgttacccagcaatagacaactaatgaagtacctcatcagacatattgtcaggttaattggctaaagatgaatttctgacccaatatgaaaaaaataataaaacttatgcattctttattctgaaatttcacataatagaaaacataaattgtcttcactttaccgtaataaaaatcatgatatattcatttgtggatatacacctaggagccttgaaaatgaatattttacttgtaaaacaagtagaatcaattattttattagtaaattcatacagaacctaaaaataaaactaaaaaaattaaatgactgaggattgggatccatttatgtgattttgccaaataaatattgagaagacaagtttgacaagttttataacccaagtttgactacgtgtttgcattcatattactggaaagtgaagaaagtaacccttgtcatttctcaggtttatttcacaatgacgctgggttactgacagtgattcctcactttaatgagccacctggcaactcttgctggtcggccagtttcgg

SEQ ID NO: 7628 - DNA, 310 bp, Homo sapiens
  source 1..310: mol_type = other DNA
caagattaacttgttacagaaaaatctgtagccttcaataaaggtggagaaatattgtcctgtcttccggatatatactagttgccatttgatttaaaagaatgaaaaggcggactccccaggacggcggagagaggcgacctccgcaggcgcagccttgccgtctcctcggggctcaccaagcagccacccgcaaccagtcgctacagccaggcgcctgcgcccagaagcgcttctcgcgttcctgcccacgcaccaccaagctgggagctaacttgcagctgagaagtttttctgatcttgaagtcgg

SEQ ID NO: 7629 - DNA, 363 bp, Homo sapiens
  source 1..363: mol_type = other DNA
ttaacaccttactttcattaatgaaaaatacttttaaaaatttaacattttcaacttatagcactgatcataataaagaagctctcaatattccttcaagtcaaggattttcaacatcgctcaatctcattgctgttagagaaaatagaatgtcactggaccagagtgatttttgtttagaatgaagcaactacactgactctaataacagtcaatggctaagagtttgtgacatagcacataatgctcgatattatctaaaatacttctctaagagatcaagattaacttgttacagaaaaatctgtagccttcaataaaggtggagaaatattgtcctgtcttccggatatatactagttg

SEQ ID NO: 7630 - DNA, 367 bp, Homo sapiens
  source 1..367: mol_type = other DNA
gtgtttgcattcatattactggaaagtgaagaaagtaacccttgtcatttctcaggtttatttcacaatgacgctgggttactgacagtgattcctcactttaatgagccacctggcaactcttgctggtcggccagtttcggccaactggcaagcactggttgtctttattttcgagaaaagagacaagagatctaaaatatctaggttgactcctgtgccgccgcgacgaattggcctctgggcggggacttttagcgcccaggccatggagaagctgattcaactttacttgtcgggtacctccagctgcagggggacgttaggctccgacttcaagatcagaaaaacttctcagctgcaagtt

SEQ ID NO: 7631 - DNA, 500 bp, Homo sapiens
  source 1..500: mol_type = other DNA
ttgtaaaacaagtagaatcaattattttattagtaaattcatacagaacctaaaaataaaactaaaaaaattaaatgactgaggattgggatccatttatgtgattttgccaaataaatattgagaagacaagtttgacaagttttataacccaagtttgactacgtgtttgcattcatattactggaaagtgaagaaagtaacccttgtcatttctcaggtttatttcacaatgacgctgggttactgacagtgattcctcactttaatgagccacctggcaactcttgctggtcggccagtttcggccaactggcaagcactggttgtctttattttcgagaaaagagacaagagatctaaaatatctaggttgactcctgtgccgccgcgacgaattggcctctgggcggggacttttagcgcccaggccatggagaagctgattcaactttacttgtcgggtacctccagctgcagggggacgttaggctccgact

SEQ ID NO: 7632 - DNA, 320 bp, Homo sapiens
  source 1..320: mol_type = other DNA
gcacctttcccagtaaagaaggtaaaaatgattcattctgctgtatttagattttttttttctttaagaaaataaatgccagctgcagcgagctgatgccacgctagccctggagttcctggagagcaaggaacctcttggtaggctaccagcggctctggactagtcctagccatgaaatgttatgattccaggtttttccgtaaaaatttgtccaaaatgtaactaagaaaacacaatgatattagttacttgagacaaaagagcaacaagtttgctttattgtttgcttgtggagggatccaagcttccaagcctct

SEQ ID NO: 7633 - DNA, 384 bp, Homo sapiens
  source 1..384: mol_type = other DNA
gctagccctggagttcctggagagcaaggaacctcttggtaggctaccagcggctctggactagtcctagccatgaaatgttatgattccaggtttttccgtaaaaatttgtccaaaatgtaactaagaaaacacaatgatattagttacttgagacaaaagagcaacaagtttgctttattgtttgcttgtggagggatccaagcttccaagcctctgccagctgacggagccagaggctccggaaggcaaagatcgcgaagcttggcgctccagaacgctcacgtccccggcgggcgctggcttgacagtttcctccccgcccactggcaggggagcgccccgccgggctgcacgcgcgcgcgcgcaggggggcataaaagc

SEQ ID NO: 7634 - DNA, 333 bp, Homo sapiens
  source 1..333: mol_type = other DNA
ctagattcaaggaatgaacatttgatcatggctgatagtaaataagagccactataaagatcaaagaagttttaatttttaaaaaacttctattactttgaaatacataaaaacccaaagtggaccttatagtaccatgcttctcacttaaacttactgtgaacgcttcctggccagaagctggccaggcttgagaggattctagaagcagctggttcttgtcacgtgtgccttttcccggaagggaatactaaagggtcccctgtcactccgtcccgctgtgcggtcgtgattggtcgacaggaccgggttgtccggccccacccccgcttc

SEQ ID NO: 7635 - DNA, 370 bp, Homo sapiens
  source 1..370: mol_type = other DNA
tgcaatgcttggcagacatttgcagatttttgaaattgattagaacactgccaattttgagtgggtctagagccgaagtcagcttactacttgggtgatatgatctggcagatccaacaagttataatattttaggctttgaaggccttagggtctttgctgcaatgacagacaatatgtaaacaaataagtgtgtctatgttcctaaatattctgagctctgctgtagaaaagaacattgtgtggagtcctcagagtactctaatatcctcttcagcagggaattgtaaaccacttgcagtacaatatcattgtcagactcatgcagtataatatgtgggatccaagcagatctggatggcataagtaa

SEQ ID NO: 7636 - DNA, 501 bp, Homo sapiens
  source 1..501: mol_type = other DNA
tgatatcaagtttccctgacatattagaaaaaggctttaaatgatattcttcacaaaaataccttccaaagtatattggtgaagtctgtaacttagttaatagtattataccaatggtaattttttacttttaataaatgtatcatggttattcaagatgttaacattaggggaagctagatgaagcatatatgaaaactctacaagctttgcaactcttctttaaggatttaatcattaaaaaattaaaaataaatgaaaaactgtttactttgggattcaagtaaaaacactatagttgttaaaccctagagtactcttgaaaaagacggttttgtacactttaaactgaaagagtataggaaaaataatttcactcttatcgctcaatgtcccttcattgcataaaggcaaagttctctaattattaaagaaaaaaacctcaacattttgccctgggactgaataactatcaggtgccgggtccactaaccaaatggg

SEQ ID NO: 7637 - DNA, 654 bp, Homo sapiens
  source 1..654: mol_type = other DNA
agtctactgataagttcattaaacacattcatttctgttactttaagaaagttttctgcatttcatttcttatgagattttatagaattcagtgtgaaaatttctttgtaacaatgatttttacaatgaatccaataaaagactactcacattttctgtttattcttttgtgagtttgatgatgtgtttttaaaaataaacttatcatttcacctaagtattcataaaggtgttatgaagttgtttataatattttcttattaacattcaagtgtctatgtgatttatagtgataatctttctatccttgatacgaataatatacctaaataataaactttggtctgttaatttttttcatcactttttagtatgaaatatttactaattttctttgtgattcttattatggattatttagaagttgtttaatctccaaattttaagtatcatatcttattattacttatgacaaatttaattattatcaaagtatattcactgtataatttcagttttttaaaaagtatttagatttgttttttaggtatattgttctacaattctcaattaaatcattctggatgagaagggacctaagaatatttacatctttagtagttttttctctgttattaagtgtaaacatatttg

SEQ ID NO: 7638 - DNA, 424 bp, Homo sapiens
  source 1..424: mol_type = other DNA
ctttaaagaaattccctttcaagagattctcattggaaaccagcagctttcgtgggctataatcataacaaaataacaaagacacttttacttaagagtcatatggcactaagtaaaataattacttaaaacatgtatctctcaggcttagagctttactttttaaatctcaaaggtgtgggattacaagtcctgtcttagtaataaacttttgcagataaaccctgagatggtatcaaattaactaaatacttagtgaacacagtttttttgcagtatctggacaccgaattgtggcttacagtggtacacaatgggcagctttgagaaaatcttcacggaagagtaatttgaatgaaattacacttgacagcctgtcctgagctaagctctgaggacttgcccaagcccagtttttccaaca

SEQ ID NO: 7639 - DNA, 508 bp, Homo sapiens
  source 1..508: mol_type = other DNA
aatcatatccattattttatacagcatagatatgtatactttttactgaaataacttctccagtatgactcttgaaagaactaggtcaataacccatagagttatataattttttttttttttgatccttcattttacaaattaggaaatgagccaggggtttttagaactttataaccttgtccaattacagaaacatattttatgtagaaggataaattaaagggagaattttctcttcctcttgtctttattaatgttattatcattaagaaacaaaatggtacaaacataaaattatcatatgaaacctgtcttttggaataatctatttccagactccacttagagtgtgcattcaatgtatttaggagagagactttgcacgtgtctgaggggtctgtgcgcccgcagagtcgccaggcgccctgcgagttgtctccgctgggaggggcgaggctgtcacttgccagggcgcgaggagcctcagcgcggcttggagaacttg

SEQ ID NO: 7640 - DNA, 432 bp, Homo sapiens
  source 1..432: mol_type = other DNA
ccatcaagaattaattgaagacctgctattcatcagatactttaagaactgattttagctttaacaagtttattctttatatggaaatccaacatttaagttaattttaatttacaatatagaatattgagtcgtctctgcagagaatattttggaaaaaatttattaactatttagagtggagtataattaattctcgatagatgtcattaaatacactttagagatgtgaaatgtcagttttgtgaaggcagatacattaaccacatacaactcgattaatataaacaaataatcttatccattgaacagcatcctcctcctcaagaaagagacaggatgactgacttactgtatatttgactcattttcctagaaagtggaacgctgatggttcacggtacggaggagctgcgccttgctgtcacgtgg

SEQ ID NO: 7641 - DNA, 456 bp, Homo sapiens
  source 1..456: mol_type = other DNA
atttattaactatttagagtggagtataattaattctcgatagatgtcattaaatacactttagagatgtgaaatgtcagttttgtgaaggcagatacattaaccacatacaactcgattaatataaacaaataatcttatccattgaacagcatcctcctcctcaagaaagagacaggatgactgacttactgtatatttgactcattttcctagaaagtggaacgctgatggttcacggtacggaggagctgcgccttgctgtcacgtgggcctctggggcagaccctggagatcgggctcgcggcgccttccatcgtggctccgcgctggggcttgcggagcacgcttcccgcccctcggagcccgcgggcccggccgccccgcccccgggcgccctgagcgagcaggcggggagggcggggagggtccgcgcgttggtggtgctcgcctcgc

SEQ ID NO: 7642 - DNA, 402 bp, Homo sapiens
  source 1..402: mol_type = other DNA
tctgcagcctcaagttcctgagctcaagcaatcctcctggagtacttgagagtacaggtgtgcaccacaaaactgtggctgtaaaaatttttaatggattttaataattaagcttacatatttataattgcctatgccaactttgcagttgcaaatatggactcaatacatatttgttgaattaatgaaggaattatgcctactaggagattttaattaagtgtgaaaatctaacctacacatcgttttcaaatattaatgtttacaaatacttaatgcaataattaaggaaatagttatgttaaattttgtggacattcatttccatttcaaaagtcttctcacaccactcctcaaaagtacgggcggctgctgcggcgcttgcgcaggcgctgaggtctc

SEQ ID NO: 7643 - DNA, 680 bp, Homo sapiens
  source 1..680: mol_type = other DNA
aatgatattttgtattttggcatatcatttttggcttaaatgccaaaatattgctttcttaataatttattctatttctcttttaaaatataagttgcctaaggatacctatatacagatgcatttcattaatgaataaaacatatttgggttaacaaagattataggcctaaaatgtatattgttttgtggcagggaccattctacttgtctttgtcacttcaaaatctagcaaagggtttgacacataccaagttcttaaaaagtgtccattggatgaagtgttaagttattaaccagtgtaatgacttgtaagaaaaatgtttttttaaatcagtaaaaataacataattggttaatttgatgagtagtcattaaaatacaagccatggactgtgtactgatttagctcatggtctacaaatagtacagtgccattttaaagccttaaatgatagacaactttactcgatatgaatatcatttacattaacaatgggaacagtcttcaaattgttcttgataactaaatatataaaatggaaaggatatgcatatatatttcaatatctggattttgaaattgtcattttatattgagaatggaaagtcaggagacttgtgacacgtgatgcaattgcttccatgttttccgaagaacttttatggagtataaatat

SEQ ID NO: 7644 - DNA, 534 bp, Homo sapiens
  source 1..534: mol_type = other DNA
gtttggtttatggactgaaatttttaaaaaaaatttatttcagcagaccctgaatccatttttataaaaacccttagcaaagggatattgaaaatgtgataaaataattgcattatttattaatgacccaacgaaattcttatacattatgctgtttgctcctaagaacccagaaaggttatccttttttatcagaaatttaaatctttagctatccatacaaagcaaagcattaatactttgaccaggtttgacagcgttttgtaaagtgctgcttccaaacgctaacttgctgccggtttcaagttcccaattctctggaggagggggtgggtcttccacaacaaaccccgcccctccctcactcgtcgctgattggtggcggcgttaggccgcgacggaggggcgggcccgcggctgagtctctccctttccgcgccgccccgtgcgcgctgtgggtgtgtttcgggaagcgggcgcgcgcgcgctcgcgtcggaggaccggaaaggaggcggggctgcggcggcgcgcgc

SEQ ID NO: 7645 - DNA, 632 bp, Homo sapiens
  source 1..632: mol_type = other DNA
agaggggacccctccgaggtcccatagggttctcttttcttggaacttttacaacccccaggacatttccaaactttgagcagggctctagcgggggctccctccaccccacgtctccccgctgcacgtggtccagggtggtcgccggtcccgccaaccgccagccccgggactgaacttgcccctccggccgcccgctccccgcaggggacaggggcggggagggagagtgagaggggagggcagcccgggctcggcacgctccctccctcggccgctttctctcacataagcgcaggcagagggcgcgtcagtcatgccctgcccctgcgcccgccgccgccgccgccgccgctcagcccggcgcgctctggaggatcctgcgccgcggcgctcccgggccccgccgccgccagccgccccgccgccctcctcccgcccccggcaccgccgccagcgcccccgccgcagcgcccgcggcccggctcctctcacttcggggaaggggagggaggaggatcgcggggtgttctggtgtcccccgccccgagctacaccgacgcggaccgcggcggcgtcctccctcgccctcgcttcacctcgcgggctccgaatgcggggagctcggatgc

SEQ ID NO: 7646 - DNA, 594 bp, Homo sapiens
  source 1..594: mol_type = other DNA
aaccaacttcttgcagaagctgacagtttaggattccaaagggatcattagcatccatagaggggacccctccgaggtcccatagggttctcttttcttggaacttttacaacccccaggacatttccaaactttgagcagggctctagcgggggctccctccaccccacgtctccccgctgcacgtggtccagggtggtcgccggtcccgccaaccgccagccccgggactgaacttgcccctccggccgcccgctccccgcaggggacaggggcggggagggagagtgagaggggagggcagcccgggctcggcacgctccctccctcggccgctttctctcacataagcgcaggcagagggcgcgtcagtcatgccctgcccctgcgcccgccgccgccgccgccgccgctcagcccggcgcgctctggaggatcctgcgccgcggcgctcccgggccccgccgccgccagccgccccgccgccctcctcccgcccccggcaccgccgccagcgcccccgccgcagcgcccgcggcccggctcctctcacttcggggaaggggagggaggaggatcgcggggtgttctggt

SEQ ID NO: 7647 - DNA, 466 bp, Homo sapiens
  source 1..466: mol_type = other DNA
cggaaaccccagtgcttttccaatggggaaattatgtctcaaaccaacttcttgcagaagctgacagtttaggattccaaagggatcattagcatccatagaggggacccctccgaggtcccatagggttctcttttcttggaacttttacaacccccaggacatttccaaactttgagcagggctctagcgggggctccctccaccccacgtctccccgctgcacgtggtccagggtggtcgccggtcccgccaaccgccagccccgggactgaacttgcccctccggccgcccgctccccgcaggggacaggggcggggagggagagtgagaggggagggcagcccgggctcggcacgctccctccctcggccgctttctctcacataagcgcaggcagagggcgcgtcagtcatgccctgcccctgcgcccgccgccgccgccgccgccgctcagcccggcgc

SEQ ID NO: 7648 - DNA, 332 bp, Homo sapiens
  source 1..332: mol_type = other DNA
tatctgagttgtcatatcaagaagttagagaacatgaatttttactgggtaagaaataacaaccattggttatttgagccttcaatgatgaaacattaaaatctagttttgtaagtcttgtaaaactgtaaattttgttaagtcttttgtacaggctggagctcagtggtgcattgattaacgggccaggcacagtggctcacgcctgtaatcccaagaaagaaagaaaatgcagttcgtatttattggataatgctttgtcatgtctgcccaaagtatggtagaaccccaaattgggtaagaaatatccaaacttcaaagacttttgtaag

SEQ ID NO: 7649 - DNA, 529 bp, Homo sapiens
  source 1..529: mol_type = other DNA
acattattttcataaaatattttacttacgttaacatgaaataaatttagtattcttctttaaaatgatttaatgtacaaaacattttaaagttttctcattttaaattcctaacatatattatagacaaaactctttgggattctctataaggcttaaatgtgtacctacagtaatagacacatacagtttagacaaggtagctcagtcagttactaggctagtaaccttatttatgttattaattaggaattatgtatataaataatccagtacatttctaacacatagatgaccactgataaatgttagcaattattactattatcaaggatatacaattacttgggaataaattataatttccccatcagaacaattattttagtacaaagcacgtattctgtataattctcagcaagtgcagaaattccaagatcctcttaatatgtaaatatatttacactgataaactggacaatgcattttaattgttatagttggcaggctgtcttctcacgcaataggc

SEQ ID NO: 7650 - DNA, 589 bp, Homo sapiens
  source 1..589: mol_type = other DNA
caaagcatattttataataaagtgttgaataatttattgactactgtactgaaaatgaaaaatgagtactcaaagtacagtttctactgtgttaacggcagcacagtgctatgcttatgaaatcacttagaaattgacattctgttttaatgtgtagtatttcagttttcaaaaaagaatacactttataatttacaaaactatatggagtcataaacttcatagatttatatgtatgcatgcatctttgggtaaatttgaaaagctacgcattaccctcaaatttatataaacctctacgtttaacaaagcaatttcatatagcttggggcgtccccttacaaaatggatgcatgcacttaggtaacttaactatctaataatggagtttttaaatatagacactagaatatattctgctgtttgtttgtctgtgacatatctgtcctgtcacagacaaggacagtgcgttttcttaataaacccacacagggcgggggtgaaccacagcgcatgcgccgtagggagcgacctcaacagctagggtgctgtttgggcggggcctgggcggggccagacgcgcgcgaga

SEQ ID NO: 7651 - DNA, 476 bp, Homo sapiens
  source 1..476: mol_type = other DNA
cacctcagcatcccaaagtgttgggattaccatatttttaaagtttgtatagatttatagatgcttttaaaaattatgtgattatgtgtcttgccttggcaacctgggcaggcattccagacattagcacttaatagtgccctggaggtgcaggaagctgcactagacctccgaggcctgggatccccaagatgagtttgacaaacttttcaacttcaactttaaattaaaaagacagtcctgcaacccagagttgaataattttgtattaaattcccaatatcaagctaaatctattttaaccacaggaaaagcagcaacttgtctggctattttaaaaatctgaacagcagcgcagggaacagctcagtgccccgtgacacaactctcccgcgggcccagggacgcctcgtctcgcgagagttgagggacgcctgagcgaacccccgagagagcgggcgtgggcgccaggcggg

SEQ ID NO: 7652 - DNA, 262 bp, Homo sapiens
  source 1..262: mol_type = other DNA
tgtcttgggaggagcagcaaactttttttttccctcccacagcaaacaaaatcgaagtggagccttcggaggactcccgggtccgcccctggccaggtgatgcggggcggaggcctatgcagtgcaggggctggtaaggaagtctgagcacttacattttgttggtgcgtgtgaatttatcacagcgtgaagtgttattcacggatgacccctaatgggagcctcggtgctttcccgaacccgacgcggccgggaggaggga

SEQ ID NO: 7653 - DNA, 273 bp, Homo sapiens
  source 1..273: mol_type = other DNA
ttaggcactgccgccctgcactgtagcagatgaaccttgctttagtcattactcgttcaaggcttcagatgttttcggttaagttacctaagttcatgtgtataaactttaacaatgtctggaatctatagatgatcaataaatatttcttttttctatttgggaacgtgaagctataggtttcaaattcaaacttctgaaataggaaatttcttaagtttttacttaagaccaaatgtagctgaagttaaaacagacttactaaaattctgt

SEQ ID NO: 7654 - DNA, 489 bp, Homo sapiens
  source 1..489: mol_type = other DNA
caaatctgggatgtgcagatcagaactggcgataatgaaacagaaaggggttcttctgtcattctcccagaaacctgtttttctcatctttgaaacaactgcaacaaagagcagggcgcggcaggctttagcaaacacctcaggccctctagcttcgaggcactgagcctcgaggcacagcgcccccgccggacccagttccctcagtgtgtgaaactgtgacccagccaccggccaagggtccccacggggacgctgcgacacagccccgacggtcgtgcagtcaggcccgggagcgcccaactcgcggccacccagcgccacgcgtgacccgggcagcggggcgacctcggggcggtctggcacccgggaagtagtttgtgctcgggctctgaacaccgccggccggaccgcgggctgcgtcacggggaccgggaggcgtacggcgacgcggagcagcgcctttgcggcgtgcgacccgcccccgcc

SEQ ID NO: 7655 - DNA, 520 bp, Homo sapiens
  source 1..520: mol_type = other DNA
ccagaaacctgtttttctcatctttgaaacaactgcaacaaagagcagggcgcggcaggctttagcaaacacctcaggccctctagcttcgaggcactgagcctcgaggcacagcgcccccgccggacccagttccctcagtgtgtgaaactgtgacccagccaccggccaagggtccccacggggacgctgcgacacagccccgacggtcgtgcagtcaggcccgggagcgcccaactcgcggccacccagcgccacgcgtgacccgggcagcggggcgacctcggggcggtctggcacccgggaagtagtttgtgctcgggctctgaacaccgccggccggaccgcgggctgcgtcacggggaccgggaggcgtacggcgacgcggagcagcgcctttgcggcgtgcgacccgcccccgcccccctcagggcttcgggcccccggggccagccgccgtcctgcgaacgcgcggcgcccgggccgctgcccccttccggccccgcggcggccccgcctc

SEQ ID NO: 7656 - DNA, 710 bp, Homo sapiens
  source 1..710: mol_type = other DNA
tatgtttggttgaactactgttaatacatgtgcatatacatatatagcatgcatttgtatgtgtgtatatagaaaactttttagaaacttagagtgacacgatatatctgtaaaaagatatagatatactttgtccttataaaaagttacgagagtgattataaggttcattatagtatctttaaatagtaattctcatatatgtaaaatacaagttgtttcacacatatttccaaacagtactcttaatatgtaaacaaaggaatttataactcatagtagtcattaatggttccccttgtgacttcatggctagacatttattaactagtgtcaccaatcaaattaaagctgaacatttagttatcaatggaaagatatgagatgttctaaaccatctgctttatatattccatataagctgtatttatattcccatgccagggcttttgttaaaaatgagccttctgctagttcagaagaaaaacttcgtaggttcagtacactcaataaaatgaggatttaaaatccttatttctgtattcactgtcatatgattaattttacaataaatgaacaacgaataccaagttattttatagtgagtgtcaatatttttaaatgctaacattaaactctataatgtgattttcagaatatgtctattttgatatctagaagttaggttaaatttcatgagtttaactttt

SEQ ID NO: 7657 - DNA, 624 bp, Homo sapiens
  source 1..624: mol_type = other DNA
tttccactccacctccggacatctgccggttggtggtaaagctgttttcctactgaccagaacaggaaggcaatgcccctaccgctgcggggccagggccagcttcgaaggctcctcacggcaacacggagccaggtcctcgtgtgaccttggactggcactcccgccctcctgaaggcgcggagaccccgacggcctcggaacgcttcgcttgttttggccccgctcacacacaggcgtctcagggcggagaccacaggccccgcggctgcgggcggctcaaggtcccccgggacgcccccctagcggactttggccgccgcgcccggctgcctcccttgcccgggctcgcctctgctcccggcgccgcagctgacccggcgggggaggaggacggcgaggacagaacgcccggggttccgccgagactcggtcgtcccaggccagctcgacttgcagtccgccctcgtggggcgggagacgcccgacgcccgcccacctcacccccggggtgccctccgtggcctcacggggacgcagcgtcgcagcggccccggcgccgcaaagcgtcttgggagcgccggctcgcgccggaagaacgcgagggcgcgcggcggcggcgag

SEQ ID NO: 7658 - DNA, 641 bp, Homo sapiens
  source 1..641: mol_type = other DNA
gagggccccgattgcagtcctggggcaggactcccaaaagcagttgtttttaaaggctgtctgtgggaccaatgcgttgtcacgacgccgggggccggagggagcaccgcctacctccctgatcaagccccgcggtgccgggcgagcccgagggcccggcaggaggcgggcggcagccccaggcgagctcggaggcggcgggaacgcagccgccgcgcatgccgggagccgcacgccgcccgccggggcgcgcagtcccgcaggcctcgctccaggtcgtccgaaaaggaaccgcctgctgctcctttgcaggctcgcgaggagccgcactcggaccgcctgatgcgggcggagcgagccgagcggagctggagctgcccctcccagcggggaggacggcacgaaggaccgagccgcctcccctcccgggtcccttcagacgcgaggcgcagagactggctccccgggcttcccctttaaggggggcggggcgcggcctgccgtttggccgccccccacaccctcccccgcgccggcagaccaatcgcccgggcggcggagcgaaggcgaccctccggtaggcggtaggggcgggccccggccttattcgcagggagcgctgcgcaggcgcagaggcggcc

SEQ ID NO: 7659 - DNA, 788 bp, Homo sapiens
  source 1..788: mol_type = other DNA
acgacgccgggggccggagggagcaccgcctacctccctgatcaagccccgcggtgccgggcgagcccgagggcccggcaggaggcgggcggcagccccaggcgagctcggaggcggcgggaacgcagccgccgcgcatgccgggagccgcacgccgcccgccggggcgcgcagtcccgcaggcctcgctccaggtcgtccgaaaaggaaccgcctgctgctcctttgcaggctcgcgaggagccgcactcggaccgcctgatgcgggcggagcgagccgagcggagctggagctgcccctcccagcggggaggacggcacgaaggaccgagccgcctcccctcccgggtcccttcagacgcgaggcgcagagactggctccccgggcttcccctttaaggggggcggggcgcggcctgccgtttggccgccccccacaccctcccccgcgccggcagaccaatcgcccgggcggcggagcgaaggcgaccctccggtaggcggtaggggcgggccccggccttattcgcagggagcgctgcgcaggcgcagaggcggccgcgggcggaggggcgggggcaggctagcgggaggctctccgtgaggcacctgcgagggcactcgtagcatctggggactccgaggaggaagtgtcagcgcccgggaccccggcgccggccccgccgaggggatccccactgctccggtcctggagcgggaggggagaaaggagggagccccggtttcgccccgcccctgggctggtgctgcgggggcggggagtcggg

SEQ ID NO: 7660 - DNA, 767 bp, Homo sapiens
  source 1..767: mol_type = other DNA
ggctgctgagctgagggcccgcggcggccgcggccggtgcatgtgcggctgctggatgcggaggcggcggcgacggcgcgagggcagcagcagcagcaactgtactcgtcggccgcgctcctgaccggggagcggagccggctgctcacctgctacggagtcgctgccccacgacatgcagaggaacgagccgcggggctgccggcctcgggagccggtggcggggagcctgtccgggggagtgccaccttccctttctcccgtgacagtctccccgagcgcaccgagggtctgccgagcgggactgggaggactggagaccgggttggcggccctccgtggccccgcggtgggcgagtactttctggggtccccagagtgggggtgggggccgcttgtcagcccccgctgcagacccagcggctgcagctgccgctgaggggaattcaggcgctggcccgccccgtgccgcagaccctgcggccccggcccgggactgcagccgggcaagggtcggagggagtgagcggccgggctcccgctggtctgcggggcgcgcttccccacctcactcgcccccaccccggagtgcgggtgctttggaacggaggccgcggaggcggactgagggggccttcctccgcgctcctgccccggcccggaggagagcagtccgttccgctctctcgccccgggaaagttcgcgggcgccccggtgtggcggggagggcccccgcgccgggggcggggcctgcgggcttgacgag

SEQ ID NO: 7661 - DNA, 605 bp, Homo sapiens
  source 1..605: mol_type = other DNA
ctaatattatatgattcaatgtcaaaatggcatctcacaaggaaatttttcttccatgagaaatgtaactaactcaattaagagatttaaagatgaccagactaaaatttaaaggtgatctcatccctgttattaagtaaccaggggagactcccggatttgcaatcctggccattcacgcgcgcttgggtgggacgccggtgaactcggggcaccccggccggctccgagggcacagggcacgtgccgggcaggctgtccgggcaccaggtctcacgggggcccggggctgcgcgccgcgcccgcgctgggagagggccctgagccggggggctcacctcctggtcactcatcgcgccggtcgcggggcgcctcctgagcggacggcgttcagcgaaggcagcggcccagaggccgggcgtccccctttcgcgcctcggctgtgggggcggcacagtcttggcactggcagacgccaactgcgcgcgccccgagcctcggcagcgcccagccgccggcagtgggctgtgggctacgagccggagccgcggctggtggggcctgggaagtgcagcgtctccctgacgcttggcagaaagtgcttc

SEQ ID NO: 7662 - DNA, 604 bp, Homo sapiens
  source 1..604: mol_type = other DNA
gctgtaatctttctgttcttagcagttctcttacaggaaagaagacattgaactaaaagtgccttctataacttctaaagctgtaatctttctgttcttagcagttctcttacaggaaagaagacattgagaattggttgacagtaatacattttgattatgtaaatataaattccataggctacttagtgattatttatttatttaccctgggtatcccaagatctgaatgaggagagctctaattctagattttataacaaataattcaagccttggaatagcacagattgtgttagaatcctaaccagctagaatccactggcttgtttttgcgatatcagcctgttagaagcatatccctataaagatttaatatatgaaacaacagcataaatatgattttgaacgttgcattgtcacagatgaaaaaaaaaaaggaaatcgggcacggggttagcagcaacgtggctgggcgcctttaactcggcgtgacctccgggtcccaggcccgcgtcccgggcccagcgcccaggcccgggcggcgcattggcccctcctcccctcgcgcgccgcgcgcatgttggaccagaaacagctgtgc

SEQ ID NO: 7663 - DNA, 138 bp, Homo sapiens
  source 1..138: mol_type = other DNA
ccaagacatagacaaataacttttttaagtgctgtgtctacagagacacagctgggaaaagcaaattaaaatcttgttgacttttatttctggaacgttcaccaaaaataataagtttggaagagagaatagctacag

SEQ ID NO: 7664 - DNA, 204 bp, Homo sapiens
  source 1..204: mol_type = other DNA
ttcttaaatcatctctctcaagttcaaagttccacagatctctagggcagagagtctaggaagttccaaactttcctctcacactaaaaatgcagttccatagcatcagatctcatgagaactcacggtcatgagatcgggggaaactgcccccatgctcttttcctgaaaacttttaaagcattaggcctacatggaaattcc

SEQ ID NO: 7665 - DNA, 446 bp, Homo sapiens
  source 1..446: mol_type = other DNA
tgaaaactgaggccttaggctttggttgaaaaccgaggccaagggtgtgagacgtcttgaagttccttttcgttctagctcctaaatggagcggagcgccaggtggtgtcagagggggcggcggcccctccaatggtggcaccctcagccacggatttcgccggacgccctcctggaaccttcaggccaccctgaggatggagactcgggtgcccgctctcctcccctaccgccgcgggcctgcgccccccgccccggaccccgactcggacgttctagccgcacgtgcgggcgcccctgggtgcgagccgcggactcacgagccgctgcttgttgctcccgccgccgcgacctggggaagcgaaaatgaaattgacttttccggcccgccaatgagctgctgcggcgaacttccgcacctcccggccgggccgctcgcgccccag

SEQ ID NO: 7666 - DNA, 369 bp, Homo sapiens
  source 1..369: mol_type = other DNA
gctcccaacagccggcttaattgacgccgtctttgcagaagcaccttgtgtcaggctctgactacccagtgaccagcaagtgctgagaactgcctcagctcgtgagcctggcaccctggagctcaaactgggcagcaggcctgggccgggccgagcctcagggcgggcgcgggacgcgagggcgggaccagggcgtgaggacgcggggcgcgggggcggggcgcgctgcggtgggcgggcgcctcctggggcccagcctggggctgggttctcgggcgggcgggagctaggggacgggccgcagcggaggcggcgcgaggggccgacaggggcgggcgggaggcggggctggcgctggagcacatctcc

SEQ ID NO: 7667 - DNA, 720 bp, Homo sapiens
  source 1..720: mol_type = other DNA
gaactcgcagcaccgcttcccggggccactcctccgccggcggtagcgccgtgccgcctgacccggccttccggcactcggccggccgccaggtctcccgccctcggagctcggtgccccgtgcccgacctcccggccccgggctcggttcccctggccaggcctcccgctgcctggcctccccggcccggcctcgcgctgcccggcctccccggtcccagcccagcctcccgcccccgggccaggtctcccctccgatgacctgaggcctttccttaggttcctggcttccccggccccggcccaggctcccgcctccgggccaagtctctcgctccgcgggcttcactgctcgcccccgcccgggcgaggtggcaaagccttccagaccgggcaggtacccgggcgggcgcagggcctgggaggggcagggctgacggcccggagcgagggcggcagtcaccgcacatgcactgcttccgcggcccgccgccgggagatgtgctccagcgccagccccgcctcccgcccgcccctgtcggcccctcgcgccgcctccgctgcggcccgtcccctagctcccgcccgcccgagaacccagccccaggctgggccccaggaggcgcccgcccaccgcagcgcgccccgcccccgcgccccgcgtcctcacgccctggtcccgccctcgcgtcccgcgcccgccctgaggctcggcccggc

SEQ ID NO: 7668 - DNA, 380 bp, Homo sapiens
  source 1..380: mol_type = other DNA
ggtacccaagagttatatataaaaatgatccatatccccatgtagtacattacacgttatattctttcatatgcatgaaacgtaatatttttgtcgtagtaaaatatacataacaaaatttagcattttaaccgtttttaactttacagtattgtgactgcttttggtatcatatccaagaaatcataccaagtccaatgttatgaaagttttaattttagcctttacattcttctgcattacacatttttaaacaatttgtcccacgtggctcccgggctttctggcgccgctccaggccagggaggagcccgggggccgctcaggaagtcctgcgcacgcgcgcgtgctcggcccggattggctgttcggagcggcga

SEQ ID NO: 7669 - DNA, 331 bp, Homo sapiens
  source 1..331: mol_type = other DNA
actgcactcctttatgaatatcatataaagtttagaaacatacaataatcaatacattatttggggctataggtacccaagagttatatataaaaatgatccatatccccatgtagtacattacacgttatattctttcatatgcatgaaacgtaatatttttgtcgtagtaaaatatacataacaaaatttagcattttaaccgtttttaactttacagtattgtgactgcttttggtatcatatccaagaaatcataccaagtccaatgttatgaaagttttaattttagcctttacattcttctgcattacacatttttaaacaattt

SEQ ID NO: 7670 - DNA, 233 bp, Homo sapiens
  source 1..233: mol_type = other DNA
gcaatactgtttctgaaatctgaacactcagtgtcaattcagaaaggccttccagcgcctggccaaagcctggctgtagctcaattcctatgtattcgtctagaataaatctgctgtcagcatgcgagcagaaagaaaacagtgtctgttttcagaaccggtcctggcagcaacactcactgggcccattgtaggctgggggagcgcagctgagccctgctaacccccgccca

SEQ ID NO: 7671 - DNA, 305 bp, Homo sapiens
  source 1..305: mol_type = other DNA
cttaaatacaaaatttaggcatgtcctaactataatcatcattttctcaagtggatgtacatgacagatctttcactagagccctcgcgtctcttttctgtcatagaaaactcacatgttttacttaagaaaagtacttatttgatcggggcagccttgatttgttttaaatgaataaagacagaaaacatgatcaaaataagagcaagagaatatttttatgtccccttttaataccctgaagacacagtcagaatcacagagggtctgacacggtcagaatcacagagggtcattcatgactc

SEQ ID NO: 7672 - DNA, 779 bp, Homo sapiens
  source 1..779: mol_type = other DNA
cagtgtttgtagcaatgcctggcatcaagcactgggtaaacagtatctattattatcaaaggcctttacgacaacaatctgtaggtcccaggtgctaaaagaagcctttgggatgtgagcccgaaaaccatcgtgttggcttctgaagccccaagacggaagccctcagaaccgcacagcaggtggccgccgtggtgcagcgcgcagtcggccctcagctcccctgcaccggcgcgagctgcgggcgctgcccacgtcaggctctgcagaggtcttccggccagggagcgtgggggaaaccctgtggggccgcgcccgtgaggaaggcccttgcctccagggccctcgcagcagaattctgcccggcctgccaggaggccagcggggcacgggctgagggtgcaggatccggagggcgccgcccgcccctcgggcatcgcggggcccagggtccgcggggcctctgagctgaggcggtccaatgtaccctcctcagattcattatgaaatccgaggcagtctgggcgactccagcggcgttcgcccgccgcagcctctcgaccgccggccacccgccagccacgcgcgcccagacaggagggcggccgggcgctcggcggggcggggcctgccgggggcggggcctgcgggcggggcggggccgcgggagggcggggccggcgcggcgagcgcaccagcagcatcctggctcagccgcggcggtggcgggggcgcaaccagcgggccgaggcggcggcgccagcggcgccttaaatagc

SEQ ID NO: 7673 - DNA, 333 bp, Homo sapiens
  source 1..333: mol_type = other DNA
cctgctgcaagtcatcattaacctttgggcaggaacagcatcatttcctgctggtgactagtctctgtggtcaaatatcacctcaaataagatgaggtctttctgagaatgcaattacagcctcttatgctttccaaagtgggggatgattcaatgattcctgactggtccacagccatatatcaattgaggttataatactaatttgaattgcaaatcctgaatttagatttaaaccttcagtcatgctgcatttaataataatagtcatactttaaagcatgtttcagttatgaattcattctgaccagaacgcttgctgtgcttcagcag

SEQ ID NO: 7674 - DNA, 453 bp, Homo sapiens
  source 1..453: mol_type = other DNA
ctctgaaaaatgaaataataaaaataacctttaaaatgcattatcactctgattctaagtcactggatttaaactatgtcaatgccctgtactttctgtctgtcagttagatatttaaaatgtacctcatgaccatgagtcatgaccttatactcttttcagtacaggagaaagcttcattaatttactaatgcattcattccacaagtaaacttttgacaaaaaaaagccacaagctttttgagtcttcacaacccaaaacatgtatttgaaactgaaaattcaatcattccatgtttataggcatattgcttgatagaaacatataaatcattacctgaattttttttttttttttttttttttgagacggagtctcactctgtcacccaggctggagtgcagtggtgcagtctctctggtgatccacccgccttggcctcccaaagtgca

SEQ ID NO: 7675 - DNA, 388 bp, Homo sapiens
  source 1..388: mol_type = other DNA
taaaatttagcccaatgaaactattcatacttttcaatggacattttcgtataggataataggctacaaattgagcctcttccccccgcgaagagggagcaggaggggcgaggcgaggcgaggcgggagcctcgtgtgccagccgcagccccacacctgccgggatgtcgcgcctccgtctccaagaattaaaggcttacttaattactttaatgactctggacaggctttaaagagggtcctcgccccccggtgcccgcggccgctgcgcccctgcgctccgcgcccgcgactgctgcaggcgcttgctcgcccgccggccatcacgtgtcctttgaagggccacgtgggaataatttggagccctagatgaccgctttataaggca

SEQ ID NO: 7676 - DNA, 538 bp, Homo sapiens
  source 1..538: mol_type = other DNA
aaggaaaattaaagctcagatttatatattttaagaaattaattgcaattaatttcctgggattaaatagcatttcctctcaagaaggcaccggctgacagacagaacattctgccctaatatgtgctgaaattccgctgagagcagagggttacactgtgttttgttgtcagattctatgaggcaatcacagcatcaggtgaccttagtatctcggctctaaagagggggcctgagcgcggcccgtgcaggccggagggtcaagaactctccaccggcggcagcggcccggtgtctgccccggcttcgccccggcctaaggctgcacatgccgcggtgacacggtgttccctgggctcggcgggacctttgttgcagggacagcccccggcccagcctcgctcccggaagcgccttcgcccccgatgccctctgcagctgggaggagggggcgccccgcacctgcccagccaatgcgcggcgcgagcgccggccgcgacccgcctcctctcgcgagagcccggcggggatataaggg

SEQ ID NO: 7677 - DNA, 429 bp, Homo sapiens
  source 1..429: mol_type = other DNA
tgctataacaaattactacaaattcagtagttaaaacaacacaggtgtattgtcttacagtgcttaaggtattaagtctaaaatcaagaagttattgtattcaatatattctgcagagatcatttttatggtatgaactgaaatttgctgatagaaaatatcacaaacacacagccgccgttcttttttattcttggtttgaattacaagataatcaagcctacccgcgccgccctaggcagccgggagcagcagtaacgcctctagggcgccatggcaaccacgcgggctggggcccggcctccactccgcccgcgtggagccccggcctggccgcctgcccgccgcgctctgtgacgcccgccgcgagggccgcacgaggcccggcgtgcgcccccgcctctcccgaagcgccgggccccacgccgc

SEQ ID NO: 7678 - DNA, 429 bp, Homo sapiens; identical to SEQ ID NO: 7677
  source 1..429: mol_type = other DNA

SEQ ID NO: 7679 - DNA, 616 bp, Homo sapiens
  source 1..616: mol_type = other DNA
gacaggtaagtttttatcactttttaaactgtcatcttgttactgtgacaatacatttctgtagttaaacagcacagtagctaccgtccccggaaggcagataacccctcgggcctcgtgggttaggttcgagtccctagtcgcggcccaatctcaatttagggctgatcctgaccgcgcgagagggcgggacccgccattctcacaggggaccggggtggaacggcgccgcgacccgccgccgcgggcgcccctgtcgtgggggcgcggtctcccaccgtccgcgcaggcttcgttaaacccaccccgagtactcgccgccgcctgggctccggagcggggagacggatggagcgtggcgggcgccccgcgagcagggagccaggagccgctcgcgcgcccctcacctgagagccgcggccaccacagccccacgcgcggcgctggcgcactcccgcggccctgaacgggctcccggcgccgcgcgcccgcgcttccggaggcggagagagcgggcggcgtggggcccggcgcttcgggagaggcgggggcgcacgccgggcctcgtgcggccctcgcggcgggcgtcacagagcgcggcgggcaggcggccagg

SEQ ID NO: 7680 - DNA, 459 bp, Homo sapiens
  source 1..459: mol_type = other DNA
ctcgggaggctgagccgatcgccccactgcactccagcctcaattgatactaaaagcaaaagctacatctgcttctttattagtagcatggcatctacttagcaagcgttatctgtatattactggctgggactaaaggcaaatatatactctaaaaattatttggaccacgttccgcagctgcgtgcaccctgttgcaccagggccttccctaaggcggcagggagatgtttgccggctggggatcacctgagctcaggaattaccagcgccgctgacacctgcagcaaattgggaaagagaggtgtgcaccgcgctgggtcgcgccctctccccgtggggccccggcccggaccccgcccccgcgctgtgggtgggcgcctcccggctgtcactcagcggccgcggtggctccgggccccgcccgacacgcacttcagggcggccccgccccgcccg

SEQ ID NO: 7681 - DNA, 315 bp, Homo sapiens
  source 1..315: mol_type = other DNA
aaatatttaccgaatgaattataacatcttacagtactcaagaactaagacatattttattgatcaacaaacaaactagtgtaagagaaaccaactttactaatttttgagaccacttctaaaaacaggagttgtaacacactcagatggtgctttcttttaaaataaaggagtgagcagcaaatgatcattaacaaatattcttatgaagccccaaagcgcttgggcaatttcattagaatgatggtatcactcagtcaagcagtgagtgttttaaaacactaatacgtatcggcgctgggccagggaccgaag

SEQ ID NO: 7682 - DNA, 455 bp, Homo sapiens
  source 1..455: mol_type = other DNA
caaatgatcattaacaaatattcttatgaagccccaaagcgcttgggcaatttcattagaatgatggtatcactcagtcaagcagtgagtgttttaaaacactaatacgtatcggcgctgggccagggaccgaagcgccaggaccgtgcgcagagcctgcacgtagcgaacgctggggacacccttagggttgcctccagcaccgcggagcgcggagcccggagcccggagcccgccgcgcgcgggcgccggggaacgctcgcgtccacggccgggcccgcagcccagccccctggctcccggcttcccgcttcgacaagggcatgccgcggccccccggagctcggggcgcgggagctggcaccggaagcggggagggccggcggagctgggcggccaggagtcgggtacttacccccggcgggcggcgggcggctgaggtcgcggccagccgg

SEQ ID NO: 7683 - DNA, 683 bp, Homo sapiens
  source 1..683: mol_type = other DNA
actcgccgcacgggacttccgggccggcccttggcagccgcgccccagctccggtcactggcacgtggagcccggcgccgggggcagggggagggggcgggcgcgcgaggccatccgccgattggccagctgtggatgcgtcaggccctcccacctcggggcggggcccgcggcggccccacggagcctcagcgcgcgtgcgcagggtaagtcagtggggctccgcggccgccatgaggcgcgtccttacggagaagcgggatgctgccggcgcgcacgtaaccaggaaactgggagccacgcgcagctccccgtcgacgccgccttcagaagccgctgtgcactgcgctgctgccgcctcggcgccggggaacgcaagttcctttacctcgcgcgcagtcgcccgcctcccaacccgggaggtgaaggcggggacggcgagcggatggctgtcccgagtggcaacggccgagcccggcccgcgcagggacccttgtggaggggccctcggggagaggccgcagcacgctggggtcgtcacgctggtccacgccgggctctcctcccgggagagcggacccggccgcgtgcgattcggacccgcggggctggtgaagccgctgtccggccccgcgggtgctgtcggatgacctgacttccgatggcagctactgacgtcagag

SEQ ID NO: 7684 - DNA, 541 bp, Homo sapiens
  source 1..541: mol_type = other DNA
agatatccagctgagatacaacttttttttctgaaaacaatgtccaaatttcctttccttatgaaatttacgtatgtaacaggaagttaaaaaataactatcttgtttcaaagaaaaatatgctaactgcagtatttatgttcaaaactgtaagaacgtgtctgataccctttattagttaggaattcctgaaaatgaacttctgtgcaaacctgaagcttcaacacgtgttttaaaaagcagtgcttattgaattgataaacgttctttaaacatcattaaaagatattgtgaatagtttaaatattaaaaatgtggaatataagaacgattctatatatttgaacacacatttatattcaaatattcatatgaataaaaatgcttaaaaacaacataaacttgcgattgcaaattttatggccacttatctttagaaacttgttttctaacagcataacaataaacgtatttatttctttggtttctaatccttctggaaagctctgacgtcagtagctgccatcggaagtcaggtcat

SEQ ID NO: 7685 - DNA, 513 bp, Homo sapiens
  source 1..513: mol_type = other DNA
ttaatgtggctacttaaaaacttcaaatttctcatgtcctcatcaagactggaaaaaaactcttaaattacatctgtgtcttgcattatatttctgttggacatcgctgctatagacatgtttttaacagctgaaacaacttgtacacagcaacagttacctgcgactgcttgcagggatccgggggtgcgttgaccgaggcccctgtctccagcagctctgaccaggcagcgcccagtggtccgtaagcttgagcctgcaggacaaaagctcgggctctgtgagcccgaatctcacctcggggttgcaatccagcagacactcgccgcacgggacttccgggccggcccttggcagccgcgccccagctccggtcactggcacgtggagcccggcgccgggggcagggggagggggcgggcgcgcgaggccatccgccgattggccagctgtggatgcgtcaggccctcccacctcggggcggggcccgcggcggccccacggagcctcagc

SEQ ID NO: 7686 - DNA, 695 bp, Homo sapiens
  source 1..695: mol_type = other DNA
tggtttctaatccttctggaaagctctgacgtcagtagctgccatcggaagtcaggtcatccgacagcacccgcggggccggacagcggcttcaccagccccgcgggtccgaatcgcacgcggccgggtccgctctcccgggaggagagcccggcgtggaccagcgtgacgaccccagcgtgctgcggcctctccccgagggcccctccacaagggtccctgcgcgggccgggctcggccgttgccactcgggacagccatccgctcgccgtccccgccttcacctcccgggttgggaggcgggcgactgcgcgcgaggtaaaggaacttgcgttccccggcgccgaggcggcagcagcgcagtgcacagcggcttctgaaggcggcgtcgacggggagctgcgcgtggctcccagtttcctggttacgtgcgcgccggcagcatcccgcttctccgtaaggacgcgcctcatggcggccgcggagccccactgacttaccctgcgcacgcgcgctgaggctccgtggggccgccgcgggccccgccccgaggtgggagggcctgacgcatccacagctggccaatcggcggatggcctcgcgcgcccgccccctccccctgcccccggcgccgggctccacgtgccagtgaccggagctggggcgcggctgccaagggccggcccggaagtccc

SEQ ID NO: 7687 - DNA, 571 bp, Homo sapiens
  source 1..571: mol_type = other DNA
aataaaaatgtccagcctggccatttagccatatgcacatacattaaaatgtaagcaaataaaaagatccagaaaagtttacaatttaaaattcaccatgctttaatattcagtggaagatgcaaactacagtaagactttaggaaattagaatgcttgtggacatagctcctaagtatttcaatgtaatgtagcaattacttcttttgaaataaactagatctgtgctgttcaatatgatagtcaacagccacttaagggtatttgaaatgtggctagtctgatttgagatacgctgtcacaccagattaagtgtaaaatatctaatcagcaattgctttgattacatattgaactgataacattttggacaaattgggtcaaatactaaaatttcatgtttcgtttattaatgtggctacttaaaaacttcaaatttctcatgtcctcatcaagactggaaaaaaactcttaaattacatctgtgtcttgcattatatttctgttggacatcgctgctatagacatgtttttaacagctgaaacaacttgtacacagcaacagttacct

SEQ ID NO: 7688 - DNA, 492 bp, Homo sapiens
  source 1..492: mol_type = other DNA
tgttgcgcctgtcccaggttaagcccttcttgcaaggcttcaaaaacgccgaagtctctcaggcggggtgcacacttgtgtagggcactttccccccggcccagcgcggagacaggcgaactggagagccgccctgcccacgcagctcgcagctgccatcttggaccccggcaggaccagctcctttcaggcgctgtgaagcccgctcgtggcggctgccaaagagatactcaccatgtccgcgacgtggcggtgacacgggcgctgacgcctgcccaaaagttccgggggccggccctgaagtggtgtcaccgcacggcccaggggcggggcccgggcggaccgctcggcggcatgacgtcacggagcgtaccacaccgcagtccctcgcggacggcgaggcggggcgggcagaagctcacacatccttctgtgtgtttcgatgcggattcgaatctcctcgatgaatggatggcaacacatcacacaata

SEQ ID NO: 7689 - DNA, 524 bp, Homo sapiens
  source 1..524: mol_type = other DNA
cgtccccgggcggtccctttctccgcaccgctttggtccggcgggtaccgcagcgagcaagcccgtcccggacagccgcgcgcgtgtgcggggaggcgcccaggtgggctgtcccaggccaggttcccagggaagctctcggggaagcgtccggagtgaggagggacccaccgggaccccaccagggaccccagccgagcgcgcgccgccgagggtgggggtggggccggcgccccggccacccggttacctggcgacaggatgccctgcgcggggcggcggagcgggtgggcggggctcctaggggagaagggcattcagcaggcggctccccgctcgaaaacccgggacatcccggtcccgctcggccctagggctgagcacccgctgcggccccctgcgtccgctgtggcttacaggctggctacgtggtctgccgccgccgcccgcccagcgcgccctcgggtggccgcttgcggaaagcgccgcgccccgccccaggcccggcctgatgccgtccctcc

SEQ ID NO: 7690 - DNA, 593 bp, Homo sapiens
  source 1..593: mol_type = other DNA
atcataagaagtttcatttcaatgaaagcaagccatcatgtattacttattatatattatatgttattatatagcaaattatgatatcctggtgattgtgattttgaattttaattttctatgtgtgatggtttactacaaaataaataatatatactcgtttaaaactttaaagagcgggcacgcacccagtccttggttaaaggaggtcaggtttcccgtgaacgcaacatcaatcctgctttcatgagcatattttaatacatgtttaggttaattcattattgaaaaataggagtcttcttttcattgcagcaaacaaaagtcctttcacaatattggtcatgggccgttccgtccccgggcggtccctttctccgcaccgctttggtccggcgggtaccgcagcgagcaagcccgtcccggacagccgcgcgcgtgtgcggggaggcgcccaggtgggctgtcccaggccaggttcccagggaagctctcggggaagcgtccggagtgaggagggacccaccgggaccccaccagggaccccagccgagcgcgcgccgccgagggtgggggtggggccggcgccccgg

SEQ ID NO: 7691 - DNA, 262 bp, Homo sapiens
  source 1..262: mol_type = other DNA
tcttaaaactgcttccaaacagacgaccctatcatatggggcattaagtccagactcttaaaataaaaatttaaaaggacattaagtaattttaaatatttaacttatgttttaattgaaataacccgaagcccccgcgcccgccgcggcccgggaggctgccccagccggccgggctgcgcactcccgcggggctggcgcggctctcgcggggcggggaggacggcggggcggtgacgtcacccccagcggggataaagcg

SEQ ID NO: 7692 - DNA, 467 bp, Homo sapiens
  source 1..467: mol_type = other DNA
gcttggcttatagtaagctctgaagtgctcaccaaataaatatttgctgaatgaatgaatgaatacgacttcttaatttttatttctagaaacaaaatgaaggctcaaagtttgtcagtcattgccagtgacccaaccagaatgatttcttcattggcctgtggaggcagaagcaggggtatcatttgtcttcagtcttaagaatagactgacaacagatactctaccagagggctctcaactatttcttaagaccccctaggtaagtaggacatctcgttttcagtgaatcaggtaattcattttgaaaacttgagttcgctggcagttttcctcaaaatttaaatgaatatttgcacaatgaaccactcccccctggagtggggggtggctcagaacagtattaatcttaaacctctggagttcaagaccttttaaaaagggctaaataaacaatctctacatgt

SEQ ID NO: 7693 - DNA, 369 bp, Homo sapiens
  source 1..369: mol_type = other DNA
ttgtttcaattaagtggctctaagattatcatttaaaaacaaaaagtgttattaacctcatataaaaaagagttctcaaaaaaatgatgagtttgatgacatgatcagccattggttgttgctatggctacgaaaagccagtggaatggaaaacagtgtggcagaagcctcttttatacatctcttcagggaagaggcatgttagtatacaatgatcacagccacgcaggcctgcaagctgccttttggacaggctgttgactgccgttccaattagctgattgaatgcagagtgataatgctgcatatctgctatcaggcagcagcaatgtcttgggaaggcaagctttccctgcaatattatctcag

SEQ ID NO: 7694 - DNA, 444 bp, Homo sapiens
  source 1..444: mol_type = other DNA
agtgataatgctgcatatctgctatcaggcagcagcaatgtcttgggaaggcaagctttccctgcaatattatctcagcgctgaggccgattttttgacctttttgaaagcacagcataaaaataaccaaaacttagcctgaaagatttacgttgattgtgtgatttggatttaccaaacaaacatactagaaaatagtatcagagacatagagttgtttcagtgaattttggttctagcaattggaagataaaaaacatgaccgatatgctttggggttttaaaaccaatatttactgtttcgcttgtgaacaatttgtattcagagaactacatgaaaaagaactacatgagaagcatttctttttaagcctcgtaaatgatttatttaactcttaacacagctatgtacacacttaaattgaagaattctgttctctatgt

SEQ ID NO: 7695 - DNA, 392 bp, Homo sapiens
  source 1..392: mol_type = other DNA
ccaagtagctggggatggtctagatctctgaattcaggttgaagactctatttcatctattggaatgaaagcgttcataaacatacttaactgcttccttggtagaaagtaagtaattttccttgatgacacacagtatcttcgatgtgaatagtctcatcatgtgaaaaagtctggaaaatatttaaaaattctgtttttatttattctcagcttggcttatagtaagctctgaagtgctcaccaaataaatatttgctgaatgaatgaatgaatacgacttcttaatttttatttctagaaacaaaatgaaggctcaaagtttgtcagtcattgccagtgacccaaccagaatgatttcttcattggcctgtggaggcagaagcaggggt

SEQ ID NO: 7696 - DNA, 474 bp, Homo sapiens
  source 1..474: mol_type = other DNA
atttgaatggaaatatatcagatagaatagaagatttacgttgttcatggcattaatcatggtagattggaagtaaaactattcttgccttgaaggtaatgtttaaagtcaaagaatttttaattaggtgcggattttttaaaaagaatttttaatttacaaataagattgagttaaagaatcattttctgccgtagaagcaataggattttttaaaaattctattttaaattgcataaaaagcatcttaaagtaatcagataagttgagccataagtaaatggatatttaaagatcttattaaaatagtctacctgatttagttattttgtttcaattaagtggctctaagattatcatttaaaaacaaaaagtgttattaacctcatataaaaaagagttctcaaaaaaatgatgagtttgatgacatgatcagccattggttgttgctatggctacgaaaagccagtggaa

SEQ ID NO: 7697 - DNA, 354 bp, Homo sapiens
  source 1..354: mol_type = other DNA
gggggtagtgcgtggagatcacgccactgcactccagccctgttctaggtccttgaccaaattgaatccagtacatggacaggagatgatgaactacttttgtagagtaaaagatttgatttttctttttattatcagagctatctaaaatcaaccataactgtcttaagagcattttgtgtaaatgatttataacactttcttgagatgggcagccttatcttttaataagcctcttaattcagtagggtgttaggcatgcattaaactccaggtattttgtagaactttggaaaattaaacattagacatcttcatagaaaatcatgtcactgatttttaaagccagctcaa

SEQ ID NO: 7698 - DNA, 394 bp, Homo sapiens
  source 1..394: mol_type = other DNA
cttaaaataaaagctttattgtcagtggtcaattcactacttccatttgatgcctctcatttttaaaaacaaaacaaaacaaaacaaaactgtctgggtgtggtgcctgtgatcccagctgctcgggaggctgaggcaggagaactgcttgaaagggggtagtgcgtggagatcacgccactgcactccagccctgttctaggtccttgaccaaattgaatccagtacatggacaggagatgatgaactacttttgtagagtaaaagatttgatttttctttttattatcagagctatctaaaatcaaccataactgtcttaagagcattttgtgtaaatgatttataacactttcttgagatgggcagccttatcttttaataagcctcttaa

SEQ ID NO: 7699 - DNA, 461 bp, Homo sapiens
  source 1..461: mol_type = other DNA
ggagcccacaagagggcactttgcaccatgatgcacgcttgtcctaatttaaacttccaattgtgatatttcactatataacaatatagttataatagatcatagcacatctgtaatgaaaaaaagtgagttcatttcttaacaagtacatttacttaactagttggagtcattaaagcaaattaagaacgaaattcttagttaatctgaacttaactcagtttcttcctggatcaatttacatatagcagaaaattgagggattcactgttattccttaacttgcagaggtccagacccgcccacatcaaatggtgaggtccccactttcaactttagctgttgctaaatctgccctttcaatgaaatccaaggatctcagctataaaataaaaactaggtgtttttcagaggcggtttgaaacgcctctctgagggaatgcaccaaacataaaagcatt

SEQ ID NO: 7700 - DNA, 494 bp, Homo sapiens
  source 1..494: mol_type = other DNA
ttaaagatactaagtgaacatatttattttttaaagtgttaaagtgattaaacaatgtagacggagaaagaaaccttttctccaaaagaaggcattactttacacacgtcagcccatgcagatgacttaaaacaaattcaaatggagaaaagccttaggcatgtttttctctgcaaagggcctggcctctcggggagcgacactcctcgcccggccactttgtaagaagggggctggggtcagcactggggccctctgccgggaagagagactggcggccagcacacgcgtctccccaggcggcccttccctcccttcccgggctgggtggcaggtgcgagtaccccgcggctgcggtctcccggcacccgctgagccggggtgagctcccagtgtcccagtgggccagcggacacacacgggtacagcgcccgctgctccatgtgaccccgcgggagccaggacgcgccccgcctcccggggctgcaagttgc

SEQ ID NO: 7701 - DNA, 322 bp, Homo sapiens
  source 1..322: mol_type = other DNA
taaaaactcggaaatacatggtttaccggcacccagtgcactgtgggaaaggcatgcctcgtgcagtgcccagctcacaggagagcgtccagctgctctgctcctgggcatccccaccccagcctggtgtgcgcaccctttgatggggcgggcccccggccccagagacccgggacgggcggttggaaacccggcccggcagggagcggggaaggcgcgctttcccggaggtcggcgcggggccggggccggggccggggcccggagcggggatgggcgggcgcagccggaggcggcgccggcgcgggcggggcgaaggggc

SEQ ID NO: 7702 - DNA, 582 bp, Homo sapiens
  source 1..582: mol_type = other DNA
acaaattcaaatggagaaaagccttaggcatgtttttctctgcaaagggcctggcctctcggggagcgacactcctcgcccggccactttgtaagaagggggctggggtcagcactggggccctctgccgggaagagagactggcggccagcacacgcgtctccccaggcggcccttccctcccttcccgggctgggtggcaggtgcgagtaccccgcggctgcggtctcccggcacccgctgagccggggtgagctcccagtgtcccagtgggccagcggacacacacgggtacagcgcccgctgctccatgtgaccccgcgggagccaggacgcgccccgcctcccggggctgcaagttgcgcagggagcgagcgatgcgcagcagagctgggctccgagccggatgcgcccagagcaggctgcccgcccgcggaatcccagaacagccccgctggggcgcgccgggctgccgcggtgacctttccgacgcccctgaccccgcatccggaggcggccggaagtgtcgccggcctcctcccggcgcagcctccgggcctccagtgccactacgccctgggg

SEQ ID NO: 7703 - DNA, 694 bp, Homo sapiens
  source 1..694: mol_type = other DNA
ggtcagcactggggccctctgccgggaagagagactggcggccagcacacgcgtctccccaggcggcccttccctcccttcccgggctgggtggcaggtgcgagtaccccgcggctgcggtctcccggcacccgctgagccggggtgagctcccagtgtcccagtgggccagcggacacacacgggtacagcgcccgctgctccatgtgaccccgcgggagccaggacgcgccccgcctcccggggctgcaagttgcgcagggagcgagcgatgcgcagcagagctgggctccgagccggatgcgcccagagcaggctgcccgcccgcggaatcccagaacagccccgctggggcgcgccgggctgccgcggtgacctttccgacgcccctgaccccgcatccggaggcggccggaagtgtcgccggcctcctcccggcgcagcctccgggcctccagtgccactacgccctggggcccggaaaccgttttccggtggccgcggtgctgcgtaggccgggccgggcgcaggaacagccccgtggcgccctctctggccgccgcccgggcgggaaacgtcgttccggggaccgggcgaccccgcagcggggagcgcgccaggtccgcgcggggaagtgggcggtgtgcggccggcaccgcctcgcaccacgcccccgcgggcccgcactttcccg

SEQ ID NO: 7704 - DNA, 545 bp, Homo sapiens
  source 1..545: mol_type = other DNA
tgtggcctcctccacaggtcggtgcaggctgtgagtgacactgtggcctcctccacaggccggtgcaggctgtgagtgtgatactgtggcctcctccacaggctggtgcaggctgcaactgcccaggttccagctgtgagctttctgcagttggcagatgaaatgaaatcggaagttcagcagactcctcttatgcatttggatcaggcttccgctcataaattcaaggaaagctattaaaattgtttagccagctcatctggagttccgagtaggctcaggacctgtaggctgtaattcattttaggagctgttttataaaacaagtactttgaagatttctgcacagagaatgaaatattacaaaaatcacttgtgccacataggaaaaatggaaaagtgagatcttttatagaggaaataatttgttttttctttttgtcctcaaagttagagaggtagattattctgaagaactcaccacttttgcatatggaaatgtgctaccctacgctggcgtaagacgcggcggtggagacgctacg

SEQ ID NO: 7705 - DNA, 436 bp, Homo sapiens
  source 1..436: mol_type = other DNA
caaaaatcacttgtgccacataggaaaaatggaaaagtgagatcttttatagaggaaataatttgttttttctttttgtcctcaaagttagagaggtagattattctgaagaactcaccacttttgcatatggaaatgtgctaccctacgctggcgtaagacgcggcggtggagacgctacgctggcgtaggtggagacgctacgctggcgtgcgctactagcacagaagaagttatttaaccacatcttaatctctgaattgtaaagaacagtaatgagtctttcattttttgtgcagattaattcagtttctgcaaagtgcttagtattttgcctaaaactcagcaagtattgttgtcaatttttactgcagaggatatgacttagaacctggtgcccgtcatcaacaggtgaggcccacctgacagatggggg

SEQ ID NO: 7706 - DNA, 342 bp, Homo sapiens
  source 1..342: mol_type = other DNA
gagccttaagcctgcgtctgcaggggccagcctaacatgggtcaggggtgagcccagcatctgggtccacatggcccagcatggagccaagatctctggaggctgacctggttctgcaggggatggcctggattctaggcccatgggtgccaacttggagcctcaggctagagctggagcaggcctctgaagccccaggggctgacctggtctggggctgaggccacagaggctggtctggcctgtggcaggcctgaataggttctatcttaactgtcccatctctctactgtgctgcccggataggatgttcatggaatatgttgtgaagccaagcaaaat

SEQ ID NO: 7707 - DNA, 115 bp, Homo sapiens
  source 1..115: mol_type = other DNA
cgtatttagcatctagtaccttgatcatccagtacctgatcgggaaactttctaatgtctcttcttgacagcaggttaaaaggcactgaagccgtcatcattccctatgcattgc

SEQ ID NO: 7708 - DNA, 378 bp, Homo sapiens
  source 1..378: mol_type = other DNA
agtgtcccacttcccactgtccagtgggaagactccctccaggacaaaaccaccctttccttcagggatgtgacgtcccaggcctgtcatcccagcagaccagtctgaccagcatggctgtagtcccagctactccggagaggttgcagtgagctgagatcgcgtcattgcactccgcaagcaagctgaaatagcttatttttctgttttaaaaaatagacttttagtgttcacaagtaagaataaaaaaaatcctatctgcttaggcctctgagaggcagcgtcaccgcaagagccaggctcttattgcaaatcaatgaatccattagactttccatgttttctttttagactttgagattcaaggtcagctagaat

SEQ ID NO: 7709 - DNA, 440 bp, Homo sapiens
  source 1..440: mol_type = other DNA
gcctgtcatcccagcagaccagtctgaccagcatggctgtagtcccagctactccggagaggttgcagtgagctgagatcgcgtcattgcactccgcaagcaagctgaaatagcttatttttctgttttaaaaaatagacttttagtgttcacaagtaagaataaaaaaaatcctatctgcttaggcctctgagaggcagcgtcaccgcaagagccaggctcttattgcaaatcaatgaatccattagactttccatgttttctttttagactttgagattcaaggtcagctagaattttggctagcaggcacacaggcaaaatcaagttctacagtgtatgtcacttgtttgaatacgaaataaaattaaaaaaataaattcagtgtattgagaaaatattagattttaatttgttacataacattgagaactagtaca

SEQ ID NO: 7710 - DNA, 566 bp, Homo sapiens
  source 1..566: mol_type = other DNA
tgacctcaggtaatccgcccacttaattgtaatttttaatgaacattttgatactggtactttcaaagaaactttaggttatttgatatttttcttggtctggcataaagtatatgaggaaaatgaaaatttcaggcttcgaagctaggaacactgtttcctagcacttttacattgctgccatgtatccttacagaagtacatacatttttatcatctgcaaatattgagttttacttttttctttgaaaatgtcatttcattatcgtgcaatacacaacggaagacagtccttggttttttcacattttactaattatgaggctaacaggtgagatagtatcttattcccattttgatttgatcccaggcagcctggccctgctgggtgaaaagacggcctcgccgtgcgcccacgaggagaggcctctgggacaccgtccccagggcgcggcggctgggcccggcttcccgcaccggggcgctgtcggcccgtggtgcggggttcgagctgcgggcggggaatccaagcgggctcgcggcggacaccaggtgtcacctggccg

SEQ ID NO: 7711 - DNA, 595 bp, Homo sapiens
  source 1..595: mol_type = other DNA
ttccttcgaaggatctgcttgtgcacgggcaccgaaaagcagtggcggtctgcagcgtggcgccaaacctgtagctgggactttgactatgacagtaagagccactttttcatctcactaaagtgtcacttgagataaacagtgaggttacaaattctgtccagtcaaaatgtgtgtactcttcattagagacaagtatgctcagactgaaatccgtatgattattttaattaagaaattgaatctagtcatgtttagttaatattctggagagatcatttcattttataattgataaaggttctcatctataattttttgagtttattaatatgtcaaaaaaataatcgggagcattttcatgctaggatttttaaaaatatgacctggcgaagtggaaatatttatattagtgacctaacatatatttgatgcttttttcttttaaagctgtacatactattttaaaacaaaattttagcagcctttctaatgatacccataggcatgcttatggttcagtcattcatttattgagtaaatctcagagcaaaagtgtggatctctttccaagaagcctctagaggaaaagcct

SEQ ID NO: 7712 - DNA, 348 bp, Homo sapiens
  source 1..348: mol_type = other DNA
cacacctccctgcaagctgagggagctggctccggtctcggccagcccagcaaggggctcccacagtgcggcggcgggctggagggctcctcaagtgccgtcaaagtgggagcccaggcagaggaggcgccgagagcgagcgtgggctgcgagggctaccagcacactgtagaatctcactcatgtgcacagagctggaaagagccctggggcgccggcctcccgcatgctgtggaggaccctccaaacggagaggtccccttagcgaagtgcgcctcggcttagtttacgcgcgcttgggcaccggggctgctctggagcgcccctgacggcacggccggggaagtg

SEQ ID NO: 7713 - DNA, 555 bp, Homo sapiens
  source 1..555: mol_type = other DNA
ttagtggcattaaaaatatattccacagcagaaagacgacgcattctttataaattaaacctcaacagtgtttgcatttatctaaatggatattatttctatcactagggatgacttataagcttcagagtgaaaataaaaatacagctccgtgattttcagtctgcagagactgtgaatttcggctgcagaagccgcggcgtgggaaacgccgccggaggggctccgcgagccggggaagtgcgcgcagcggggctccaggcggctccaggcgctgagtgcgaggaacgcccgcgctcgccggcgcccgggagacgcagccgaaggaggagggcgggcgtttcacccgcgccacagctgcggccggccagagagaccgcagaggccgggacccccgcagcctccacggccgctgctgccactgtcggggtggcgcgcccagccggagaatcccgtccgcgcccggggcggggggcgaggcggggcgctgacgtcacctcccctcccccaccgcctccaagggggagggagtggggaaagaggcagcgagtcgcc

SEQ ID NO: 7714 - DNA, 517 bp, Homo sapiens
  source 1..517: mol_type = other DNA
ttcactagactgtagccaatagtgagcgttgcctttagcaatacagtcacattaatggctgagatggagcctcgctctatcacccaggctggagcttagtggcgcgatctcggctcactgggttcaagcgattcccatgttggccaggctggtctcgaacgcttgacatccccccgtctcggcctcccaaagtgctgggacgacaggcgcgtatttgttcaacagacatttattgagcgctcaccacgtgccaacgccgggcgtctgggctctggaggcgctgccacgtggcggatgcgcagtgcccggcggccgggctgaggggtgaacgcgggggtcagggggccccgggctgagggtttgcgtgcgggccgggtgcctgggggccccgggctgagggtgagcgcgccgcccaggtgccaggcggctccgggcagagagtgaacgcgcgggccaggtggctccagggcggcgccccagggcggggccggccacgccctccctaaccctggcggag

SEQ ID NO: 7715 - DNA, 405 bp, Homo sapiens
  source 1..405: mol_type = other DNA
tgcagtgagcagaaggcaggccaggacaggagctgactcccgagcagggcactttgtggttcactgtgcacagtctccacaccatatgtccgaaaaaatgtctgcacacttcatttctgtccagtaagaactgaaaattttcaatgggtgaaaataagtgagcaaaattacatttatactaaaatataattctttccagcaacttccaattagaatgtcattttagatgctttccaaattttgttgggatgaataaaattaaataaaattaggctttggagaaaaggactatgtattacagttttcttccaaaagatttggaccaaatttccaattcagatattattagagatcatcaaaactcaattatgtacaataaccagttctcaaaatgggttagagcta

SEQ ID NO: 7716 - DNA, 201 bp, Homo sapiens
  source 1..201: mol_type = other DNA
caggctggagtgcggtggcgccatctcggctcactcccgagtagctgggagattgctcactgcacgagtagctgggattatggtctcgatctcctgacctcgtgatccacctgctgggattgcaggcagcctaatacattgtggtcagtgtaagatatatatatctatatatagatatagatatctatctattatgacgtg

SEQ ID NO: 7717 - DNA, 217 bp, Homo sapiens
  source 1..217: mol_type = other DNA
aatgtgtatttactatgtgctgggcacattaaatttaatcttcacaaagacctgattgatttaattattcatacctgttagacaggagagccctcctgttctgtgcagggctcgcactgtcgcccaggctggagtgcagtggtgcaatcttggctctggcagggccaccggcacccggccgtggacacaggcttggttagccttctagtcattgttg

SEQ ID NO: 7718 - DNA, 409 bp, Homo sapiens
  source 1..409: mol_type = other DNA
caatcctgactccatggtgccaccagggatcacgaatttaataagatcttcgtggatgctctgatttcattcaaggcttcttctgagcctgtacacagtcgcgcgaggcgcagtcctgagtgacccacgcacgagtggcccgcgcttccagccgcgccgccgcaggccagcgagggcagcctgagccgcttcccgccccggcgaggaccgtcgccagcccgctgctctagcaggaggcggttccacagcgcacccggcagcccagccaccgtcagcaccgcgcctcgggcgggcttttctcccttccgggaggcgcgaatcctcaggggctccttgagagggcgccagggagcagctgcgcgcggatgccttttggccctctgcggccgccgtagctccccggcagaaa

SEQ ID NO: 7719 - DNA, 512 bp, Homo sapiens
  source 1..512: mol_type = other DNA
cagagacagactccgcgatgaggcagctgttctgaacctggagctccaccacaccttcactgaggcagttttgaagtgtgaagacaggagctgatgttcagaatctactaattaggttagcactgactcaacctaatcaattcaattttattgcatttgatctaattatcttccccatttttaaggtaggaagggccatttttatttcatcatatatgtgtggacctaatacaatcaaccataatttgacatttgttgtttccaagcatttaagaaattataatatctatgcatacaatgttaacactatgtataataaattctctttctgtgcaaaatatataacatatgacaatataggcatgtttaattgtgcatcttgaaaggtgaacaggatcataaatccttccaggtaggaactgggacagaaataggaagaaatgcttccccgatttctggacaccatgacaggatcctgaaactacagcaagaaacttctgattgaggctcta

SEQ ID NO: 7720 - DNA, 461 bp, Homo sapiens
  source 1..461: mol_type = other DNA
agatcccagggagactgactgcctgctgcataggagggaggctcccagctgtgtccctgagctgcataggagggaggctcccagctgtgtccctacacagaggccctcctggacggagtggaccttatgctcgctggtgccaccagacaccccgaggcaccctgagttgtggggggggggcgcggggtggcacgtagttcccacagcggcccctggacggaggagagggcctgggccgtccacacctgcagtgcaacgtggcagtccccgagctccgggcccactgccgcccgcgctcggggaggagccgcccaggtgggcgcgtccggggctaggcgggagctgcgcagccgggtccaggggagacgccccgccccggccggaccctcggagcctcctaggggagaccccggccccgcccctctctcgcccggatcgggcggggccccgggaacgcgcgc

SEQ ID NO: 7721 - DNA, 513 bp, Homo sapiens
  source 1..513: mol_type = other DNA
cccatggacctgagtggcagtgtcacggggagaggtgagtgcagcgtgctgcagctttccctgccgcacaggcggcagggttgcagacaggggggcggaggctcctccattcctggccactcgtctcaccccagatgcgaggcgaagtgtgggagcggccccagaggccactagtgaggcgcaggggcctggcctgttctctgccccgttgactggggaggtgcccagagctgggacctgcccgctggcctcaccggccgccagcacgaacgctttctgcagcatggagcaggcttctctgcccagccctgccatgggcacgggctgcctttctgtgtcggctgggtgcctgagccaagcagctcccaacggctgggtgcctgagccaagcagctcccaacggctgggtgcctgagccaagcagctcccaacggctgcgtgccccgaggccgggcagacgcaggtgatcataaggccccgtggcagggcccccagggcaggctgctcacaggc

SEQ ID NO: 7722 - DNA, 840 bp, Homo sapiens
  source 1..840: mol_type = other DNA
gttttaaaaactggcacagctgcttttaaacactggcacatttttggtattttgcgcttgctcgggcgcgccacgcttcccaccggacgcccaccgggccgagcccggccactcgcacccacccgggcggtctcacccgccccgccggccccacccacgggctgcgggctgctcctcaggacaacccgcacagagggcggcagaggcccagcccagccagggcggccaccggccgctatccgcccgggtgaccttgggcagacacgactcctccccgagtccacctgccaggcactgaggcgaggggctacctcagcccgcggggtcccaggaccccaggcccggaccaaggcggcggaggggacgcccagcaagcccgcggggttgtgaccttcacctccccgggtccccgagtccgccccgcggcttcccctcgcaccggcccagggctctctcagccccttcccgatcccgggacagagggcgcagggacccggcgcccgctccgctcggacccgctggggaccgtcccgctcctaccgccgcctcggcccccgcctgccccgccccggtccgcggcacggactcaccgccttggccagcgccaggcgccgagcgctcagcagccgcgacaggccccggacccccgacatgtctgctgttgccgccgcgcagtcccgccagtccctgcgcagactgcgcctgcgcaccacaccggggtcgagctggcgggggaggggggataccgcgcctgcgcaccacgccggagtcgagcggggctgcagtgggggacatcgcgcctgcgcaccatgccacgcccggagcgggtactgagtgggg

SEQ ID NO: 7723 - DNA, 590 bp, Homo sapiens
  source 1..590: mol_type = other DNA
gagattagcaattgaacctttaaactctctggagaaccctcatacagttgtatcaaagatacagatgccgggctcagcatgcaccctccatagctagttagtaagaatttactgatttactgagtacctacacgaagtttcacattttcacaaagtagagtcactttaagtttgtttacatgtgacctccacaaacacacacaattacaaaatagtttagttaatcaagggatgtagaggtcggaggccccgggccgctcccgcccacctccgcggacgagcgcccccctccgaccccattccctgcggtctgggcgttcaggcccttcggtctgggcgatcccggagcaccacctccccggaacagggcccgctctacctcggtcggggagcgcgggacctcagcgttcccttaacgccaccgtccgcgggtccgctttgcgcaggcgcggcgcccccactcagtacccgctccgggcgtggcatggtgcgcaggcgcgatgtcccccactgcagccccgctcgactccggcgtggtgcgcaggcgcggtatcccccctcccccgccagctcgaccccggtgtggtgcg

SEQ ID NO: 7724 - DNA, 308 bp, Homo sapiens
  source 1..308: mol_type = other DNA
tgggcacttcccaattccgggatttggtgtccagcacgaaggcagtgctgtcttgcgggaggcagggctgcaccaccaccggggtgtgaaggggcccagcagcagctgcacggggtcaggggccgcgctgatgcagagcacaggcctggagtgcaatggcccagtagctgggtccactggccttggcctgtagtgcagtgagctcggctccctgcggccttgacctcccgggctcaggcaatcacggagtagatgggacatccatgctgcccaggctggtccgaactgctgggctcaagagctccgcc

SEQ ID NO: 7725 - DNA, 378 bp, Homo sapiens
  source 1..378: mol_type = other DNA
aggcctggagtgcaatggcccagtagctgggtccactggccttggcctgtagtgcagtgagctcggctccctgcggccttgacctcccgggctcaggcaatcacggagtagatgggacatccatgctgcccaggctggtccgaactgctgggctcaagagctccgcctcacttcctgtcccaggtcgcggggccggcctggcacagcgcgcaggcggcctgcgccaaagctctggcttcctccaggcgcccagaccccgccctccccgcaggcgccagggcgttgcctggcaacttagctgcgaggggattggctgcgcgggaccccgtgaccatcccggagaccacgcatttcctgcgcccccggaagtggtgataa

SEQ ID NO: 7726 - DNA, 378 bp, Homo sapiens; identical to SEQ ID NO: 7725
  source 1..378: mol_type = other DNA

SEQ ID NO: 7727 - DNA, 408 bp, Homo sapiens
  source 1..408: mol_type = other DNA
ctgagggactgtggcatttttgtgcataaaaaaaaaaaaaaactgtgtgtctacacatctcctgaccttaaaaatatttttttagttcatttttagtgagtatggacagtacagctttcctattcagtttcactttctgaaatgggaattcgtgaagtcctctaacaaaactaagtgcgaacttctcaacttagctggtgactgcatccttgaaaaattctgtgtgtaaaatgatacagaaccatttcttggttatctgttaaatacgcgatgactgtggacggccttggaggtctgggaggccacgaaggactcccacacacagcagggtgtgaacccaccaggcagtgctttggccccctcccaggagtcatggcagccgacacgtcacctggagtgtcccagaaa

SEQ ID NO: 7728 - DNA, 412 bp, Homo sapiens
  source 1..412: mol_type = other DNA
actgtgagattcagaagagattccttgcctcctgagtcagtaaggatatgccacagtcacgaaggaagggaaggcggcaggcggggcatgccctccggggtgcccgaacacacctgagagccctctccctgtgggaggcctttttcaggacagcgtgcccttcagtccctcctggcaggtgggggcacatcccccagccacctggaaccaatcattcagaattttcttatctaggctaataaacataataaaatcaataagagttaattcacaggagtgactaatggcatcaccatggaagtgtctcagttctgagtgcctttgagggaatttgcacttccgttcccacacagccttgcattgtgtgtgttcaggaggggtgagtgttggcacatacctcccgtctctccca

SEQ ID NO: 7729 - DNA, 478 bp, Homo sapiens
  source 1..478: mol_type = other DNA
gccgtagcctctgccaagtcaactgtcaccccagctggaatgtggtggtgtaaacagctcactgcagccttgaccctgaggctcaagcgatccttctgccttggcctcctgagtagctgggaccatcacccaggccagagtgtggtggtgcgaacacggctcactgcagcctcgaccctcaggctcaagcgatccctggcctgctgacctggcctggaccctcggcttgaagccctcgtgatgtcacaagccctctggctgggcatcccctgcgctgcacatgccccaggtggcccccacagcagaggcgagccactggagggtggagggcttccacgggacgggcccaggcccccaggagactcaggagaccagagcctggggtcaggggctcagccaggggctcagccagggctggatgtccggagccagccccgcagctccctgtgctgggctccatcagggagcccagaagacg

SEQ ID NO: 7730 - DNA, 709 bp, Homo sapiens
  source 1..709: mol_type = other DNA
ggactccagggaccaccgactccatggccggccccagcgagggcgagacaggctgaggtgtccccagggatcccctgagggtacagggccagggcctgcgcgcccggacggtcggaggggccggcgggcgcgcagagggcgcggggtgagccctaaggacctgcaggcaggaccctgctctcggccgcgcggtcccgggtgccgaccggcggggtgggcggggcaggggcacccagggccgcacacctgccgcgtgggaccacgtcgcacggacgaccctgccgtgcctggcgcgcgtccgcttcctgggaagctcaggatccaaaagcatcttacaccgcccggctctagggccggcagctcagcacagccggccgcgagcgctggggaggggacgggggcgcagggagaaccgggggaccctgggcgcacacagaccccagggggaacgcagggcctggaggggctcagcgcgcgacccccgcctcggggcacggagactccgggggatcactgggacgcgaagggcgcagggcggaccccaggggaaccggatggcgtctccggttcgccagggcagctggggcagccggacccgagacagccggacccgcgggcgccctctgccgcctcccggccctggatgctgcggggcggggcgggcggctcgcgtgccggggtggggcagtccctggagccgccgcgggtt

SEQ ID NO: 7731 - DNA, 832 bp, Homo sapiens
  source 1..832: mol_type = other DNA
gccgcctcccggccctggatgctgcggggcggggcgggcggctcgcgtgccggggtggggcagtccctggagccgccgcgggttcccgggatgcgagcgccggcacccgccgccacagctcctggccagggcgcgctgccccgcgggtgtgcctgagcctccgcgccccgcaggccctgggtaagtgtcctgggcgcccccgcaggcccccgccgcgtgccgcccgcggtggagacgggatgcgctcccgggtgtggggctgagggacgggcgccggcgtcgggaccctcctcacgccgcatcctcgcgtcgccaggcccggcggccccgggacggggcggacactctggggtgcggctggctggtctcggacctcggagggaagccgcggcgcgtccacggttcgtggtcgccttcactccccgggcgttccgtgcgggccgcgctccctggggctgggcgggtgcgggcggcggagcggggccccgctgtcgggccgagggcgccaggtccggggggcctcacccccgggaaaggcccatcctggagtccacgctgggaccccttctggggaggggtcgccatgggcgcgtgacaggcaggggccaccctctgacctcttctgcgaggccggaggtcagagaccttgtgcagaagcgtcccacgggcctgtcccacgggcctgtccggctgtggcctccgggatggcaagggcaggcggggaggggcttcctccctgggcctcctgtgcgcgcgcacaggctctcgtcttgcagaagggtgggcgtgtgcgcgcgttctccaaacgccacccccacggggcctcacagcc

SEQ ID NO: 7732 - DNA, 615 bp, Homo sapiens
  source 1..615: mol_type = other DNA
gctccaacctatgaaagactttgtcagttggtgtgtcaaagccagcatcttttatcaaacagacaaaccctgaacgctcgtggtttagcacgtgctcgaagccaagtgctggccatgggcctctcctccaggaagcgactcaggaccggccctctgcagcgcggcccagtgacgctgctgggcctctgaggggccccggaaacatccggtggccacccatcccactggcattgttcccacgagggtgccaatgactgcgctcctggaggggctgagttcgtctttgggtccaggaggtacccaaagccacctcagtccgcgggaaacgagggacgcccctgccacactgcagtggaggatggagacagcggctctggggctgtcttctctccgcagtcacgctcggcggaggcgtccaggactgcgcccgccctggggaagggcgcacgcggtggtcgcgggacggacaagaagccccccacctcggcggtttccctgtcctgctggggagcggccatggggcaggtccccgagctgaagtcgctcggccgggagacgagtacccgccccgcgggagggcccggacccgtgcttccggcgccgttgccggaagcg

SEQ ID NO: 7733 - DNA, 555 bp, Homo sapiens
  source 1..555: mol_type = other DNA
tatcaccccccaggctgtgacataccagggatgttgccaacgttctgggtgcccctagacaccaggagaaaggcggggaggggacacccctgggggtctggattcactccaccaggcgctgggccacagtggtacggtgacacagtagatgtcttgagcaggattaaagtcttcccaataaacaggctgaactctgtcttccttgaaagctctgtagaaggacctgagccacagtgctgggcctgtgacatctctggctggggagaagctcagctcccgcccacctctgggaggcccggggctggacgggaggtgcagcaggctcccccgggggtccccgggggcgctgggagtgtggatggggcagggtccccatgcccaccaccagccgcgattccaccgcgcctactcggggtttccccgggaggacaccgcgtgtgtcaagggccggggcctagaaggcggccgcgcccagggaagccttgacagggagctatctccctcgccccgccgcgcaggccccgccccgtcccgccaggctctcggtgcctcgcc

SEQ ID NO: 7734 - DNA, 780 bp, Homo sapiens
  source 1..780: mol_type = other DNA
gggagccaactcctgcggagggccgggcagccccgggcggaatgagccccctccgcaaagcctgtctggggagcgggggaggggcgcgctgcatacgggcgacctgcagggagaacggaagctgaggccggggtcaggggtgcgcgctccgctcctccactcctgcgtgaagggcggcccactcccgagcagctgcgctgggcgcccggcacggacccgtctccctgctcaggtcgcccggccgcgctgcccccacctggaagcccagtcccctgggtgcgccccgccttggggtccgagcaccctcacagcccggccctgcccaccgcttaaagaactgggcgcggtcggggctcgccccgcaccgtcctcgaggccccgccgcgcggcccccccgccgcaccgtcaacgcgcgtcctgcggggcggagagatcggggtccggtcgtccccggggggccccagagccaggtgaggggccccgccgccccctgcccagcggttcccacgacccgcgggtcggccgcgccctgcgctgagcggatacccggcggtccgcggggcctgagcagagtcggcgaggtctcggtgcgcccgcgcgtccccgggccgggtggggcggcgggggcggggctgccaatgagcgcgcggggcgggacgctgggcgggcgccggacgctgggggccgggggcgggcccgggaccgggctgggcggggctgggcggtgctgggcgggacgggcgggcgcggggcggcggctggagagctccgctgagcacc

SEQ ID NO: 7735 - DNA, 783 bp, Homo sapiens
  source 1..783: mol_type = other DNA
ccccttcctcctggggggctgcgcctcggcctcctccagggcaggtgcccctgtgcccctgaagtcccagcacccagcaccacagactgtcgtctcggccccggaaccttgtggggagccaactcctgcggagggcccggcagccccgggcggaatgagccccctccgcaaagcctgtctggggagcgggggaggggcgggcgctgcacacgggcgacctgcagggagaacggaagctgaggccggggtcaggggtgcgcgctccgctcctccactcctgcgtgaagggcggcccactcccgagcagctgcgctgggcgcccggcacggacccgtctccctgctcaggtcccacctggaagcccagtcccctgggtgcgccccgccttggggtccgagcaccctcacagcccggccctgcccaccgtccttaaagaactgggcgcggtcggggctcgccccgcactgtcctcgaggccccgccgccagcggccccccgccgcaccgtcaacgcgcgtcctgcggggcgcagagatcggggtccggtcgtccccggggggccccagagacaggtgaggggcctcgctgccactgcccagcggttcccacggcccgcaggtccgccgcgccctgcgctgagcggatacctggcggccggcggagcctcagcggagccggtcttgtaaggctgaggtctcagtgcgcccgcgcatgctccgggcctggtggggcggcgggggcggggcggggcggcagggggagcgctgcgctgagcacttggtcg

SEQ ID NO: 7736 - DNA, 578 bp, Homo sapiens
  source 1..578: mol_type = other DNA
acgaagaattgttaactatttctcaatgtctctcttctcaaagaaatacatttaatatcaacttcattttctgaaggtttttcggccgttgagtgtctctggccaggagcagccgcagcgtgttcagaacctcccagccactgtccacccgggcggagaccccagccccgcgtggctggacgggcttccctgtcctgtggaaggggagacacacaggaccctgtgagtgagctctcgggtcctgctcctctgggaagctcagagaagcctctcagggaggatctggcgtaacggctcacgagctcttcaggcattgcctcagtagcactccccagaacgtaacaaatcctcaggggaactgatgggcggtcgcgcgggcactgggtcctccacaccctggagagccccctgggcggggccctgcaccgactccagcccagcccctgctccctctgcggggaacgtggccccaggcagtgctgggccattggctgtcagtgctggtcctggcggctgcattcccagtccccttggtctctgtgacagtgggcggggccggccctcccaggatctgacgg

SEQ ID NO: 7737 - DNA, 326 bp, Homo sapiens
  source 1..326: mol_type = other DNA
gcgtcagcagctggcccgcatcggaggcattcagataggagtccttggggaccccccccagtccttaaacacacttgctggcccttctcaggccgagttaagccagtgaccgaattcctgctgagactccctgcactcgcaaccagctgcgcaggtccctcccccggttcctcctaggctgagtaccattttgttgcggaccacaacgcgttgcaatcctaggggcttttcaggtatttgacttaagagctgagtagctggtcatcttagactttggggcccatccagctgaggcgccctgggttccatggctaccgtgtcgacca

SEQ ID NO: 7738 - DNA, 375 bp, Homo sapiens
  source 1..375: mol_type = other DNA
gcctgttgaaggacgccctccactgggaagaggggtgctgctccacaccctatgggacactgcacagtacacctggcctgtgtcccccacagcgagagctggccctgggcaggcgtggtccctgcgggttgggatcctccacagtgacagacggtgcgctctgccctcacccctttgcagagagctcatttccctgcggtcgaagtaaaatgaggggtggtgaattacacccctgctggttacacatgaaaactcagggactggggtgctggctgccagccaggcggtccctcagcccctggagaagcggggtggggcctgcagatgcagaataattcagtatttggcgacttgaagtcggagctgctctactcg

SEQ ID NO: 7739 - DNA, 456 bp, Homo sapiens
  source 1..456: mol_type = other DNA
tgctaaagcactttaactgagtttgcactgcgttgaaaaataggaagtctgtctacttggcttacacttaccctttattttaataaaagtgtcttagatgctttgagacctaaaaggagcggggacgctgcctccaggtgacttggttgtccccacctcacgtttgagcctgctgccgggacaggatcaaccggttcctcccaggcggcaaggtagtgctctgtggccaccgagagagggtgccacgtggccccagactctctgtggctgtgtgatctagcacagccaccgggatccagaggtcagcgtggggccctgacgggaggtccgggaggccacgtggtcactgacctcatttccttgatggaggccctgccagttggatccgacagatggtccataatagttgtggtggtggggcccactcagctgaccacgttctagacccagtgtctt

SEQ ID NO: 7740 - DNA, 409 bp, Homo sapiens
  source 1..409: mol_type = other DNA
ctgtgctaaagcactttaactgagtttgcactgcgttgaaaaataggaagtctgtctacttggcttacacttaccctttattttaataaaagtgtcttagatgctttgagacctaaaaggagcggggacgctgcctccaggtgacttggttgtccccacctcacgtttgagcctgctgccgggacaggatcaaccggttcctcccaggcggcaaggtagtgctctgtggccaccgagagagggtgccacgtggccccagactctctgtggctgtgtgatctagcacagccaccgggatccagaggtcagcgtggggccctgacgggaggtccgggaggccacgtggtcactgacctcatttccttgatggaggccctgccagttggatccgacagatggtccataatag

SEQ ID NO: 7741 - DNA, 425 bp, Homo sapiens
  source 1..425: mol_type = other DNA
tttttgtttctttttatgaacgcttaaaaaacatataagccatccttgaggaaacctcaggccagaggacacctgggatgaggccctggaaataccagctctcctcctgagctgtgaacaccaggagagtctctaaaagtgcacccttgcctggctgtgtccggcacgctcggactggccgatctgggggcggctcctcttcctgggcggcagagtcaacaggagtaggcgggatccggacaggtctgcccaatcccctcgcagttctcaggggagggcctcacagagaccctggcagggtctgctgaggaacagcacacccaggatcctggaactgagtctgcgggccacgcaggcgcactctgcctgggtcctgggaccaggctccccacgggctcctcgtgggcagcgtccgggccaccgcc

SEQ ID NO: 7742 - DNA, 585 bp, Homo sapiens
  source 1..585: mol_type = other DNA
gctcgggcccggcagggccacttcctgccgcggccccgcctcgccccgtttccggcgcggcccagcgagctcggcaacctcggcgcagcgagcgcgggcggccagccagggccagggggcggtggcggccaaggtccgaccgggtgccagctgttcccagcccccgcctcgggcccgccgccggcgccgccatgggcaagaagcacaagaagcacaaggccgagtggcgctcgtcctacgagggtgaggcggcggcgctttgtgacgcgcggcgggcggggtcccgggcacgggggaggagttccgggcacgcggacgggggtcctgggcaccgggcgaggtcctggccacgaaccgggcacacgtggggttcgaggctgcaagcccactcaccccggtcagggagaagctgggctgccctttctcccccttgctcccgcagcagctccatgggtgtcagcgggcagcacgggcgcctgcaggaaagggagatcgggctccggggttccaggtccctcttaatccaggacctgaagctccctgcggaggagaacaaggaggcagtgacatgccgccactgtggtc

SEQ ID NO: 7743 - DNA, 791 bp, Homo sapiens
  source 1..791: mol_type = other DNA
cccatcaatgcactgccggggcaggggcagggtcagggccaggtccgtgagctgaggtcgggtcggggctcaatctgtgagctggggtcctgcgcgcagggctcgggtcggccgggtcagtgccctgcggtggggtcgcgtcattgcgctaggatccggtcggggcccggcggcctgtgcgcccgggtccagtcgggccggatcagtaccctggggttcggtcgtgcgctggggtcggggctcggtgcacgcgctggggtctgcccagaggatgtgtcggacaggtccggctcacctgctgccgcgctgatgcacctccacgtggaccgttggcgactcggccaccttcaggtcgcccacggcctcgtccatggcgcccccgagagcagtggggacccaaccagggcgcggccgccgccacctcacgcccagcgtcgccgccacagccgctgcctcagcccgcgggccccgccctagcttcgaatctgccgcgcgaggcgcaccacctcctgacccggaagcgctcgggcccggcagggccacttcctgccgcggccccgcctcgccccgtttccggcgcggcccagcgagctcggcaacctcggcgcagcgagcgcgggcggccagccagggccagggggcggtggcggccaaggtccgaccgggtgccagctgttcccagcccccgcctcgggcccgccgccggcgccgccatgggcaagaagcacaagaagcacaaggccgagtggcgctcgtcctacgagggtgaggcggcggcgctttgtgacgcg

SEQ ID NO: 7744 - DNA, 404 bp, Homo sapiens
  source 1..404: mol_type = other DNA
agtaactggagtcgtggccggatcctgagagttcagtcacttcacgaccacagtggcggcatgtcactgcctccttgttctcctccgcagggagcttcaggtcctggattaagagggacctggaaccccggagcccgatctccctttcctgcaggcgcccgtgctgcccgctgacacccatggagctgctgcgggagcaagggggagaaagggcagcccagcttctccctgaccggggtgagtgggcttgcagcctcgaaccccacgtgtgcccggttcgtggccaggacctcgcccggtgcccaggacccccgtccgcgtgcccggaactcctcccccgtgcccgggaccccgcccgccgcgcgtcacaaagcgccgccgcctcaccctcgtaggacgagcgc

SEQ ID NO: 7745 - DNA, 600 bp, Homo sapiens
  source 1..600: mol_type = other DNA
gaccacagtggcggcatgtcactgcctccttgttctcctccgcagggagcttcaggtcctggattaagagggacctggaaccccggagcccgatctccctttcctgcaggcgcccgtgctgcccgctgacacccatggagctgctgcgggagcaagggggagaaagggcagcccagcttctccctgaccggggtgagtgggcttgcagcctcgaaccccacgtgtgcccggttcgtggccaggacctcgcccggtgcccaggacccccgtccgcgtgcccggaactcctcccccgtgcccgggaccccgcccgccgcgcgtcacaaagcgccgccgcctcaccctcgtaggacgagcgccactcggccttgtgcttcttgtgcttcttgcccatggcggcgccggcggcgggcccgaggcgggggctgggaacagctggcacccggtcggaccttggccgccaccgccccctggccctggctggccgcccgcgctcgctgcgccgaggttgccgagctcgctgggccgcgccggaaacggggcgaggcggggccgcggcaggaagtggccctgccgggcccgagcgcttccgggtcagga

SEQ ID NO: 7746 - DNA, 510 bp, Homo sapiens
  source 1..510: mol_type = other DNA
gaggcctggcagggccggagctgggcaggtgaggggtcccgcaccgccagcctcggagctccaactccagggacgggagctgccctggcagacacccagtctccagagccagctggaggagcttgagatgaggccaggcttggggctcctgggaggctccaacaccctcaaggcatgcagggcccttccagccggggccggggggggccaacgctgggggcggggatctagtcctgccggataccacccccaccccctctccagcagccaagggaggcgggtcctccctttcaaagggaggtgccctcaggctcctctgtgacccaggacggcctggtgaggggtcggagctgactcccgccaggctccgctgcagcacctgaccgcccccacaggtggccgggccgggtcctcatcgctggtggggctccaggctgggaacgggggtcgaggccgatgcgctgcgggcagcggccgccgggggcgctgcgggggccgcggttaaagccc

SEQ ID NO: 7747 - DNA, 334 bp, Homo sapiens
  source 1..334: mol_type = other DNA
ttctggaacatttcccaaggccctctactgggttaggtccctaaactggagctggaccaagctccggaaaggctccttccactggagttgcctttgcagccaggttgggctagccaggagccaggctaggagcccagggtctgagcggagcgcaggcagcgaaagccccgcgtcccgggtcgcggcggtcagacagacgcagcctgggttggggtccctgcaggaagtcgccgcgggccaacttttcgtggggccgcggggcaagcaggtgaagtcacgtggcccgggcggggcggggcggctcggtcggaccccgcccctgcctccaagtccc

SEQ ID NO: 7748 - DNA, 695 bp, Homo sapiens
  source 1..695: mol_type = other DNA
gctgtcccatgcccggcacaggggtggctgcaggttccatgacacaggaccctccatcccccgtgaccccagagggcccttggggacgaggctgccctagagggtggctctgggtcctgaacctatggccgggagctgaactccccagctcagccagggatgggatccgggcatccaggctcattatgaagttcattacgaaccccagaatgaaactgtggcccagggggcaggagccgtggttccgtggggactggtgggaagccgggcccccgagcagccgtctagagcccagagccaggctggaggggtccagggcctcgctgtgcttggtgtgagcagaccaagagctgccccagggcccctgctcccgctgagttccctctccctggactggggtgggggccggggatgcctgtgctccagggagctgtggagaggcccacccggcgtcctgcaggtgggggtgtgcggcagccaggggctcccagaccggggcagagccagcagggggaggggtggccagcgcccacggagcagcctccggttgcccgaaggcagtgggtggctctgctggccccggggccgggcgtctctgcagataaggcattaacagtccctccgcagacgcaccctgcagatctgctgacgactggctccgttctgcccaggtgcctggggcgaggtgccagtgc

SEQ ID NO: 7749 - DNA, 640 bp, Homo sapiens
  source 1..640: mol_type = other DNA
tgctgggctggaagtcgggcctcctagctctgcagtccgaggcttggagccaggtgcctggaccccgaggttgccctccaccctgtgcgggcgggatgtgaccagatgttggcctcatctgccagacagagtgccggggcccagggtcaaggccgttgtggctggtgtgaggcgcccggtgcgcggccagcaggagcgcctggctcaccgccccggtggggacccctcgggaggcactccgggaggtcccgcgtgcccgtccagggagcaatgcgctcgcattcgtggtgcccggagcccgacgccccgcgtccggacctggaggcagccctgggtctccggatcaggccagcggccaaagggtcgccgcacgcacctgtcccgctggggccctcgctggcgtccctgcaccctgggagcgcgagcggcgcgcgggcggggaagcgcggcccagacccccgggtccgcccggagcagctgcgctgtcggggccaggccgggctcccagtggattcgcgggcacagacgcccaggaccgcgcttcccacgtggcggagggactggggacccgggcacccgtcctgcccccgcgcggaccccgccccgtcccgacccctcccgggtccccggcccagccccc

SEQ ID NO: 7750 - DNA, 518 bp, Homo sapiens
  source 1..518: mol_type = other DNA
aggctcttcccggatctttctagaaatgtcgaacaaggtttttcgattgtgctgcacgtgtggcagacagtctgatggagtcggggaggtcgccggcccatccaccggctgcccgagggcctcccactgacctcccccggccgccctccgaggggcctctgctgacctcgccgtgctgggcacgctcggctttagcggtttaaaaacccacacacgggatgaggtgcccggcttctcacgtcgacatggcccccacttggtggtctggcaggcgtcggcggttggggacggcgccccggggaccccgcggccctagccttccccggcgccccgcgaacgccctccgcggccccagcagctgagcgcctgggtccctgagaggcaccccaggagggcggcgcgggcgggtaacgtcacacacgcgccgcatcctggatgcgcgtgcgcggcagcggccgagactccgtttcccagggagccgcgcggcgcgtccacttccggcaggcggcggggcccgg

SEQ ID NO: 7751 - DNA, 861 bp, Homo sapiens
  source 1..861: mol_type = other DNA
ggtgctcacgggagcatcgagcggggaggaacgccggggttcgggcgaccctaggggcgacgcacagagctgggcgcggccactcacctcggtgcaaggacctggacatcctgggccttggcggcctgggggctccattcctccgcgcgctgaatggaagaaatcccgcccgggcatctcggaaggaaagcctcggagtccattcggccctggagccggataccaaccgccagggctttccaggcccgtcccgggaaatggcgggcccctcatgccggcaaggcggggactaggcctaggggacctcggtcgcctcgaggtcgcggagaccccaaggccacggaaggacccgcgtctccgcagcccgcacgccgggaagcgtgcagagtcctcggcggggtcccgagcccgctggtcagagcgagcggcggggtgggagggacgtggtccccagagcgcggggccaccgtaggggcccctgatggggagggagggaagggtcggcccgacggggtcccagcagttccccgcgcgcagccgctcggctccctccccgtccagctgggagccgccagccctgggcgtccgaagatagcgggtgcccggggcagcccccaggggtgcgggcgagggcgcagggcggcccagacagttcccgcgtggaaggcgcccgtctagatccgcgacgtctcggacccccaggcccccgcaccccgtgtccgaggctccgggacgcgcaggacagtggagccgtggccgccgcttgctcccagccatctgcgtccgggaggcgggggcgggggcgcggcccgcgagggcgaccccgtcggcgggagggcggggcggggcggaccctgtcta

SEQ ID NO: 7752 - DNA, 759 bp, Homo sapiens
  source 1..759: mol_type = other DNA
ctggggggttggccaggtggcccaaaccggctctgtctgggtgaggtccgttggtccggctaattatgggccccaccctggggctcctcacacggctcctgagcaccagggtgagaaagcgctgggatctcatcgcagcccctgcacaaccagcacggacagtcagggcccctatgtgcgcctcctgcctgggccatccctgcggggcctgaggcctgagaggtcctgagatcggaggggtcctgaggtctgagggggtcctgaggcttgaggggtcctgagatctgaggggatcccgaggtctggggggtcctaaggtcgagtggacctcaggcgggagtcgcctgggctgaggcgcggctggaagaagctccctcagcccggggcagcttccagggtcgccggtgcgagctggggccttcgccggaacagcccggggctcggcacccagggcctggcccgccttgcgcgtaagctggacgcgtgcccgccccttcctccctccccgcgagcaggcgggccgagcggcggaaggggacgacgtggcagcctcgcgggcccgggggacctccctttctccgcagccctgccggggatccctgtgctccagtggctgcaggaggcgcccccggtccccagcggccccggccccccacagggtagcggaactccggctggtgccgcccctgccggccggcgggaggcgaggcttccagggacgccccgccccggccggcgctcccgctccgcccacgacct

SEQ ID NO: 7753 - DNA, 484 bp, Homo sapiens
  source 1..484: mol_type = other DNA
atgttttttacttaaatggaaacgtattttgcacacggttgtacaacttttttttgcatatttaatattcagaaatatgttggcttgtggcgagccacgccgtttgccgtggttaccaggagcctgtgtgaccactgaatttctagaaaaatccagtgtgcaggaggcgggcctcctctcatgagcaggcacggaggtgctggtctgccttcgctggccgagtgcccgctgcaggctgggctgggaagcaggctctgcctccacgcagcatgctcaggcgccggcagcggtctggggcttcctggacagacagggctcctcctcacatggtggatggggcgagctggctcacaaggccctggagcaggactgagtcaaagcactcccacgggggatagaccacagcacccagctctctgggttcccagaaccctgtgggagggctgggtcgcgcctgcccccttttaaaggaatggacaggatc

SEQ ID NO: 7754 - DNA, 366 bp, Homo sapiens
  source 1..366: mol_type = other DNA
agcatgcaaatacagcctctaaaaaggcccgttttgcttagagttgacttgggtataaatcccagcttaagctcttgctgtggtcagagcctgaggaccacgtgactcggagctgataaactccagcggcccgcccggtgttcgccgggtcaggtcctgcagggagcgcggagtggacgcagccacgtctgcgaagtttttcataatgttggggaaaacagccgtaaccagttgaaactacttcccggtggcccgcagagtgcgcgcagtcggggagtgatacgtcgcactccagcgcctgcgcactcgctgctgcgtctctgcgccccgcactggacgtgggcacgccacgtgaccccccctcct

SEQ ID NO: 7755 - DNA, 657 bp, Homo sapiens
  source 1..657: mol_type = other DNA
ttgggaaggcagactgagggtgttcccataccagctgcagccttaaggggcagtggacggtggcttccttccctttcccgcctggctgggagggagcttaaacttggttcaactgatgagctcctccctccaccagacccaggggccctccctcgggccagtttcgggacaggcccccgctccggaagagcacggaactctggcaccccggtcgcccgcccctgcttccccacgcgccccggcccttagggttcagcggccccggctgggaagagctgggcctgcagggcccggaggacactgcggcaccggagccggccctgcgcgcgggctgtgaggtcgcgttcgggagccgccagttctcccgccccggggtcgctggacaccccctcctgtcgccaggtcgggcgcccacggtcggacccgcaccccccaaccctggccctctgagaccgccaggccccggcccacgcagcccactcggggagacacgcccgagggtcccaaggtggccggccccacgggacccctgacctgagaactcacccggcgccgacccctgcgtctgcgcactggcacgcggacgctgctgccaggagggggggtcacgtggcgtgcccacgtccagtgcggggcgcagagacgcagcagcgagtg

SEQ ID NO: 7756 - DNA, 602 bp, Homo sapiens
  source 1..602: mol_type = other DNA
aaagtcacttcatatcaatcataaatattacaggaaagtgtttttcttaacttttaggccattgatgaaaagtcaaacaagtgcacagtactcatctactagggcacattccagtatacacaggtacctactaaaatttattattgaatattacacaaattctatatgggcagccagtccacagcaagtgctgcccgctggggagacttcccgttccagagcccgcaggccctggaaggacgagtgccccaccgtcccgactcgcgggcgtcctccccggcgcgtgagcgacctgcgctgccggcgcagaaccagggccgcggatgcccggcgagcccactgccaccagtcgcccgaggtgcggctggaggaaggtgcatcctgtacccagcggccgcgtgaccttctccccggtcggcgagacccgcaccccgaaacacctggcgcccaggggcaggctccgcgccgcctcgccacacgccggcagaaggtcatcgccgccgccattttgcgccgctggcctttgacccggcgcaacgtcccgcttagcgctaacgcatgcgcacggcttctggcggcgccaaacacccggtatttatttc

SEQ ID NO: 7757 - DNA, 426 bp, Homo sapiens
  source 1..426: mol_type = other DNA
acctgacccggcgaacaccgggcgggccgctggagtttatcagctccgagtcacgtggtcctcaggctctgaccacagcaagagcttaagctgggatttatacccaagtcaactctaagcaaaacgggcctttttagaggctgtatttgcatgctttgcagaaatcccccagtctcgtctgctaagcagttgactcctccaataattttgatatttaaatgtctcatgattatcggttaccataagaatataaacaatgtattttcagtttacatggccctagctctagcctgcggctgcaactgcatgaggctgcacctgccggcgcaacttttaggccattgatgaaaagtcaaacgggcgaaataaataccgggtgtttggcgccgccagaagccgtgcgcatgcgttagcgctaagcgggac

SEQ ID NO: 7758 - DNA, 634 bp, Homo sapiens
  source 1..634: mol_type = other DNA
caaagccggtgggcgcacgcccggggcggccctacagccctcgggccgccagtctcagggtgtcgggctccaaggccccgaagcccccacgcaccggcggccgcagtgggttccgagacgcgtgcggggcgcctgcgagccccttcctgccactcggagcagagcgcgccagcgcgaggccgggccggccgcctgcgcagcgccgggccataggtctcatttgtaattgaggagcagctgctcattaattaatttctaattaaaagtgcctcggaggaatggcccctccgtccaccgcgcggccgggactgtcctggcccctcccggcctgagccgccggcgagtgaccggcgagtctgcggccaggccgggctgcgcgaggtggggctgacgtcagagcctcctccgcttcaagccgcgcacgctgcgaggccgctcggtcccagagccccctcgagcctcggaatcgcggcggccaccgctgctcactttgttacccggttagaaaagtttgcggagcgcggggatggactaaccggctctcctgcttcgccctcccagcgcctagaagcctgcagctccggagcagtggccgcgccacgccggccccagcgcgcagaaccctgcaggcccc

SEQ ID NO: 7759 - DNA, 676 bp, Homo sapiens
  source 1..676: mol_type = other DNA
cttgcccgggtcctggtgcccggacctaggctttgcccctgccacagcctggctagggacccgagggttggctggagcagcagcctcgccctccacaggccttggggggtgggggagggggccgggctcttcgcgcccggcccaagcgtccctgggtggggcagcccaaacggggagaggggccccgtgggccgagggcccgaggccgcagcgagcttagcgtttggccaaatctggctcttagggctgtgtgacctcccggagccctacgcccccaaacagctcccagcgcccctgctggcacccggggcgccctcaccccagctcctgcacccggcgcgccgcgcgcagaccggacggagggggcggcgcccgcggaatgggcggccgggtgggagcagcgcgctcgctcgcccacgtcacgccggtgcgggctcggctgacgaccgcggcgcctggggacgccggcgcgctccgctcgccaggtgctccgcctcgccggctccccgctggagcgcgcgcgccgagcttccgcgcggagccctcgcgggctgccgggagcggcccagcgccaccgcaggtaggtgaggtcccccgctcccgcccccgccccggggttccgagacccctccccccttccgaggaggcggaggctccgcgcggccgccgaggggag

SEQ ID NO: 7760 - DNA, 683 bp, Homo sapiens
  source 1..683: mol_type = other DNA
cagggtaggggccccccagctccctgagggaggggcagggcaagctgcacgcaggcgcaccttccctgactgggtcctggcctcaggctgcagaagcggaagaccctccagccctagtctgaccccaggccagaggtccagcccccatgccctcccctaaccctggcggctgggaccaggctccccaccagggcatgccccccttagcccgcttgcccgggtcctggtgcccggacctaggctttgcccctgccacagcctggctagggacccgagggttggctggagcagcagcctcgccctccacaggccttggggggtgggggagggggccgggctcttcgcgcccggcccaagcgtccctgggtggggcagcccaaacggggagaggggccccgtgggccgagggcccgaggccgcagcgagcttagcgtttggccaaatctggctcttagggctgtgtgacctcccggagccctacgcccccaaacagctcccagcgcccctgctggcacccggggcgccctcaccccagctcctgcacccggcgcgccgcgcgcagaccggacggagggggcggcgcccgcggaatgggcggccgggtgggagcagcgcgctcgctcgcccacgtcacgccggtgcgggctcggctgacgaccgcggcgcctggggacgccggcgcg

SEQ ID NO: 7761 - DNA, 367 bp, Homo sapiens
  source 1..367: mol_type = other DNA
aggcgccggcgcgcgttggcgaacggtcatcttggtgatgatggctagcatgatcttccgtcccgcgtggcgttcttgcggtacgcggaggccgcgctgccgtacgggcgcgtcgtagggtgcgcggagaccccgcgggcaaccagccagaggatgccgttccccccgtgagtctggctctggggctgcgctgattcgggaccagctgttgatcacaaaaagtaccggagttttattctcaaggagccgctcgtggcaatgtacacaaacccttgcacgtgcgcgcacacaggcccacacaaatccaatttgcaactcaaatacgccgtaattagcattttaattcatcctttaacgtttaaattcg

SEQ ID NO: 7762 - DNA, 560 bp, Homo sapiens
  source 1..560: mol_type = other DNA
gacggcgtcttctcacctcagggccctcctcaaccaaggcgccccggatccaggtccatgctgggcggagcgaccagacgcgaggccacgcggggagcctcgggccaggaggcgtccgggaccgtggtgagagccgcgcgcactgcccggaggaagacccgagccgcgggcgccaccatcctggggccgggcctcctcggggtgcacagcggggcaggctgtgagtcccctaattggacccggcctggcctgaccgcgggcggcctctgcctagtccgtgagcggtggccggggacggtgggagccggccggagccgggcaggggacggaggggtgcgcgccggggcacgcagcgcggccgggctgggctgcaggtccgcgagccgcgggctggggccggagctgctagagaggcggctgcgccacaaaagcctgccgtctctgcccctcccccggccgcggcccggaggctgcagcgggcggagcaggggaggggcgggcccccgaatatgcagatgagcgcgtgatggacagctgcgcgttccaatgtccctcggaaa

SEQ ID NO: 7763 - DNA, 794 bp, Homo sapiens
  source 1..794: mol_type = other DNA
gtcccgcgtcccgcccgcgcccggttaccatgtaggacgggaagccggcggcggcggcggcggcgtcggccgagtactgcagcgggctcccgaagccggtggccgcctgcgccgtgaaggccgccgagcccgggtaggggctgaacgccgagcccgacgccgagcgcgccagctcctcgctgcgcggagccgccaaagccgacgcgccgtaggccgggcacgagtagagcgccagcgagccgggcgcctggtacaggtagccctgcgggtaggacatggtgggcgcggggcgcggggcccgcgtcacgccgagcagcgggcagggcgcgcggcgccctccatccacgcccggccggggcgcggcgcggcggcgggcacccggacggccggcggaggcaggccggcccgggtactagcctgggcggcccgcgggccggggcggcggcggggtggcggtggcggcggcagcagcgcggagccggtgggcgcagccgcgcgccaggccggcggtcggggtttccgagggacattggaacgcgcagctgtccatcacgcgctcatctgcatattcgggggcccgcccctcccctgctccgcccgctgcagcctccgggccgcggccgggggaggggcagagacggcaggcttttgtggcgcagccgcctctctagcagctccggccccagcccgcggctcgcggacctgcagcccagcccggccgcgctgcgtgccccggcgcgcacccctccgtcccctgcccggctccggccggctcccaccgtccccggccaccg

SEQ ID NO: 7764 - DNA, 780 bp, Homo sapiens
  source 1..780: mol_type = other DNA
gccgcctgcgccgtgaaggccgccgagcccgggtaggggctgaacgccgagcccgacgccgagcgcgccagctcctcgctgcgcggagccgccaaagccgacgcgccgtaggccgggcacgagtagagcgccagcgagccgggcgcctggtacaggtagccctgcgggtaggacatggtgggcgcggggcgcggggcccgcgtcacgccgagcagcgggcagggcgcgcggcgccctccatccacgcccggccggggcgcggcgcggcggcgggcacccggacggccggcggaggcaggccggcccgggtactagcctgggcggcccgcgggccggggcggcggcggggtggcggtggcggcggcagcagcgcggagccggtgggcgcagccgcgcgccaggccggcggtcggggtttccgagggacattggaacgcgcagctgtccatcacgcgctcatctgcatattcgggggcccgcccctcccctgctccgcccgctgcagcctccgggccgcggccgggggaggggcagagacggcaggcttttgtggcgcagccgcctctctagcagctccggccccagcccgcggctcgcggacctgcagcccagcccggccgcgctgcgtgccccggcgcgcacccctccgtcccctgcccggctccggccggctcccaccgtccccggccaccgctcacggactaggcagaggccgcccgcggtcaggccaggccgggtccaattaggggactcacagcctgccccgctgtgcaccccgag

SEQ ID NO: 7765 - DNA, 739 bp, Homo sapiens
  source 1..739: mol_type = other DNA
cgcggcgccgactgcgcctgcttcccccgagctggcgacttctccgcgggatttgccctcgctcaaagtttgcacaattgaaagagcccgcagagctcggccgctccccgcttccccaagggcggcgaggccggtcattggcagacgatcggttactacccagtaggggcccacgggaacccgcatctggagtcgggggtgtcacgccacgccggtcggagagcgtccgggtgcacttctgccaaagatgtcccctggaggccccggccgcgcgggactcgggggagaggccgctcccccctcgctgtcaccagcgtccaggccgccggccccttccccgctgcccaaaaacccggtgtcagacagctgtaaacccgtgtcgacaggttgtcagacagctgcgggggctggtcgggaaggagcccacggcctccgggcccacaccccgccgccccgacgcgcgcgcccaccgcgagagtagctggccgggccggcacggggcaccacgtgctcgcgggaggggcgggagcggccggcgagggggcctgcgctcagcatcaactgctgaaagccccgccgccgagcggagggcggccgccgcagtcggcgcgcgattgcggatccgggcgcagccgggagccgggcgcctgcgagcaccgggcagaggagccgcgaccggcctccatctcccggcccgcccgagcgcgcccggccggccgcccgctcctcccttaatact

SEQ ID NO: 7766 - DNA, 659 bp, Homo sapiens
  source 1..659: mol_type = other DNA
gtcaggtgtggatgtacacccgcgcacacccaggcacatgtacacccagaattctggccaggctgggccaccctgtccacacagtagcccgatcgacccccgtggcggccgagacccaggcccatccgcagccctgagacctccctagggattgcacccagcagccagtcaccggcctccgcggcctggccagttgagggtggccgtgaccgcggggccaggagcgccgccacatctcggggcaaatggcgcgggggaagagtttcctcctcagcctccccgcagagcgaggcacgcgcctttaaaggcaggtccgcggctctcagtgtccccacagctgtgcccgggcacagaggcgcggccagaccgcactccgcgggctgcaggtgtcccggcctctggcggcgccggtgcggcccggaggtgggagcccgcggagccactgcagtagctggagtcccgccgagtccccagccccaaggcagggcaggagcgcgcaccggccggaggtccatgctgagcatcgcccgcgccggtgcccggcagcctctccaactgtgtggtccccgcgcgggcagagaggcacggactgcaggccgtgggcagctccatcttcccccgctcccgccgcccccgccgccgcggctgccactccgccc

SEQ ID NO: 7767 - DNA, 366 bp, Homo sapiens
  source 1..366: mol_type = other DNA
ttctctcccgagatcaaaaaaccaggctctgggcttggcgcatggtgggcggtggcgcccacacctgggcctgggaacccgccgctcgggcatcactggctgccgcggcgaccggcgaggacaggggagccgccactggctgctaaggccgtgcaactggcgccgaagcgcacgatctccgcccgccccgcagcgcgtcgggaactgtagtccctccctctcctgctccctggcccaggacgggctccgggacagcgccaaggatcgacccttaacagtggtaggaatgttgctcaggcagcgccttaggcagccccgcgcccaggggaggggcggggcgagccagggcggggcggggcgagccag

SEQ ID NO: 7768 - DNA, 704 bp, Homo sapiens
  source 1..704: mol_type = other DNA
cgacccccgtggcggccgagacccaggcccatccgcagccctgagacctccctagggattgcacccagcagccagtcaccggcctccgcggcctggccagttgagggtggccgtgaccgcggggccaggagcgccgccacatctcggggcaaatggcgcgggggaagagtttcctcctcagcctccccgcagagcgaggcacgcgcctttaaaggcaggtccgcggctctcagtgtccccacagctgtgcccgggcacagaggcgcggccagaccgcactccgcgggctgcaggtgtcccggcctctggcggcgccggtgcggcccggaggtgggagcccgcggagccactgcagtagctggagtcccgccgagtccccagccccaaggcagggcaggagcgcgcaccggccggaggtccatgctgagcatcgcccgcgccggtgcccggcagcctctccaactgtgtggtccccgcgcgggcagagaggcacggactgcaggccgtgggcagctccatcttcccccgctcccgccgcccccgccgccgcggctgccactccgccccccgcgccgcacggagcttcagtaataaccccggcgcggcggcggagtcgctgtggggaatcctcccgcgctctgcctgggtcgggtcctccctgcccgctcgcacgctgccggccggggaccctccggtggccccta

SEQ ID NO: 7769 - DNA, 374 bp, Homo sapiens
  source 1..374: mol_type = other DNA
gtctgggattacaggccttaattccctaaagttaattgttgttaaatcaggagagaagtattttatgtaacatttctgtttatcagcccagcccaccaactggagtgccctgatatggcaagtccacagctgggagaggctctgaagatcatctagcaaaggagctccctcactttgcctgtttctaggcactgaaaatatattagatatccgctatcataggagagacctaaactgaatttcaatgagataaacagtgcctgaccgattttcatccatgtgtgtattgcttgaagatgctgcattgcagaaagtcttcagatgagagtgcaaacagttagtactcgcccagctgcgcgccgaggccgcgggag

SEQ ID NO: 7770 - DNA, 79 bp, Homo sapiens
  source 1..79: mol_type = other DNA
gtggcagcagcagcagcaccccgggggcgcgggcgacgccagcccgggacccggcaagggaaagggcaagcgcgcggcg

SEQ ID NO: 7771 - DNA, 704 bp, Homo sapiens
  source 1..704: mol_type = other DNA
ccgtgcagatgggggacgccccgggggatctggcaggagtagggtagggggccgggggccggggacgttaccgatgcccgtggggcggactcgctggcgtactggtagagcggcagggccagcgagggcagctcctgcaccacccaggcggcccgcgccggcactcggagcctgtggctgggcagcgcgtggcggccgtacactgagttcgtctgacgattgcgcgcgaagaccgcgcagcccacggcgcactgcaggtaggcgagcgcggccagcaggcgctcctccgccacccccgtcgccgttgccatcgccagggctgggcagcgtgctccatgccccagaggccgcggcgggcaacatatagggcggcggcgcgggggcaggaggggcggctaccggaggggcggctaccggagtcccgcactgccgggactctgcagacttctccggggtagccggggctgtgggtgcggccccgggggcggggcgagcacttgcgcggggagggacctgcaagcgccccacccacgccggggccgcagtaaccccgcgccgctctgcgcacgcgcggcttcaggctgtccgcggagctccttgagcccgcgtgggaaacctgggcgcttcgcgcggaggcttattcctggacggtccccaaaggtccccgaaaggaccaggcccggacacgtggggccttggtttcc

SEQ ID NO: 7772 - DNA, 654 bp, Homo sapiens
  source 1..654: mol_type = other DNA
ttcaagcgattcttccatctcagactcccgagtaactgggatcacagacaggctggtttccaaactcccggggccgggggactcggggaagggcacccgtgcagatgggggacgccccgggggatctggcaggagtagggtagggggccgggggccggggacgttaccgatgcccgtggggcggactcgctggcgtactggtagagcggcagggccagcgagggcagctcctgcaccacccaggcggcccgcgccggcactcggagcctgtggctgggcagcgcgtggcggccgtacactgagttcgtctgacgattgcgcgcgaagaccgcgcagcccacggcgcactgcaggtaggcgagcgcggccagcaggcgctcctccgccacccccgtcgccgttgccatcgccagggctgggcagcgtgctccatgccccagaggccgcggcgggcaacatatagggcggcggcgcgggggcaggaggggcggctaccggaggggcggctaccggagtcccgcactgccgggactctgcagacttctccggggtagccggggctgtgggtgcggccccgggggcggggcgagcacttgcgcggggagggacctgcaagcgccccacccacgccggggccgcagtaaccccgcgccg

SEQ ID NO: 7773 - DNA, 593 bp, Homo sapiens
  source 1..593: mol_type = other DNA
cgggagcggctccctgagagcgtccatgaactggccccactcgccctcgggcacgatcttgagctcctggtagtcctccttcccagccctgaggaaggaaagagacgtctaccccgaggcccaaggagccgccccctcgccgccgcctcgcaggcctcggggtccgggaagcccaggaggagcccctggcccgcccgccgggtcccggctcctacctcctccgcgtcctccggccgctgctgttgctggagccgccgaccccgcgaccgccgccccatagcccacgcggccgcgcaacggccagaactctagccctacacctcccgggacttccggccggaaaccaaggccccacgtgtccgggcctggtcctttcggggacctttggggaccgtccaggaataagcctccgcgcgaagcgcccaggtttcccacgcgggctcaaggagctccgcggacagcctgaagccgcgcgtgcgcagagcggcgcggggttactgcggccccggcgtgggtggggcgcttgcaggtccctccccgcgcaagtgctcgccccgcccccggggccgcacccacagccccggctaccccgg

SEQ ID NO: 7774 - DNA, 748 bp, Homo sapiens
  source 1..748: mol_type = other DNA
tctactcatccaggtcccgttctacttaaaaggcttggagcccgggcgccactgggctaaggcagcttcagggccctggcccgggagtgcatttgcggggactccgcctgaagacagggcggcagccgcggggcctcacgtcgcccaggctcgcggggcaccgcgatgatcaacgacactggcgtttgctttgtgatcgcgctcgggacaccgggatggcaaacggcaggctgtggatggcgggcggtttcccactgactcctgcccgctcggtgcagctggaaaaaccgaagccgggggccggacgcgccgcccaccagccgttcctcggctagctgcccagggaattaacttggaagttttcacttcacttttcgcatagaaaatcattttaaaaagccgctagggagcaggactctgccgcgtgtccttcccggctccggagcggcggagccagccacccggcacggcacgctggccgctcaccccgcgaggtgcagggagcacgtgggccgacgcgcggaccccagagagcgcagcgtgacctgcacctggggcgggatctgcgaccggggcccgcccttacgtcaggagggagggccggccggcgggggaagcgcctgcggtggcgtccgctgcccccgcccggctgctcggaaacttccaccggcggcggtgacggccacgctgccctgcgcacgcgcagcgcggctcaggcggcagcccggtgacaccggccctagcgcgc

SEQ ID NO: 7775 - DNA, 864 bp, Homo sapiens
  source 1..864: mol_type = other DNA
cccggctccggagcggcggagccagccacccggcacggcacgctggccgctcaccccgcgaggtgcagggagcacgtgggccgacgcgcggaccccagagagcgcagcgtgacctgcacctggggcgggatctgcgaccggggcccgcccttacgtcaggagggagggccggccggcgggggaagcgcctgcggtggcgtccgctgcccccgcccggctgctcggaaacttccaccggcggcggtgacggccacgctgccctgcgcacgcgcagcgcggctcaggcggcagcccggtgacaccggccctagcgcgcatgtctgcacgccggggtctgcgcgccgcggcgggccgagggcggcgtgcgggccttccagccgctgcctattccacccaacgctgacgccgtcctcaccccgcccgcggccgacggggccccaacgcgcaggcgcggtaaccacggcggcagtgtctcggtcgcgcgtgcgcaccggcgacacggcccggcgaccgaggccgcgcttcctcctgccgcgtccccgccccctcccccgcccctcattggagcggacgcggcggcggccccctccttcccccgcgctgtcgccgccgagagtgtcttttcaccgccgccgccgccgccgccgcaggagcgccgagccagcggcgcgagcgtgactgagggctagccgcacgggcggcggcgcctcccgcgggtccttcagccgctcggcgcctgggcccgccccctcggccccgccgcccgcccttctccgatggcctctccccgcggcccgagtggaacgccgccgccgccgcggcccccgcgcccgccccgcgccgcgtgaagcgggagcccggaga

SEQ ID NO: 7776 - DNA, 376 bp, Homo sapiens
  source 1..376: mol_type = other DNA
attttttctcccttcttgagtgggtgaagacaaacatgttaattagtctgttgtcatggaagcttgctctcagaaccttcaaaaccccagcccagtgagtttcttggtgagccttgggacctacaggaggcttcagggggacacccccctccttgtttccaggtcctcagaaggagggaagtccagggaccagggagcctggtggggccggacctgaggtactgcacgcagccctgggcccagtctctatgagatctgcgggtgagctgtgcagctcctgagccctcatccttaggaaggatccgtgcccggcctggccctgtgctcagggtaacgcagctacctagcttacatgccctctgccagcgaggaggac

SEQ ID NO: 7777 - DNA, 607 bp, Homo sapiens
  source 1..607: mol_type = other DNA
cctgagagctgtctcagccctctggggctgccctctgggatgctcaagggtgggttcctttggtgataagcaatgaagccccttcggcccccagggcgaaggccagcggcctccgctcccacgcgtgtcgggaggggacactgtccctggtgacatcccctgcgtccaggcccccaaggtgacagggagggagctactcccagggccgacccgcccgctcccgcgcccagccgctctccccggcgccctttgccgccatccccgctcagcagaggggctcggcgaggaccacgaccagccacggggcagctctgtaacctgtgatatgacaggcttagagcgtgcagggcgcaacggacgctgcccccgcgaggccgtggcgggggctcccagtgcagtcactgccgcccgcgccctgccgccctcgcagggagccccggccctctcaagagggtggagaggatgggggagccctcaaccctgctacgctgaggggaagaagggtgcccaccgcggggaggcgggaagggtgggaaatcctctcctcggagggaccccccgggtcctctgaccccggctgcgctctgtgactgtgggggagggtggg

SEQ ID NO: 7778 - DNA, 389 bp, Homo sapiens
  source 1..389: mol_type = other DNA
gattgtctctgcctcagaggaccaagttggcttcagcaaggctggccttcccaggcacgctggctaaagcatttcccaagccttggtcatctgtacacccacttctgccagattcctagccacacgtggccaagtgccatttggataacgttttggacttactgagtcaaataagaaacgacacacgtggctctcatcatgtttctattagcgctgccctaccatgcgctaggtgctcagtcactaatggtctcgcgaaggatgggtagtccccgcggcgtctcccagtcgggctcctcccgaggaggaaggagggagggtcgctccaccctggagcgggaatgctgcagggcagctccgggtcgccaggcggcggtttccaggcaacg

SEQ ID NO: 7779 - DNA, 763 bp, Homo sapiens
  source 1..763: mol_type = other DNA
gcgtgcagggcgcaacggacgctgcccccgcgaggccgtggcgggggctcccagtgcagtcactgccgcccgcgccctgccgccctcgcagggagccccggccctctcaagagggtggagaggatgggggagccctcaaccctgctacgctgaggggaagaagggtgcccaccgcggggaggcgggaagggtgggaaatcctctcctcggagggaccccccgggtcctctgaccccggctgcgctctgtgactgtgggggagggtgggagcaggccccgcagcccactaggagggtggcagcgtccctgcccgctgacggagaggagctgaggagccccgcagtgctccgagccaggtggggcggggggagtggtgggggtaggactccctccctccaccccttaggcttcgtagcggggagggccgtccctcccaccccacccacgctgcactcgggatagggcagaggagggccggcgggcgaggacgaccccgggccggggcgcagcgggagcccctcagttcgccactcccccgcccccgccgtccccagcctgcagccgggccgtcgggtgggggccgacaccgcccctgcacggaggccggctgcgcgcggggcggggagcggcgggcggagggccccgtggaacccgccccctcccgcgcggtggcggtggcggcggcggcgccgggagctgcccccgaggccgccgcccggcccccgcccgcgcgtcagcgcgcccagcccggggcgccgagctc

SEQ ID NO: 7780 - DNA, 457 bp, Homo sapiens
  source 1..457: mol_type = other DNA
taaactgaaacccaaaccaaaagcttggctttcggtgaatactctcagcggaggcccgggccccagcagccccggaagcggcgcggaggcggtgggcagagctcacggccgcgggcagaactcacggccgcgtcccgccgggtgggcgctcggaacgtcccgggttccccggagcgcgccgccccaacccggcaaccccacgccgcccaggggcctcccgcggcagaggccgacgccgagcccacgagccccagcccgcgcccgcggcgacccccggaggccgaagggcgtgggaaccacgggcgcaagccggctgcccacccccgccccgggccgcctctcccaggagattagtgcagggcgagcggccggccttgcgccagcgcgcactgacgcagcgcccatgctcggtactgggccaatcacattgcgccgccctgagtcgtgctcccgcccc

SEQ ID NO: 7781 - DNA, 440 bp, Homo sapiens
  source 1..440: mol_type = other DNA
gagtggctgacattgaacaataacaatcgctattacttgctaaacactgttgtaggtattctattaacttacacaagagctagggttcaaactcaggcaatgtagctcactttgtcaatggtgtgtgcaagacagacagacgggaggccccgcggcgcgttttcctaggaatagggacccgcggggcgagcacccccaaactcggcgccccggggacctgcgctgagacacgggccgggcggcgcagcctgaggagaaagccggccaggtctttcacccagccggacactgcgcggagaccccgcgttccgcgctctgccgggcaatcactccgggtggtcgcggaagcgcctgggcgtcgtgggcctccgtagcaaacgcggggcgggagcacgactcagggcggcgcaatgtgattggcccagtaccgagcatgggcg

SEQ ID NO: 7782 - DNA, 438 bp, Homo sapiens
  source 1..438: mol_type = other DNA
aagtgtccaattatacacgtcttcaaaggcaacttttcacctgagtacttagtaaggccggacctggggacgccggattaaggagtttctccctcagatcccccgggccagatttagccgaggggccggcagagagggagcgccacgtctcaggtctcggccggcgcccccctccggggtgcagccacgtctgaaccgggacagcgggcgggggcccgtcagcgctcggccgcactcgcacctggggtgcagcggggctcccaggagcgaagggccggggcccgtcggggaggtcaggcgcgggtggggcgctcgagtttcaccccggcggggagcggcgcggcggcgggggcggggcaggggcggggcggggcgggggtgggcccaggctgtcccccgctccccgcccagcgctctccgccccgcgctctccgcgcc

SEQ ID NO: 7783 - DNA, 539 bp, Homo sapiens
  source 1..539: mol_type = other DNA
tcttcgcagccgctaaagaaaaaatgaacatacatggtcaaacaatatgaatatttcctatcaatggtttaaactaagacatcattttaaaatgtgtctctaaagcgatatagctttgtggagtaatagtcaacccatgcaacttagtttccttgattggttaaagacttcacctcaagtatcagaatagtcagccaacccccggggaggtcgaacactgcatctctccatcagtgggctagcacagcagcagtggtgaacaagtaataatatgcaataaaaataacctgtcaatgaaaaatctgcaattagttacatatttcctttgtagttaatgactgtttactcaaaactgaaaacaggtaaaatcccactggcctccggagagtgagtgctgcaagaaaacattttctcagaactcttcaaatacgtaaagcattcaaatatgaatttcaaaactttctccttgatttattgatatggtttccccacccatatctcatattctcatgacagtgagtaagtctcacaagatctga

SEQ ID NO: 7784 - DNA, 637 bp, Homo sapiens
  source 1..637: mol_type = other DNA
gggtggaccagcgaaaggttaagcagcagcgccttaacctcccactggagcgcagtcccacgcggccgtcaggctggaggagccgggcggggaggcggtcccgctttgctcccgcgggcgaccggactgagcggccccacccagctccgaagggcgctggcggcccagcctggctggcccccacattccgagcccaggattaggcgccggcgtctcccgagctcagtaagcgggctgagcggccggaaccgggagattctcgactttccggcagagccgctcctcaactcgcgcaggcgcagagccacggcctcggccacctccccttagcccaccgcgagcaggtccctggagggcctcaagtcccataagacgggacttgcggtcctgatccttgatgatgaggaaagggcgcccatattcatcgaaggcgagggtccccatggacgccatcggaagcgagaatgcatccctttctcgggagggcaagcttgcgcacgcgcagcacaagacgcgcgggacttatgtttctactgagactaatttcacgccagacagtatcttctgaacttctattgaatttgtcattttttaaaacgttaggaattcattgacttaaagcactatttctttattt

SEQ ID NO: 7785 - DNA, 408 bp, Homo sapiens
  source 1..408: mol_type = other DNA
ggcaagttactgaaccatttgtgcaaaatgttaatttatttaccaacactgtcacagcagccctgtgagttgccaaaggctgagtcgacaaggatcgccagaaccggcgcgggcaccgcgcggcgaccaggagctctggtcaccgaaggccaggctggaggccagagcagccgcccgcacccggtcaccgcctcgacagtggagacctcagctgaccgcgagcccccggcccgcccgcaccttttaaaaaaataaagaaatagtgctttaagtcaatgaattcctaacgttttaaaaaatgacaaattcaatagaagttcagaagatactgtctggcgtgaaattagtctcagtagaaacataagtcccgcgcgtcttgtgctgcgcgtgcgcaagcttgccctcccg

SEQ ID NO: 7786 - DNA, 257 bp, Homo sapiens
  source 1..257: mol_type = other DNA
agctgttgtcataaccttgggcagtatgaaacgtgtattaatttcttttttaaaaaaaggcttaatttggggtgcggcggctcacgcctcccagctactggggaagctgagttcgaggctccagtgatctatgattgtgtcactgcactccagcctgggtgataaaataaaataaaataaacaaaaaatagcttaatttgtatttacaacagaagttacttgtcttggaagccaggcaccagaaggctggctgtctt

SEQ ID NO: 7787 - DNA, 310 bp, Homo sapiens
  source 1..310: mol_type = other DNA
tccataacaacacctttgcagtggggatggcaggaagtgcggccaccacggtgagctgttgtcataaccttgggcagtatgaaacgtgtattaatttcttttttaaaaaaaggcttaatttggggtgcggcggctcacgcctcccagctactggggaagctgagttcgaggctccagtgatctatgattgtgtcactgcactccagcctgggtgataaaataaaataaaataaacaaaaaatagcttaatttgtatttacaacagaagttacttgtcttggaagccaggcaccagaaggctggctgtctt

SEQ ID NO: 7788 - DNA, 499 bp, Homo sapiens
  source 1..499: mol_type = other DNA
gatgaagattgggggaagagccctcccaattccacggttgctagcattcttaaacatttttcgaggaaaatttatattctctaaataattcttcatttagagaaaccggaacggattatgtttcaaccacatgcagaagtctccctgggagtaattttggtgaagtcagcccactctagccatttggcctcggcatcacggtgcgggagcgtggggcgcaccttccgaagagccccgcgccggggcctttgtctcgcacgtcggctggggcgggagctaggttctcgcagcctcctcccaccgccgccaaagctcagctcggccccgctggccggcgcagtctcggcgactaccccaggcggcctggcgcacgcgaggattcgccgcgccccagatgcaggtgccgccgaccgacagtgcacgccgcggccgccggaagtgacagcgcctgtcgttggggagctcccgccccttccgcctcggcgccccgcccaggcct

SEQ ID NO: 7789 - DNA, 488 bp, Homo sapiens
  source 1..488: mol_type = other DNA
ttatattctctaaataattcttcatttagagaaaccggaacggattatgtttcaaccacatgcagaagtctccctgggagtaattttggtgaagtcagcccactctagccatttggcctcggcatcacggtgcgggagcgtggggcgcaccttccgaagagccccgcgccggggcctttgtctcgcacgtcggctggggcgggagctaggttctcgcagcctcctcccaccgccgccaaagctcagctcggccccgctggccggcgcagtctcggcgactaccccaggcggcctggcgcacgcgaggattcgccgcgccccagatgcaggtgccgccgaccgacagtgcacgccgcggccgccggaagtgacagcgcctgtcgttggggagctcccgccccttccgcctcggcgccccgcccaggcctacctgagcgtacgcacctgcccgggcccggctccccgcccggccgcgggagcctcgtggc

SEQ ID NO: 7790 - DNA, 451 bp, Homo sapiens
  source 1..451: mol_type = other DNA
gtcatcaactttaaatacaagtattttcagtttttgccaatgctgttaatttaacgatcaaaatcgggcaacttccccagtttccttgaagggatccacggaattcggtggctgttaacggcaactgcagcagccagccaaaacaaatacaatagtgttttagctggataagcggctttttaaattaagaactcagggaagtggagcggccccaggcgcaggcgggtcccgcagcggggcccgtgccgcccaggcgatcagcccccctagcctcagcctcacgcagccagagcaaggggaagagctcgcgcggctctgaaccaccggggagcagcggctgctgctagtcggactacgcccctccttgtccagcccgggagcagccccgcctcgctcagggccgcgtgcgcgtgcgcggctccaggggcggggcctgctcgcgtcccgggtg

SEQ ID NO: 7791 - DNA, 386 bp, Homo sapiens
  source 1..386: mol_type = other DNA
tggttgagagttatcagggacagaagccaccgtctctgctccccagcgctggccctcactcggagcttcattaggcgctgccgcggcaggggctgagggcctcaggggacggtcgcctccctgccgggacgccccggccctggcccgcactgtggggcgcagtcacccagccgtcgccgcgtagccaggagcccggctgagcgcgttcgctgcaggagccatcctcaggggaccccgcccccggccacagcatccgacgtggcgcggccggctgcgcacgcaccgtatgcttggctcgcggcccagcagggcgggcgggccgcggtgacgtcagtgcgcatgccgtcggtgggctcggctgcgccacgtcggcgcgcggcggccgc

SEQ ID NO: 7792 - DNA, 472 bp, Homo sapiens
  source 1..472: mol_type = other DNA
attataaaatgtggacctgggatccatttggtacaaaggtcaataaaaagtgcttaaaatactttgccgaatttatgttttataaaattgtattctctttgaattgtaatctatttcaaaaaaccaaataatttgaataaacttatttgttgaacagctgttcatctttgaaaccaaaaccggactggctttgaatatgaactgcctcttgcttttgaattcatcaaggaaataaagtctattttgagtttgataatcatttcattgtgtgtgtgtgttttaatgttaacatacagatagctaagaatcatgttgcataaataatgccaatggggtctaaattcactgttgccatggagacctttgagacagcaaccactgggcttttaaactgtttgcgagtgaaagcagaaattaccataggataattcagcgtcaggaaccgcctgctccacagcctggggaaggaggg

SEQ ID NO: 7793 - DNA, 540 bp, Homo sapiens
  source 1..540: mol_type = other DNA
ctaaccatttacatttgtatattgttttagaattgaagaaagtacttctgcagatatcatcttgttaatactcacttttaaataacttgtcccaggtcgtctaattataaaatgtggacctgggatccatttggtacaaaggtcaataaaaagtgcttaaaatactttgccgaatttatgttttataaaattgtattctctttgaattgtaatctatttcaaaaaaccaaataatttgaataaacttatttgttgaacagctgttcatctttgaaaccaaaaccggactggctttgaatatgaactgcctcttgcttttgaattcatcaaggaaataaagtctattttgagtttgataatcatttcattgtgtgtgtgtgttttaatgttaacatacagatagctaagaatcatgttgcataaataatgccaatggggtctaaattcactgttgccatggagacctttgagacagcaaccactgggcttttaaactgtttgcgagtgaaagcagaaattaccataggataattcagcgtc

SEQ ID NO: 7794 - DNA, 553 bp, Homo sapiens
  source 1..553: mol_type = other DNA
tccagtttcaaatctgaagtgattttgcctgggaagcggagtaacctggggttccatccctccagggcgtgcgttccccctctctcccgcggctgccgctgctgccgcgaaaaccaggagaagtggaacgcgcgcggcgaagcgccgctctcgcggcggcactgggcatgctccgcacccggggccggtttcggcggcggggcggacgctccctcactagccgggcgcccgggccggccgccgaggtttaggtggaggctgaggctgccgcgcgccgcgggaggagcctcgccctcggcggctgaggcggcggcggcacaggtggcgcgggccgcgcgcggggcgcagctcgggagcgctcggcgccgggcgccgcggcggccccaggctcgcgcccgcggcgacagccggctgagcggagctgcgggcgcggcggctgctctctcagcccggccggctggcggcggcgcccggagccccgaggagcccgcaggagcccgtggagcccgcggagccgggcagggggcgctgcgctcgccgagctcggaggggc

SEQ ID NO: 7795 - DNA, 727 bp, Homo sapiens
  source 1..727: mol_type = other DNA
tagccaccagtcacactggccattgagcacttgaaatgtggctagtccaaattgagatgtgctgtacgtgtaaaatacacatcagatagaatgtaaactgtctcatgaataatttttatattggtagcatattgaaataatattttggctgaaacatagtaatgacttcattaatgaatgaagaaactgaaacatactattaaaattaatttcacctgcttcttttactttttaaaatgtggctcctaaaaacataaactttcacatgtgtcaggcattatatttctattgggcccagatgagaaagattttgcagatacgaaatatttctattcaaatttttttggaaagtgctttaaggcaaatttacttggaattcatacatgccaatgaggtattacagtgtttagaaagttatctttattacctatagattaaaactcaaagttaaacgtttctatggaggtctagaatctaaaacttacagtctaagactaataatcaagactgtgcgaattaatgttgaaatcttctaaatttcattttgaattattttttcctcctaaagctagaaacactccagtggcaggccggaagctctgggcttccccagaaccggagccggccccgagcatgcaagtagctcgggagccggagccctggaagcgccgagccgagccgcgccgcgccgcgctgggggcggtggccaggcccaggcggagcattg

SEQ ID NO: 7796 - DNA, 461 bp, Homo sapiens
  source 1..461: mol_type = other DNA
attaatcattgagttttattggagctcattgaattttatattacatggacaggagaatattttgtaaagtaaaaaaccacattagaattcttggatgtaaaaggacttttcaaaaggtgataatatctaagagactggaataccttcttttcaattactggaagaccaggttactgtcactgtaattgatgatagtcatctatattttcttaaatgttttcattgcaaatgtcttaattgacatccttgtccaagtaacatctatattgaaccttaagggagatcttgatcaaacagtggaatcttttagtcattgatatttctgtcagtataatcagcctgggggattagagtaactctctctgtaagaggaacacatcagataagattttctggtaggtcctgcaagttcagaactgctgacttgttcttcgaagtaaagactcttctgagagaatcag

SEQ ID NO: 7797 - DNA, 697 bp, Homo sapiens
  source 1..697: mol_type = other DNA
cccattcattctggcggagtaaggactgagagaggttcagcagccgaaagtcccctgggagatggggatacaccgagaggaatcccccgagccagggccagcgctgagcccactagggaggcacccgccccggcccgcgtcaccccgccttgcgggctagacgacgaaacgcctcggcgctcaggggaccgcgcaccggtgcaggagccagcgccccggttgggggcgcaatgccgggcctgggaaggtccgccccggctggtcagagctttcctgcgccttccaaggcttggagctgccccggggaagcagggccctgcgggagcccatccgcaacgcggccccgcccctcccccaggctccgcccaccgccgagcccaggctcggcccttgacgaagttcgccggaaattaccgaagccctccttccttccccattgaaatcaagatggaggctcgcggcagccgccggcgcccgtgatcccggaggtctcgccggccacgggcccccgccctcgcgactgcgcgtccgggaggcgcgtgctgctgcccgcgctccggccggcgcccgggaggccgtggctccgcgcctccgcccctcggccagctcgcggctaccgggcggagtcctcgtctatgtgggcgcgctccttgggccgagccgccgccgccgccccccgccgccccggggctctgcg

SEQ ID NO: 7798 - DNA, 570 bp, Homo sapiens
  source 1..570: mol_type = other DNA
ttgtggacattgccctcaggctactgaagcctagttatggaacttctctttcaaaagatgccaaaacttggagaaaaaggaagtgttcaacaggattttcattttcttcattttttgggctgtttattctactgtaaactactccccatattttttcctttggataaatcattctataagaggacagttttgtcaataatgcacatatttgcgctcccaaagaaactgtgagttctcagtaagtgtaaccccgttctgctgacccagcgggggatgtctggactccgcaacctgcccgcggggggaaacagcactgaatcaacgggtcccaagatgtttcccggggagcagcctcaggaacgcgcctggaccccaggagtagcttcccgccccgctgccgagcctcggaggtctccgcagttctggggcccgcgaccccgacagcgcgcggaggccccgcccctctagggcccgctcctcccctgcccggcctctgattggctgcccggcgcgtcagtcggtaccccgccctccccagcccgcctcagggaagcgagcccgggcgccggc

SEQ ID NO: 7799 - DNA, 573 bp, Homo sapiens
  source 1..573: mol_type = other DNA
agtgatttttcaaaatgatctcaagatctgtcaatgaggattaagcataagcgccacagttagcctaatatggcgaactgcccagtccatcccagagatgaagcatttcgcctttggatgcttgaaaacggttaatattttcccttttgtttctcttaaatcaaaatgtttacatgaaatactatgtaaccgggtcgagttgaactagttcgtcttcggaactagcctggcccgacagcggaggcccaagcccgctgggctcgggcgttggaaccgtcccggcggggggaagcccgggcaggacgcagccgcgcttcacagctgaggaaaacccgctgcggcgtagggcaacgctcagaagccgagagtggcaccgcgacgcgccggaacgcgtcagcggcgtccggggacggagcaagcgcagcagccgcagcgcgcggttccccctccaggccccggcgactcagcccgcacacgtgtatgcgcatgcgccgcgtccgggcccttcagcctccggccgcacctcctcgcgcagggtcagaggccgtggggcgggccacggtgacgcgcgcg

SEQ ID NO: 7800 - DNA, 801 bp, Homo sapiens
  source 1..801: mol_type = other DNA
tttcctctttcttcccctttatttaaaagagatgataggctttacgagttatttttaatagaaattttttacaatgaaaagaattcgggcgtactgtttgcaaactgcagcagacaggtctgagcgccccagaaggcggccggccccagcctgggagcctgcggggaccactccctgctgccctggcgcatgtcctccagggacacgggccaccgttgcccctggaaaccctgggggacaggctccctcctgggcgaccttggaggggccgcagtcccccgaagcaggccccagccccggcgcaagctgcctcctccgcagtccccgcccgccgccagcccggccaccgccggacggcgcccttcccagccccgcgccccggctgccaagtcttccagacggccgggccctcccggcacagcgcgggaaccccggcccccggccccacgggacgagggctacagggcccggccggcgagccagggcaccccggggtctccaggcggcccaccgccctcccgtccccgccgcgccctcagcgccgccgcccccgggccggccgaggctccgcggcgagtcccgcccagcgccccggaggcgccagccccacggcccgagcgtgcgcagcgccccccgcggccgcgccaagcgcaggcgacggcacaggaaaggaggccgcggcgcgcccggcccggccccctccccagcccgcccccggggccgctggcggtgtccgcgcctccgcgcccgcccctgatttcctccgggcggcggcggcggcggcggcgcctcgtgcgcgcg

SEQ ID NO: 7801 - DNA, 563 bp, Homo sapiens
  source 1..563: mol_type = other DNA
cttttctacagaactttgctgtcctatatacactgggcacctggcacgggtctagtccaaattgagaacacacactggatttctaaaagatctaattaattcttttagactgattacatgctgaaatgactaaattaaacacattaaaagcagtttcaccgatttctctttactacagggagctcctctcgcgcactctgtgcactcaaattccgccggtgtcctccgccggaagggccgcctcagaaaggccgagcccccggcctggcttctccggtttcccgggaaagcgttgcaaccacgggcgagggctccgaggtcggccccgaggggtaagggcagcccttgccttccggctccgcaggtgcagcgcgcggtcctcaggcgttaatcgggggcttcccagggcccaggagcagcctcgggcgccccagagggcgcgacctccctcacagccacctcgggctgactgagcggacccaggtccctttcagccacagcgttccctcggcttcctgggcctcacggcggcggaggcgtggccacagcctgagaacttccga

SEQ ID NO: 7802 - DNA, 624 bp, Homo sapiens
  source 1..624: mol_type = other DNA
cgcatcatatgcatatatctatgtatgtatatctctatatacgcatatttatgtatgtatgcatcaatatacacttttaatttaatttgcaacatctatctttattaggatgtaatgttataaaattctaggtatttacatgaaaagggaataaaacattaaggagaatttcctttttctgtttaatgcagaagggccattttaaagctgtagaagtgtcactgttttaaatctgaagctgtcctccttcaccggggcggggcagggaaagtctggctctcctgggaccgactccctgggacatacacctgaaaggtgtcagaattagacacggatgcgtgtttattttaaatgcccacgcacttaaaataggctgtacagacaaactcaagggattccaaacgacgcctggaagttcatcttatagattgggggccaagcccttcgctccgaagggttcgcgcgtagcgcgctgagccggtgcccaggctggggcctggagccgcagccccgaaaaggcgcgctgcccctttaaaaggccgcgcatctccgggccggccttcctccccggggctccagctgtgattgacgctgggcggcgagaggaggcgcctggcgctaagt

SEQ ID NO: 7803 - DNA, 440 bp, Homo sapiens
  source 1..440: mol_type = other DNA
gttccagctactaaaacaaaaataaaaacaaaatctttacttccttaattaattaaattctcaggcatttaaaaatgttttacttatcaaaggacatagattttcagtggtggtgatattgctcctaaggggacacaatccacccccaatcacatacatagtacataagagatatacagtatatctgtagtgtactgtcatagggcataatgactatttaataagagaaagcatgtaaagcatttattagagtgctcaatgaaacatatgcacttagtgttagctattattataaataacattattatttgtttcctcaaccttatactctttcttcataaacaagcaatttttaaattggagtttgtttattttgtgctttcattttcatgataatcttaaaaataatgaataactgtgtacctttatattgtagatgg

SEQ ID NO: 7804 - DNA, 498 bp, Homo sapiens
  source 1..498: mol_type = other DNA
acattttgaaaataatattgtttcttaataagcagatcttactaagaaaaaaaaaatggcttcaactttttgtccaaagctttcaggatatattcctaaagaaatctcagtaatatttcttctggcctttttgattgtcgtactcttttaaaaaagcaaatgagggatggctctcttcagtcaggctgcccctaaggacagggaagtcctggggagaaagcgttttgcccagatgaacacgtgaactcaacattcgtgtgcatgcttcaatctagatgacccgaaaagattttcttgcaaagcaatatccctcaaaaccccattgcataatggcttttgttttaaacctttttggagtggctaggcgttctccaaacaactccctcctgtgacttgaaggaggagatttgatagcccagggtgatgtttcaacctcctgtggccaccggggcagctgggcagggctcacttccagccgcctgtcacagtactgggagt

SEQ ID NO: 7805 - DNA, 487 bp, Homo sapiens
  source 1..487: mol_type = other DNA
tcacccaggctggagtgcagtggcacgatcttggctcactgacattttgaaaataatattgtttcttaataagcagatcttactaagaaaaaaaaaatggcttcaactttttgtccaaagctttcaggatatattcctaaagaaatctcagtaatatttcttctggcctttttgattgtcgtactcttttaaaaaagcaaatgagggatggctctcttcagtcaggctgcccctaaggacagggaagtcctggggagaaagcgttttgcccagatgaacacgtgaactcaacattcgtgtgcatgcttcaatctagatgacccgaaaagattttcttgcaaagcaatatccctcaaaaccccattgcataatggcttttgttttaaacctttttggagtggctaggcgttctccaaacaactccctcctgtgacttgaaggaggagatttgatagcccagggtgatgtttcaacctcctgtggccac

SEQ ID NO: 7806 - DNA, 434 bp, Homo sapiens
  source 1..434: mol_type = other DNA
cttgacagcgcacgcgcgggccaggaagcagcttcccccaacgctgcggccttgtgtttcctcccgtgtcaaacgagagggccccaaggacctctcgctgccaggggaaggggcgccccgataccaccctcagtggctgctggttgggcgaccggtggcccacggaaccgaacttcgccctctcccgccgctgcaagggaaaaggtcgttttcctcgagtcccggagaggccctccaggaacccagagccccccggggacaccgcccagctcccggcgcccggccccgcccctgcgcgaactcggccgcacccgggctccgtggcctgtggcgtcacaaggcccccagccgcctgtgccccgcggtgcgcgccccgctccgggacctgccgccaccgccgccccgccctcggcggcacccacacccaggcgcgc

SEQ ID NO: 7807 - DNA, 386 bp, Homo sapiens
  source 1..386: mol_type = other DNA
agcatctcaaatcttttgcgccaggtgtgactcaccacgtgagtaccaggtagcacctgaggggcacctggaaagcagattgttccagctgcgttctaacaaggttgtctagaaaagggttacatttttaaaggtgatattggccacgtccccttccagtttcaggccccgcagccccggcagctccgctgaccgcgcgtgttgagccggttcccgggtctgctatgtttagtctctctctgcagagggaagagttaaatcccctccccacgcctacgtgggaaacacgcggccccctcccgggtccgctaacgagcctgcggctgcttcgcctggtcgggaagggggcggggcgctccgcccgggcggggccagacggtgtggtt

SEQ ID NO: 7808 - DNA, 451 bp, Homo sapiens
  source 1..451: mol_type = other DNA
accaggtagcacctgaggggcacctggaaagcagattgttccagctgcgttctaacaaggttgtctagaaaagggttacatttttaaaggtgatattggccacgtccccttccagtttcaggccccgcagccccggcagctccgctgaccgcgcgtgttgagccggttcccgggtctgctatgtttagtctctctctgcagagggaagagttaaatcccctccccacgcctacgtgggaaacacgcggccccctcccgggtccgctaacgagcctgcggctgcttcgcctggtcgggaagggggcggggcgctccgcccgggcggggccagacggtgtggttggcggagggccaagctcctgggggcggggccgcgagcgggagggcggggccggctgcgggagggcggggccggctgcgggagggcggggcgaggtcgctgggctgtagt

SEQ ID NO: 7809 - DNA, 285 bp, Homo sapiens
  source 1..285: mol_type = other DNA
agagcatcctccgaggggcgacgtctctcgccccaccagctggacctcggcgaccgcgcctcccccgaagctgcagccttcggggctgagccccgcgggtgcgggtgcaggtgcggagccgcccaaggtgcgcaactcgtttgcagcggcgcagcccagacgcgcctgcagctggggctcaccccaacctcgctgccagccgaggtagcggaatcgtagtcgacgtctcatcacctcgaggcagctccctacagcccaggcggcgcggcgggaaatgcagaggct

SEQ ID NO: 7810 - DNA, 637 bp, Homo sapiens
  source 1..637: mol_type = other DNA
taaatcttaggtttttgagtgagataatatttaaatcgatttttaaaaattattacagaattaaaatatttctatcagttcgcttattagctagctttttgccaagctttagcagatagagaaattgagccttttgataaaaagcaccaacaatgacagtggcatttctggagagccctaaacatttaggctgaggcctcttcataatcctggatttactaggatccataatcctcctggatcttattctttattttttaatttcacaattaagaacagtttgaattttcatttcgacatcagagagaaactttcatttggaggagatttgatcactcttgtgttatttacggtagttttgtaaaaattgcaaaatccacacccatttttaaaaacaaggtgtcatgtatatacacatgtacacatacacatacttgtttatacacactctaaaatcttatgaataacttgaaatcaaactggttggtatagaatattattttatagtgcttctttctaaatatgtgtttgaaagggaaagcctagcaagtctattaataagctcacttccctggagcattaagctaagcctactaaataaaagatttataaaattgttctgtcttatttttgtggt

SEQ ID NO: 7811 - DNA, 294 bp, Homo sapiens
  source 1..294: mol_type = other DNA
gtttactttaaataatatttcagctgtccagatatcaaaagctatgtacattgcaaatcgatttaatttattctcatcacagcttctattcgtcttcacaaatataaatttaccttgagtactttgggtgaaggcgttaaaggactcactcaaactatggatcactgatgaatgagccgggaatatgaaaatttattaccaccgtcatttttcaagaaatctgcagccccaaagcgccgccagccaatcagaggcgcgctcgggagctgcagagacccagcctcggagcccagg

SEQ ID NO: 7812 - DNA, 510 bp, Homo sapiens
  source 1..510: mol_type = other DNA
atttgcataattttatcctgcaaaagtgagagctgtcaaaaattaacagagagttagatctcttcagggaactaggaacttgatgaggacatagctacgtttaaaaagttgttagatatttttgttttaggaaatcagtatttcaacagataatcaaagagatgataaacattttttgcaagtgtaatgctaattgaaaatgccgtttggaaaactacacaagcaaggctgtgtttctgccaaatatgcttatttagtatgaatacttcctttttataaattcagagagttgcactctggagggctgtaataaacctttaaattcattttagttcgacaacagctatctctttgatcacatcgctttaaacatttttcagctttaagcttattaattgcttcactgtacctaatatcttacggctagcgccccaagtggccttggtgccttttccagttcccgggagacccaccaaccctcggcgtgtgttgcctgcgcacccggagcag

SEQ ID NO: 7813 - DNA, 671 bp, Homo sapiens
  source 1..671: mol_type = other DNA
ttatagaacaaaattaaatgattatctgaaatattgtggcattcttgatgtctgaataataaaatgacttagagtcttagaaaatacacgattcttggtgaatatatttaagcaaatgtttattcaatagttagcactttaatagtgaaacacaaagaaagataatcatggttaggaataggttttcaacaataacacttttcattgtaatattttattgccattataatattctataaagttttaggtaattattaataaattctctcatataaagagaaattaacattaatttttaaaatcttacaatatttaaacatgacaaaattaaaacagaccagactaatgtatatagtcttagcttcatagactctgaaccaagttaaatcgttattgtcaccaataagcatctgattctcgtttagacaattaaaacgtaattaattgtcttgattcacaaaaaagactcaagcgacttagtggacagttctctgatatgcaatagatctcaagcatttaaaaagcaaagctttaatgagtcttctgagagctaaggagtcctcggattcattcaaagcattctacaatgaaaatacatttcaaatataggattcaattacttttcaggaatcctgggcccccattggctcgccgctcgccgctgcagttga

SEQ ID NO: 7814 - DNA, 502 bp, Homo sapiens
  source 1..502: mol_type = other DNA
agttagatgtttaagtagatagaacaatccaaatgtatttacatctgtccacacactcatttgggtatgaaacccgtatttatgaggtgtcaagttcaaagtctaaatattttaataacactaattacatatttacatttttaataaaatattttatctataaagtattaaaatgcaaagatgtaacatatcaaatctggttgcaatttgactggaatatatattccagaagaactatctttttttaaaaaaaattgcaagaagcagtcctgttcctgagattgtattacggacacaagagagtctttctgccctgcgggggaggggacgcctttcaagcaaagccctcctctcggatgcaaatcgctgtgtgctcgcagaagccagcatggcgagtgctgcagctctatcagcagaacctttctctccgtgtgaggaagagctcttaatcagaagcactgaatgaaagccaatcagagagagctcgcccccgttttcttcg

SEQ ID NO: 7815 - DNA, 533 bp, Homo sapiens
  source 1..533: mol_type = other DNA
aaaaataaaatctcagaaaaaagctttattcacatttacattagaagctacaataaaaatatatttaaaacaacaattaaaaaatgatgaggtatctcatgttcatggaatgactcagaattgttaagatgagaactcttctcaaattgttctgtagattacatgaacttcctatcaaaatctcagcatgttattttataatagaaaatgacaaggtgattttaaaaattatgtggaaatgtaaccaccttaagtctgaatacactgtacaatttgaataataaaggtagcgtgttattaccaaaattataatcaaataggtccatgaatccttttcagtcaattgattttctacgaagatgccaagttaatttaaggtacaaaaaatttgtgctgggaaaattagatgtctaatcatagagctagatgtcaaaaaaatcctatggcttttggttaagtagaattttcatatatgtcaacaaaaacaagaatgttgataaatcatacacatggatatggagttctcaggagat

SEQ ID NO: 7816 - DNA, 565 bp, Homo sapiens
  source 1..565: mol_type = other DNA
taacattctgagcatttttatctgctaaagaaataataataataacagcccaaaatgatcttcgtaatttctcctctagctttaaaactataattgacatatatgtatttatatgcatatatgtatgtatatgtgtatataatttatttatggatggcactttaaaaggaatctcaaagatgttaattaagttagatgtttaagtagatagaacaatccaaatgtatttacatctgtccacacactcatttgggtatgaaacccgtatttatgaggtgtcaagttcaaagtctaaatattttaataacactaattacatatttacatttttaataaaatattttatctataaagtattaaaatgcaaagatgtaacatatcaaatctggttgcaatttgactggaatatatattccagaagaactatctttttttaaaaaaaattgcaagaagcagtcctgttcctgagattgtattacggacacaagagagtctttctgccctgcgggggaggggacgcctttcaagcaaagccctcctctcggatgcaaatcgctgtgtgctc

SEQ ID NO: 7817 - DNA, 519 bp, Homo sapiens
  source 1..519: mol_type = other DNA
caactattactagaacttcttttcagaaggatttatctactaatcaatatctttcttattgtgccatttccagaaatactaaacagactctttctgaagcagggtttttttccagggaagatgaaactcattcaattgcattataagtcgttctagaaatttaaaattattcttaaaaccattatctttactgaaaacagatatgtcaattactgaaaacagatatgtcaatcattaatttttagatgtttaacaatgtttctaaaagactattttagattataaactcgtagaggcacaagtaaaaaaattcatcgttatcaatgatatatattatctgtatttttttctctctttttcttaaagttgacattttgacactgattgataaacaaaatttcttttgagcaactccctgtgatatatattttctacagatgatttacaggttacagaggtctttgacaaagcccttctcttattaatcagaaacgctgaatggaaaccaatcagatagag

SEQ ID NO: 7818 - DNA, 365 bp, Homo sapiens
  source 1..365: mol_type = other DNA
ggtaattagatttaattttcctaatggtactgatattaagccattcaaacagctatgtgtactaaagagtttaatttgaaggttatccaacttcggcaactttccagaaggatcttcgaacgttaagtatcaattcatttagaacgatggcatcagtcataagtagcccagggaagcatggcttcatgctgaaagacatgtatgaatctatccatgtctgcttttatgttgtaaagaaaagccatcggtacatgttatacgtgctatcacacgaagctggccaactgatagagtgacgaggtactgtgtccctgggaattgataatagcacaaggtgcattttgattgctcaggacttcaaacac

SEQ ID NO: 7819 - DNA, 356 bp, Homo sapiens
  source 1..356: mol_type = other DNA
agcccagggaagcatggcttcatgctgaaagacatgtatgaatctatccatgtctgcttttatgttgtaaagaaaagccatcggtacatgttatacgtgctatcacacgaagctggccaactgatagagtgacgaggtactgtgtccctgggaattgataatagcacaaggtgcattttgattgctcaggacttcaaacacctgcagtttcagccgcgacagcaagaacggcagagccggcgaccgcggcggcggcggcggcggaggcaggagcagcctgggcgggtcgcagggtctccgcgttgatagaagccaatcagagagagagccctctccgcccggtgggtgccgcgccg

SEQ ID NO: 7820 - DNA, 393 bp, Homo sapiens
  source 1..393: mol_type = other DNA
ctcatggatgtttcagtagttagaaaatctaaaaatactaatcatgaaatttaattcaaaagtcaaggaattcactgcacctggaaaagtaacttgtctcttctcggttgcggtttggaaacagagacactgttaacacggccaggcatgtaaaaagaattttaaagtgtgactacatttttatttcccgccagacggtagccccacgaggcaggcgctgagctcaggatctcactcccctccgagagccgggcggccccaggcctggacccagatctgaagtggggctgcccgaccccaatggtaccccttttacctataaaaggctctcgggccgcgagatcgcctggcagcccaccgcagggccttgtgcgcggtgattggcgcacgcaa

SEQ ID NO: 7821 - DNA, 340 bp, Homo sapiens
  source 1..340: mol_type = other DNA
atcgcgccactgcactccagtctgggtaacagagagagactccgtctaaagatttttaaataatactcctaagagccctgtgagtccatctaaacagcaggctctgcagccagactgtccgtgttttggggtcctctccacagcaacggaggccctctgagcgtcagggcttccgctgattccccacactgggagcttggggtaacgccggagaccagcgcgccctcccgcgagacccgggaaagccggcgcctcatcccggccagctctctccgggcggaagcgctccctcacccggttgcgtgcgccaatcaccgcgcacaaggccctgcggtgggct

SEQ ID NO: 7822 - DNA, 256 bp, Homo sapiens
  source 1..256: mol_type = other DNA
gcgggcgcctgtaatcccagctgcttttgaacctggaattccatttataaaagaagagatggaaaatatcgtggtcactgtccatagctatgaccaaatccttctggccaagaatagcaagggtcctcactctggccaccctctgtcaccaggctggagtgcagtggtgcaatctcggctcactgagtctcctgcctcagcctcccgagtagctgggattacaggcgtgagccaccgctcctggccccgggaggtc

SEQ ID NO: 7823 - DNA, 712 bp, Homo sapiens
  source 1..712: mol_type = other DNA
ctttggtaggcagaaatatttgaaggccttcctgaaaggatcccaaaagcctgaggctcggttcctcgagtgacctggacgggagccaaggcattagctctcacagtccactcggcaggagctcgtggctagtgctcatgggaccaaaaccaccaccccagggccatgggattcccccccaggggcttaactgggggattaagcagctctgaggtgccaagttacctttggtatcccaaggaccagaggctaagggtagcttggggtgagtggtctctttgctgtgtaaagtgctatgcagaggcaacttcacgtcccctagctcgctctgttccacctagatggcgcccatgggtttctgaagcgggcgcaccaggactcctggctcacccagagagacgccttgcccgcggcggggctcgctcggggaaatccccgccggggaatccccgccccccgtccctgtcactcggggaagggagttcccgcccctcgaatcaaccagggggagggaatccccgcccatcctggaggctcggcggatcccctgcgcagcgaggcgaggagcggaccccagcgccggtgcgtgccggccccgggcagcgggacgcggcggggcggcggctgcaggcagccgaggagccgcaggccgaacccaaggcaccgggattgcgcctcccgcggctgccggcgaaccgcggctctgcagctc

SEQ ID NO: 7824 - DNA, 571 bp, Homo sapiens
  source 1..571: mol_type = other DNA
gtgaacagaggaagctttgctcactcacccactgctgccaccagtctgtggcccaagggttgaggacccctgtcctaagtccttctaacaacctagtaagataacaagacagatatcatcatcaccattttgcagatgagaaaactggagtttggagagtaacttgcctgaagtcacagatttgagaccaaacccagtctgattgcacaaaattcttttgtttcacataacctgaaggccttcggttaatatgctagaataactaagttaacacaaatataattggttctttggtccttccaaaaatgtatctaaatcattttccatttaccacagaaaatgtttttatttttatcacataatatttatttcaataatttcaataacgactttcagtaatttaggatttttgaggtctaatcaaaatttctgagaaaatttttttcacacttgggaacgtaaatggagggtttacacttgcatttttttcaaagctcatacaaagctagacaaagtccccatggtcactaatgagcacataatcactgattctcagaacttgcatatatca

SEQ ID NO: 7825 - DNA, 380 bp, Homo sapiens
  source 1..380: mol_type = other DNA
cccatgatcactttttttaaaaaatttttattttttacattgtttaatacaggatggcacacaagttaaatgtgaaacgctgcaggtttattgtctctataaaattacaaacaaaactggtcaactgttctatcttcttatttggacgcacttgctccttctaaagggttaggggcagcagagagcaaagtatgggaccccgtccacacgaccgcggagtcgcctccgaagacggcggtgtctggggcgtgcctcgcgtggcccaggctcttccattcacggggggccccgccaggttcaggctccagccctggggtgtaggctgcagtggcagcggatccccggccgccgcttccggcgcctcccggcccatcctccgg

SEQ ID NO: 7826 - DNA, 384 bp, Homo sapiens
  source 1..384: mol_type = other DNA
atttatgcttgaagctccagtcaccatcagacagaatttctgtgttttggctaccggctgttggctgacatacctgggggtgtgcttttagtccaacagaaaagcactctctccctccgcacttcagaggttggggatccccgactccccagaggacaggcgaggcgcttctggcacacgcccccgtcgccccgcggccgcgcggcgtcaccaccacttcggagaaggccaggcccctcttcccccgcgggcttccccgcgcccgcaccgccgaggccccggcacgcgcccgggggagccgcgaagacggcggggccggatgccgagcacaggcgcgcctgcgcagtgcggtcggaggcggcggtctgttctccgctgaggagg

SEQ ID NO: 7827 - DNA, 397 bp, Homo sapiens
  source 1..397: mol_type = other DNA
actagcctggccaaggtgtgatggcaggcgcctataatcccagctactcggctgcaggagaatcgcttgggcgggcgcctgtaatcccagctactcaggaggctgaggcaagagaatcgcttgaatcccatttttggacgttttattccaaagacacaagcaaacggttttatcctcgccatccaatcgttggaaagtccggagagaacgctctctggattggtccggggttcggccggcagcgcctcgggatgggggggcgtggcctccagttgcggtctcccggctctctgggcccgcgcacgggatgggcggggcccacgggcctgggcggggcgagcggtgtcagcggcggagccggatgcgggcggcatcgcggcggtcgcggccttgggga

SEQ ID NO: 7828 - DNA, 395 bp, Homo sapiens
  source 1..395: mol_type = other DNA
gacctgaggcaaacaggaaataaaatggagagaacagtcatttctgcttttaaatctttgttaatagatatgcctttatattgattcttagctgtaggaagtattcattcaaatacatattcaaataatcttttagctatattcctgcttgtaaggagtactccaaagatttcttgcactttctgggaaaatgggccagagtattgatctttttcattatgaccccttcgcttcattagagtaaacatttattgaacaaacgcaaagcttggtacaggaaggatattatgtaatcttccgcggtccctttaaggccctggaaagggtgtggggaggccacgccccatcacgtgaccgcagccccagcgcggcggggccggcgtctcctggctgcc

SEQ ID NO: 7829 - DNA, 608 bp, Homo sapiens
  source 1..608: mol_type = other DNA
tttcaccgtcgcaagtgagaaccagagcgcgttaaaggcctcggagtaaaaaacgcatgcggcacccgggttgagtcgggtgcaagtttctgccgaacaaatgaaagaccattttaacacattttcaatgtatttaaatgtgcgggactgaattctcccccagacattgcaaatgacttggctgcagtaggcacagaaggtccagttccattttgacccgccccgccgcgcggcggactcccgcgatgctcctcccggtctccaccgctgctgtggctatggccagtgggaggcaggacctttcttggagtcgcggaaccccagcacagtgcctcgagcgctccagagaaggagcggttacccgggggacctaccgggaacgttttgggaaagacagtccctttatttaggtacctggtttagcaaacaaagccccgaggacgctttggggatgctttccaagctttgtgacacctccagaagttgaaccatactttcctgctctcagtgcgctgacagagggtccgtgagctgggacactgtgacctcggcaccgctgcgattccagcgcaaacctgcgtggcccagggggagggcggggtgtaggt

SEQ ID NO: 7830 - DNA, 354 bp, Homo sapiens
  source 1..354: mol_type = other DNA
ctgcgattccagcgcaaacctgcgtggcccagggggagggcggggtgtaggtgacgcccgggccagccgggcacaccaggtccgcgatggagccatctgcactgggaccttggtccttgttccctgaccttgcgccgagggaccaggaaggtcaggcccgcgtatgtgtgcgtgcgcgcgcgcatttctctactttaaagcacgtccttttttgaagccaagcccggcctcggcgcgccatgtgtggtatggatacttggacaagtctaactttttttttcttctacaaaaacgctttcgtatatgtataaacggagggcgaatatatacaagtatatatatatgtatattaca

SEQ ID NO: 7831 - DNA, 284 bp, Homo sapiens
  source 1..284: mol_type = other DNA
gtatgtgtgcgtgcgcgcgcgcatttctctactttaaagcacgtccttttttgaagccaagcccggcctcggcgcgccatgtgtggtatggatacttggacaagtctaactttttttttcttctacaaaaacgctttcgtatatgtataaacggagggcgaatatatacaagtatatatatatgtatattacagacgcacaggtttacacccggtctttttctttttcttttttttttaagaaaaactagtgacattgcagagaaggacgcttcctctcgcccg

SEQ ID NO: 7832 - DNA, 332 bp, Homo sapiens
  source 1..332: mol_type = other DNA
gtgatcatatttgtatttgaagactacaacgatgctgtcgcttctgatttcaaataagtaattgttttaaattgcctactaacatccccggatcttgggaagcctggactgccctgaggcctgggtggtgccgacaagtcggcagtcacgccaggtcagccgaagccgcgggaaaccctggactccatcccgggatttgtccccgtgtcgtcgccgaaaacttcccggaagtttagaccggggacttgactctggaaagcgtccagaccaaggtcgctttagaggagggagggcccgccttcccccgttacgccgcaagttgggggcggcat

SEQ ID NO: 7833 - DNA, 535 bp, Homo sapiens
  source 1..535: mol_type = other DNA
gctcagaggtgaaaaatcttggctggattagcccagatgcctggcaagcgtcctccctctccagggtagccagttcagggaaactggggagatgaggggcccacaggcatttgcagcagtcacctcattgcacagctgagggggcttgtctgaggtcacattagcagattgcccatttccctttgtgtgacttggcaaagagaaaaatcgcctattagtttttccgaaggatggagggagtggggcccccctctgcctcaactgggctggcctgggggcccagtgcctcccagggcggctctcccgggtctcccctatttggccggctcggccagctgggcctggcgttcggggcggggccgaccgagcgggcgggctgcgaggccgcggggcatgcggaggcggaggggtggggaccggggtgggctgcgccctcccgctctggcccattcccggacactgtcagctgaatcactccccttttaggaggagggaggggaaaaaggtgtctagctcctttctgcttaaaaaagca

SEQ ID NO: 7834 - DNA, 494 bp, Homo sapiens
  source 1..494: mol_type = other DNA
caagccactgaatttatggtaacttgtaacaagtcttggtgcccatgtgttccacatctgagaggaccaccaagctggtatcccagaactcttgattaacacatgtggttggctggcagccagggaccgaattcttcctgaatggagtaaggaggcctgtttcagctcagaggtgaaaaatcttggctggattagcccagatgcctggcaagcgtcctccctctccagggtagccagttcagggaaactggggagatgaggggcccacaggcatttgcagcagtcacctcattgcacagctgagggggcttgtctgaggtcacattagcagattgcccatttccctttgtgtgacttggcaaagagaaaaatcgcctattagtttttccgaaggatggagggagtggggcccccctctgcctcaactgggctggcctgggggcccagtgcctcccagggcggctctcccgggtctcccctatttggccggctcg

SEQ ID NO: 7835 - DNA, 79 bp, Homo sapiens
  source 1..79: mol_type = other DNA
tgcatgagaagccatgtgtgtatgatcatgtgtaataacatgcatgagagaagccggatccctttagaaaagtattcca

SEQ ID NO: 7836 - DNA, 524 bp, Homo sapiens
  source 1..524: mol_type = other DNA
taaaataattctaaaactcatcatgactttcttgcctaaaagatcttgttttgctttaatcacttgcttgagaaatacataaatccccacttaagattagtgcaggcatatctatttctggttctattaaaattcctagagatgtcaaaaatatgatttgtaaaagcagtggggctatttctttttttttttcttaaatatcacctattaggttgaaaacctgaaattgcagctttctgttgatgagtactacacccctgatattcttctgatactaaaataattttcctagtgtagtctaaacttttttaaaaagacatgtaatcctctggattaaattcccagctagctagctagctaagcagggtcagtccctgcaatttaagactcaggaatttagactggcggtcccgggaggccgggggtggggaagcgcccagtgcgcagactccgcgggcttgcgcaggcccgcaaaagagggacggcctttggggcgcggcgccgcggctgggggcgtggcgccg

SEQ ID NO: 7837 - DNA, 363 bp, Homo sapiens
  source 1..363: mol_type = other DNA
ttgctccaggctggagtgcagtggcacgatctcagctcactgcactcctgtctcagcctccctggtagctgggattaatatcacctattttgaaatataccatatactgttgttaactaaatactattatttagctattatttattcctttttatgagattaaatttttaactcccacatctgagtgattcacttgacataatgacctcgagttccagatgacaggatttcatcctttttttatgaccaaacaatatttcattgtgtatatgtacacattctctttgtccattcatccagtaataataaacactcttaagatttttatcaagacaatatgtgcacagctgaacatagaccctt

SEQ ID NO: 7838 - DNA, 377 bp, Homo sapiens
  source 1..377: mol_type = other DNA
tgaattaataaaagtatagcaacaaggatacgctgtgtttgaaataataagtagagacgccccgtttctattttaatcaagaatatgtcaaaagaaagaggagccagagacagccttctcttaacacaaagcagggtgttgtatcttcatctgacaataagtgacttagttaactttgatttaatcactctccactggtatccagttacagctgtcgtgaaagccctgaatgggttcccactgtatttcagacaaaactgatgcagttaagcctgaatttcccaaaaggctttttagactgcaaatacaccttcaacagaaacgtgccaaggtgtgacatttatgaatttcgccaactgggaactgtgcacactgct

SEQ ID NO: 7839 - DNA, 351 bp, Homo sapiens
  source 1..351: mol_type = other DNA
aattaggacccaattgcttttggagacttagccaaaaattcttcgccaagaccaattcaagaagggtatatcataagtttttcacaatttggagtcttacacttaaatcctcaatgtgattaacatttaaatcagtagacctaatcagttgaaggccttaagagaaaagccggcagctgctcctgatcaggcttgttgctgaacagctaagtgtccagggtcatcctaattgagctgaacactggtctcttccaatggcttctaatagagctatacaaggttccattccttggaatctgtgaggccaagaacccccagcccacccctatcttgggagtggcccgccacatc

SEQ ID NO: 7840 - DNA, 358 bp, Homo sapiens
  source 1..358: mol_type = other DNA
ttttcattcattcattcattcattcattcattcatgagatgtgcaaacacagctcaccacaggcagtcctcccacctcagcctcccaagtagctgggaccacaggtgttctagtgtagttcagccttaagactgtatcagcagataaaaattgagtatcagattatatttataaataaagcagttactaattgatgtttttttttaaacctcctttttttagggtacatgtgcacattgtgcatgttagttacatacgtatacatgtgccaacttatgaagcatcagtgagtcctgcagtcactacagcccccagtgaggacagatattttggtcaccatcaagtggatctttatttt

SEQ ID NO: 7841 - DNA, 355 bp, Homo sapiens
  source 1..355: mol_type = other DNA
ttattctagaaagctttcttccctgagcaaaggaggttggaattaatggtgcctggggcagtgagcctgtaccccgtgatgagtgctagaaaacagtcacttcaaccaattgattttggaaaacacagccgggacgcgcgggccggggagatgcgccgggggctggagggcggagagcaccccccgcaggtcccggccagagcccggggccgggtcacctgactcgcggaatttgggtggaatgggaggggaatggttagcgcctcccttcccgctcccactggatccaggtcggcgggggccggcgcccggcggccacgtggtggtgctgccgctgcccccgccccgccggcct

SEQ ID NO: 7842 - DNA, 434 bp, Homo sapiens
  source 1..434: mol_type = other DNA
aatcttgagttaactacaggttttacttaagagatattcaagcaaactcatttaaataaaaaaaggctttcttggcagtcttggatcaatggcaattaaacttccagcctagagacttgacttgccataggcctagtctatgataggggcaccttgtgtgtattacacacactgtattccatgtgcattatttagggctaagtgctaaataaataatgaacagctaaccattagcagatctagtagtcgattgtgcaccgtggccaggatcgtcgccgaatataagtagggccgtggggcccggcgctcccttccatccttggacggtcacctccgaggggtaaggccggaggccgggcgcgtcagggactctccgaaccggaagtgccccgcgtcgccatggctacaggcgctcccagcagaacccgtagcgt

SEQ ID NO: 7843 - DNA, 509 bp, Homo sapiens
  source 1..509: mol_type = other DNA
aggacaagaaccgtgtctaaaaaacgcttagttgaacttgcaatcctatctgaaccacacaaatattactttggaagaacaaaaattctattacaaatactctttaaaagagcatatattctggaaacaaatattcgctgtgggactgttggcaagtgcctcgtttccacatctattgttaagattaaataagttaaacaataagaagactgtagcctagccaatagcctagtttaataaactttagtcattactaaccattatctctgtaaaaatgggaaaagaatttgttaccgggagagaaaaaaaattcaagtaatgacgttttgttctctaacttaagactattatttatttattaagttatttattatgactattgacaagttattatgactattaagttattttgtctactgaaaccttccgatttcattaaattacatttatacctgaataaaagcatttgcttgcacaaaggctggccacaaggctgtactgatcatcct

SEQ ID NO: 7844 - DNA, 334 bp, Homo sapiens
  source 1..334: mol_type = other DNA
gggccgggtaaaggttttaaaacccgccgcctcccagtctggccccgcaggtgtagcccggggacatcccctccggggcctgggatccggtccccgctgtggcgcggcacgcgcggctcctccttcagctctgtggtggaagagtggcgggactggcttcacttcctccgcggttcctcggagccgcccctttgctgagaagggctctcgggcgtccagaccccaccgcaaaggtagggtttccgcactcggggaccccgagactccgggcccgccccgccatcgcctgttttgttggaggcggggctggtggcgcgggctgcacaaaaccgac

SEQ ID NO: 7845 - DNA, 560 bp, Homo sapiens
  source 1..560: mol_type = other DNA
tattgttaagattaaataagttaaacaataagaagactgtagcctagccaatagcctagtttaataaactttagtcattactaaccattatctctgtaaaaatgggaaaagaatttgttaccgggagagaaaaaaaattcaagtaatgacgttttgttctctaacttaagactattatttatttattaagttatttattatgactattgacaagttattatgactattaagttattttgtctactgaaaccttccgatttcattaaattacatttatacctgaataaaagcatttgcttgcacaaaggctggccacaaggctgtactgatcatcctcgtctaaggggcatcgtccactgcgcattcggccccgagggatgctcctggggccaacaacttctcgccaaacacctgaagggattagacagcccatcagtgctggcgaggtccggcgagctccacctggaaaattagctacaaatccgcggggagtcggttttgtgcagcccgcgccaccagccccgcctccaacaaaacaggcgatggcggggcgggcccgg

SEQ ID NO: 7846 - DNA, 241 bp, Homo sapiens
  source 1..241: mol_type = other DNA
agtgcatggcacattcaatgtctgttgaatacaacctagtctatttttcagtatctcttgagttaatgacctggttaacaagtcagactgagagtggctgagggccgggtaaaggttttaaaacccgccgcctcccagtctggccccgcaggtgtagcccggggacatcccctccggggcctgggatccggtccccgctgtggcgcggcacgcgcggctcctccttcagctctgtggtgga

SEQ ID NO: 7847 - DNA, 429 bp, Homo sapiens
  source 1..429: mol_type = other DNA
caaaggctggccacaaggctgtactgatcatcctcgtctaaggggcatcgtccactgcgcattcggccccgagggatgctcctggggccaacaacttctcgccaaacacctgaagggattagacagcccatcagtgctggcgaggtccggcgagctccacctggaaaattagctacaaatccgcggggagtcggttttgtgcagcccgcgccaccagccccgcctccaacaaaacaggcgatggcggggcgggcccggagtctcggggtccccgagtgcggaaaccctacctttgcggtggggtctggacgcccgagagcccttctcagcaaaggggcggctccgaggaaccgcggaggaagtgaagccagtcccgccactcttccaccacagagctgaaggaggagccgcgcgtgccgcgccacagcg

SEQ ID NO: 7848 - DNA, 408 bp, Homo sapiens
  source 1..408: mol_type = other DNA
actgatgcatgtaaacattccacattacagtgaaatatattggtgtattaatgcattttaataattatggtattattttgatacctttcaaagtgtttggaataattgtgcagatagtcagatcaaccaaaacctatactatcctttaactgctttctacctaaaccaatcttggaaagttaaataatctaactgttttctcaagcatattggtcaagatgatcaataccagatatcccgaattctgctactgtattagctgaggaggcttgagctccattgagaaattataatcagatattttcgctgcactcacactgaccgccatgtggccctgcctcccttccgcgcggccccgcctctcgccccgccgaggccccgcgggcctcgccagcccatgcgaagcgg

SEQ ID NO: 7849 - DNA, 150 bp, Homo sapiens
  source 1..150: mol_type = other DNA
tacacatatttacataaattaattaagaatgacaaaaggatatatataagcatgctaaatacttgcttaccaatttatttaatattaaactaacagaacttgtcagatgacctttgctctagaaagagaagccatgggcagtcaccactc

SEQ ID NO: 7850 - DNA, 610 bp, Homo sapiens
  source 1..610: mol_type = other DNA
gataataactgcctttacagagttattatgagaagcatagattaagttgacataaatttaggaagattcttattccagtgcatcttggtaaatttccaaatcacagatgtgtaatgatcagaagttgcaggcctagttataattaacagttctgtgaaagattatgaactcttttcatgttaatatttcattaaaaatttttggttatggattggacatatcaacaaccaaaaatgtacaataataatattcaaaaggagcaagaaatccttttgaattcttacttattcagcctgttcaggtatgataatcatttacctgttatgatgaaaaggtaagataaatgaactcacccttgatttctcatcaagtacttcattaagacaaagagaattcttaaaactattctgtaatagaaagtgaagcagtgttcattttgaaaactgaagatgcattgccttcatgtttaagctgtcagtgtataaaaacctctagttgaaatctacccaaaattcttcaacattaaaatttttcattttgtattttaaaatctttttctgtgatcaggctgcaaaagtattaagaatttgtttttgttactgtgaaatgt

SEQ ID NO: 7851 - DNA, 264 bp, Homo sapiens
  source 1..264: mol_type = other DNA
aatgaacgaaacttgagaattcatatttttattcaaaatcgttttcattttagactgatgtcacctgacgaaccaactgaaacaaaatgtatccttgcattttccagcaaggaattgccttgcctacaaaaatactctgtactttaatatgcagatcaattattaaagcagaggaggattccagcctgaagcgtggtcaaaggcgacaggtgagatactcagggtattaacttaaaaggccaacaccgaggctcatttgagctg

SEQ ID NO: 7852 - DNA, 441 bp, Homo sapiens
  source 1..441: mol_type = other DNA
gcgagactctgaaaaaaaaaaactcagtaaccttggtttaaagtatttcattaattattatggcatcaaatgacaccatagtcagaaataactatttgattcaggcaggttgtttttgcaagagaaaagaaaagataaattctttatttgtggaaaacaacagaagtgccaatgtttattatattcattaaacacagcaagaagtttgcgctttgggtattaaaaaaaaaaaaaagcaaaaccttgctgctgttcaatgttactcagagctgcctggaaaaatatcatctttgaggtcattcaactcactaagtcatttttatttaaaactggcaggctctggacgttttgcatgctgaagaaaatcactgttttgcctccagcaaggaacataaatgttgcaacactgactcctcctctcatgaagaaagagtgaacaag

SEQ ID NO: 7853 - DNA, 303 bp, Homo sapiens
  source 1..303: mol_type = other DNA
gctaactgtgatttcccagttatccagattcccccgcgagactctgaaaaaaaaaaactcagtaaccttggtttaaagtatttcattaattattatggcatcaaatgacaccatagtcagaaataactatttgattcaggcaggttgtttttgcaagagaaaagaaaagataaattctttatttgtggaaaacaacagaagtgccaatgtttattatattcattaaacacagcaagaagtttgcgctttgggtattaaaaaaaaaaaaaagcaaaaccttgctgctgttcaatgttactcaga

SEQ ID NO: 7854 - DNA, 541 bp, Homo sapiens
  source 1..541: mol_type = other DNA
ttttaaaatttctactttcattcatttataatacagtagtacatatatataatttatgactaaaaatacatatgtatttggaaaggcatgctaaaaatgattttactgctaagatgataaaaaaactttggaggtcacttctctagaaaataactcttcaaaatttaatgtacgtaggaactacctaggtctttgatcttggacttcccagtctccaggactgtgagaaataaatttatgttctttataaattaaagaaaaaatacaaagtctttgcatttctaataagattatgattaatctaataagttgaaatcatttgttttggtttaaactaattaccaagtcaattcattcatagactaggcctagggttaaaatgataattagtatgatgccagtgcaccttagagactaacaactgctgcatttgattcagcagactcagtttgaatttccttagaaggaaggacacattgtctaataatagcagtgccttatatttacacatggtttataattaaccaaatgtcaactcata

SEQ ID NO: 7855 - DNA, 224 bp, Homo sapiens
  source 1..224: mol_type = other DNA
ttccactacagtgtatcagaactattcaaaatagccaagatatggaaggtatatatacataacggaataccatttgtccatggaattatgttcaaaaagacaaatactgcatgttttactcatatgctagcaactggggtgactatagttagcaatgatacattgtatatttcaaaatagctaaagatttgaaatgttaccaacgtatataaatgataaatact

SEQ ID NO: 7856 - DNA, 237 bp, Homo sapiens
  source 1..237: mol_type = other DNA
ctagcaactggggtgactatagttagcaatgatacattgtatatttcaaaatagctaaagatttgaaatgttaccaacgtatataaatgataaatactcagcatcctgagctggtgggaccacaggcgcacgtttcttacagaaaaaaaaacggtttcaggctggtctttcctcctgcgctggcgcacgctcaggtcttacccgccagcaggtggcgaaacacgtgtcctctgcggc

SEQ ID NO: 7857 - DNA, 336 bp, Homo sapiens
  source 1..336: mol_type = other DNA
tgaaacgttatttgcaaaaacagaatttggtcccaaggcttacttgggaaaaaaaaagatcttttgaaaaagaaaaaataaatgaataattttttaaaaaattgttccctaggtcatagacaaataattcttaataaagtactagtgcagactgtttctttaaatcaaaactcactccaaacaaccaattgattcactttgtaagtttgaacctgtagtcctagctactcaggaggctgaggcaggaagtcatgctattgtactccagcctgggcaaagcctctagcctaagatagcttgagcctagggagtagtctgttagataagtataaagcc

SEQ ID NO: 7858 - DNA, 503 bp, Homo sapiens
  source 1..503: mol_type = other DNA
tgtaatgctttaaataaaatgtaatgctttaaattcagattaaaaatgtaatacctgtagactgatacagccggtagatataatccattgaaggatttctctagaattgcactgaaagcctttccgaaaccatacctggtgtagtgatccctgtctttcccagggttgacccttcaaggggcagtgtgctttggggagattatcaaaatatccctagttctattttatgatacacattcagaatcatagtctctgtgttcgaattgctcctcttcatgaatgttatcttctaaagaggccctcagagagggtagatcagtttcccttagggattccctctcagggacatcttgagcttgggacaccagctagagattttcagcagtttccttggggatggagccttcattaacgtgatttactgaggcccctgtcattcctggctcttagtccccctcctactgacttcaggtagtttgatcatggagcatgcacccacctac

SEQ ID NO: 7859 - DNA, 343 bp, Homo sapiens
  source 1..343: mol_type = other DNA
cataagaatgtaatgctttaaatactgcaaccaaggatttctctgcttatttagagttgcactgaaagcctttcctaaaggaagtcttagtttgacctggtgatccctgtcatcagcatgtgctcttgggatactcattcagaatgatagtctcagcttttgaatttcagtcctccagggacagacctggacttccagaggtaggactctagcctcttttcaggaatgttaccttctaaagagacacctggggattcccttccagggaggtggaaccagctcaagattttaaggctttcagggttaagtatgggctcaccgacccctcctactgactgctggt

SEQ ID NO: 7860 - DNA, 306 bp, Homo sapiens
  source 1..306: mol_type = other DNA
atctcctggaggtgcttcctgcagataatttcaaggcaattaaagaagctgcagtttatgcattgtacacagcagctattttttatgtgccttcgagaaggctttttgacttacgatcctgcaactaacaatattagccagtagcgatattcgattattattggcgcgcggcggctccgagcgtgctgctcgggcccccagcagccagagcgcgcaaggagcccgctctgcttcgcggccgcactgaggcccaaggcctgcacaaccccccgcgggagcgggactggtcggcccacggggtaggcg

SEQ ID NO: 7861 - DNA, 504 bp, Homo sapiens
  source 1..504: mol_type = other DNA
tcttctcagcagagataggctgaaagcagctcgcttttaggcggcgacgcccagctgagcgacagcaagcaaccaaatggctttgctggaggccccctgcggctgcaagggcatgcgcagccttcccgccttctccccgacggaggaagaagcttgttcgcagcctctcacctggccggcgggctgggctactgtcaccactcagcagccaaggacttgggccccgcagcggcggccactcggggtctgccgggtcccctcgcgcctcacgcgttccgccttaggctcaccgtccgatctcgccagacagcgtctggacgggaccgggaaacggcggccgccacagctgtccaggttctgggatccacgctcagagacgacagcgctggcgatcaccagaaggcctgcgggcgccgtagcgcctaccccgtgggccgaccagtcccgctcccgcggggggttgtgcaggccttgggcctcagtgcggccgcgaagcagagcggg

SEQ ID NO: 7862 - DNA, 649 bp, Homo sapiens
  source 1..649: mol_type = other DNA
gttttaaatgaacacagttctgtgattagataaggtttagtaaataagcagaattaagatgattaatgagatttgaaacaattttatttattgtcaaactcatttgacaaaagttttgaattgaaattgaacaagcacatgtaataatatttacctctaaaacaaatttcattagtaattaaggaaaagtaatttaaacaataaattttagccatttatgtttgtaaaactgtcaagaatgagaaagccagttttattcttatgtgcaatcaaatttgattaaacatatcaaatccatatatatatatatgcatgcatatatagctttttgtatcaaggtctttctctgagttgagctgataatttaggtaaacaactacttggtattgtaatatcaacttgttatatttgaaagaataattgggttgcctttaggcagttatagtccaaaagaaatgagaaaaatataatgttccatttaataaacataataaacagaagaatataataattagaagaatagatcaatgttgtcttggtttggtaactatagtgtattaggtaactattgttgtataacaaatcactcagtttagcatcttaaatgtaaatatttatgacctcacacagattataaaggtcaagattc

SEQ ID NO: 7863 - DNA, 516 bp, Homo sapiens
  source 1..516: mol_type = other DNA
cagaagtaaagatgttggcatatacaaatgtttaatacacattatttccagataccctagggtaaacacatttttggattgttacgatcaagtttaaaacttctgttttatacaaggctacattttaaatgaatgacccttgtgcatatttaaggtatgcatttaacttcaaatatgattcaaaggatcagttattgtattttggtataattatggcagttttaagaaaaaaatgaaaggtaaattctattcctctcttacttttttctgaactttatcattaagttaatggctactgtctaaagctttaaggttgaagagaaaaatttgaagttggacacattggatatgtttttattaaaataatttgtgaattagtacctctaaaacattctacaaagaattatttaaaactactgattttcaaaatggccaaaaactagatttataacagaaatttggttatgtcttgtattttgctggcagcgagtaaagtcttggacagacttaaaccag

SEQ ID NO: 7864 - DNA, 335 bp, Homo sapiens
  source 1..335: mol_type = other DNA
gaggatgtgcacttttccagttaaaagctttcaaagaactaattcatttggactttgtcctggcagcggggcgggcactgggtcccacgccgagtcgtgccaagccacgcacacggtgcagcaggagccgggtccgcctcctcagcccccagcctgggccccgcgccgcctcagaccggatccagctggattcctcagggaggccgcagccaatggcgcggcccctcggatccggagccgccgcgggctctgattggccgcggggaggtcgcccccgggcggcggggtacgtccccctagccgcgtgggccacgcacgtcctggcacttaacctc

SEQ ID NO: 7865 - DNA, 495 bp, Homo sapiens
  source 1..495: mol_type = other DNA
tacaactgcagtagatagactactgaaacaattaaagcattcaagaattataaaagatcaatcacctacttcataaaaattttcataaaccagactatacttggggaattgttaattgcctcaaagtaaaatgagggcagccacccagatctggttttacagtgtcaagttctgcagagtccagacttcgaggctaaacagctcgcaggacctaccagcattctgacttcagtggggtttatgtttccaaacagtaaggaaatttactttctcctatgacctagaagtagcaaactctggaaagataatgttttgtgtgtttatttttcttggcaggaaggctgccctctaactttgaaagttccagcagtacatttccatgaggttctaccttttagatttcacatgcacaaatgaatcagtataaactcctgctttcagcttgcattttaattacaaacaaagtagcagaaatcaggtactcagttactgtaa

SEQ ID NO: 7866 - DNA, 300 bp, Homo sapiens
  source 1..300: mol_type = other DNA
gtagattcactgaagaaccttggggtcaccctaacccccttgaggatgtgcacttttccagttaaaagctttcaaagaactaattcatttggactttgtcctggcagcggggcgggcactgggtcccacgccgagtcgtgccaagccacgcacacggtgcagcaggagccgggtccgcctcctcagcccccagcctgggccccgcgccgcctcagaccggatccagctggattcctcagggaggccgcagccaatggcgcggcccctcggatccggagccgccgcgggctctgattggcc

SEQ ID NO: 7867 - DNA, 140 bp, Homo sapiens
  source 1..140: mol_type = other DNA
gggctccgtagtctgtatgggcattttaaaatgtccttttctgaaggaagggttttcttccatctagaattaccagtaagtgcctcttgaaaagggccagttttggaacaaagcagggttaacctgaagtaaatttaccc

SEQ ID NO: 7868 - DNA, 497 bp, Homo sapiens
  source 1..497: mol_type = other DNA
aatttttgtttctaatgaaccattttcttccttctaaagaagatttaagttttgggaataagtcacctcaaaaaaatttttttttattttctaatatctattttcacaatttatttttcttttaagaaaagtggactagaagctcaagttaccttctcaaggcaatgagaattttttagctctaaaaaagttgtgttttaaaatgaccaaatctcaagtgtactttgcactcttggtcttaaaatgctcaacacaggcagtaaaaaaatgaagttttgaagtttcaactgctgaaatagaggcatgtccctaactttagacaaatttagagaatcgtagtaagcattattttttttcgaaacagttaattccccgattcgaaaaaggaactttctcgtaacagttgttaaatttagccttagaaaagtctttgaaacgttctaatcaagacttgcaagcctgcttctggtccaagattaatcaatattccagaaacc

SEQ ID NO: 7869 - DNA, 487 bp, Homo sapiens
  source 1..487: mol_type = other DNA
aaaatagcccctttttaatttacacaaacttaatagagaacggtggaacaatggttacttcttgttttacaatttaaaaactacaacaaccatagtactgtatcagctggccgcaggcccgcgggtcgcccgcagtcaccggtggctgagtcggggccggcggttctccccgcgcgctcggctccacccacacctagaggggggcgcccgggcagccgcgggcgagcttctcgctcgcgcagcgtcgccatccacccggctgcagggtcgaatcgcgggcgtcctctgtggggccgcccggagatcggctccctgggacagccagcgcggcctccagccgccgccgtcggcgacctgagagcccgtccgggcctgagtgccccccacgctcggagagccggcccgcctgtgtcgcagggcccctgaggggacgggcgtagaggagagctgccgcctcccggctgctgggcccgggtgccgcgcggcg

SEQ ID NO: 7870 - DNA, 462 bp, Homo sapiens
  source 1..462: mol_type = other DNA
tcagctggccgcaggcccgcgggtcgcccgcagtcaccggtggctgagtcggggccggcggttctccccgcgcgctcggctccacccacacctagaggggggcgcccgggcagccgcgggcgagcttctcgctcgcgcagcgtcgccatccacccggctgcagggtcgaatcgcgggcgtcctctgtggggccgcccggagatcggctccctgggacagccagcgcggcctccagccgccgccgtcggcgacctgagagcccgtccgggcctgagtgccccccacgctcggagagccggcccgcctgtgtcgcagggcccctgaggggacgggcgtagaggagagctgccgcctcccggctgctgggcccgggtgccgcgcggcgcggccgaggacgcgagcccaagtggcggcagcggcggctgcggcggtggcggaagccggcggagggagtcattcctg

SEQ ID NO: 7871 - DNA, 459 bp, Homo sapiens
  source 1..459: mol_type = other DNA
aagatcttaactgacaattttcataaagttttgatttatattttatttctgggctgcagtgcagtggcgcgatctcggctcactgcagttcaagcgattctcttgcctcagcctcccgagtagctgggaaactgaccttgggtgatccgcccgactcaccggccaaattgggcttgtttttttgtttttttaataaaatagctttaaaagaaaaactactcatctatcaagatgctagctatcagtcgcattaaagcatcatttgcagctcctaatgaatagtatcagcgctgctaaaattattgagtgaaaaaatactgttagtcaatcttaaaattgctaagagcgaggaaaattgacgttcctccggatcctgctcgagaagctgggggactcgggtccggtgccgaggtgtggcccgagcctggcaccacccacgccggccgggtgaccccggcc

SEQ ID NO: 7872 - DNA, 259 bp, Homo sapiens
  source 1..259: mol_type = other DNA
gtagtaaatgaagctatagtttatacctatccaaatagaaaaattataatgaatctctgcttggtatgaactcttgggttcctatctcatacgagttcctatactagcgctgggaaggaaaagcacggcagcttcttcttaaacacgtattttatactaaggtatagtgagatactggtttatatccctctctgtgacagcgaccttgcgcgctcatgcgcgaactcatatagctgcagttccagttccccaccggatg

SEQ ID NO: 7873 - DNA, 515 bp, Homo sapiens
  source 1..515: mol_type = other DNA
ttgtgtattttgtctcaaattaaaaacaaactcggtgcaccacttttcaatctatggtctatatataccaatgataaaaaatccagtttttcttggtatattggctatgtcaaattttaagtgtagattggtaacatcaaagaactttcaattttcagaaatatagcaaaagaccaatttagagtaattcagttattgatttgtgaaattctgaagaacataactggaagctttcttaggtgagattctaaataagagcagctttctaaaaagtggtagtaaatgaagctatagtttatacctatccaaatagaaaaattataatgaatctctgcttggtatgaactcttgggttcctatctcatacgagttcctatactagcgctgggaaggaaaagcacggcagcttcttcttaaacacgtattttatactaaggtatagtgagatactggtttatatccctctctgtgacagcgaccttgcgcgctcatgcgcgaactcatatagctgcagt

SEQ ID NO: 7874 - DNA, 396 bp, Homo sapiens
  source 1..396: mol_type = other DNA
ctgtgggcagatcacctgaggtcaggagcaggcgcctgtaatcccagctactaggttgcagtgagccgagatcacgccattgcactccaggttgcagtgagccgagatcacgccattgcactccagcctgggcgacagaggctctcccagctactcgggaggctgaggcaggagtcgcttgatccggcagtcagtgagattacgccactgtactgcagcctgggcgacagaggctcaggatgttatagaaactccagatactactcggcgctttcccgcctgtccggtagggcggtgccgcgcagaaagccgcggtccctctgcggaaggcgccgctcttggcttcggcggcgccgctgtagcttgaaggcggtacttcctccagcatttgccgca

SEQ ID NO: 7875 - DNA, 361 bp, Homo sapiens
  source 1..361: mol_type = other DNA
tctttgcctaacagcaatggtaaagcatttactgagctcttactacatgttccgctagagctcataactttttgggaagttaagtaacttaaacttgctctcgcaacagaatacctatttaggtggctgggtgagtggtgcccccgagcctgccctcgactagccagccggttgggacctcgttcaggggcctataggacgggaactacccgattgccccccaggaatgggggatgttgcgacctgaaccaggagtgcgagctgctcctggggcgcgtgcccgaggagccgctggcctgcagcggtgccggaggaggagcccactcccgcctgcccgcgcaggtgccgccgccggacggga

SEQ ID NO: 7876 - DNA, 363 bp, Homo sapiens
  source 1..363: mol_type = other DNA
tgtcccaggcagggtctcctctggcaaaaggtacattttactagcccgatcccgggatcagaggccaggaccccgccccggccccctgccccaggcccagctgggcgccgcccaggggcttttctcggtccgcctgggggctcgagctcgcgtccctccctaagacgccaggcccaggagggtctcaagttgccttcctctgccgggaagggcccccagcgccccagggtgaggaccgcggagggtcctggacccgcagtcgcctaacgtccctcccaggtccccaatctaggtcaccagcggggaagggctgcgctggggggaaggtttcagggcctgtccctctcacgggccggtcgagcc

SEQ ID NO: 7877 - DNA, 471 bp, Homo sapiens
  source 1..471: mol_type = other DNA
tcagccagttataaagtcttcaattttaggtaaattacttaactactcttaactcagttttcttatgtataaaatggattagtcatacttaccttgtaagattattgaaaagtttagaaatatatcatgttgagctgttttaattgagaaccttgaattcttgaccaagaagcctagaatttatggataaagatgaagagaatcttaaccttgttgagaatgtgttaagccagcttgctttatgtttactaccaaatggatttcttcttctggaatctaacaattctgaatatgtggagatagatacagtagttccctctccgcagcaagattcccagtggatacctgaaactgcagataatactgaaccctatatatgcagcagaactagcataaatttcattttccttcttcaacttaattcagttgagaactttcaccttttaatttaaaagatgcacttcatggctt

SEQ ID NO: 7878 - DNA, 388 bp, Homo sapiens
  source 1..388: mol_type = other DNA
tgtaccccataaatatgtaaaattattatgtgtcaattaaatttttttcaataaaataaaagcaaaaaaattaggtataaattatcacctgaggtcaggaggtcgagaccagcctggccgcctatagtccagctactcaggtggccgagatcgcgccactgcactccagcctagagagactctgtctcaaaaaataataataatagtaatgtttacaacatttaaaagggctcagtggtctattatttgtccctatatatactcacttaaatgaagcatagtttgactattttttaggcagctagctggcttatcattcctttactctaggagctgtttctctagatttaaaagaaatgcagatagaagtgtcagacagctgattcta

SEQ ID NO: 7879 - DNA, 263 bp, Homo sapiens
  source 1..263: mol_type = other DNA
cccagctaagatcgcgccactgcactccagcctgggtgacacagtggccgaagaaactttgtcggactgagccccagtacctctggttccgccggctggcccgtgcgtccttggccggggcaggagcagcgctgcgcgcggggcacggagcctcggccgccgagttttcgcaaagtccgggttgtgaggctgcgcctcccccaggatcgcggccgcctccccccgggactgaagggagggaattcctgtgggtcccaggagtg

SEQ ID NO: 7880 - DNA, 256 bp, Homo sapiens
  source 1..256: mol_type = other DNA
tggtctttgcattgccccaggtccatgaatcactatatataaaggagtggtacaaattgtccatgctaagaatgagcgatccgggcgccttgtagtcccagctactcgggaggctgagagccgagatcgagccgctgcactccagcttaaaaaaaaaaaaaaaaaagacctattgtggttttcaggattactctaatactagaagtgggttggagtgctggcctggaggcaaaagctttttaagacacaatttggt

SEQ ID NO: 7881 - DNA, 543 bp, Homo sapiens
  source 1..543: mol_type = other DNA
ttaaagatgaaacaaacaagcctgtttccttctgtctggcacatttctgaactttgcaaaattaattgtgccgaggaggaaaaatctgaggcaagactagatggctccaggatactctcggcgcgcccgctggccatctcgggcaggggagccccacacccggcaggaggaccaggacgcgagcggcggcgcctcggccctgggctgtttagaggcggcgaaaacacggttccccgctttcctctcctggcactgtttgcagcggcagcagcggccgcattcggggaggcgcggtcctccccgcagagccgtcgcgcactcggagagcggcctcaccaccggaggctcggaggaagcaccaccctcggcgtccggggcccgtcgcgcggccgcgttcctccgactccttggagcacccgcgcgcgcgggcgcgcggccggggatcggcgggggcgcgcgggttggggcggggccggggccgggggcaggggcgggtcaggggcggggccgggcccgctgcgcccccagccgagcggcgtgcag

SEQ ID NO: 7882 - DNA, 482 bp, Homo sapiens
  source 1..482: mol_type = other DNA
gtgttcataaatgcataaggcatgagacctccaagaaagggcttcttcctttaaaatggcatttgcatgaggaaacttcccaggaatatttcagtaatgacatttaaggattttcataagcatctttactgagaatgagattttgcaaagagacaagatttgattaagaagttctacaaaatcaatgggtaatttttctttccttcttttgccctgcagagaaggaaagtcaatgcaagatttataaattaggcaatatttgacaatagtaaaaggaacagatatctattttcattaaaaaaagattgaaagcaaagaagagagaatgtgagaaaattagtacccatttttattcatttatcaaatacttactgagtagcaactgtcttctgggactgacagacaatggggaataagatccaggcctgcctgcaagtggcttattttctcactggaagttggaagtagcagtgctcctcact

SEQ ID NO: 7883 - DNA, 552 bp, Homo sapiens
  source 1..552: mol_type = other DNA
tgtgtgtgtgtgtgtgtgtgtacacatacgtattaactaagcagtttctagaattaaaatccctaatgttaataggcttatgcataaaatagattctcggctcccggcagagaacaccctctccccggcctcccggcgctggcgcgatcccaccgcggggaccgccgccctggtccccggccgctgcacccacttggagaagccctcctagccgagagggtgtgcgcagcgtttttataaaaaaatgtttcagtggaactggcaggccggcgagagcaggtggcccgccggccgcatcccggcctcctcctccccgctcgcctgcatttggacgacggcttccgcggcggccggaggggagcatccatgggactttcctcgtgggaactgcccctcccggcggacgtgccctccgggtccggcgtgggcgggcgggtgccgcggggtcggctcagtgctccctcagcgctggggccgagcctgcaccacccgccgccgtcgccgccgagggggcgggggaggtgccgcggggggcgggcgcggcgcgcgggg

SEQ ID NO: 7884 - DNA, 580 bp, Homo sapiens
  source 1..580: mol_type = other DNA
catacatgtacatataaaatattttataatgtatatttttaatttcgtacatatttaaacttttattataaaacaggaaatttgtaatattttgcttgatttaatatcatgaacattatttcctattactaagttgacataatttacataatccctacctttggtcatttaagtgtttccaaatgttcactcttattaacaacttcaacaaatatccccaatattgctttttttttcttttttaaagtaagcagagaattggaataaattagaacatccaacagatatttattgaatacttatttgtgccagatattgcattaaacttttaattaactttcacctctctttaaagtaaattgtgtgtgtgtgtgtgtgtgtacacatacgtattaactaagcagtttctagaattaaaatccctaatgttaataggcttatgcataaaatagattctcggctcccggcagagaacaccctctccccggcctcccggcgctggcgcgatcccaccgcggggaccgccgccctggtccccggccgctgcacccacttggagaagccctcctagccgagaggg

SEQ ID NO: 7885 - DNA, 548 bp, Homo sapiens
  source 1..548: mol_type = other DNA
tgatttttttgaagcctccaattttgaaatatttctaaaagaactaaaaatttaaactccttgcttttgagacgtaaaatgggattacattcacagagaaaaatgaatgcctattatctttgctaagtagaaataagactgacagcctgtcccttacaggtgaatctttagtgctaaataattacaaataaggagaagaagtcattttattacttacttataaaaatgagcaacaaacagaacttcaatcacagagatgtatgttaaacatggccatgctgtatgaagcacacagcctcaatttacagaagaacttactttcattttttaaaggtagtttctacttaagagtttcaattataaaatatggaagaaatctttttttagtcacttccatattttttcaagtgaaactttaaaaataaataataccaaagaaaggatttgttccttaagtaaaaataagttcctctttcaagaaactctcgcaacttattttgccagagaggaagataaatgttacaatatcttgctatagtattttaaac

SEQ ID NO: 7886 - DNA, 494 bp, Homo sapiens
  source 1..494: mol_type = other DNA
caaagcaaggtaatatataacctagaattcttctataagctttgttaactggtttgataaaaactccttaatactgtagtaattaaattgtaaagacaatttcaatacaatactcgttccattaaaatgtggtggaaactctctttttaatcaaaagtaagttgattaataagctatttcttccagaacactgatgttctgaagagttaaggccctctttcattaaaaaagttcactgtgtttttaaaacaaaaagcaaacagggagactgaatttccttgaatttttatgaatctgcttgtaagtttcctttaatttcatgatcaaagagcagctctgtagtgactatctcttagtatttggcgatattttagccaaaggttctcttatagcttcccataaatgatgggcttcaaggaaggttgtagatggaatcagtgtacaaaacaaacattgctttttttaaaagtatgaaaattaattctcattggagc

SEQ ID NO: 7887 - DNA, 241 bp, Homo sapiens
  source 1..241: mol_type = other DNA
ggagtgcaatgtgcaatcatagctcactgaagccttgaactcctgtgctcaagaatgtctggggctggtctcaccatgttgtcaagactggtcttgaactccacacatgagtgaccactcttcagttgatatggtcaagcacaccactttacctcctgacctcagtccacatgctccagtggacctttctaatgtggaaagctgaacagacacttttaggtgtggctcactcaaccactga

SEQ ID NO: 7888 - DNA, 184 bp, Homo sapiens
  source 1..184: mol_type = other DNA
ggaacaagtttttctgtctcagattctatcttgttgacttgtaaatgcatttgctcacgtggaaataacctacctagcccattttgtcagtggcgtgattattgccccatatctacttgtcaatatgagaaagcaggaggccaagaattacaaaatgattctcctttggttggacttcagtacc

SEQ ID NO: 7889 - DNA, 565 bp, Homo sapiens
  source 1..565: mol_type = other DNA
ctactagaagcgcttttataatagcttttatttatttatttatttttttaagacagactgtcggccaggctggagtgcagtggtgcaatctcagctattctcctgcctcagcctcctgagtaggtgggactataggcacgtgccaccagtctcgccatgttggccagactggtgggattacagtcatgagcactaatagctttttgatggtaaaacatgtttagctaagatttgtcaccaagaaccttcacagtataaacattcatttaaactggagaaagattatttgcacaagaactattatcttctgaatttgagaaataatatcacatagaaaacatccttcatatctcttaatgaaagcatttcgggagaaaattgagccaaaatactgtcttgaaaacctttcaaaaatttaagttcttaattttccaacaatatttctatagcctgtgaaaataatatgaaatgcatctgaaccttgattttcacataaagtttgattggctgattggcctatgacctaagcgatttttaaaagaattttggaagtcttcatttggaa

SEQ ID NO: 7890 - DNA, 578 bp, Homo sapiens
  source 1..578: mol_type = other DNA
aactctactcaggcagaaataatatacaagacttattcttgccttatgcctgactatgaatatgaagatcactgaatatgtatctttctttttagatagaagttgaggtaaaattgcatctttacttcttgttacttctctgatcatgaaagatgtttagttaaaagatgattttatagacaaagctcaactaaatccttaaatatttgctatctttactaacaaactgaaatcggtatgtattaatatgtgacgtttgacataccaaatctgtattgaatctatatgaaaatccaattgagacaactgtttttcaaaatattagtgtaacatctatgtcaatatacaaaagtagtcaaaaaaagattagaaaagtaatctttttagtagccacacctgaatctaatctaatactttttaaggatgtggacaagatagattcttaatatgaaatctattagttaaatggaaattaaattgtgacagctactttcctaaactttaggaaacaaatgattacaatatacgaagtaatcttttttagtagacacatctgaatctaatccaaatactttttt

SEQ ID NO: 7891 - DNA, 486 bp, Homo sapiens
  source 1..486: mol_type = other DNA
aaatttatcccagcacttcgggaggcagaggtgggtggatcaccggtcagcgaggttgcagtcagccgagatggtgccactgcactccagcctgggcgacagaacgagactctgtcaaacaaacttaaaactgtactcaggactatgtttaatattatatataaatatggtctatctgaaaatttgatgtattgtctattcttcccaatagggcaatggatactttttctctctatgagattcatattaattctaggaaatatacaggacatttaaataactctactcaggcagaaataatatacaagacttattcttgccttatgcctgactatgaatatgaagatcactgaatatgtatctttctttttagatagaagttgaggtaaaattgcatctttacttcttgttacttctctgatcatgaaagatgtttagttaaaagatgattttatagacaaagctcaactaaatccttaaatattt

SEQ ID NO: 7892 - DNA, 435 bp, Homo sapiens
  source 1..435: mol_type = other DNA
aatctcctcaaactttctaagatactctaagatatcttagacattcttcaaccttgttaactgcttgaaaggctggttactgatgtagtcattatgtcattaacatactgtagttattactacattatgttactatgtattaggctgtctaggtgaggctgagaaacacttgatgacagtatttggtatcctccagaatatactctttaaagcagggagagtaaagtatcaatattttaagaaggaacattcttcccactcctttctagaaagagtaataatgaaaagtctatcttcaaatggtttaaacttttcatatatgccttcatagattctagttttcttaataaattactctttatgttcttttttaaggtaatagagcatgaacatccagtaaataagatttctttcattgcccgtgatgtgacagac

SEQ ID NO: 7893 - DNA, 422 bp, Homo sapiens
  source 1..422: mol_type = other DNA
gtaatatgtaatacagatgctaacgtgctttttgttaccatttagtgcaacagaaataaaccaaatgtgtttgaacatatgtcagtcatataaagggaaaattaagcgacttaaatgcaattcatttttgaagtagaaaaaacaagtatgtaggcttttccatcaagggctaaggttcaactatagctgaggcttttcatacatgtactagaattgaaatgatagacagttatatttaatgtccacgctgtcttctaaaggatagcttgatgcagaaatgcttgcttaaaaagttgatagtaattgaaagcaaatatttacctacatataaagatagttagagaaaatagtaactactcaactaacatatgattttattgtagttaagtggttaatggatttggcttttaaaggaacaatgg

SEQ ID NO: 7894 - DNA, 539 bp, Homo sapiens
  source 1..539: mol_type = other DNA
attctccaaaaagcaacagagcttctgtggatgttttacaataattcttgattttaaaatatggagaaaatgaattctcagcttgttaacgttaacatttttaaatattttattctagagttataggaagtgctatggaaattcatgcagataaagtcatgttatgtgtctacatataggtgtatatacactgtaagggaagcctgtatagaatctctgattgtatcagaattataacttatttgataggctacaagacgtgaacatgttttgctcatatcgatttcagagagaatattatttttatatccatatatatgattatatttcataggtaaatacagtatgtttcccttgtcagaaaagggcagtcctttgcactcgcagtggcaatccagggaacggatctgtgaaacgaagctcggtggatccccgccccccgcccgcgtcggtctggggccgctgggtccctgcgatcgcccccagctggtggggctcgcggagctcaggggagcggggtcctctgcgccgctgcagcg

SEQ ID NO: 7895 - DNA, 548 bp, Homo sapiens
  source 1..548: mol_type = other DNA
catataagaagtacttgctaaatgctaactgctagtgctattaatgttattgaagcacagtggatggatccacaagtattacagtttttaagatacattggaatgattattgagtttaacccattaagtaaaccatatattttatgttcacattgtaccatgtgagaaaattcctttggcggactatcatcaaaatgtgtttaaactcaaataattgtgtgcctctataataataggacattttccttccaatgaaatggctttttgtccaacggtagaaatatataaattacccaattcctgtcactgaacatgcagtggatttagagggagcccggactgtgatgtacagtgtgccctacaggtctttctggacctaaaaaaaatgtccttcaaaaataacgtagttattgacgtcagtaagtctgaagtaaaacaattacgtgctttcaagtcattttgttgcaaacactgaacgtctgacattatcctagaagttgtgcaaatgatttggcaatgtatgcacacatgaaacatggcaatgttca

SEQ ID NO: 7896 - DNA, 494 bp, Homo sapiens
  source 1..494: mol_type = other DNA
cctctgactttaaacaattaaatttttttcttaaaaaaagggaaaagagactcttttcagaattctccaaaaagcaacagagcttctgtggatgttttacaataattcttgattttaaaatatggagaaaatgaattctcagcttgttaacgttaacatttttaaatattttattctagagttataggaagtgctatggaaattcatgcagataaagtcatgttatgtgtctacatataggtgtatatacactgtaagggaagcctgtatagaatctctgattgtatcagaattataacttatttgataggctacaagacgtgaacatgttttgctcatatcgatttcagagagaatattatttttatatccatatatatgattatatttcataggtaaatacagtatgtttcccttgtcagaaaagggcagtcctttgcactcgcagtggcaatccagggaacggatctgtgaaacgaagctcggtggatccc

SEQ ID NO: 7897 - DNA, 387 bp, Homo sapiens
  source 1..387: mol_type = other DNA
tataaacagaataattctttattagtatatccatatagtgccttttgcaagtaaatatgattctggatattttatgacctgtaattacttgaaatcggaaagttcgttcaaacatttaagaaatgggtacctgcttatcacataaaagaatccagttatttacttaccctgtgaagacatattttccaggaatttaaattgtgcaataaggccacacaatcttacttaaaaaaaatggtgaaggggttttaattacaccatgaagttttacaattttttaggtttttagttctggttttagaaaacagaccgcaaggctctgccacctgcgccgggagaggctgcaatcactgaccaagcgcagcccgcagtctgggcactgccaac

SEQ ID NO: 7898 - DNA, 371 bp, Homo sapiens
  source 1..371: mol_type = other DNA
ccgcaaggctctgccacctgcgccgggagaggctgcaatcactgaccaagcgcagcccgcagtctgggcactgccaacggcgcacccaagtctaaccccggggcgcacgcgctagcgtagatgttgcggcccgcggacagggcagcgaggcggaaacggtcgccggtttcagtggtggccccactggaagccgaagcggtcgccggggaaagcaccggggcttcccagggtcccctccgagttcccactccgcacctccgaggccagtcttccctgcggcgcccagggaggacgcgctccgcccccttccaatccggccaatgggcgcccgggcagcgcgcggtttgcctccgcctccgccagggaaactt

SEQ ID NO: 7899 - DNA, 365 bp, Homo sapiens
  source 1..365: mol_type = other DNA
caggccagagcctctggcagagtggaccccgagccgcccccaggtagccaggagcggcctcagcggcagccgcaaactccagtagccgcccgtgctgcccgtggctggggcggagggcagccagagctggggaccaaggctccgcgccacctgcgcgcacaagaccgcccaagtttttgaaagctggcaactctgacctcggtgtccaaaaatcgacagccacgaccggctttgagaagcctgggggctcgtgaggctgccaccgctgctgccgctacaggtgagaagggaagagcgcgctctccaaattgcttttgtaacttagcattttattgatagaaaatattaaacaccttacaagtggt

SEQ ID NO: 7900 - DNA, 313 bp, Homo sapiens
  source 1..313: mol_type = other DNA
aaaatattaaacaccttacaagtggtagccccgaccggctgaacagcccagtgaccatcccggcggtgatgttcatcttcggggtggtgggcaacctggtggccatcgtggtgctgtgcaagtcgcgcaacagaaggagacgaccttgggcactttgttggtgagcccggtgaccatcgccacgtacatgaagggccaatggcccgggggccagccgctgtgcgagtacagcaatgggtctcggtagctcgcggctgcagtacccagacacctggtgcttcgtgacggcgcacgccgcctactcctacatgta

SEQ ID NO: 7901 - DNA, 601 bp, Homo sapiens
  source 1..601: mol_type = other DNA
attttatgaaaaataaacagactttatgctatggtatggttccatttatgtttatataatagactaagtattactcattacaagtacaataaatatttgttgatctcagtccagtgaaagtatacattttactgataatctaaaagtattaattcctatctcctcgcaacagagcttgctttggggaggaaatttcaggatcacctccagaagaaaacaccgacagcgctcctagagccatcgtggtgccctctagcaacttgccggcttctagattccatccgagaaagcagtggcagggcggtgtcccctgccttgctttaattcagcgacggtccgcctaatcgttccaggaagcccctccgcgtgccggtgggcgggcgctcaggcccgaggatgcggggcgaggaggcgggtactggtgattctcctggcagcccccgcccgccccgccagggggagcgtctgcgcccgacgtaggctgcggggcctgggctggcggcgcagggcggtgactcggctcggtggctgccctcccgcgtccccaccccctccccgcccgcccccggcgcggccctgcccgccccctccgccccctccc

SEQ ID NO: 7902 - DNA, 546 bp, Homo sapiens
  source 1..546: mol_type = other DNA
aaaacttaaagtaatttaaggtgctatttggggaggggagggagtttaaggttccctgccccactatttctgttttacagagatccaaaatccaaaaattctgctttacatcagtaatcaaagatttcttaactttttagtaggaacttgattaaggcgcagaaacttttgcttctcctgcaatatcttcctcggaacaaactttgatttcgattaaaaatgacatttttagtttttttcttttattgacactggcccaatgctatgacattccaaaattgagagaatataaactttttaaaacagaacacttgattttgactactaatcagaggagtactcaaacattttatgaaaaataaacagactttatgctatggtatggttccatttatgtttatataatagactaagtattactcattacaagtacaataaatatttgttgatctcagtccagtgaaagtatacattttactgataatctaaaagtattaattcctatctcctcgcaacagagcttgctttggggaggaaatttcagga

SEQ ID NO: 7903 - DNA, 483 bp, Homo sapiens
  source 1..483: mol_type = other DNA
ctgtggaggggccagctcagtgcaaatgtcagcattgcttcatattagtatgaaaataattttggctcaggacaatctttcttccaggggaaatttcactggggaaaccattggctgtcacaatcgactggtggtgacaattatcagtttgaaatgttaatggtgctgaggctatgacttccaaaaatgagtcttttgaaattaacaatcttgattacctttattacatgtgctgtccaactcacttgtaactttaacgtgaagcctgcagttcagcctcagctaggctataaaccccttcggggaaggagcatatcctaatactgacgggacgcgaggctgcgcggtaccgcgggggcggctcctctcggtgcgctcttcagcccgcgcagcccgcgctcgtgcgctgcggtcactcagggctgctgctagagggcgcgcccagccgcgtggccctgactaccatgcagtgggggcggccgc

SEQ ID NO: 7904 - DNA, 316 bp, Homo sapiens
  source 1..316: mol_type = other DNA
tactcctccaccccctgagtagctgggttggcaggcgcgcgccaccacgccggctggtctccaacgcctgggctcgccacggcgccaggcccttggaaactatattgaacaagttccatgtgtgattccttggcacaatgaaatatgggatcagagaggaggctgctggagaagttgcacgccggggacgctcagtcggtgcgggtacccctgggcagggccagccccgcattccagggatctgactgctaacgtgcgaaaccgatcagtagtcaccgcgccccgcaggaagtgcttccctgggcggaagcttctg

SEQ ID NO: 7905 - DNA, 696 bp, Homo sapiens
  source 1..696: mol_type = other DNA
tattttcaacttttaaaaaggttgtcatactgtatataatcttttgtcattctttttgaatgccatgtaatattatgttataagaaatatcacagtttattcggtaattttcttaaaataaataataataaaaaaccaaaaatgtaaaatattaaatagtaatgtttaaagtggaagtataaatctccctgtagtcatattctcagagataaccagtgttaaaatttgggatatctcttgtcttctttaaaatataatgcatatctgcatatacatattatatacatatactatatacacattaagttttttaaaacaaaaatgagatctataacttgctgtttccatagcaatatatcatggatatcattacttgtcaatatgtagagatgtacttttcactgtcgacatgtcaatatttattcctaaaccccaactttggttattttcaattttgtactgttgtaaacaatgttgtaatgcagattcttgtacatacatcttcgggcatttgctcaattatttccttaagataatttcctagaactatttattgctgtatattgccatattgcccaccaaatatcaattaataatttacattctcctagtccaacctgaagttcaagagcgacttcttggaggaggtgaccctgggtctgagtcatggtgagaatttatcaagacttcaaaaga

SEQ ID NO: 7906 - DNA, 685 bp, Homo sapiens
  source 1..685: mol_type = other DNA
ggtaattttcttaaaataaataataataaaaaaccaaaaatgtaaaatattaaatagtaatgtttaaagtggaagtataaatctccctgtagtcatattctcagagataaccagtgttaaaatttgggatatctcttgtcttctttaaaatataatgcatatctgcatatacatattatatacatatactatatacacattaagttttttaaaacaaaaatgagatctataacttgctgtttccatagcaatatatcatggatatcattacttgtcaatatgtagagatgtacttttcactgtcgacatgtcaatatttattcctaaaccccaactttggttattttcaattttgtactgttgtaaacaatgttgtaatgcagattcttgtacatacatcttcgggcatttgctcaattatttccttaagataatttcctagaactatttattgctgtatattgccatattgcccaccaaatatcaattaataatttacattctcctagtccaacctgaagttcaagagcgacttcttggaggaggtgaccctgggtctgagtcatggtgagaatttatcaagacttcaaaagaggatcagagagtgctccgagctgggttgccccagttagccaaatagaattgttctttgtcattttacttattcattaggatgatttcataa

SEQ ID NO: 7907 - DNA, 469 bp, Homo sapiens
  source 1..469: mol_type = other DNA
tcccttatagggaatctgttgttttatttactacaagtagacttaacatcttatagatgttaagagttttcatgatgctggggaagagctccttgcccaacagttaactgctatttactgatccactaatgaatgtttgggcaaggaccttggtcagtgcttttcaaagttcagtgaaccacattaaatatatagattgctgccccctcattctaatttactgggtctgaacctgggaattcacattttaaataaggataccgtcaccaaactctgaaagtctccatattcacatagagtctggacatatattgaagattgtcatcacatagatttatagttggggaccagatttcaattcatgctagataagttgaaaacattatggaaaattgatctagataaaaaataatttgatgctgctgtcagttggacattccatccaactgcccctgaagtgcattccagt

SEQ ID NO: 7908 - DNA, 604 bp, Homo sapiens
  source 1..604: mol_type = other DNA
ttagacttgctgagatcatcatttcccaccatgtgataaaaatctaagctgtctaaggaatatttgttttagttgttttctactgctttgaaaaaagtttgaaaaacacttgttttacaaatgagggaccagtgctgacaagactagaatatgtatccacattccaccttaggatgaaatccattttacttcaatctaaagttaaattgcaaccatttaatattttaatccaaattaaattttctgtttggttttgctggcatatagaaacactttttactataataaacttgtgttgataaatcatactaaattcatttattaattctaatgtttgtagattcttttgaattttctacatacacaatcacattgtctccaaaaacatttcttaaatagttaccaataactattctataatcaaaaactaagaatctatacattcattttaagcaattaatctaaaggattctttaaaatggaaagagagatttctatgcagtagcaatagctactacaatagcccttgaattgaaaactcactgaaaattcaggactctgtgtaacatccaacacccagagtttcagggttttgcaaagttca

SEQ ID NO: 7909 - DNA, 406 bp, Homo sapiens
  source 1..406: mol_type = other DNA
ataatctaaaatcttgcaaaataagcagcattttattaaatgtatgaaggtccaacacagtgatctgattatcaaaggattaagtgaagttcttgagaaaattagtgatgtcctcaaatatgtttacaaaaattgatattctttctgattattctgtgaaagttaaggggaaaaattctactccagaacattctatttagattttgagtgacagaactgcatttaaatattttctttcataaaatatttaatctcaaagtctggcatataacaccttttaagagaatatccacttagtttagtagattgaaacaagaaggagacattgaactgagaacatttgctgtgtttcctgatttatagatatgtttctaagaaacatatctataacttccaaacagtccca

SEQ ID NO: 7910 - DNA, 716 bp, Homo sapiens
  source 1..716: mol_type = other DNA
tgtaaatattctatatgtgaagagcttctccatctatagtgaaaaagaattatgccttccttagagttctaaagtgaacatagattttacatcatatagcccatttacactttttgtagaatatccatcaagaaacaatggtaacaatagtttaagacattattgtttatccatttcatatcccatatcttttgtgccacaagatccatgaagatcatctcatttacttttgataatgaccagaatgagtagttagagcagttatcatttccctattttacagataagaaaactgactgctaaaaatgttaattaaaatttccaagatcaaataattggtgactgagctgatattagaaacaaaactttatatgaataaatgtttataatatgttgtcaaattaatttttaaatacagaaaatacagtaatacacatgaaaattatatacataatagaatattaattgaaaatatatgcatacaaaacagcagattctataaatataaaatatctgctgtatttaaggctgtaatagatactgggtttcttgtcacagtaaaactaataatgtaatgatgaatagcatctaattaatatgagagttgatttgactctgaggaagcaaaaaagatcatgaatgacttaaaattttttttacttttctgtatttccaaatgcctaagaaaacacaatcagaaacaatgcatacctgct

SEQ ID NO: 7911 - DNA, 339 bp, Homo sapiens
  source 1..339: mol_type = other DNA
ttgagagaggcacatctttccagtctgcaaaggaatgaaaatgcagacagtcacatagtcaccaaatgctactggcaataattagagcatgtcctgagtgccatgaaactgacaggacagaggcagtgttctccatggaaacttgctatttcacaaagtaggcaaaagagtgaataaagataatcattttttaataaacagggttgtaaggtataacctgttgtagattacaaaaaggaaagtcctcaggaggcaataacatcccaaagtctgctaggattttaggttcaataattattaaatgcgccatcctgtgggtgtggcgcagagaggagtgac

SEQ ID NO: 7912 - DNA, 305 bp, Homo sapiens
  source 1..305: mol_type = other DNA
ctgactcatctgagattgagagaggcacatctttccagtctgcaaaggaatgaaaatgcagacagtcacatagtcaccaaatgctactggcaataattagagcatgtcctgagtgccatgaaactgacaggacagaggcagtgttctccatggaaacttgctatttcacaaagtaggcaaaagagtgaataaagataatcattttttaataaacagggttgtaaggtataacctgttgtagattacaaaaaggaaagtcctcaggaggcaataacatcccaaagtctgctaggattttaggttca

SEQ ID NO: 7913 - DNA, 578 bp, Homo sapiens
  source 1..578: mol_type = other DNA
catgtcctgcttggcgaatatgtacgtgccatgtcaatgaactgctacaatggaataaacttataataatgcctaacatttattgactcctcataataaggccataaactttgcatgaattaactcatagaaacgtagatgacactgaggcttagggaagttatctaacttgcctaaggttaaagcaatatactgcttttatggttgcatctttggggttgctgggactccagtgcgagatgaccgacagttcgaggcaagtgctcacagcaaacttacagaagggggcctcgaggggtgcccctatgcagcccactggcgggagatcctcccgcggccggagggccctgaaccctaggccacctagggggaggcggccaccagcgcgctgtagcggcaagtgtgcgccaacacagctgcacacgcgctgagaggaacttccccgcgatccgccccggctgcacagagcctcttctccccgccggggccccgcccagcaaaagcagcagccagcagcgcgccggtggcgtgcggctcgaaaggccgggaggacgtcatcgacgcgctgtcgagcctcc

SEQ ID NO: 7914 - DNA, 626 bp, Homo sapiens
  source 1..626: mol_type = other DNA
tttttagtatttttctattacatataaaaaactaccttccatgagaaacaataggatggagattattcaagtgtgtcaaactgagaaatgaatacacagagttaacgatttgttcacagaatgagttagacttgttttgtggccgcagaatttactaccactggacgcaagatgtctaaagtactttaaatgtgaactccaagggaggtcagagataaattcgactgctaaaaatcagatttacaaaagcaatactccactagtgtttggagctccccatccagatgtacaacaaactcttggagacttggatgtgtgagattataatcactttattttagcaactccagactgtgcttcccgcgccggacagggaagtgggagtgcggtccgcatcctgccagccagacgtcaccaagctgtcttccaagaggcagttgggtcagccgaggggcacggctggctccctattggcttacaggagggggctagagagaggcgtgtctcaacgtcacacccgcccctagtctccccggaaagacctttgccggcctgggccagccctcttccggacaggagaggtccgccctaggccccgcccgtgccgggggatcaggtgattgcgg

SEQ ID NO: 7915 - DNA, 372 bp, Homo sapiens
  source 1..372: mol_type = other DNA
gatatctatagatattttattctaaagaaaagaaacttggttcctttaagttgtttaaagctctgttaaaaaaaaaaagtctttagtaagccaaagctgttagaagcttataagtaagtgacattacaattgaccgtcagtaaatagtggaaagattgcatgactagctactctctactcagaaaagcatatagtgctgtacaaaaatgacatgcttatgcacaactttaactttctgcaacacttttacaacttcttgtgattgacagatgagctatgtccagcgtgaggcagagttaaaaccttttcctggctcaggaacttcaggctgttttcctctaggaggagccgcgcagctcagttgagagtgac

SEQ ID NO: 7916 - DNA, 392 bp, Homo sapiens
  source 1..392: mol_type = other DNA
attttattggttattggcccctaccaacaacatgcaaataataaaatgtaatgaaacttaaacttgtatgttacagacatttagatcctcagagatttactttttgaatgtatacatacccagttctatgtaacagattaacttgtaatacgttctcttaaagcacttttaaagtaagcccgagaattaaaaaactcactagtgggatttcaaccttgcaaattttaaatgtgcttatatttttgatactcaagaaaataacaagttagctcacagccacgcacagtgggtgcccctgggcctaaccctgccctggaggcggactcgcgggagaagcgggaggcggaacgcccgagggcgccctcggctggcgcggagctgcgcaggaggct

SEQ ID NO: 7917 - DNA, 309 bp, Homo sapiens
  source 1..309: mol_type = other DNA
gtcagtaaatagtggaaagattgcatgactagctactctctactcagaaaagcatatagtgctgtacaaaaatgacatgcttatgcacaactttaactttctgcaacacttttacaacttcttgtgattgacagatgagctatgtccagcgtgaggcagagttaaaaccttttcctggctcaggaacttcaggctgttttcctctaggaggagccgcgcagctcagttgagagtgacgccgggaagacccagcaactcgggggggactgcgggccaggcgcggcgtgacccctggtgaacggtggccgc

SEQ ID NO: 7918 - DNA, 450 bp, Homo sapiens
  source 1..450: mol_type = other DNA
taattcactaaatgtttagtattttatacctttaaaggagatctatttccctctactagaaggtaatcagaaatttcttctgcccaattgaccaaaatatacttagttgattgttttctgtaaactactttatactgctgacaaatggttaaatgtttccaatgaaactaagtatgctaggatttctaatgagcaatgaaattttagaattcatttactcattaatttcttcatttacaagatgtatagcagtgagtaccacaaatggttctggatcatgagactccagcctaggcctggccttcagttcagcaggcagagcccattatatgagacaatggtctgatgtgatttaatttactcctctggttatatcaaagattaatacatgccaagtggtaaccaagaaacttctattttaaccaaatcagtgtgatgtgatctgcttgc

SEQ ID NO: 7919 - DNA, 334 bp, Homo sapiens
  source 1..334: mol_type = other DNA
tttcaaactattactgaacaacattcaaaaattctaataattaacatttctgaacacttactttaagcaaggatttaagaccttataaatgcatggccaggctggtctcccattataattaatctcttatacagatgaagatgcttaggtgcatgaaattaagaacttacccacaaactggctctggaattttaaaaggcaattttataagttacaaaaatagatatggataattatttattcaaatgtgatttattctttggaaacaattattgatccggtgttgattcatgttctggaaaccacatgaaaatacctaagcacgcagatgctg

SEQ ID NO: 7920 - DNA, 595 bp, Homo sapiens
  source 1..595: mol_type = other DNA
ttatttggaaaaaaattaattgatgaaaaaaccattgctatctaggaatgacatcatttgatcttctgaaatagtaggaattagctatttcatttgtacatcttgaaatttcatttttatggtattcacatttgtaaagattttatattcgatcctcaaaaaattctggggatgcataggtcttccaggaagtacgacttcagtgacaataaaaatgaggtctgatttccctcagataggaagtctatttttctatttccttaaattaacaagaaaagagcagtggtcatatgaattcaagttataaacatagaaccttgtaacagcaggtgacttttctaacaaaggtcacactgtgtgggctaagagcaaaacaaaaggaaaaaaaagcttctctctctcttttttttttttttttaaagcagcagcataattcgctggctcagcaaatgttttaaagaagaacttggaccattaaatcctagattctagggtgatagggaataaattagtaattgtcaaaatgttttcccctttaagttgataacaatcagctcagtgcttgcaaggtcactgcaagaatgaacattgaact

SEQ ID NO: 7921 - DNA, 240 bp, Homo sapiens
  source 1..240: mol_type = other DNA
gtgcgaacagcggctcggtgcaatcaccgttctgcacggcaaaggaagttccttgccagctctgcataggaagccgagctcggctcatacataatttaaaataatgaaagtctaagcgatgcaatgcctaccataaaaaaatatccacggttaaacgtgtttagctacgtctaaaaaatcgtagtagctggcaagaggaaaaatgacttcggagttttaaaaacacatttcctgcgcagc

SEQ ID NO: 7922 - DNA, 399 bp, Homo sapiens
  source 1..399: mol_type = other DNA
agcttttaaataaaagcccttgtatttaaatattaagggggcaaccagaaacctgttctcaggaccccacgtgcccatttcttcatgatggtgaaacaaaaacctgagcctgtaatcccagctactcaggaagctgagacagcagtgagcagtgatggcgccattgcactccagcctgggcgacagagcgaaagtgtcacactgaatagcggtgtgtcctgtggcaaactttatttttggcgcagtgtgcactaagaaagttggaaggttgtagggtgcttccaccgagaaagcgcctaccgcagtcttgcccaatcacggtgctgagacagtgagacagccattgttttgttcagcgctaccaagagcgcggcaaccgagaaaaccctagtggcgtcg

SEQ ID NO: 7923 - DNA, 232 bp, Homo sapiens
  source 1..232: mol_type = other DNA
aaaaagtgcagatttttagaaaaacaagagcttgaaattgcattgcacttcgccctttgaggattggagaggtacctagctgccggggcaggcctgaagcctcggtcaggaggcattgagtctttcactccacggaggtcttggactgagaacttcaagttccaaattccacttttcccatgcgcatcgcaagggatcggttgatggggccctcactgtgccagcagcactg

SEQ ID NO: 7924 - DNA, 152 bp, Homo sapiens
  source 1..152: mol_type = other DNA
cggacaacatccattttggcggaaccaacggtgttgtcacgttctgcgaccgagaaattcggtgcaacaagtggtgctgccaccgtcagtgctgctggcacagtgagggccccatcaaccgatcccttgcgatgcgcatgggaaaagtggaa

SEQ ID NO: 7925 - DNA, 308 bp, Homo sapiens
  source 1..308: mol_type = other DNA
tgttgcaaaactcatcagcaagctactagcatacatatctgttgaagttatgatgacattattaccatatagctattctcaagttctttgagagaaaaaaataagtaaatctcaattatagaattatcctcaaaatgtatttatatataatatttctttggaggaatagtcacatgcagctgactgtggaggccggcctggactctttgagcagctccaggtcctgagcccagcaagcacgtgctgcggcagggcgcggggagggcgcgcttcgcggaggaagattccgggcggcccgaacgtgctcg

SEQ ID NO: 7926 - DNA, 531 bp, Homo sapiens
  source 1..531: mol_type = other DNA
gcccattccgggctcgggtcgggaagtgtccgcccctggagtcaaggcaatgacttaggttcccagcttctggccctgccaggctctgcacagagagcaagccctcgcccttcgtgagcgccatccccgcgctcggccccgcccatccactgaggggtgtgggtaggggcgtggcccgttcccttgctggtcggcgcccggaaggcgtccgcgtcagccggagctcgacgcggtgacggtgtgcgtcgacgtaagtgacgcgcaagcctgggccgctcctccttccctcagtgagtgccggcccggtcggggcgggggagcgagagtcgttgtgggtcgcgggccggaccgggtcccggggcggtgggagccccggccgggcagaagggcttggcgggccgttagaggaccgccacggctgtcgagtcccctccctgcgcgccctggcgctcggaacctccggcgcggactccaattaggtcaggctcggagtcccgcggccgcggctccggtctcaacgctccggggccg

SEQ ID NO: 7927 - DNA, 465 bp, Homo sapiens
  source 1..465: mol_type = other DNA
gccggcctggactctttgagcagctccaggtcctgagcccagcaagcacgtgctgcggcagggcgcggggagggcgcgcttcgcggaggaagattccgggcggcccgaacgtgctcgcgcccgtagctgccgctgccggggccgcggccgcccgggtgcccaaccgaacgcacgtgcgccagcggggcccgagcagaaggggagccccggctgcgcattatgccccattccgggctcgggtcgggaagtgtccgcccctggagtcaaggcaatgacttaggttcccagcttctggccctgccaggctctgcacagagagcaagccctcgcccttcgtgagcgccatccccgcgctcggccccgcccatccactgaggggtgtgggtaggggcgtggcccgttcccttgctggtcggcgcccggaaggcgtccgcgtcagccggagctcgacgcggtgacggtgtg

SEQ ID NO: 7928 - DNA, 454 bp, Homo sapiens
  source 1..454: mol_type = other DNA
aattttgggttccctagtttctacttgtagacatgggttatgttgctactgcaatctgctaagttaactgacccctaaacttcagtaaataaccggtatgttttatttagtatttttacgttcaatccagtgacggtatttctagtttataaacagaaaaataatagagtatctccctaccagtccaggaatccagacggtggttgggtcacggtttcccaaggacatggaaacccttgctgaagcgctggaaccgctcggcacgaggcgtacgtcggtgggagctgtgtgttcccatccagactctagaaggggtcctctttgcgtcaggcccaatcaccctccccgagcgactgcactgggtgtccctgcgccgcgcgtccaggtccaggccggcgtccgggtgcactacaggccccccgtcgctgtggggcgtctcggtccccgctgcgga

SEQ ID NO: 7929 - DNA, 529 bp, Homo sapiens
  source 1..529: mol_type = other DNA
caacagatattggcccattacctatgggtggtgtatgatgaagattcatcttatcaaaatataaaaattctacactcgaagcagtttggaaatattctcatcctgagtggggtctgggacatcatgggaagtggcaaagattagtcaaactaaaaccaaagatggtcactatggtagagcttgaccaaatggtttagacaatcttaaaggagactgctatcaggttctaatagaagactgtaagataattttattatgtgattaatgatttaacagctgttccaataagaagattccacatgggagtctcagagctctatgaagaacagctggagaattcttcatagaacagttgctctatgaagaattgttctgcggaattctcaaaggagatcgtcccttcctgacctccatatgctgtacatgacatcagaatgagtcaggcaattgattgtgaattcctcaaagttttcctttttttaaactattatttttaattttaaaaagcaaatggaaaatctgtattttg

SEQ ID NO: 7930 - DNA, 380 bp, Homo sapiens
  source 1..380: mol_type = other DNA
tttacttggcaggtaaatggagtccctttcctcaggcaactgaaaccattttgttttaggtttagttttctttaagtcaaggtagttttgaataaaggagacaatatttgagtatttacaaatcgggtatttagactatttacacatatacaagttcttttttgcactgaattcaaatcaagtacagtatttcagaaatctttggttgctaggcaacctgacagactcccaagctcggtgggacgcggagtacccattggcccgcatctcctcaattggctggggggcgggcgctgccgggcaactctaccggccgcgattggctgtgggagccaccgtcccgcctcccagcgactctcggcggtgccggagtcgggtgg

SEQ ID NO: 7931 - DNA, 419 bp, Homo sapiens
  source 1..419: mol_type = other DNA
tcatgtaatcaataaacagtataaacattattaacaagatattttatatttttttctgtacccagtctttgaaatccagtgtgaattttatacccatagtacatctgagtttggactactcatatttcaagtgctcaagagccacatgtgttatttacagcaaagttaagtacgttgcctgaggttatacaacttattagtagatgaggaacaattagaatccaattatcttcatgcagctgattggcagcaaagctgcactagcgctcatgctattgtaaaaagcttcactggaaacaatttggctgtcatggtttccataagctacttaaaaactgattatgattcaaatgactggtctcctacctgggagttctggtcatttagattgattttttttaatgttctgccagctgcca

SEQ ID NO: 7932 - DNA, 350 bp, Homo sapiens
  source 1..350: mol_type = other DNA
gaaagggaaagaagaatgtccctccttgggcctcttcttttggtgctaagagcaaccaccactttgtaagcgcaatttaattagggtcaagggcggtgaggagccgccggtcggccaggtcgcccggtccctcagtcgcccaccctgagggctgcaccttagagatgcgacggccgaggctcccagctcaagcttctggtagtaaggcctgtgtgcctggcattcggcacagctccggtttgacactttaaaagttggccagtatcccggcgtcctctcggccgacgctgcggtctgaggccactctggccggcagccgacgtctctatggctccgaccgaggggcggag

SEQ ID NO: 7933 - DNA, 367 bp, Homo sapiens
  source 1..367: mol_type = other DNA
aaatgcttctagaattttactgatgtgacaatcacttgaattagtaaaataacagcaactctgcctaaatttttagtagaaaaatattaataaaggaaatacaatatgatttatcagattttgtttttatttaaaattgcagcattttactaatcatagacttttttgcattaatttttatttttaaaaatattgcatccaaatattgcctgaggctcgtgcctcattttaatacaacgttttctcctgcaagggcagcccgcggtaggctaggcctggtcctgggcgccccagccggctcccccgggtccaggcgtgcgcctgcgggcgacgtgcgcgtctgggcatccggccgtcacgcgctgcc

SEQ ID NO: 7934 - DNA, 390 bp, Homo sapiens
  source 1..390: mol_type = other DNA
agctactccagaggctgaggcacccttggaggtcaaggctgcagtgagctatgattgcaccactgcactccagcctgggtgacagagggagaccctgttacagagaaaagaactactattacatccaaattattactgcattcagaaggagaaaatttgtccttaacatggctaaaagcactcaaaattataaatacatttgctgaaagatactttaaattctcatttaaggtgtgtgggaccaaaactctaagagagtttactttgagattgaaatttattttctatggtcaagaaagggaaagaagaatgtccctccttgggcctcttcttttggtgctaagagcaaccaccactttgtaagcgcaatttaattagggtcaagggcgg

SEQ ID NO: 7935 - DNA, 503 bp, Homo sapiens
  source 1..503: mol_type = other DNA
aacagattcagtttctacatcaaagatcagtgatcacacagatcacatacaaaaataatgaaaaagtttgaaatattgtgggaattaccaaaatatgtcagagacaatgatgttggaaatatcttagaaacactcacaactgtaataaatgattgtttattctttctttaaacacacagtgagtgttccataaacacttgtttagtggcaataaatatagcagacacatttatttgccactttataaggaaaaaaggtgcagatacatagacgacctattttctgataccaaattaggaagagttctccatctttggccaagtttttttttttctaaacagctttactgaagtataatcgttttttaccttatttaaaaataagtaccactctgatccttacagcctttattattaatacaacccgcccttcgtagggaacgcagcgagggcagcctccggagtggaggggcgggacttccggcccttcctgttgtggagggg

SEQ ID NO: 7936 - DNA, 448 bp, Homo sapiens
  source 1..448: mol_type = other DNA
aatgtggcttctccaaaatgtaaaattacataaacactgaaagagcacattttcttgttaaacgtaggtgtgacctactgtggtaaacacctagggtgaattaaagaggggacacatattttgattccgtttctactccctcggagcaggtgacagtctcccagggaccactcctcagcagtccgcgggtctcggccggagccgactgtgcgccagcgaaccctggcgcagggtccacgccccctaggtggccccggaaccgagatgcccctgcccgagcctggctgcgggccggcaggtggccaagacgccactcggcgggcggcctgctgggcccggcggccggccagccgcgaactggaggatcctcgcgggcgcgtcccgggcctccgggccgcagggggccgctgtgacccgcctgcgcccctgccgcgccgaaggcggggag

SEQ ID NO: 7937 - DNA, 366 bp, Homo sapiens
  source 1..366: mol_type = other DNA
gaagacattgttttctttattaatgagaagagaaaacggttaaatcagaatttatggagatggatcaatccaacagtaaagaaatcaatttttccttccttgtcattaatactgtcaggcctgacaaaaacaacaatttacatattaataaaatctagaattgtgctagccactagccacatgtggctcttgaaatatacactggatttcaactagtatctaaaaaacagagaaaatatttaatattttaaatcgcatgttaaaaaaccattttgaacataatggattaaataaatttaaattaatttcacctggtttttgttttagtgcaacaatgtggcttctccaaaatgtaaaattacataa

SEQ ID NO: 7938 - DNA, 330 bp, Homo sapiens
  source 1..330: mol_type = other DNA
agatactaaattgtccccagttgggaaccacgaattattaataaaaagttttaaatcaataacttagtttaaaatccttactaagtgggatcattactaataccacggctcattattattttaaaacatgtgaatgaccttctgtgtaggttaatcacaagacaagttctcaaactctcatttctttttaaaccttttagattcataattatttttcttgtatcaaaatttcaattaatagaaataaatgacgttactgacacttcatgatgattaagtttttttagtcagaatacattttagaaaaacagccgaggcctggtctggaaa

SEQ ID NO: 7939 - DNA, 307 bp, Homo sapiens
  source 1..307: mol_type = other DNA
ccttttagattcataattatttttcttgtatcaaaatttcaattaatagaaataaatgacgttactgacacttcatgatgattaagtttttttagtcagaatacattttagaaaaacagccgaggcctggtctggaaagcaaatgtgtccctgaaaacttcagctgccgcgttgctgggggccgcaggccgaggcagatcgcctgtccccgagagtggaagggcccctgggggtaactagcctttgagctcaaaggggcatttcgtgccgaggtgggagcggagctgcagtcacgtggccgcccgcc

SEQ ID NO: 7940 - DNA, 256 bp, Homo sapiens
  source 1..256: mol_type = other DNA
cccgtggcccgcgctgcaacgagctagaggcgccggcggaggctgcggccgcaacagccgcggcgaggaagggacctggcagcccccgagctcggtgcaaaggcatcgcgctctccccctgcaaatgaggtttgaccagcagaggcagagcccacctctggccttcaacctgagggatacttgtagagtgagaggggtgcagatatctccccccatctaacatgtggtgaccacgccaccaccagctcctgctgct

SEQ ID NO: 7941 - DNA, 599 bp, Homo sapiens
  source 1..599: mol_type = other DNA
aaaggtcagtttaatagacttgcaatttcaaagtttaaccgtaccatctgttttaacttaaaaatatagttataaattctttttagcaacatttgtgttttaataccctgaagaattattacaataaatccaaattaatattctggtccctaattacaggagtgaatcaataaattggtgacttcttagcagatatttagtgagcacccattatgcacaagtattgatttgttgctgaagattaaaaattaaatcagtccctttttaagaggctcacagattagtaagaactcgtgtttaatttataatgggttttaatacaaggcaaaatttaaacacacttctttgatagttttattttaaatatcattaaacaaattgtctgtatttagcacagataaatatatggaattattttcccaaagatgaatagtgatgcttgcataatttttaaatataatcaaatatactgaaaaacatgctagtactgtatttccaaaagtaagtttctattcctagaactaaaacaaccattttcctgcaggatgtttataaatagttcctgtaacctaacagcaagagggcaaggacaattgctt

SEQ ID NO: 7942 - DNA, 320 bp, Homo sapiens
  source 1..320: mol_type = other DNA
gagtgttccccccttctgaaatggtaatgacatacacatcccttaatgtgttttattgattatgtaacttatctaaaaagataggtcaatagatctgcgcacgtgtattggcacgcgcactttccattgtcaaacttggcgttcagacaatgtcttcatgagtttatgtttgtttcttttggaccaaaccctttctggccaacagagggcagccgaggggaggcgctggggcgcgagggctgagccgagctgagcctcgcctagctccggcagcctcagcttcagcaccagccgcaccggagcccggaccgcagccacta

SEQ ID NO: 7943 - DNA, 461 bp, Homo sapiens
  source 1..461: mol_type = other DNA
cgatatattttgaatttacgaatgtgaaagctgaacttcaaaaaacaaagctcgtgaaaaattttaaaaatatcttttaatgcgttataacatcctggagagaaatcaaatcaatgtgtttcaatgttacaatatagattggataaagcactaatttatttaatttggttcagagcactgaatattccaagctacagccttgtgggtaagagcattatcttaaagatctgttgtctggcagctggataaaacctggtccgggaggagaaaagtgtttctcatctgtcccatcagagtttcgacctctgccaagctctctcccgacctgctagagccgagagggcggaggccggagaggctgcagccgggaagtagcaccgccaccgcacatacgccagcagccggctgagggctgcatagggggagtggggcaaggcggccgggcccctcccattccgcct

SEQ ID NO: 7944 - DNA, 496 bp, Homo sapiens
  source 1..496: mol_type = other DNA
gaaacagacgtgttttagtaatacgtaccaattacaaattaaccattcctgcctggaataaacacaggttttgttaaatagctcaattttcaaaatttgtcgatatattttgaatttacgaatgtgaaagctgaacttcaaaaaacaaagctcgtgaaaaattttaaaaatatcttttaatgcgttataacatcctggagagaaatcaaatcaatgtgtttcaatgttacaatatagattggataaagcactaatttatttaatttggttcagagcactgaatattccaagctacagccttgtgggtaagagcattatcttaaagatctgttgtctggcagctggataaaacctggtccgggaggagaaaagtgtttctcatctgtcccatcagagtttcgacctctgccaagctctctcccgacctgctagagccgagagggcggaggccggagaggctgcagccgggaagtagcaccgccaccgcacatacgcc

SEQ ID NO: 7945 - DNA, 603 bp, Homo sapiens
  source 1..603: mol_type = other DNA
ccaaatataggcctacatacttggacacaggttgtctgttaacctaagactttgagtcaaattttaataataagaatagttataaatgtatagccctatgagttagcatttttttagttccagctgaaaaaagaaaaaagaattgtctagaacatttttctctcttctggcaatccactaatattattatttattgtccttaaaggtaaaaatgtcagacagaatagtatttgcttcaaaaatatttattactagataaaggatcattttaaatgattctactgcaaacatttttcaaaagataaacatgacccatttctccaatttgtgtcatgtaatagtaataataatgatatttaaatactcccactgatatgtcctttacaaagatatattatatgtcttatttaatcaaaaaaccttaaaagagtccctgtacctaattttattccaggactcaaactgtgtcagcatgtcattcagtgtagttctgaactttcatagacatttccaattagctcggagagacaactggatattgtgtttaagcactgtgtttaggcttaactaagtatgtgtaattacttgggcaattacttaagc

SEQ ID NO: 7946 - DNA, 389 bp, Homo sapiens
  source 1..389: mol_type = other DNA
tattttaaggagtaagagctcatccagacaaaaaaatatttggtagctttaaaactatttcacatttatttgtagtaagtaactataaaataaattcttgtgagttaatagactttcagcctttttggcacatcaaaggctgcagtggatctgactggacaaggaaattattttgtaatttgtttcctgaaagataaaggagttagaacataggatctttcattgattctacagaatcttaagactccttcagggatagtcattcctaccgtgctgaacatcatgttgtcacggtcagaatcagaactaaattgattaagggtctgaaacagtttggcaacaagaaatgaccattcgtgcattccaggcactgtacatggcactgagta

SEQ ID NO: 7947 - DNA, 547 bp, Homo sapiens
  source 1..547: mol_type = other DNA
ttaggaagaccctggaacgtgccagttgattctgaccatttctcatgaacagaggaaagatttgttcgttttattatttttttaatttttaaagatttaattcctttagaaagtggagtcgaagctgggagccccagggagtcttcacgaccgctcagctcccggcgcgagtggaggtcggtgtggggagaagcggctcccgcccgggatggctaatactctgcgagccccggcagcccgcggccggcggggtgactaggcggcgggcgcggagggtctgcggcgggcgggcggcgctgcagcagcctgggcacggctgccgccgcccgcgggcgcgagtgtgcgcgggtgtggaaggccggcggtgtgcgcgcgtgagccggagcggggctcgcccctcgccggcgcccgccgcccagccggtgattgctctctggctgtccccggcacctcggcccccacggccgttggtccgggcgggtgagggagagtgtcatcaccatccatagcagcggcgagcagcagctgggcggtcacatctgggaat

SEQ ID NO: 7948 - DNA, 477 bp, Homo sapiens
  source 1..477: mol_type = other DNA
gaggtttcatttttaactgaatatatcgacgtcgtgatccagaagtccagaggcaacagctgctgcaacgcgggagccaaaagggggagggggcgccagcctctccccttcccctcccccaccctgaggcagccaccagctttgagggcagagcccgcgtggccggagcggggtccagccccgcgtagtgcccgaagcctccaagcacgcttcctgggttccagcagcggcggcactgagcggcggcggccggagcctgctgcgctgcgctgcgcttgtaagctgcgcccggcgccgaggacccccggggggcagcgctcggcccatctccggccccttctccgactggcaaagagaagggattcctcggattcccaaggcacccagcgcccctgcctgggggtcgccgcgagcccggctgaggctgcttccggcctcccctacgggatgccatggcacccggcacttgttgcgggg

SEQ ID NO: 7949 - DNA, 348 bp, Homo sapiens
  source 1..348: mol_type = other DNA
agttctgctagagatgctcaattagttgttgagttgaagaattgaattgaactgtttccctcagattaaacattctttctgtctttgaaattctcaaaaccgctaagacacagctattttgaaaatagccagcttgcaagttcctaagcacttctggactcttaatgcattttcactcgtgaaagtttcaagcaagaaaaaaataaagtagtgccccgagttctttattagattcaatgaaaagcccgttaagggcgcccaggcactgtcaaagcgccctccctgcccgggccgggagaagtaaggggtgtgaaggcggagccactgggctggcaacaccctcccgaa

SEQ ID NO: 7950 - DNA, 568 bp, Homo sapiens
  source 1..568: mol_type = other DNA
ttgaacagtatataaaaatcttacaaactttagactactgaaagttcaattctagagttaaactgcacccaacgtttttagatatctgaggttgggagcgcgccgagcgcagccagttctggaggaactagccctccggagcagccaaggcaggccaggccccggggatgtgcaccacggcgtggggaccaaaccaagcccgggagggacctcgtcaacaggtagagccactcgccaccggcggcagaaagtgagccccgcgcgcaacgcggccagccggactgcggggaccccaggagcgcagggcggaggagcagcgccacaggaggcgagggcgcaggcggcgcggcccagcccggcagcccgagcttcgggggagaacggcctgagccccgagcaagttgcctcgggagccctacctctcccgctggctcgccgagcggtcagtggcgctcagcggcggcgaggctgaaatatgataatcagaacagctgcgccgcgcgccctgcagccaatgggcgcggcgctcgcctgacgtccccgcgcgctgcgtcagaccaatggcgat

SEQ ID NO: 7951 - DNA, 348 bp, Homo sapiens; identical to SEQ ID NO: 7949
  source 1..348: mol_type = other DNA

SEQ ID NO: 7952 - DNA, 300 bp, Homo sapiens
  source 1..300: mol_type = other DNA
ttgcaagttcctaagcacttctggactcttaatgcattttcactcgtgaaagtttcaagcaagaaaaaaataaagtagtgccccgagttctttattagattcaatgaaaagcccgttaagggcgcccaggcactgtcaaagcgccctccctgcccgggccgggagaagtaaggggtgtgaaggcggagccactgggctggcaacaccctcccgaaatcaccctctcaatgaaaggctacagcccgtggactttagcctaaacttgtccatgtctcggacagagcctgggaagctgccagt

SEQ ID NO: 7953 - DNA, 329 bp, Homo sapiens
  source 1..329: mol_type = other DNA
agaaacttttagattcttttgttcttaaagaggcaacttcctaataaagaatgctaagtaacttaaggattttctttaaattatgtagctattcagatctggccctaagaaagctgaggctgccaactttggagcctaggattcccaggtctaaataccagctccaacaggcttgtgcatagtttgggccgttggggccaaatctgcacttctgctacttttactgctaagctttgaaattttagtgcgcctgcgcacgcgcgaactgcggccccgcctctcctttggggacgggagacgtgcgtcgggtcgcgacggggtgcgcatgc

SEQ ID NO: 7954 - DNA, 315 bp, Homo sapiens
  source 1..315: mol_type = other DNA
aaagctgaggctgccaactttggagcctaggattcccaggtctaaataccagctccaacaggcttgtgcatagtttgggccgttggggccaaatctgcacttctgctacttttactgctaagctttgaaattttagtgcgcctgcgcacgcgcgaactgcggccccgcctctcctttggggacgggagacgtgcgtcgggtcgcgacggggtgcgcatgcgcccgttcccgcatgagtcgaagcaagcgtgtttccttcccgccaggcaagggccccattcccatcccctctcccggggcggaggtgaggacctc

SEQ ID NO: 7955 - DNA, 411 bp, Homo sapiens
  source 1..411: mol_type = other DNA
ttagtgcgcctgcgcacgcgcgaactgcggccccgcctctcctttggggacgggagacgtgcgtcgggtcgcgacggggtgcgcatgcgcccgttcccgcatgagtcgaagcaagcgtgtttccttcccgccaggcaagggccccattcccatcccctctcccggggcggaggtgaggacctctggccatgaagcgcgggccaggtgaccctggtccccgaggagcctgaggacatgtggcacacttcaacctcgtgcaggtgggcgacagcctgcgcgcctccaccatccgcacgggcagcgtgggcagcaaccgctgcgtggaggccatcgacttcgactcaccgccagttcagagcaggcctgtgacccagcctggagcgctgatggtcatgcaggaaggcctcgccc

SEQ ID NO: 7956 - DNA, 772 bp, Homo sapiens
  source 1..772: mol_type = other DNA
tcagcaatgtgctggaaatttgtggccaaacttttggataaaacataagattcagacaagaaaaattaatatcctatttcttaggtttttaactaaaaatctcggatatagaatgttctctttccagatgtgagactgaaattgtcacagtctatgtcatggtgtaaatcagctcttaattatctcggaggagaggaagtaatgatgatttctctctctctgtctctctgtcacacacacacacacacacacagctcttgcagcaggtattgcttaaatatcaccttggataatcataacttgtgagcagatcttctttcctgatgagtacagagaaaggcaccgcgcagcccctaggcactgtggtttagggctagtgccctcggcacccgctgccaggagccgggcgctgccaagggctgcggaggggccacgttctcccggggactggggcatctcctgcgtgctggcgacaggctgcgggggcggagtggtgccagggcgggcgctcgcccgtcggatatgcccacccgtcccgtccagggcaggaaagcctgccagggcgccatccccatccccaccgcctccaggctgccggggctgggccgctgtacgggagccaaggtgcggtgccccgcgtgtggacgagccgaggtgcagcccgcggggccgcagggccggggtggggcggggcgcggccggagcagatccggcaggaggggcgggctggggcgggccctcggcgctgcaggagctgcccagaacttttccc

SEQ ID NO: 7957 - DNA, 721 bp, Homo sapiens
  source 1..721: mol_type = other DNA
gttctctttccagatatgtcacagtctatgtcatggtgtaaatcagctcttaattatctcggaggagaggaagtaatgatgatttctctctctctgtctctctgtcacacacacacacacacacacagctcttgcagcaggtattgcttaaatatcaccttggataatcataacttgtgagcagatcttctttcctgatgagtacagagaaaggcaccgcgcagcccctaggcactgtggtttagggctagtgccctcggcacccgctgccaggagccgggcgctgccaagggctgcggaggggccacgttctcccggggactggggcatctcctgcgtgctggcgacaggctgcgggggcggagtggtgccagggcgggcgctcgcccgtcggatatgcccacccgtcccgtccagggcaggaaagcctgccagggcgccatccccatccccaccgcctccaggctgccggggctgggccgctgtacgggagccaaggtgcggtgccccgcgtgtggacgagccgaggtgcagcccgcggggccgcagggccggggtggggcggggcgcggccggagcagatccggcaggaggggcgggctggggcgggccctcggcgctgcaggagctgcccagaacttttccctgctctcaccgggcgggggagagaagccctctggacagcttctagagtgtgcccctcggccaagggtatcctccg

SEQ ID NO: 7958 - DNA, 480 bp, Homo sapiens
  source 1..480: mol_type = other DNA
gttcttgttggcaagtcatacagttcgaatgttctgaccaggcggatattctgtctttaagaaacactatccaagtcactcttttgctgacaaagaatagatgcatattctgattgcctcctttagaaatatcagaaactcaaaagactacctggaagcccccagttggggggggcgccctgaccaccttgggcacatgtcctcaggacttcctgaggctgtgtcacgggcatgtcctcaacgttggcaaaataaactttctaagttaactgagacctgtctcaaattttcgcaggcggcaagtgtccaggagtctggcgtctgctcgcctgcaccacgacctccctcctggggagaaggacatgcatggtaaacagctagagcccggcgcggggcggagctggttgtgcgcatgctccgtgcaggcgcaggcgggggctgagcgccgtcgggttacgcctgcgctccgggtgagcccgc

SEQ ID NO: 7959 - DNA, 407 bp, Homo sapiens
  source 1..407: mol_type = other DNA
aaaagatgccaggcactgtacttaataaactccaatcttttttattccgcgaaaagagagagagaggaagggggggccagaccgcctacgtcggcgcccccgctccgggctccgactccagacgccgcccgctctgccagggtggaaggtgccggggccggggttcctagcaacacctctgggctgggggtggctgcaaagtccgcgggtcccgcgcccaggctgcgggtgcccggaaccgccgcgaggccggcgcgctccgacccgacccggggcgggatatttgggcagcccggggctcaaaagtcggagaggcaacggagacaaaccccgggtcgcgcgcgcgcgcaacacccgccaccccgggcgcgccggcgctgccggcgagcggcggcgagcaggacttg

SEQ ID NO: 7960 - DNA, 429 bp, Homo sapiens
  source 1..429: mol_type = other DNA
gagaggaagggggggccagaccgcctacgtcggcgcccccgctccgggctccgactccagacgccgcccgctctgccagggtggaaggtgccggggccggggttcctagcaacacctctgggctgggggtggctgcaaagtccgcgggtcccgcgcccaggctgcgggtgcccggaaccgccgcgaggccggcgcgctccgacccgacccggggcgggatatttgggcagcccggggctcaaaagtcggagaggcaacggagacaaaccccgggtcgcgcgcgcgcgcaacacccgccaccccgggcgcgccggcgctgccggcgagcggcggcgagcaggacttggcacctccgaaagataattgggaagggtttccagaaggtgggaaatgtcacctgatggagacccccgtctagatttaaagcgc

SEQ ID NO: 7961 - DNA, 533 bp, Homo sapiens
  source 1..533: mol_type = other DNA
cataatgccatgttttcatgtgcttaattttaaaagcaggaaagtactaactctttaaacaaatttcttaaaaaacaaaacccaaaactaacctgctttttattttatataattcagttagtcatacaaacatgtttccaacacttgtattggaagataatttttgttttatatgcatggagcattaatatcattcttcatgtctatggattatgaatgacatcaaatattatgttctattgattcttcatataaatctacatgtcaaaaaataatcctttgcccgtatccagatttttcgtttggaaaatacgaacattaggcttgcaaagtgaatctggcaatactttggaaaagtactactgcaggttaaagagctctaatttcttcaataaattacgagttgcaggtgtttaaatatgcaagtatatttggtccctaacaagcagtaaagattacactttatggtggtaatattccctctttttttaagccccagtattaaaaagaaaatattcgcaacattgcgattg

SEQ ID NO: 7962 - DNA, 304 bp, Homo sapiens
  source 1..304: mol_type = other DNA
ctgataatcactagtgtgattgaattattcacaagttctggtagggtgatcaaccttcccaacttggatctgtgacctcacccaaggggggcagaatcctcattaatggtttagcaccatccccccggagtatgaggtatgcttcctgtacctttataaattacccagtctcaggtatttctttacagcaaattaattttaaacatgtaacagctgctaagtattggtgactaatgccattctaagctcacagctgaggatcatatgaaccacagctgttggagtgggtcagccacaccctgac

SEQ ID NO: 7963 - DNA, 339 bp, Homo sapiens
  source 1..339: mol_type = other DNA
cattacgaaatgcatacgtcccaaatgcatctgatgtttttacctcctgaaataataccgagcgtaatttgactccaagcatgcaatcacgtggaggaaagcgaattctccgaagactgttcggcgttcagtcacctctggctgcgcggggggcctgtgtgtaccctcagggacaccaggctggaatcgtccaccttactttcaaagtgcggggcagagcatcagtggcgaccacgcctcccatgttacagggggttggcgacaccaaggctctccagcccgggaacacggagttcggctccgttagtggggcctgccttttataggcgccgcagccaa

SEQ ID NO: 7964 - DNA, 507 bp, Homo sapiens
  source 1..507: mol_type = other DNA
ttcctggtgcatgtacccttgttgattgaaattcagaagcctggctccgaagtttgagctctcattcaccgcactacatatatctatgggaggataggcgacacatgcatgtaataaatgtgtgagcatttattgtactggccaatctcctctccttgagcagaagagggaagggagcctgctctgtagggctcctccgcatagtgcaatcactaattcgcattgcaaaatgctttctaggagcattcactgagcgctcagagtgggaacgcttactttctagagaatgtttaacttaaaagcctaaagaaatctcagagcgctcactacggcgcccggcttcgcggcaccggccactagagggcagtggccgccgcaaagccgacgcgggcggtgggctcggcggctcggccatcgcttgctctcgcctggcaaggggctctcggccgtggattagcgcagctggagacgtgggaggccgcgggccccgcccccgaccggcggcgg

SEQ ID NO: 7965 - DNA, 341 bp, Homo sapiens
  source 1..341: mol_type = other DNA
aggaagttttggagtccaactgataagttgtggctttttgtattgattttaaaagaaattctcagagcttagatatatgtaacatgaattgctttagaaaatagccctatcaaaatattttctttcttctaagtattgaaaagacacaatataaccctttcttctttcaaatgatctcatagctatttgttgaggggaaataccaaatgtttattattttttttgaagaagcttcttcggtcctgatgattcatgtcagaacattcccgtcctgaaggagggtgtgcaaccttctttatcctccttcacagacgtccttgagcccttgagacggtcctgga

SEQ ID NO: 7966 - DNA, 556 bp, Homo sapiens
  source 1..556: mol_type = other DNA
ttgtagaatcttgagtctaataccttttgtattgaaggcctggcaatgcattgtcatctgttcctgggaagaattacaaaatgcagtcctttatttttaaaagacattattattaagtccctggaaaaacacatggccattttcaattaaaaatgagtaaaagagagactctgaatcaaaaatagttgccaatgttcacctttaacaacattatgaaatctcacaaaaatgtaactaaaatttaaccaaatttgggcaaacttagagaaactttagctaagccacattgtgaagtcttcatcataaatctatgtccaaatgaaaaagagacattttgtgccaggaaaaatagtaagtattgctcattcttatggcatggatatttttcatttataaatattatatacacatatagtataaattttctttatagcataagtactctgatacaggtattagagatggtatctccagatatgagttctttatggcatacatacctctcccaaaaaagtgctaaaagcaattagccgcccagctactcgggaggcgcgga

SEQ ID NO: 7967 - DNA, 454 bp, Homo sapiens
  source 1..454: mol_type = other DNA
atttctaaagaagtaaccactaggtttgaagtcatcaggatgttaactatggggatggttggttcagtacccaacatcctggtacggagaccacatcctcagctcagaaaaagagctgaactcatttcgagtgagttggaacaaaaatgactcccacttcttttctcacctaaacctgttcagaagaaagtaaggagatactttcagtatctaaagttgtgaatcctcaggcaggagcctctatgtaaatattttgattggtgaccaattttgaggacttttattaaaattctaatttaagtcttcgagagtttatgaaagcgtcttcaaaatcaaaagcctgcctgctggcagtgagccatcattggatttggtttcctaatgctaaactttgaaacttgaaaaaaaaaatgaaaggaaaccacatcctttttactctcagtatatagataga

SEQ ID NO: 7968 - DNA, 502 bp, Homo sapiens
  source 1..502: mol_type = other DNA
ggacaaacaggctgccaggctgtcagaggcttccccccctcctgccatatggcacaactcggctctcttggcagctcagatgggcagctaaggctgcacagcccccctgctaaggaacagggctcagaataatttattgcataaataaaatcttgccacgttttcttgccttcgagctgtgcacgctcggatcctgcaaaggcagtaaggaaacattcttgtttctgaaaatggaacccctccgcctcctgccgcggtggcagcccccggcgccaggcccagccgcaggcccgccacggctcgcggcaaagcttggcgcccgggtgcgcgcctcggccggaggcggtggcggggcggggcccagagagggccggcaggggcggggccgcggcgcgcgccggggaatcccacccgggctctgacgacaccgcggcgccggccaataagaagccggcgagggggattcccgcgccgactgccgccccgccggctttttaaatgg

SEQ ID NO: 7969 - DNA, 332 bp, Homo sapiens
  source 1..332: mol_type = other DNA
ccaagttggtcttgaactcatgggctcaagtgatcgtgaatgatgaaatcattttgatgactatagtttgctctatgatagagaagggtttcttttaacaccttcactgtttttaacatatttattagatgaatcagggtaaatagcctttttcaacaccatatgagtaggtcacatttaatctacattctaaactattgctgagcatctctaaatattttctttgtagggagaatgtcaagacctaccaaaaatgtcctgatttttctagcaaaaattataattacatcacaaatactttgaaattcagtgaaagcagtccttgaattcca

SEQ ID NO: 7970 - DNA, 481 bp, Homo sapiens
  source 1..481: mol_type = other DNA
tcagacgactgttcaaattggatgaatatgatccctcgcctaaggatgcccctccctaggagatgcctcggactcaggaaaatgcccattccttggagaggtgttggcttgggaatggcaacagccaatgggcggtcttttaaacgcgccactgccgagaagagtggcgggctcttggcgtcaggcaggagcgtggagtgggaagaaaaggaaataatcgttaactttgccattccccctagacggtacccagggcgagggagaccggcgtttgcccgcccctccttctccctctcttcgcctggcgcgtccgggaggcggcggcgccaaagctcgccgaaacggcgctggcgggccggggccccgcgctggcggctcccgggggaagcccggttgccagcgcctccgcccgcgcgcagattgtcccgggctgaaggcgccacctctggcgctcaggcgcaagccacccctcccgcgcggc

SEQ ID NO: 7971 - DNA, 555 bp, Homo sapiens
  source 1..555: mol_type = other DNA
aattcgatcaaactcgaaatgcaactttccaacaatgttcttgctgtagtcttcacggcctgcagacccctcgaggctcgctggcggaaggaagggcactacactattgcttgtttgggtcactgaagaaaacttttcccgtgtcgacagaattctaccgactgtttggaactcaggatcagaccggaggtgcccgcacgtgtcgagaccatctggccaaggacagagagatgccccctgaccggcgcagcggagccgcttggctgcgcccgccgcagccctactcccactccgtgcaccgggctccgcagtgacccgggctccgcagtgacccgggctcccgcagcgacccgggctccggttgcccaggtaacgcaggacgcaggcgcgaaaggcgggtgcctggcgcgcgctgcagctccccctccccccggcgggccgcggaggcgacgcgctgcctgcgccctgaggcgagtggttctccagccggaaaatcgcggctccggtgccgctctgggctcagccagtgagaggagccggccgggtacttaggac

SEQ ID NO: 7972 - DNA, 467 bp, Homo sapiens
  source 1..467: mol_type = other DNA
ccccttctcctatagggtcagagaccctcaggaagatcccgaggcgccttgaggaaactgccacgcccggtcggcctgggcgtcccaattcgatcaaactcgaaatgcaactttccaacaatgttcttgctgtagtcttcacggcctgcagacccctcgaggctcgctggcggaaggaagggcactacactattgcttgtttgggtcactgaagaaaacttttcccgtgtcgacagaattctaccgactgtttggaactcaggatcagaccggaggtgcccgcacgtgtcgagaccatctggccaaggacagagagatgccccctgaccggcgcagcggagccgcttggctgcgcccgccgcagccctactcccactccgtgcaccgggctccgcagtgacccgggctccgcagtgacccgggctcccgcagcgacccgggctccggttgcccaggtaacgcaggac

SEQ ID NO: 7973 - DNA, 475 bp, Homo sapiens
  source 1..475: mol_type = other DNA
aggatgaattcctgctgaaacaggagctaattcagaattttggaggcccaaagagcttagacttttttaatctaaaacaaggccacccctaaggccctttcctcaggacaagcagcaaggtctcagggcagacagccaggggctgggggacctctcgacacggggctccctggagccggcagcggcagcggcagcggtggccggcctggacactggggcagatttggctctggaagcagacacggcggcccggaccaccgcggccgctggagccagctgtggcagaagatccttcgcggcccaggccccgacggtaccactgcacagccgagagctcttcccggctccgggcgcttcgatccgggcttctcgggccggggcgaccgctgcctcgcaattggtcgaattcagcaggctccgcctccttgagtcgccagctgcctgccacacgccaggcgccacgcgccgacgagac

SEQ ID NO: 7974 - DNA, 247 bp, Homo sapiens
  source 1..247: mol_type = other DNA
ctattatctccattttacggaagagaaaactactacatcttggagattaaatgtcttcaactaatcattcgttttgtttattactggtagtgttttcttcctccccaccgagaaaaaaaataaaagccgagtcgccctcgaacacgctgaaggagcagtgagagtctcgtcggcgcgtggcgcctggcgtgtggcaggcagctggcgactcaaggaggcggagcctgctgaattcgaccaattgcga

SEQ ID NO: 7975 - DNA, 488 bp, Homo sapiens
  source 1..488: mol_type = other DNA
gttgagttgtcaaatcaatttggattacacgtaaccagtgtgtaacaggatgaattcctgctgaaacaggagctaattcagaattttggaggcccaaagagcttagacttttttaatctaaaacaaggccacccctaaggccctttcctcaggacaagcagcaaggtctcagggcagacagccaggggctgggggacctctcgacacggggctccctggagccggcagcggcagcggcagcggtggccggcctggacactggggcagatttggctctggaagcagacacggcggcccggaccaccgcggccgctggagccagctgtggcagaagatccttcgcggcccaggccccgacggtaccactgcacagccgagagctcttcccggctccgggcgcttcgatccgggcttctcgggccggggcgaccgctgcctcgcaattggtcgaattcagcaggctccgcctccttgagtcgccagctgcc

SEQ ID NO: 7976 - DNA, 438 bp, Homo sapiens
  source 1..438: mol_type = other DNA
agaaaattatcctgacacttgtcaaacacatgaataatttattcaagattattacaataagggtcatgactagtaatataaggaatctaatccgatattaaatatcaagaattcaacggtgatcaggtatcgaggatggatgatttagcatgcttcgaggtcaacgttgaggcctaagtgtagggagcctagctctctgggtccagagcaaagccccctggatcggaacgggagccgcccccacgccccgcccggctgccgagagccgcacttctgggcggatgccgcaggtcgggagggatgaggccgacggcgctgattggctgaccgccgcggcctggggtttccctggccccgcccccccgcccgcgaacccgcgcgctgcccggtcctgcgctgctcagcgggaggggctggaccccgcgttcctcctccctg

SEQ ID NO: 7977 - DNA, 448 bp, Homo sapiens
  source 1..448: mol_type = other DNA
gattgcaaggtcacaataaattcaaagtacttgtgatgtctgagtattaggtatttatttaaaaaatccccattttacatattaggaaactgagattactaaaagaaaattatcctgacacttgtcaaacacatgaataatttattcaagattattacaataagggtcatgactagtaatataaggaatctaatccgatattaaatatcaagaattcaacggtgatcaggtatcgaggatggatgatttagcatgcttcgaggtcaacgttgaggcctaagtgtagggagcctagctctctgggtccagagcaaagccccctggatcggaacgggagccgcccccacgccccgcccggctgccgagagccgcacttctgggcggatgccgcaggtcgggagggatgaggccgacggcgctgattggctgaccgccgcggcctggggtt

SEQ ID NO: 7978 - DNA, 503 bp, Homo sapiens
  source 1..503: mol_type = other DNA
aattcttttgtagaaatggggctatgttgcccagacttttctggcattacagacactgtttcttctggtttaaacagaaaaaagaaaaagaaacaaaaagagccactggcttcctttgtagtttcagggactgaccttgaactgattttcataacaagcacattaattttacttagactgtatgatccttctaaagccccttttagcctagagactaatttgcaaacacatttttaaaaaaggtgatccctcgatggaggtgccgagaccttctactacccctcccagcctccagccgggacaaggaactggagcaaactcggggctgcagttccgactggactcgcccacctgggcgcgccggctgcccagcctcctgaagcctcggggctgggccctgcggtgatgggcgtgctggccgtcgcagagccctctgggagttgttccgagaggtttgacagcgaccgcgggcttggcgcattcagaactccaactcccgccgg

SEQ ID NO: 7979 - DNA, 214 bp, Homo sapiens
  source 1..214: mol_type = other DNA
tagagaggttcttgtgagtagctgggaccctgccccccttactgggaggaaaaggggagcctcagctgcacttgccctttccccttttattattattttttgttagaaaaaggcttgtacccacaggcccaacaggccacttggctatgaggccagagcgtcgccataggggcccgaacgctagcggctgattggctggtggcgctagtcacca

SEQ ID NO: 7980 - DNA, 371 bp, Homo sapiens
  source 1..371: mol_type = other DNA
tctagtctttagacttcagctctcatattttgaatctccacttattttctatgaaggtttaactaatatttcttttaaaaaatattctgcttttttccccccatctgctgttgggatgggagaaattatgtatagtcaattctcattattccttcattattcctggcaattatgttcaataaaaatcccagctacatgggaggctggcctgaggaattaaaaaaagaaaatactgaattattctctgtgggtcacaacatttttgtcagctaatcaatacataaccttgttttgtgtttctgtttaaagacaccttatttaatatacattgttgattcatcaacattgaactcatggctaataacagtact

SEQ ID NO: 7981 - DNA, 478 bp, Homo sapiens
  source 1..478: mol_type = other DNA
tggaattttaaatatctcataattataatcttctaggtaaaaattcctcctacttagtggaacattgcctaaggaagatggaaagcatagcttgttttaaaacttagttttctccattacaaacggttgcaaaattgtggtactgatcctagaaataatctaatttgaacctttgattgctaggaaactgagagtcaggctaaagtgggaataaaaaatgtgaagttcttagtactatgcctgacacacagtaagagctccacaaattattaatgatgattattactagtggctaaactgaagctctggtttatgttttcctttagacgtaaataagaatttgtaattgtaaggacttcctgaagagaaaatttaaaagttagtcacttcttttagttgttttgcttttgtttttagttaacaataatgcaatccatttcccagcataagtgggtaagtgccactttgacttgggctg

SEQ ID NO: 7982 - DNA, 425 bp, Homo sapiens
  source 1..425: mol_type = other DNA
ctacttagtggaacattgcctaaggaagaaagcatagcttgttttaaaacttagttttctccattacaaacggttgcaaaattgtggtactgatcctagaaataatctaatttgaacctttgattgctaggaaactgagagtcaggctaaagtgggaataaaaaatgtgaagttcttagtactatgcctgacacacagtaagagctccacaaattattaatgatgattattactagtggctaaactgaagctctggtttatgttttcctttagacgtaaataagaatttgtaattgtaaggacttcctgaagagaaaatttaaaagttagtcacttcttttagttgttttgcttttgtttttagttaacaataatgcaatccatttcccagcataagtgggtaagtgccactttgacttgggctg

SEQ ID NO: 7983 - DNA, 538 bp, Homo sapiens
  source 1..538: mol_type = other DNA
ttttcagtttcttttcattagacatttaaaaaatatttttataaatttaattccttatgtgttattaagttatatcaaaggcttaatgtgtatgaaacagtttgaagttacttgttgtatttcaaagaggagcactagtacttaagctagaatttaagtgaacaaatcttaaaatggatttttatctctggttcttaatttagtgctagtagaagaagaaatatgtgattgttaaagaactccgtctgtcataaatgttcctgtcatgtttctgtgacattacatagacgtcagggaagtttccaggctcaggccatctctagtcccagctactcgggaggctgaggtgggagaattacctgagcctgggaaaaaaaagcactagaatatttgaatactcttatacaagtgtttatgggtttattttattctgaagctcagaacatatctaaagtaggatggggatttttaaagtacacatataataaaattatcaaagcaagtagaagacttagcttcaaatccctactccttcact

SEQ ID NO: 7984 - DNA, 631 bp, Homo sapiens
  source 1..631: mol_type = other DNA
tggatataatttaagttcattaaaccatgggtgtttaacaaacatcatgagcttacccggtattttttatcataaacggggaggttggtgggccaccactcactgcgcacccaaactcatttactaatttaaaaaagtactgtggcaaggctcgtttacgtaagtagccgccgccacaatctgccgcagtctcgtgcggagtccaagggagctaggcggtccctcgcggctctgagtccctcggggaaggccgcgaagagaggccgcaggcgccctggcgagaagggagggcgggggcagcgggcggcgggcagcacccgggctccagttcatgaccccaatggaacattccgctctttccgcccacagaggggaggtggggggaacggacgcagccaccggaatccgggacgcgaagagccgcgttacgggaatcgctacccctcggagtcccgccccctcgtcgacaggcggccactggaccaatgcctgggcgcaaagggtctctcaggggccaatcagcgcctaggtcccggtagggggcggggcgcagcgttggccggccgggggcgcagctgggcgggattggggagcgccccgccccgccgcgggactggggtggcgcgctacc

SEQ ID NO: 7985 - DNA, 461 bp, Homo sapiens
  source 1..461: mol_type = other DNA
ttttaaacataacatcatgaaagaaagaaaaaatgaataaggaattaaatgtgatttttttttaagttttatagaaaaatcacttaaaaattgaaagtccccagcactctgggaggcaaggcgggtggatcatgagttcaggagtaaatctcagctactcagttgcactccagcctggatgacagagtgagactctgtctcaaagtaacaaattacagaaaatgttttcataaacataacctataaaaactttaatagaaaaatgacaaaaggcattagtcatttcaatgaagaaactatatttcaaaagttcaaaccttactataaattaaataaaaaggaaaatattttgcctaccaaaatggacaaagatttttaaagttagtgacaaattgactcaatcttccggaaggcagtttggcactatgtataaagaacctcactcttctaggaaattgtta

SEQ ID NO: 7986 - DNA, 643 bp, Homo sapiens
  source 1..643: mol_type = other DNA
tatgtggttctgtacgggactgcctttcccaaagacagccccaacggtttctcagaggctgtggggactgtattacagaaaactttgaagttttgttaagaaggaatgttttcttttcaaaagaaaacacaaacaaaactttatttttctggtttgcagcaggcgacggtcccgggcgccacctgcgcgtcggtgggaggctggtccacgcccgggtcccccgacgcccactgcaaagggcagtgggaatgacagactgtaaacaaggtgcaactcccctcccgcgagctccgcggtgccgggccgagattgccgagaggaagcggcgcagcgctgccgccaaggctcctcctgtcgccggtgcggccgggactacctggcggcgcggcgcgtgcagcgcgcagagtcccgggagcccacgcctccgcctccgcccgcccgccctctcgcccggcggagagcacagcccacctcccacctgcggccgccgggccgccctccacccctctgccgcaggccggacccagtgcgcccgcccgtcggtcagtccaggccaggcgcccggcgggccgcgctcacgcagttggcgcaggaggccttacgctggcggcgcagtgcccgccccctgcgctctccccgcccc

SEQ ID NO: 7987 - DNA, 264 bp, Homo sapiens
  source 1..264: mol_type = other DNA
tagatctgagccgttcaatttcaacaacgtatttatctgtcaataaacacttggtgatttgctatcaaattgttcactttaaatatgtgcagtttatcattcctcaacaaagctgtttttcagaaacatttgtccgagtgaaaacagggaatcatgacactttgtttttttacgtgtaaatattcgcaaaaaactcgggttcccgaagtcgggctgctcgtccgctcctgggacgcggtctcgggggcgggttcgcccctgagg

SEQ ID NO: 7988 - DNA, 351 bp, Homo sapiens
  source 1..351: mol_type = other DNA
ctatcaaattgttcactttaaatatgtgcagtttatcattcctcaacaaagctgtttttcagaaacatttgtccgagtgaaaacagggaatcatgacactttgtttttttacgtgtaaatattcgcaaaaaactcgggttcccgaagtcgggctgctcgtccgctcctgggacgcggtctcgggggcgggttcgcccctgaggcccggtgacccttcgcccgcaaccagggctagcgcttgtgtgcgcccacggaagcacccgagcgattccagctctacgcgcctctcattcagagaggtgaggtccggagccaggggaaggcggccgagcgcggccccctctcctcccg

SEQ ID NO: 7989 - DNA, 396 bp, Homo sapiens
  source 1..396: mol_type = other DNA
catcccctaagacacgttggtgatgaacaattcctagaactggtctcactccgtgagcagtgtacaccggtcccgcacgccctcccgcgccgcggtgtctgtgggtcggttcccagacgcgcccgccggctcttgggcctccactggctggacgtgggtctgtcccgcgcccgcgcgtccgtccgtcccccacgcgcgcgggtgcgggtctggccggctggggccggcgcgggggcggcgaggggcgccgggcggcgtcggcttgcgagcgggccgggggcgtcgcgggccgccctgccctataaggggccgtgccgcctccgccgccgggcgggtgccgggcggaccgcggcggtggcggcggcggctgcgattggctcaggcgccccatccggg

SEQ ID NO: 7990 - DNA, 660 bp, Homo sapiens
  source 1..660: mol_type = other DNA
aaatgtgatttttctttttcgtgtcacaattagagaaacaactttgaacacggtaatactgatttttaaaaatcaataattcacctactgcagatttagtagaaagaaaaataattagcatgattatacctagtagccattgcatgccacggtggagcatcccctcagcgtgccctaccgctccggcgccggctcggcagatgttccgcctgcgcagagctgagcataggcgccgtgtgagcgccgattcacccaggcccgagcgcgaggcccaagcggggtacccggcgaagggcgtgcgccgcagcgtcttccgcagcttgaagctcggaggagctgcggcgcagcttcgggagcttagagctggggaagacgctgcggcgcgcgccactcgagcctgcgcggccgcttcccggcgcagcaccctctgcgcagccccaccagcccggactccgaggcagccccggacggggggaggtgcgggaggaggggctcctcagggagcggcggggaattcccccttccacctcagcagcagggggtaatccccgactccagctgctcctgacgtcaccgcgtggagccaccgccccccgcgcgcccctgctccggggcctcctcgaagccccgcctccccctccccccaggcgcccgacgtag

SEQ ID NO: 7991 - DNA, 648 bp, Homo sapiens
  source 1..648: mol_type = other DNA
aattcacctactgcagatttagtagaaagaaaaataattagcatgattatacctagtagccattgcatgccacggtggagcatcccctcagcgtgccctaccgctccggcgccggctcggcagatgttccgcctgcgcagagctgagcataggcgccgtgtgagcgccgattcacccaggcccgagcgcgaggcccaagcggggtacccggcgaagggcgtgcgccgcagcgtcttccgcagcttgaagctcggaggagctgcggcgcagcttcgggagcttagagctggggaagacgctgcggcgcgcgccactcgagcctgcgcggccgcttcccggcgcagcaccctctgcgcagccccaccagcccggactccgaggcagccccggacggggggaggtgcgggaggaggggctcctcagggagcggcggggaattcccccttccacctcagcagcagggggtaatccccgactccagctgctcctgacgtcaccgcgtggagccaccgccccccgcgcgcccctgctccggggcctcctcgaagccccgcctccccctccccccaggcgcccgacgtagagggcggagcttaccgcggcgcgccactgtgcacgatctcgcgagacttggcccagaacattgcg

SEQ ID NO: 7992 - DNA, 742 bp, Homo sapiens
  source 1..742: mol_type = other DNA
gtcatagatgactctgattggaaactcacaatcggcatcgatgtttagtactagtaacacggttgtcaaccgctgggcggaggacgccttgccaggacgccgacctcgctctgcaaggttcaggggccgacctcagacagaggctcgctctaggggcatgggcgggggccagacgggcctcgagtgggatcctggcacggttggccgatcggcccgggatcccggctgcgggcccgtgtctgccctagcgcgatgggctcgaatgcccggctccacgaatcccgggagctcgtcacagcgcgggcaggcactgcggggcagctgcagacgagccctgtcatacggccggaggaggcctcgcctgcccgtgcggcgggctccgggcaccctgataccttgacacaggaggccccgggcggccgggaagggctgtgcgggggagggactgcgtctacacccgcgcccgactcgctcgggtcacggcactgccctgccaccaggcggctggggcgggggtgaggccaggcgtcggccctcgcaggctcggagccttcgaagacagcggggcccacggacggctctgaaggccttcccgcggccgcaagagatctcggcggccggcgtttgaggcgcgcggctccgctgggaagcgagacccgggtggcgggacaagacttgcttcccggccacgcgcgctcggccggccgtggggcggggcataggccgtgacgtgatgtcgcgt

SEQ ID NO: 7993 - DNA, 621 bp, Homo sapiens
  source 1..621: mol_type = other DNA
actaaaattaatggaaatattgaatatggtaggttcccaatattagactgttgcattattgagtccataccgtgacatttttgaggtttgcacctttgaaaaagtgttacacatagattcttttaagacaatgtttctcaaattatggcaagtttaaaagttccagacctctcaaaagatctagtgaatcaatcctacctgtggcttaaaaattttaactttaacctccgtctcaacagattttcaagtacgtttaagtttcagaacctctgttctactgctgcaatgaagtttaaagctgattcaaggttataattttgacttcatgacaaggcagggctgatcaacgtttacttttaagtagagagggctgtctctagatagttacagaagtcatacctatcagtcaactgacagaaaagtacagttcctagatttcaaaaccatttttttgaactaatctgtaacttaaggtctcccatctctctgcagcccgcggccagcggcagtgtgtgcgcgcagggcctggggaggggctggccagcgctatcgcgcccctggcacttcctaagagactctgcagctgcagcttgcacgctttccctccagaggaaagaagcc

SEQ ID NO: 7994 - DNA, 407 bp, Homo sapiens
  source 1..407: mol_type = other DNA
agggcctggggaggggctggccagcgctatcgcgcccctggcacttcctaagagactctgcagctgcagcttgcacgctttccctccagaggaaagaagccacgcgcgcgcgacttctcaggaagccactctgcctaaggaaacgtagaaactttcccgattcggatgagctctggcttcgtttgcattggaaattagcacaaggtagtgttgtttcctaatcagaaaatcaccatctacttccgaaggcgatagttacattcgcctgcccctggcgaggaaaagagcagaggctccgcggccgagcccgactgggttcaccgctcgcccgtttgccgggaacacccggagggcgagactacagctcccaggagtgcacggggctcctcggcagtacgcgtgtgcgg

SEQ ID NO: 7995 - DNA, 333 bp, Homo sapiens
  source 1..333: mol_type = other DNA
cccagcttctcgggaggctgaggcaggagaatcgcatcgcactactgcactctagcctgggcgacagcgagactctgtctctaaataaataaataaaatattctcttctgatcaaaatacagatcctgagttctatatacaaaacactgcattccttatgcatacagtggtcccacccctagattttgaaggttttagaactctcattgcatttctacatcaaaatgctaaaatgccctccaaaaggatgggcaattcttaagaatgaactacgaattttgaggagttttatggtcattattaggagaaagcctccccagaggctggcccttg

SEQ ID NO: 7996 - DNA, 463 bp, Homo sapiens
  source 1..463: mol_type = other DNA
ttccttggcccaagatcatctaggtcttgtagtatgcaggacatgcgtaaattctcctcctttaagagaactcttaggcaattggcatatgaaaatgcagcctattgtcaaatttgtgaattataaagcgttccgaccccacaacattgtatattttggtacttctcagaaaccttgagggtcctaaaggctccagcggcacctggctcggcggggcgcgcggggttctagcgagacaggtgcgcggccgtgcgcgcctgcgtgccggtccctcctgagccccgcggcgggcgcgaccccggacggcggactgcaggcgctccacgccggcacacgctcgcgcccgcgcctcctcgtctgcacttcaaagcgagtggcgcccggctgcgccggggggatggcactgcgaggtggcggggcccccggggcagagctttcccggaaagctgcggcgttggagccg

SEQ ID NO: 7997 - DNA, 476 bp, Homo sapiens
  source 1..476: mol_type = other DNA
catttaagcaatcagaatgcttacattattttcacttggtaattcacatccaaaataattcctctgtggaatcagcttagattatatctactgtaatagaaaatattttatatttaggaggtgggaagagatgaatgaaatttgcattttttttaaaaaaaaataaggtttagaaaacatttgtccaggaataatacattcaatttttcagtttaaaattccagtatctgaatttttaagaggtaatttacatattaaaaatgaacagctgctaagtcatcaagttctctcaactttgcttctaaagagaaaagtttagttttagtgcttcagtgaaatacttttttgaaagaatgacttttataaaattcatttgtttattatggtaaataaacaacttaatgtgatcaaagacatctcatttcccagagaaggaaatggttctttgtaagtctcagcaattgacgaggctaggc

SEQ ID NO: 7998 - DNA, 486 bp, Homo sapiens
  source 1..486: mol_type = other DNA
gctgcattgttaacattgaataccactcagtggtgagacaatttcttgaaatagatgctttcccaaaatgtcctggactcataaaatatatgaaggattctatttggctttcatcatttatttaatttgaaagaaagttgttttaacagatttatcagagttaagaaatgtttaaggtgacgcagcatctccttgaggattttcaagacgagtaaatcctagaattatatccatctctttttaagagaagttgaaataaggaaaattattgtgtgaaatttagtaatctttgtcagatgacccagtcataggcatgtattttttaaaattttttaacgaagccctgtgggtttacattttttaaagttcacactgatataaaggtactgtttaatcagctatatttaaaaacaaattttcgagggagtgtttctcacgttaattatgagataaggcctgagtgaagaggaagtcctggccatccct

SEQ ID NO: 7999 - DNA, 435 bp, Homo sapiens
  source 1..435: mol_type = other DNA
gagaatctttcagaagatgtcagagcatcagaataaatgatcttgtgaaattcattttctttccaaggcaaaatatgaaaagctcccacatggttttgataataacaaaataaaggggattcaaagatcaatagcttagtcattttacttaaagagaagaaatgaatttcatcgtgacagcatcttctgaagtcatgatggtagttaatgtaatcttgtcctgcagagcagaaattacttgaaccagcaattctgtcattggcaaagcaacctgaagttttccatttcccttctaacacttctttaacaaggatatcaagaaactgtcttccttccttaaggatgcattaatttacactcaaggcggttagattttacaaccaccatttaggattattagttgaactggttattttagtatgttgactaactagt

SEQ ID NO: 8000 - DNA, 479 bp, Homo sapiens
  source 1..479: mol_type = other DNA
tattccaccctcttatagttgaatacataaaattgtatatatcacaaatagtaattgaaactactcttatgaaaactatctagaaaacatatcatttgtgagtctaaatagtgttgttagttctttagggccctaattaataaggtacacaactgcaacctgtaaagcgttccatctagagacagagggagaaaaagtcaatttcattctcatgggatttgtcttatgtgtgcttgtttattcttcccttattaaaaaaaaaagagagaaaaaaacaaaggattggcatttttcttttatgaacgaaggtcaagttcaaagtttttctttcctttggattcaggaataagcaaatggaaatacataagcagcagaagtcactcgcgcagctgcggcgcattagcacggacaaagccgtgcgagcgcggtgctttctccgcggaggagtgcgctcgcctcctctgcacccagcccccgaa

SEQ ID NO: 8001 - DNA, 541 bp, Homo sapiens
  source 1..541: mol_type = other DNA
ttactttttttccaattgcaaaattatttctttgaataagtttgttgaagctctattcatcacacataaaaatcttatattccaccctcttatagttgaatacataaaattgtatatatcacaaatagtaattgaaactactcttatgaaaactatctagaaaacatatcatttgtgagtctaaatagtgttgttagttctttagggccctaattaataaggtacacaactgcaacctgtaaagcgttccatctagagacagagggagaaaaagtcaatttcattctcatgggatttgtcttatgtgtgcttgtttattcttcccttattaaaaaaaaaagagagaaaaaaacaaaggattggcatttttcttttatgaacgaaggtcaagttcaaagtttttctttcctttggattcaggaataagcaaatggaaatacataagcagcagaagtcactcgcgcagctgcggcgcattagcacggacaaagccgtgcgagcgcggtgctttctccgcggaggagtgcgctcgcctcctctg

SEQ ID NO: 8002 - DNA, 457 bp, Homo sapiens
  source 1..457: mol_type = other DNA
ccttaccagcgggctcagccatggctctgcaactaaggacgactcgccttggcattctccctgctgtgggaaagagccacacaatgttttatcctatgtcagggaaagagactgaattaatcttactattggatcttagacaatattccaggcaactttgcctggatttctctaagagcactgatcacagctcgggcgtgccagcctggagctgtccaacttttcagcagctccgggatcagggttccggtgccctggaggcggctaccactgccgccgccgccgttgctgctgcttctgcagcccgagttgctgatccctgctctcgccgccggcgcccaaacgcgcaccctagtcttgggggacgtgtctctgccatagcctcggtggaaggagccctgccgcgttctgtgacccctcccgctggcagggccccctctcggtagccctgagctaa

SEQ ID NO: 8003 - DNA, 284 bp, Homo sapiens
  source 1..284: mol_type = other DNA
atggtgtaacaagtaattggtatgactaacactaaagtgtcaagaccagaggaactgggcagtaacttatcttctcaattttctctctgaacatagatattttctttaagatacgaaaaacttttaattccaaagctgttctggaaaatcctgtattttcctccacaaatgatcactttcagtctgcattattctactaaaaataaaaagaaagatgaagggacggctcgggtcccgtagcgccggcacagcaagccgggaagagaccttgctccaggtgtagc

SEQ ID NO: 8004 - DNA, 354 bp, Homo sapiens
  source 1..354: mol_type = other DNA
attatcttcattctgcaaatgagaaaactgaagtgcaaagaagtttcataattttcctctatgatgtgataaagcttagcctaagctaggtagaactgactaagaagtctgtatgcagtgggtgcagcttagagtttcaacttgaaagtttcaaacctgggactaatgagaaagttgtcactttagtatctgcttcccttgagagaatagtgtcgcatcaaagtgggacacttccaccggttgtcaatcctcctttattaaggaaggaagctgatggatctttcctttctttctcagttagcatgtgaacttctttttaaaaagaagtttacattttactctaattcaatcagt

SEQ ID NO: 8005 - DNA, 396 bp, Homo sapiens
  source 1..396: mol_type = other DNA
aactgaggttattaatattgtaccaggtagcctttgtcctacattgaattgtaagagcaaccaaagagccttggaggcaccaatgatgatgattttctctagttcttcaaaagccaggaactgggccatattgttttctttgaaagaaaagaaaaataagtgaaaatgcttcacagaatattttatagcaacacacttctctggattaattaatagttttagaagcatctgtataatcttggaaaaaaagaggctgttattccatcatttccacatacacggttttgttacaaatataattgaaaattcaagtctttcaaaaatagaatcacataatcaaattctaaaagtcttgtcacatgctgctgagtgacctcaatacaagctttttctgtg

SEQ ID NO: 8006 - DNA, 516 bp, Homo sapiens
  source 1..516: mol_type = other DNA
tggtagggagaggatgcccatcccagagaaatctttgtggcctgctgcatcgaagaggcaggtcagcttgccctcgaaataatcaatataccaattaggcatattttggaccaaatttgagtaggtgtacagagtcctaagtatatggagttacttcctgaaagattgcaaatcggactagcaattcccagggggaagaagaggaatcggggctcccttcccgctcttccacgcggcccaaagctgggtttcggtcgctggaaatctgggaagggcgctgcacagcgttttccagcgctggggagacgcccccggccccttagtcgcacctgcctaggtgtgctcgcacggtgggaccagggtgggcaacagatttcgccccgggcaagttcgcacgcggagctcccagcgccgcgggtctcggagaagacgcctgcctccccgcgcatttccggtgacgtgctgccgcgccgcccaatcagcgcccgcagcccgcgggcttgggattcaaactgc

SEQ ID NO: 8007 - DNA, 280 bp, Homo sapiens
  source 1..280: mol_type = other DNA
gacaaggccgggctcctctacaggcgcgcaagcagcccggggcacgccgggggaaggcgctgggtagtagggaccgcggacgcacgaggccgggccaaggcgcccagagccgggccgggtagggctccgactctccggtgacaccctaagtgtcgcatgatgcgttagtgtagtagtaagtttccagcgctgccagcagcgggacccgcagtaggggtaatgctccagccgccgatcaggtcggcctccatcctggagccccaccgactgaccaatggga

SEQ ID NO: 8008 - DNA, 444 bp, Homo sapiens
  source 1..444: mol_type = other DNA
agcccacatttgtgagctgcaactaaaaatgattattgttttttaggtttctgggctattgatgatccaaatcataccagcgatgtaggtaacgagaaatgaattttctagactttttttcctgcagcagttgctgttaccagaaacaaagttagatgatatacaatctaatcttggagatgtcccgtgatggcatctgctctcggatcatcggtgccacgaccagccccgctaacccagagcggccggtgggccccagtcccgagagtcagggcgcgcggcggaggcgaggccggggcggcctccgccctcccggccgctccccctcgcgccgccccggctcctccctccggccctcggcgggcacctggcggcggcgggcagggggcggcgctgcgcgcgtcacgcggctgggtgggatagcgggcaggtgacacccggcgg

SEQ ID NO: 8009 - DNA, 274 bp, Homo sapiens
  source 1..274: mol_type = other DNA
gacaaggccgggctcctctacaggcgcgcaagcagcccggggcacgccgggggaaggcgctgggtagtagggaccgcggacgcacgaggccgggccaaggcgcccagagccgggccgggtagggctccgactctccggtgacaccctaagtgtcgcatgatgcgttagtgtagtagtaagtttccagcgctgccagcagcgggacccgcagtaggggtaatgctccagccgccgatcaggtcggcctccatcctggagccccaccgactgacca

SEQ ID NO: 8010 - DNA, 276 bp, Homo sapiens
  source 1..276: mol_type = other DNA
tcacaacagttagaaaacaaaatgcaatagctgttaccttaaattcactaaatatgcagactgaatgaatgaagtacaacgaagtattcttcttcacctgagcccgcgggggaaccccccccccacccccggggaaccccaaagggatccagattctaactggcctgttagccaaaaagtaaggttttctttctctccgaaggcgaagagggtcctccaaacccgtttggcgtggagtctcccattggtcagtcggtggggctccaggatggaggc

SEQ ID NO: 8011 - DNA, 350 bp, Homo sapiens
  source 1..350: mol_type = other DNA
gtcttgcaacatttgtcagaggtagtcaaacaaaaatttggcagattagctaatctttcagtctgtagattagaagaccagtttaattacttatcaagttctttcgtgaaacgaattagatacttaaattaaacttggtaacaaggttccgctacagcggtctcgacctcggggggcaaagtgcttcggaaccgctcctcgagtcctgaagccgctcccccgcaggacgtggcagtctcgggctccagcctggaaaggagcccgcccgggtgccgtcacccgccccgcgcggcctcacctgccgctccccgcacgcccggctggcggctcgggtcgcctgtgggcgggac

SEQ ID NO: 8012 - DNA, 355 bp, Homo sapiens
  source 1..355: mol_type = other DNA
tatttttaaaaagaaatttttgtcaaatttcaggggttgggagcctcactcattattatctttgaaataattaaatgttcttggcagcaaccaatatgctgtcattgacaacactttttaaaatgtaaattgtgattcaatactttaaaagtacccagggattcctcaaattgcaatacgcccattggggtgattgtgtaaacagaacttcttttccttaaagaggaattaacctttagattagaaaaattaaatatatttgtttcctagaatctaggtgattgcccaataaggcaggatgcatcatgccacagcgctgctcgtggggcaagcatgcctgggagatgacctgggg

SEQ ID NO: 8013 - DNA, 462 bp, Homo sapiens
  source 1..462: mol_type = other DNA
gccatgaaaagtgttgtttccaacctatcaattgctacagtttccagggccccggtacacgtggcctgatgtggtcagactaattaaattattgcaaaaagacacatgttggctttacaggccaaggcaagtaagggtgtttcttcccttccagcgtaactgggggggtgccaccttccgatgaaaacccggatcccgtactgtcaacggagggcccttgaattcacccggagaaagctcggcgcgacgcttcccgcgtcttctaggccgcgcgctgaaatcaaacgcgacgccggctagctgtgggccgggccgagcgctcaacgctccagcggctgggtaagccgcggccgccgcccaccccgctgcagagctgggcggggccgcctggaggcagcgggggccggaggcgcgctctgcgcaggcgcgcggcgccccgcctccccagcgtcggctccccgg

SEQ ID NO: 8014 - DNA, 532 bp, Homo sapiens
  source 1..532: mol_type = other DNA
gttggctttacaggccaaggcaagtaagggtgtttcttcccttccagcgtaactgggggggtgccaccttccgatgaaaacccggatcccgtactgtcaacggagggcccttgaattcacccggagaaagctcggcgcgacgcttcccgcgtcttctaggccgcgcgctgaaatcaaacgcgacgccggctagctgtgggccgggccgagcgctcaacgctccagcggctgggtaagccgcggccgccgcccaccccgctgcagagctgggcggggccgcctggaggcagcgggggccggaggcgcgctctgcgcaggcgcgcggcgccccgcctccccagcgtcggctccccggcgggcggtgcgggccctcccactctaccccgcgccgtctcacggccccggcccgactacccggcgtgcgcgtcctcctgccggcctgcaggcccggggcctccgcctgctgcggccccgcttgcgttcacgctgtcgcccgggccggcgcggccgcgggcaaccgctccccctccca

SEQ ID NO: 8015 - DNA, 552 bp, Homo sapiens
  source 1..552: mol_type = other DNA
acacaaaattgaatgtctgcacacagctctaatattctacggccatagctttcatcagatgctcaaaggaaactatgagctaaaaaggttaaaatagtacatgacccttctttctttttttctcagttttcaaatgacacgaagcctgacaagatcctttaactatgtaatgctctttcagcaatttatatgtggtactagcatacaccaaataatttatatgtagtactatatgtttttctggggaacaaactttctaatgtgtagtttagacataaatagatggagtacatattgaaatagaagaataattatcttgaaaatcctagacaattatttgattcattcaacaaatatttacagagcatctaatgactttctgcgcttatgtattcataggaataaaattaataaaccttatcgataatgctgttaataatgagaggatttttcaaaatgtgctgcccaatccccgtgttgaacatgagtcctgtaagaaaatacgaaacagcattaattttcctactgagtatggggaagatttctgcgcca

SEQ ID NO: 8016 - DNA, 254 bp, Homo sapiens
  source 1..254: mol_type = other DNA
aaaggaatttgttgaattatttgttaaatgaatcaaataattttctagtctcgctctgccgcccaggctggagtgcagtagcgcgatctcggctgggattacaggcgtgagcctcgcgcccggctcttctattcttagtagaagcatatccagccctggttgggacaagggctccaactccagactgcagtcctcggtagcgcggtgtcattcccggcagtcagtgggctccaaggtccgccctctcagagcgt

SEQ ID NO: 8017 - DNA, 610 bp, Homo sapiens
  source 1..610: mol_type = other DNA
aatcctagacaattatttgattcattcaacaaatatttacagagcatctaatgactttctgcgcttatgtattcataggaataaaattaataaaccttatcgataatgctgttaataatgagaggatttttcaaaatgtgctgcccaatccccgtgttgaacatgagtcctgtaagaaaatacgaaacagcattaattttcctactgagtatggggaagatttctgcgccaggcgacgcgcagggcctgcggccgagtcggggacccacccctgccttccgcgctcacgggagcgcgtcctgaccggcctctgccgatcaggtcttggtccgcaccccaggctaggtcctgccggaagacctgacccgaccgaccccagcttcctcgcggggatccgcacctccagcgctcttcagctcccggcgctgctcctgccgcccgcggcggcggccgatggcccccgacttgaccttcggcatcagccaccacgtggggatcgccgccacgcgccgcccgcaccactctggcccaagcgccggaggggcaagggtccgccccctcccgtacgctctgagagggcggaccttggagcccactgactgccgggaat

SEQ ID NO: 8018 - DNA, 325 bp, Homo sapiens
  source 1..325: mol_type = other DNA
aggctggagtgcagtggagcaatcttggctcactgcaacctagcgattgctgggattacaggcgcccgccaccaggctggtctcgaacttcggacttcgtggtccggccgcctcacgagtagctgggactacaggcgcgcgccactgttctctttttaaggataagaaaatttaggtgactatgctagcttttagcagaggcaagcagaacaagattctttaaataactcttctcttgatatctagaatataaagcgtgaaatggttctgattgaagcttcaatctatggtttcgtccggactactgcgcaagcgcactgcgcaa

SEQ ID NO: 8019 - DNA, 305 bp, Homo sapiens
  source 1..305: mol_type = other DNA
gataaagttcccttctgcttcatagaggaaatgaaatacattgagtctttgtgtttgctagggccgccacaacaaaataccttatattgggtagcttaaacaagagaattttttttctcacaacctccatccttgagatccaggctggagtgcagtggcccgctctcaggtcatagttgcactgcaattggtttagggccttaccctaacaacctaataggcttcaaatgaatttttaaggaacacattactcctttttcaactagtactaacttaacaaggatttaagcatacccaagtctctt

SEQ ID NO: 8020 - DNA, 800 bp, Homo sapiens
  source 1..800: mol_type = other DNA
aaaggagagttgtatacaattatataacttgatattttaggaatattatcaggctattagtaatattaataaaagtcagaattagaaagcttaagcaactagcttaaagttaatgaaagaaagttaatgactgaacaatatataatataaacaatttatatccgattctttaaattcttgaaaaatgacgttaaaaaattctccatttttgttctaaaagattcaaactgatacagatatatataatttttcttgcaaagataacctatgtcagtaagttggtatgcagcttcttaacatcttataacccaacacaaccaattagtgcgttactactaattagtagcttactaccaattagtacctcacgtattaagtagtactcagtattttttgcaaccaaaaatattttgaaaattttaaaaagagcacgaggataatataacaacatttatgttcattctaaattttttcccctatttttattaaaggaataaagcataaagtttaagtcttcaatgcgtatttaacacaacataaatattttattcattaaaaagtttacaaaaaattgtattactcgatatacatcttatttgtctgaataactaatgttttcaagtatcctttaaaaactattatttttatattataggagatatttcaatgtgtatattaggaaaactctaactgcattctgaaaaaataagttcctgagatttccgttcagcaatacttttgaaacacagataaaattacttcctgctgttttacacattgactgtaaaggaaccaatgtg

SEQ ID NO: 8021 - DNA, 519 bp, Homo sapiens
  source 1..519: mol_type = other DNA
caggctttcaacatcttgaaaaccttgcttgtttgtatttaggaagtaataatttaacaaaagtaccatcaaatgcctttgaagtacttaaaagtcttagaagactttctttgtctcataatcctattgaagcaatacagccctttgcatttaaaggacttgccaatctggaatacctcctcctgaaaaattcaagaattaggaatgttactaggatgggtttagtggaattaataatcttaaacatttgatcttaagtcataatgatttagagaatttaaattctgacacattcagtttgttaaagaatttaatttaccttaagttagatagaaacagaataattagcattgataatgatacatttgaaaatatgggagcatctttgaagatccttaatctgtcatttaataatcttacaattacgttatattaacattacaaattgtgttacatcttcaataaatgtatccacatgaatgcctttggtaatccattagagactacagcagtacaaga

SEQ ID NO: 8022 - DNA, 310 bp, Homo sapiens
  source 1..310: mol_type = other DNA
ttggttatagaaaatttttatccattaaagaagtagcatattcctgattttaggtgaaaatgttcattctttcaagattaagtatgatgttaattatggatcaagaagtctatttaaagtagtgtgttacattaattttgtatgtcacaccaaacttgctaaatcctacttggtcatgttgtataattttttaaaatgaataaaaatttctgtatctagcagagaaacaaagctgtatattttttttctaataaaacttgctttttatattccgaatcttatttatagtcgtttgatcatctatgaggca

SEQ ID NO: 8023 - DNA, 340 bp, Homo sapiens
  source 1..340: mol_type = other DNA
tctaatctgttcttattaggattactaatacataactagttttcctatgggagacctcctcccagaaatggctgagggcctcacccccacttggcctctgggttactgatatcccataagtctaggagctgagtcctgagaccctgcaatgcaagaccaagagctcttgaaatgggatggggcccaatctgagtgatcagttggtgagggcctcaagcccactgtatgtgctccactcttttctaataatagagcagatgaagtaatattgcaattgatgttcccggggcgtcctatcaatgtgcgggcccgcgaacaacgtcagccggaccgattctct

SEQ ID NO: 8024 - DNA, 346 bp, Homo sapiens
  source 1..346: mol_type = other DNA
aatggctgagggcctcacccccacttggcctctgggttactgatatcccataagtctaggagctgagtcctgagaccctgcaatgcaagaccaagagctcttgaaatgggatggggcccaatctgagtgatcagttggtgagggcctcaagcccactgtatgtgctccactcttttctaataatagagcagatgaagtaatattgcaattgatgttcccggggcgtcctatcaatgtgcgggcccgcgaacaacgtcagccggaccgattctctgcgtctgcacggccagtccttccaggcctggcgacagtggagggcagcgcaggctttgaaagctgaaactcg

SEQ ID NO: 8025 - DNA, 331 bp, Homo sapiens
  source 1..331: mol_type = other DNA
aataaaaatttctgtatctagcagagaaacaaagctgtatattttttttctaataaaacttgctttttatattccgaatcttatttatagtcgtttgatcatctatgaggcagaaaaacccctccgtctggcccgcggcgcttgtctgcctgcgcggggtcaaagcccggcgccgcccacgcgcggctcgggtgggaacccgcagacgtggggcgagcagggccgctggctgtggcgggcgagcgccggggcgccacgtccgaggccgcggggtcggggctgcaggcacagctcgagcgctttccccgtctcgccgaaccggcatcgccgc

SEQ ID NO: 8026 - DNA, 319 bp, Homo sapiens
  source 1..319: mol_type = other DNA
agcttttccgggaaaatctccacttgacttcttcaagagtaaagacaacacttctcgtggtctcttcctaccacgtccgggaaatctcactttggggatcccaggaccccaagttccctagatgaggcccttcggcgggggatgagagcggccggccggccactaaagctgtccgccaggaaagcttcagtttgtcaatatcatccgtaaagttaccatagcttaatgttatttatgttatttgtattacaatattagaagggacacttcataagtgggtgtttacactactctcgtgagtaatggttcggaccatgtg

SEQ ID NO: 8027 - DNA, 458 bp, Homo sapiens
  source 1..458: mol_type = other DNA
cttatatataattcaacaaagctccttctttttataaggaaactcacacccggtgggtcctagcgacttctaagacaaacgatgcctccggttacctgggtcggccaagtcttcgccaagcagctggggcttggctcctggggggaagatagttattttctttcctagtttatgtttggagtgtaaactttttcatgtaaacaaaacaaacctgactatgacggtggtaagagagcctctggctttcgaaaagggcacagtcaaagcggcgttttccttcccccagcgcagcagcaccctcgctacggtcgggaagggcctgtacgcctctagcgacggcagcacatggtccgaaccattactcacgagagtagtgtaaacacccacttatgaagtgtcccttctaatattgtaatacaaataacataaataacattaagctatggtaactttacgga

SEQ ID NO: 8028 - DNA, 401 bp, Homo sapiens
  source 1..401: mol_type = other DNA
ctaggagctgagtcctgagaccctgcaatgcaagaccaagagctcttgaaatgggatggggcccaatctgagtgatcagttggtgagggcctcaagcccactgtatgtgctccactcttttctaataatagagcagatgaagtaatattgcaattgatgttcccggggcgtcctatcaatgtgcgggcccgcgaacaacgtcagccggaccgattctctgcgtctgcacggccagtccttccaggcctggcgacagtggagggcagcgcaggctttgaaagctgaaactcggaaccgccgggcggcgcgttccttctcgcccagccttgcaatccatgccgagaggaaggcagtgcgagcccgcgccagcgcccagctcccgggacagggtcggcaatgct

SEQ ID NO: 8029 - DNA, 372 bp, Homo sapiens
  source 1..372: mol_type = other DNA
gcagtcattgaagtttcattcaatggactgacttaaaaaatcttttaaagctccacataacctgaagtcgataatcaaatggaaaatgtgctggagtttacttgctgaagtatgtataaaacacaggcattttgtacacttgtgtgcacgaatctaagctttaagtttcgttttaacattttgattgtgtggattttaaaaataaaattacacggagaacagtgacattatagcaaaccaggctagaatttctaagagagtaatttctctcattcacagtgtggaaaagttgacattgtctaagccatctgcagactgacgtcagtgtgctctgcctccgaggaaaagctgccaaaattttctcctgctgca

SEQ ID NO: 8030 - DNA, 396 bp, Homo sapiens
  source 1..396: mol_type = other DNA
ctcccgcttggcgcaaaagtttaccttttagcgccagcaggtgctcctgctggacaggttcaacttgccccggtcgcgtttggcaaaaccaaaggcttcttttcaacaagtccatttcttctatcttagaaacgtaggcataaaatactttgttttccatctgcaatcacacgttgccggagttttttttttaaaaaaaaaaaaaaaaaaaaaaaagaggtttatacaaaaaccgcgttgcatgcaggaggaaaaatcattaaaggatctggagttttcaccccaaaactttactttcctccagcagctgcagactacataatggagtcggctaagcggcgcccagtgtcctactgcgcctgtgcgccggtggcgtgcgcagaggcctctgggtag

SEQ ID NO: 8031 - DNA, 309 bp, Homo sapiens
  source 1..309: mol_type = other DNA
gagcgtgatttcaaaaccacagacttcgggttttggatgaaaacaaatctgtgatctagtcattttccattatctaaactggtacccttttgcatacctaaataagagttcgaaattccaactaaatgttagttttagcatctgtcataacaaatcaatgatcaaaagtgttagatattatcaaaaagacgttgtactacgcttaaatcactatttcgttaagacaagaagtgagaggacggccctctgttctgagggctttccgccgccatgttgttcgcagggcatgcagcgcgcgcagaagtccgg

SEQ ID NO: 8032 - DNA, 243 bp, Homo sapiens
  source 1..243: mol_type = other DNA
ggggcagttccttccctcattttgacaagctgtatttgattttttaaaaaagagattaagataatacattttatgttatgtgctttttacctaattttttaaaaatgaagaagacagaggaggaagtagctgcttctctcaccaccttcttcagagagtgtgtaagcccggctgggaagtgtcgcctaggcgctgcgcaggaagcgcttgccagccccggacttctgcgcgcgctgcatgccc

SEQ ID NO: 8033 - DNA, 552 bp, Homo sapiens
  source 1..552: mol_type = other DNA
gggccaagtcaccacagctgcggcacttttaatgacaggtctgtaggattgaacgtgaaatgattttcttatccaaactatttgcccagcctcgctgactgcggctgaggcagtcccaaggtggccccaggtggccgcgccaggtgtcccccaggggtccaccttgcaagccgcggggagggtgcgtcccgggagcgtcggagaggggtgggtccgggctccaggcgccctgcccacggccaaggttaacccgcgcgctggaggtacctgcggaggcttcgcacagccaaaaggcaccgggcgatcatgggagcgctgagaggctggcggcggcgggcgcgtggtccttcggcgtggggcggcgaggcgggcggcagcgcctgggcgcccgggagtctcgagccggcctagccgcagaggccacagtggctgcctggccagcgccctcccacgtgcggcagctccacgccggcgcctaccagccccgccccgcgccgtgccccgccccagctcgcgtgtctggccccgccccagccctcgcgtccggccccg

SEQ ID NO: 8034 - DNA, 493 bp, Homo sapiens
  source 1..493: mol_type = other DNA
gggaattcacatctacttcataagtagatattaacgagctaaaacacctaacttagtacgtagttacgatgatgatgactcaatttataatactaagctaattaatgtctgttgagtttaactaaaagatgatgacatgtcatgagcagagccgcgcatcccacctatcgaagcctgggccgcggcgatgccgccaggtctccaggatggagaatagagcacgcaaggtccctcaccttcactacatccgagcttgtttacaaccagggtaggagccacctacccagaggcctctgcgcacgccaccggcgcacaggcgcagtaggacactgggcgccgcttagccgactccattatgtagtctgcagctgctggaggaaagtaaagttttggggtgaaaactccagatcctttaatgatttttcctcctgcatgcaacgcggtttttgtataaacctcttttttttttttttttttttttttaaaaaaaaaa

SEQ ID NO: 8035 - DNA, 477 bp, Homo sapiens
  source 1..477: mol_type = other DNA
tgtcgttcttaataaaaatggcatttctatttaatcagcagacatgtcaggaaaaccggcgaggggtgagaagagggaaataggcttctcccccttcctctccggtacccggcctcgcctcggccctgcccggtgtgcagcgggtgccggtgcgggccccggtccggagcggcgggaggcgcacccttgcaggaggacgcgagacgactgctgctggcccgcggggttccgtaggcaggcccgcccgacccctggtcctcggggctggagcccggctcgggatcgcagcactggtcgcggcggcgcaaacttccccggcccctaggcccaggctgtgctctctctcaggcggcagggtctggccagcaccgcccctggggcggggccggacgcgagggctggggcggggccagacacgcgagctggggcggggcacggcgcggggcggggctggtaggcgccggcgtggagctgccg

SEQ ID NO: 8036 - DNA, 468 bp, Homo sapiens
  source 1..468: mol_type = other DNA
gccgcgcatcccacctatcgaagcctgggccgcggcgatgccgccaggtctccaggatggagaatagagcacgcaaggtccctcaccttcactacatccgagcttgtttacaaccagggtaggagccacctacccagaggcctctgcgcacgccaccggcgcacaggcgcagtaggacactgggcgccgcttagccgactccattatgtagtctgcagctgctggaggaaagtaaagttttggggtgaaaactccagatcctttaatgatttttcctcctgcatgcaacgcggtttttgtataaacctcttttttttttttttttttttttttaaaaaaaaaactccggcaacgtgtgattgcagatggaaaacaaagtattttatgcctacgtttctaagatagaagaaatggacttgttgaaaagaagcctttggttttgccaaacgcgaccggggcaagttgaac

SEQ ID NO: 8037 - DNA, 778 bp, Homo sapiens
  source 1..778: mol_type = other DNA
cccggcccccggcccgctgcccccagccgccgacgtcggcccgcaccgcccccgcgcgctgactggcccgcgcaggcctcctgcccggctgttggcggttggggcgaagccggcgggaggccgccccgcccccgcccccgccgcagagtcgcggcgcgcagcctcttcacccgtcgcggccggggcggtggcgctgttgccgccgcggcctgtgaggcagtaactcccctccctcgccgtctctcgctcgagtgaatgtggcgcggcggcgcgggacgcagtctcggcccctgccgcggccccgcaagctcgtgaggagacggagctgcctcctgctcccgccccctgcgcgtctcggggagccaccgccgctggcgaaggggacggacggaaggacggacggcccgacggacggcccggggagggggccgctattgagcctgcccgactcctcggctccggctccgggtggcggcggcagcggcgtcgcggacgaagggcgcggcaagcgctcaataaccctgccgcccggctctgggggcaacggaagcggtggcggcctagcgcggccgaggctcgccgagcgcccgggcagcgtcctcgcccccgccggccgggtgctgctgccgtccggtgtgccgggcgcgccggttgcccggaacccgaggctcccggcggccgtcccctcccctccccctctccggtgcgcgcggagctgccctggacggagctggatcctgcttctcgccaaggcaggaagtgagtttcgcactgcaat

SEQ ID NO: 8038 - DNA, 609 bp, Homo sapiens
  source 1..609: mol_type = other DNA
gccgtcttttctgtgaacatatttaaagcaagaactgcaaaaactgtgcaatgttatggttgaggctgaaccaccgaaccgctggggttggaagcctgcgtcgcatcggagcgtacccatcgccggtatgaggctgagacttggaggaggctgagctgcgccgctgctcgaagggcgggcgtgggaagctgcaccgcgctgccgctgtggtttcctgctgcagctgcaagtccatcggccggcgcggcggaggcctgtggctctctggctgggcgctgggccgcgagcagacagcagggtcggcgttgccagcgttccccaccctggggggctcgggagtccgggagtgcggggtcggcaggcctcgaggggcctgggccagagtgggcctcacggcgcgccttgcacgcgaacccacggccgccggctgcccctcccccggcccccggcccgctgcccccagccgccgacgtcggcccgcaccgcccccgcgcgctgactggcccgcgcaggcctcctgcccggctgttggcggttggggcgaagccggcgggaggccgccccgcccccgcccccgccgcagagtcgcggcgcgcagcctcttcaccc

SEQ ID NO: 8039 - DNA, 674 bp, Homo sapiens
  source 1..674: mol_type = other DNA
cgaagccggcgggaggccgccccgcccccgcccccgccgcagagtcgcggcgcgcagcctcttcacccgtcgcggccggggcggtggcgctgttgccgccgcggcctgtgaggcagtaactcccctccctcgccgtctctcgctcgagtgaatgtggcgcggcggcgcgggacgcagtctcggcccctgccgcggccccgcaagctcgtgaggagacggagctgcctcctgctcccgccccctgcgcgtctcggggagccaccgccgctggcgaaggggacggacggaaggacggacggcccgacggacggcccggggagggggccgctattgagcctgcccgactcctcggctccggctccgggtggcggcggcagcggcgtcgcggacgaagggcgcggcaagcgctcaataaccctgccgcccggctctgggggcaacggaagcggtggcggcctagcgcggccgaggctcgccgagcgcccgggcagcgtcctcgcccccgccggccgggtgctgctgccgtccggtgtgccgggcgcgccggttgcccggaacccgaggctcccggcggccgtcccctcccctccccctctccggtgcgcgcggagctgccctggacggagctggatcctgcttctcgccaaggcaggaagtgagtttcgcactgcaat

SEQ ID NO: 8040 - DNA, 238 bp, Homo sapiens
  source 1..238: mol_type = other DNA
ttttccagctttaatgtctaatatggtaaatatagacagtaatttttgagaataaaaagtttgagaattgttcttttttttttttttttttgtcttgctctgtcgcccaggctagagtacagtggtgcgatccgagtagctgggagtctcgatcgatcgagaattgctcttatatgaaactgacatgttacaaagtagttttgttgatagctagcaagaagcacattgtttccgaaaa

SEQ ID NO: 8041 - DNA, 596 bp, Homo sapiens
  source 1..596: mol_type = other DNA
gtccagcttcggcttatgatggtgtgaagcaatacatgttcaatagaaatcctactttgagtaccaatacaactcaatacagtgtttggtagagtacatgatgtgttcaacactttcttatatctgagcatgcttaaagtaggctagagtaagctataggttacgtgtattaaatgcattttttacttaaacctatcataagtggaaaatatataagacaaggagcatctgtactttttctaagggtaaatttttaaaagtagacattgcgtatacacattaactttatttatacgtgttgtcaaattgtcatcaaggacatttatactattatatgcttccactaagaatgcgataatagaacacgtggtgttaccagttttttttttaattgccaatctggtggaaataatggtaatttgatcacttaaaaattcatctaatgaggtgagcatcttaaatattattgatttggaagaagtattaatatttagattctttaattttataacttttaaaaacacagttgatagtgtcctttgtcatatgttttatgtagtttaatatattttatgatttctagctcatacaattta

SEQ ID NO: 8042 - DNA, 506 bp, Homo sapiens
  source 1..506: mol_type = other DNA
cctttagtgaaagttctttctcctagttcttagaggtaaggaaaatgaaggttccaaagtgaatccttttcatcctctgcttagctgatcataccgagacagacaatttgagtaggactacagagcttggtcctaattaaatacaaggacatacttttttaaaaaggttcaagtctcagacttaactttttagtttacaaacagaaataaagtcttttaaaaacgtatatatatttgctctaatggagacaaagttaagttcggagtctcagcccttggctccgattctgggctccgcccccaccctccggggacccccgcctggtccctgtcccctgcgcccaggcgctccagcgggaccacggcccgcgcccgggccccgcctcccctacctgaggccctcatggccggaggcgtcgcagcctccgcccaccagcgcgcctgccctgccattggctctgcgggtgcccctccgtcccggaggcaggaagccgcagtacccgcgg

SEQ ID NO: 8043 - DNA, 812 bp, Homo sapiens
  source 1..812: mol_type = other DNA
tttattaaaaaatgtgcttatagtggatttatacatttatagtagtatactatatttatagtagtatactcttttgagtgaaagacttcataatactaagtagtcaacttttacaatgtcttcaataggtagttttacttattaaaggacaagtaatattaaatttgggacattactagattagaactaaggtagtgacgatggagtttctgcctcaaaacctcaatttatcaagaatgttcaggttttacaaaccttttgagataataccaatttataacagataaaacaggtgaaatcaatataaatagtatagtgtatatgtgggtatatataaatacatgtgttaataccaataactaatacatataaagcagattattgttatttgatgttttgaaatctgttctccagaattttcactgaaataataaagataactttgtttttgaaagtaataaagtaatataaacttagatgctgcaaaggtagaaaatagtaggttttatttgcttcctataaataaggcatagccattatttaaatcaagttttaaattccaacttgagttccatccatgtttaaagatatattcagataatattgtttagggatttatctctgcacatgtggttgttttaaatatttttacaactgaaaccaggcatggtgcttgtggaaatttacatatgctatatttttttgtgcattgtcttttaaaacacttttggagaattaataatagaaatgctttaccagctaccacatgagtgttcttctaaatatatccacatgtagtcaactatttaaga

SEQ ID NO: 8044 - DNA, 483 bp, Homo sapiens
  source 1..483: mol_type = other DNA
catttttaaagtgaaactagcatactttaaaaccttaaatgttgtatgatgtgaagaatcactgccttgattgctgctaaggtgtcagcagtttaatcttttacgttaccagtgcaaatggcaacaaaaaaaaggtcaagaaactcttaatattattacgaaaatcgttttgactaggcccttgcctaatagaggttataaagcattttgtaaaattttgtttttttcacaattaggacgcctgccaacttttaaaaatagttggagttaggccaggccgcttggtttcccaatccgagaagactctcatcgttgccccagggacccgggagctggaggccgcagccgcgcgagaaccgccgggttgccggggcgacgcttccggctggcgcgcgcagccccgggagcaggcggctagatctgcccggcgctgtgaattcgccagcgggagcgcgctcgcggccgcgcgttctccgctttccc

SEQ ID NO: 8045 - DNA, 552 bp, Homo sapiens
  source 1..552: mol_type = other DNA
tttatatatatttgctctaatggagacaaagttaagttcggagtctcagcccttggctccgattctgggctccgcccccaccctccggggacccccgcctggtccctgtcccctgcgcccaggcgctccagcgggaccacggcccgcgcccgggccccgcctcccctacctgaggccctcatggccggaggcgtcgcagcctccgcccaccagcgcgcctgccctgccattggctctgcgggtgcccctccgtcccggaggcaggaagccgcagtacccgcggctcgggtgcagcgcgggagcacagtggagcgcagatcgcggacccgagcgggcatgtccccgcgcgcgggagcctccgtttgcggccgggcccgggcggctgtgaacttagcagcgggctcctgcggccccgtcactgccatgtagtcgctggcggggctccctgcagcccgggagcggcagtgccagtgagcctgagcccaggagcccgcgtcttccccgggaggcgctgagtgcgcgccgcgcccccgccgctcgggaggcaccgga

SEQ ID NO: 8046 - DNA, 422 bp, Homo sapiens
  source 1..422: mol_type = other DNA
tctctcaatttaaatatctttagaatagacaccaaggaggaataatttattatgaattggtagtgtctgccatgccagtaatgaaaacttaatattcatctcttggttgctttcaattgagatgtgcttatacactatacataggttaaatattccagaactaagttattatcatgagggattaaggagagcagctgccctgagccctcctgctgcttggctgaccagctgtgccagtcagcggctgccttttacagaggtgtctgtcaccgtgccgccatttagtggtctccgatttcctgtctaagacctcctggataaatgcattaggtgtctgagcccacttgctggcatccgtgctccgactggaccagctgactccgggctccaatcagctagagcgtgatgtaagtgtttagcag

SEQ ID NO: 8047 - DNA, 313 bp, Homo sapiens
  source 1..313: mol_type = other DNA
agtagtagtagtagcagtagactctgatactaaattgaggaatgtttgaactttggctttctttaatcctgcttcaaagctatttctaagaagaaatagagccaaggctggcatccctaactctgcagtgtcccctacttccccaggccaggttaggacccagctcagcaggtgccactgaagggctcagttcttcagtctgcccctgcagagtaggacaactaagaaagtggcctccttggtccagaagctgttggagttggccaaatgcttgaagttggcataaagtcaattggaaccatcacaataaaag

SEQ ID NO: 8048 - DNA, 440 bp, Homo sapiens
  source 1..440: mol_type = other DNA
ttatttatgtttcagtgaaatattttgcaaagataaatataccggaagaagtttaggcagtcacattaaaattctcattaataatgttgacagacaattacgtttattatttctgctaataggcatctgcattcctattcagaattttcattgttagtctataaagtctagttttaactttcatctatacttcagtgaattatggaggactaaaataccaggagtagtccgtactgcttctcttatacatgagagatatctaaggactataaaacataacttaagtatacccttttaatgcctttgtaagatttttaaaccaaggaggagctgcagcatatcagcttttgtcaacctgccaacagctttttgaaaggatgagcatgtatatattgcagttctattaaatgtttcagtgcagcccttataggttttaaaat

SEQ ID NO: 8049 - DNA, 533 bp, Homo sapiens
  source 1..533: mol_type = other DNA
ctttcttcagaaggggcaatacttgtagcatttgccacataaatgccagcgtaaactcataaatttagtttactgagggaggagtcactgtggacttccccggagcgttgtcactgccatccgtgacacaggtcggcctcaggtgcgcgcagcacacacccggagcagccgcggggacggatccattccgggctccggggagggggagcggcggcccaggctgcggggctgtcccggcaccggctggggtcgcgccgcggccgcctgctccctttcccgtgagcccccgctcctcaggcgcggccggggctggtggggggtggggggctgggggcgcggccaccaagctgtccagggacaaggccctgccgcctcctcccagccggaccctggaagggtccacaaaggtaataggcccattttttaaaagtgcttttaagtttaattcttttccttgtatgtagataccaaaaggaaactttgctgataagcaacagctcccccgcccctcgcagaagcggcgagtggtatct

SEQ ID NO: 8050 - DNA, 689 bp, Homo sapiens
  source 1..689: mol_type = other DNA
cgcgggtccgcctggctcccggaggcggcggtgccaggctgccggagttagccagcggcaggctgcgggcgcccgtccccccctccttcacccccggagcgccaggcgggtgccgcgggtttgtgctggcgagaccaggaattgcagggcctctccgctttggcgagctctggaatccgagtcctccccaccccagccactctgctggggcgctaggggcagcctcagccccgaacccctccgcctctgcgctgggagacgcccagcagccgggcgggcccgggacgtgtagagccagagcactccgcagcggaggcagcgcgcggcacggccgcccggggcatccccgcggctggggggcggaaggcgagggcggtggcaggaagggtccgccaggcctgagctcgctcccccactgccagccgccggctcggaggcccgagccgtgcggacggaaaggggcggagcgggctcgggggcggggcgcgcggggccgggccggaggcggggctagcgccgggcgctggagctgcgggcgcacggagaggagtcgccagcagctggacctggacggcaagcacggatcgggcacggccggcgggtcgcagccgggctggaggccggtcggaaccgagcgggcaggaggccaccgctgcagcgcgggccccgcagaggaagggaggcggtgc

SEQ ID NO: 8051 - DNA, 370 bp, Homo sapiens
  source 1..370: mol_type = other DNA
ggaattgattgaagtgaactctaaattactttctgatttccctggataaccttaaagctatctatcatgcaactgaaaattttcttagatcaaattttaattaaatagtagtcagtatcaaataaagggcaaacatccgcttagaaaggtatgcccttctctgccttttaattagcaggtcatatggccatttaaatgcgagttgcaatccgtccgaggatgccctcctaccacctgcagggtagctcagccacttcccccccgcgagccagccagcgcgcatttcccaggcgaaaatgagcaagttggtcttgcattggccacttgtcagccgatgacaactttgagcccaagttaatcatgaagctgc

SEQ ID NO: 8052 - DNA, 675 bp, Homo sapiens
  source 1..675: mol_type = other DNA
atcttaccatcagtggaaggtttgaaccaacatcaaatttttctggagcaacttaggtaattattacttgaagaatatgcatttcaaaactaacaaaccccgcccccgactccgcgaacgccgaggggcccgtggtctgccgcgggtccgcctggctcccggaggcggcggtgccaggctgccggagttagccagcggcaggctgcgggcgcccgtccccccctccttcacccccggagcgccaggcgggtgccgcgggtttgtgctggcgagaccaggaattgcagggcctctccgctttggcgagctctggaatccgagtcctccccaccccagccactctgctggggcgctaggggcagcctcagccccgaacccctccgcctctgcgctgggagacgcccagcagccgggcgggcccgggacgtgtagagccagagcactccgcagcggaggcagcgcgcggcacggccgcccggggcatccccgcggctggggggcggaaggcgagggcggtggcaggaagggtccgccaggcctgagctcgctcccccactgccagccgccggctcggaggcccgagccgtgcggacggaaaggggcggagcgggctcgggggcggggcgcgcggggccgggccggaggcggggctagcgccgggcgctggagctgcgg

SEQ ID NO: 8053 - DNA, 326 bp, Homo sapiens
  source 1..326: mol_type = other DNA
tagaaaattgccctgggatagtttgctgaggaggcaaattttggtcaatactgtttctcctgttcaaaagaaatggccgtaccactatttgtaattgattctctacagcttcaaaaatagttgtgaacttttaagacttcgggagggtatgttaacctagattcccagcttcgcgccattggtttgctgtacttctgacggcccataggtggcactgtagggacatctgcttgcgcagacgcaaggctgggcactcccccgggagtgagggttgctgggcctgatgacgtggcttggcaacgtccctaccgccgctgcttcccggg

SEQ ID NO: 8054 - DNA, 553 bp, Homo sapiens
  source 1..553: mol_type = other DNA
ccaaagaaaccaaatgattgggcgccttctttcggatccagatagaaggcaaaaagaaccctcttgtttttctttggatctagagagaatctgagcaaatgacaaagcaaatggggtaaaatgtctttttgtttagtttttcctgattttcccatgagaggcaaatacatgttaaggacatagaaatattccttacaagatttttgttggcaactggtctaagtatgaaattatttccaaatagattcagttcagagagttgttgcaacgatcaaatgaaagaatgtctattaaagcctttcatgaactatattattgctgctaccgtagaaatggaaagtgtgcaacactagatccaaaactacttttcgcctctgtcaccttccaaaggccactaggcctttcctgagctggcattggcaacgcactgggcggcgcactggcttcactgctctccaggtggccgctgcagctgcccgagagcgcaggcgcagaggcagaccacgtgagagcctggccaggccttccggcctagcctcactcgccttcgcgc

SEQ ID NO: 8055 - DNA, 220 bp, Homo sapiens
  source 1..220: mol_type = other DNA
cccgcctcagcccccaaagtgctgggagtacaggggtgaaactagtactctcgactcttgttcaaatgaaaaactacaaatcagtcatctgtccttcaaacttgagggcacgcaactctcagttacgagttgtctccaggctggaatggtttctgaccaccgggagatgtgggccctgggcggaaggggcggggccctcgggccttttcccggcgtccat

SEQ ID NO: 8056 - DNA, 552 bp, Homo sapiens
  source 1..552: mol_type = other DNA
tagaaggcaaaaagaaccctcttgtttttctttggatctagagagaatctgagcaaatgacaaagcaaatggggtaaaatgtctttttgtttagtttttcctgattttcccatgagaggcaaatacatgttaaggacatagaaatattccttacaagatttttgttggcaactggtctaagtatgaaattatttccaaatagattcagttcagagagttgttgcaacgatcaaatgaaagaatgtctattaaagcctttcatgaactatattattgctgctaccgtagaaatggaaagtgtgcaacactagatccaaaactacttttcgcctctgtcaccttccaaaggccactaggcctttcctgagctggcattggcaacgcactgggcggcgcactggcttcactgctctccaggtggccgctgcagctgcccgagagcgcaggcgcagaggcagaccacgtgagagcctggccaggccttccggcctagcctcactcgccttcgcgcgatcgccctggaaacgcattctctgcgaccggcagccgcca

SEQ ID NO: 8057 - DNA, 327 bp, Homo sapiens
  source 1..327: mol_type = other DNA
tgatgtatatcatcaaacacattggtcaagcttacaatactatatataacctaagcattatcacagaacgtaatgtaactttttttttttttgagaagtagctgggatgcgaaagatatgagtggcttacatttcaaatatttctgaatttttgagttatctcaacttgaatttaacgaaattattcattttaggaaaccgcaatttatttggttccagataaaattttgaactatatcgaaattatctagacaatttatatcaggcacagggggcggagccagccccacggcggaggagagcccagtccggtctccgcctccgtga

SEQ ID NO: 8058 - DNA, 292 bp, Homo sapiens
  source 1..292: mol_type = other DNA
atagcacttatcacctatgtatcataacacatatttgacttggaaggcagggatctttgctccctgctatctcagattctaaagcactcaatatgtttttgaataaatgaattagtgtgtttgttatgacaatttatgataatcaactaagttaattgagcactgtctcaattaattgagttaatgaaagggactggactaagaaccccacttcaggcaccgacaggcgtcacgtgacgggtggggaacgccaaccgcctgggcctagcgcagcttcctccgcccaccacgg

SEQ ID NO: 8059 - DNA, 226 bp, Homo sapiens
  source 1..226: mol_type = other DNA
ctccactccgtcgcccaggctggagtgcagtggtcactgtagcctggatctcccaggctcacgggatcctccccctgagtagctgggactacaggtcagtggcacgatcccagccctactttttaaactgggattacaggtgtgaacgagctgcctccatggcccagggcgacctcacccttcctgtctgggactgcgcccacgcggtcacgtggtggcccggagg

SEQ ID NO: 8060 - DNA, 492 bp, Homo sapiens
  source 1..492: mol_type = other DNA
ttatgcacaacatgtgttccaaagatatgacagaagaatctacattcagtagaaacaagttggtcaaaccttaacttttcattttagaataattttagatgtacagtaaattgcaaagatagtactaagaattcctgtgtaccttttacccaaattcctctaatgtcaacatttgtgtacaatttgtcgaaattaagaaattaacttcaggatccaaaccaggataagagaaatagggtctctgaaatctatttcttatttttttcttaaggatttgggcagtttgtccacaacctgcagagtttccacgaatccaggtctgaccccgggtaccctctcaaggtccgtggcggggaccggagcccggactccagctcagggcaagtagcctcctctccgtgcgcgtgcgccgctgccgccgcgcgtcctccgggccaccacgtgaccgcgtgggcgcagtcccagacaggaagggtgaggtcgccctgggcc

SEQ ID NO: 8061 - DNA, 473 bp, Homo sapiens
  source 1..473: mol_type = other DNA
attaaagaatatatactctgttagggaatccaagaaatattaaatggctggcaattctttttaagttgaacaaacaaaggtttggtactgctaaacatatatatgagcacagtgagtatattggtctcactgactatgctatggtatcttagattagtgtgagatttgcatgcaactgcatatattctaagatgatcattgttctttttatagtcgacaatgatttgtacatcaataaattaaagcgaccttaagttgcctcattaaaattaagaaaacatatggtttaaattttaaaaatttttttacagtttaacatagatttaaaatttttttaagttcctgacagttgctactaaagtaactatttcagattgatctaatgtacatatttttttcaaatgatctaaagtctgatcatcggaagagttataaatcagatgttggagtttcgatatgtgacggcaatccag

SEQ ID NO: 8062 - DNA, 290 bp, Homo sapiens
  source 1..290: mol_type = other DNA
ttcaagggattctcctgcctcagcctcctgagtagctgggagccactgcgcccagcacgcgtcagaatctgctgtttggaaaatttttattagatcgtagtacatgctaatccagcctggccaatggtgaaaccttccagctactgtgccactgcactccagcctgggcgacaagagtgaaactctgtctcaaaaaaaaaattttacatatgattgctaattaggaaatttttcatttcaagtagtatttcacaaacagtatttttctgtgggactgaaatacattaatg

SEQ ID NO: 8063 - DNA, 526 bp, Homo sapiens
  source 1..526: mol_type = other DNA
gtggggtgccgggttgagctcgcaaatccccgctgcagggggctctgcaccctcaatcttctcatccccagatgggatgggcgggtcataatatagccgcaaccgcggcgggggcagcccctctcaacgccgagcctctcggaggtacggcctcccggggaccttccagactggtcggcccagtgggccgcggctgggccgccggggcaggctaggggcgccgcggtgggcttcggggccttggggcgccccttccggctcctccctgtagagcaaagggcacgtgagcgaggcgcccgaagccgtcgcggcggggaccatgttgcttccgaacatcctgctcaccggtcagggcgcgcggccgggagggactgggcgggcaggctgggggcgcagagtgctctgggcatcgggcgcccaggtgggggcccctcactgccctcttcagaggccggccgagggccacgaggcggttgtcagcgccccgggagccgaccctcgcgggcgttgcgggaggcgagggagg

SEQ ID NO: 8064 - DNA, 474 bp, Homo sapiens
  source 1..474: mol_type = other DNA
ttcataattttcagctattcagatttaacatccctgaaattaaacttaagcataaagataatcaacatgttttcaataaaatgttcactttaaagttttgacaatgacttaaaagatgtaaaatcttccgcttaaggaatctaaaattctaaacgttatttgtggggtggttaatctgcacctctcagaaacagacatgtcttgtgcgctgcctgggtgaatgatgtaactttactgttcccacaaagagtcttaatttttctgtaccttgcaataaaatctacatgcattagatttttccacgaatggcctacaatttgataaacactttcaggactaaacggctagcaaaaatattcgttaaagtcgttatgcagcattttaatttgatgtaactcaacaaaagcatcacaaacatgaactcgtttactaaggagtgaggcatccaccattaatagctggagagctggatct

SEQ ID NO: 8065 - DNA, 351 bp, Homo sapiens
  source 1..351: mol_type = other DNA
ggcggaggttgcactccagcctgggcgacaagatcacggtcaggtctctattcactcttgaaaacaagattgacaattaaaagtggggtgccgggttgagctcgcaaatccccgctgcagggggctctgcaccctcaatcttctcatccccagatgggatgggcgggtcataatatagccgcaaccgcggcgggggcagcccctctcaacgccgagcctctcggaggtacggcctcccggggaccttccagactggtcggcccagtgggccgcggctgggccgccggggcaggctaggggcgccgcggtgggcttcggggccttggggcgccccttccggctcctccctgt

SEQ ID NO: 8066 - DNA, 351 bp, Homo sapiens; identical to SEQ ID NO: 8065
  source 1..351: mol_type = other DNA

SEQ ID NO: 8067 - DNA, 447 bp, Homo sapiens
  source 1..447: mol_type = other DNA
tttgatgtaactcaacaaaagcatcacaaacatgaactcgtttactaaggagtgaggcatccaccattaatagctggagagctggatctcctccctcgcctcccgcaacgcccgcgagggtcggctcccggggcgctgacaaccgcctcgtggccctcggccggcctctgaagagggcagtgaggggcccccacctgggcgcccgatgcccagagcactctgcgcccccagcctgcccgcccagtccctcccggccgcgcgccctgaccggtgagcaggatgttcggaagcaacatggtccccgccgcgacggcttcgggcgcctcgctcacgtgccctttgctctacagggaggagccggaaggggcgccccaaggccccgaagcccaccgcggcgcccctagcctgccccggcggcccagccgcggcccactgggccgaccagtc

SEQ ID NO: 8068 - DNA, 309 bp, Homo sapiens
  source 1..309: mol_type = other DNA
acgattagagactgtgacgtttcaaaaggtatacaggtggaaaaaaaacacctatttgagtaaatatagtttgtagctcgaaataaaagatgaccagcctggccaggcggaggttgcactccagcctgggcgacaagatcacggtcaggtctctattcactcttgaaaacaagattgacaattaaaagtggggtgccgggttgagctcgcaaatccccgctgcagggggctctgcaccctcaatcttctcatccccagatgggatgggcgggtcataatatagccgcaaccgcggcgggggcagcccct

SEQ ID NO: 8069 - DNA, 480 bp, Homo sapiens
  source 1..480: mol_type = other DNA
tttgatgtaactcaacaaaagcatcacaaacatgaactcgtttactaaggagtgaggcatccaccattaatagctggagagctggatctcctccctcgcctcccgcaacgcccgcgagggtcggctcccggggcgctgacaaccgcctcgtggccctcggccggcctctgaagagggcagtgaggggcccccacctgggcgcccgatgcccagagcactctgcgcccccagcctgcccgcccagtccctcccggccgcgcgccctgaccggtgagcaggatgttcggaagcaacatggtccccgccgcgacggcttcgggcgcctcgctcacgtgccctttgctctacagggaggagccggaaggggcgccccaaggccccgaagcccaccgcggcgcccctagcctgccccggcggcccagccgcggcccactgggccgaccagtctggaaggtccccgggaggccgtacctccgagag

SEQ ID NO: 8070 - DNA, 457 bp, Homo sapiens
  source 1..457: mol_type = other DNA
agctggagagctggatctcctccctcgcctcccgcaacgcccgcgagggtcggctcccggggcgctgacaaccgcctcgtggccctcggccggcctctgaagagggcagtgaggggcccccacctgggcgcccgatgcccagagcactctgcgcccccagcctgcccgcccagtccctcccggccgcgcgccctgaccggtgagcaggatgttcggaagcaacatggtccccgccgcgacggcttcgggcgcctcgctcacgtgccctttgctctacagggaggagccggaaggggcgccccaaggccccgaagcccaccgcggcgcccctagcctgccccggcggcccagccgcggcccactgggccgaccagtctggaaggtccccgggaggccgtacctccgagaggctcggcgttgagaggggctgcccccgccgcggttgcggctatattat

SEQ ID NO: 8071 - DNA, 471 bp, Homo sapiens
  source 1..471: mol_type = other DNA
cctgctaatcagatttcagcagagttaatatgcttttctgatgaattacacaacagtttgttaattcttcattttcatcttgaagtaaatagaagatcaagccttcaaatctcttaattttttcggtatttattaaatctataaagtgtgtttgaacattatgccggttgtaaatatcaactattcaacagtttagcgagtgtaaactgtgtgccaatatcttagatactttttggaaagtatttacataagttatatcacaattaaaatgttgaatttaattttgtttctccagtgtcaaacttttcaaaagatagggaagaggtcattgccgcgacgtgccggctggtggcaccgagcagcctgggcccagagcggttgtcgggccgacagatccgggcggggcaaagccgggcggggaaagctgggctcgtcccgtcccggccccgcccccaccccgggagcccgata

SEQ ID NO: 8072 - DNA, 573 bp, Homo sapiens
  source 1..573: mol_type = other DNA
aaaagttcgctttcaatgcagatagttaaatgccaagatatacacagtgttaagtgcagactatgaaatttcgaactaaggtgctttttcgttttcttaaaaaaaaaaaaaaagtaaaccaagtttattttgctttttaagtagtgttgttcttaaagcactacaggttggtaaacaacgtataaggtgctttttctcaggccaaagagccataattcccggtcctcaagagcggaccgggtggactgtattatgcactttacttattctgaatctagagattcagaaacagcgccaatgtttacacacgacttttgaaattttcccaggagtctttcgtctttttccagcaacagtttaatcaaattctggaagcagaattccggaggaaacagtcccctcgcaggcggagcaccgaacgcaccccggggtggtcagggacccccatccgtgctgccccctaggagcccgcgcctgcgccccgcctctcgggccgcaacgtcgcgcggttcctttaacagcgcgctggcagggtgtgggaagcaggaccgcgtcctcccgccccctcccatc

SEQ ID NO: 8073 - DNA, 605 bp, Homo sapiens
  source 1..605: mol_type = other DNA
aaaaaaaaaaaagtaaaccaagtttattttgctttttaagtagtgttgttcttaaagcactacaggttggtaaacaacgtataaggtgctttttctcaggccaaagagccataattcccggtcctcaagagcggaccgggtggactgtattatgcactttacttattctgaatctagagattcagaaacagcgccaatgtttacacacgacttttgaaattttcccaggagtctttcgtctttttccagcaacagtttaatcaaattctggaagcagaattccggaggaaacagtcccctcgcaggcggagcaccgaacgcaccccggggtggtcagggacccccatccgtgctgccccctaggagcccgcgcctgcgccccgcctctcgggccgcaacgtcgcgcggttcctttaacagcgcgctggcagggtgtgggaagcaggaccgcgtcctcccgccccctcccatccctccctgcttcctctggcggaggcggcaggaaccgagagcgagagcgccgagggtgggactcgcggcgctggcccgcaggcttcccgcacccccttccacgttggtgcgcatgcccgggggcaggggaaggg

SEQ ID NO: 8074 - DNA, 404 bp, Homo sapiens
  source 1..404: mol_type = other DNA
agcagggttaacacccttcctccttaactgtcttcccagcgaggactcacccaggctggagtgcaaggttggctcactgcaacctgggattcaagcgattcttcagtcccgagtagctgggattacaggcgcctgccagcacgcccgcaggtttcatatagtatatgtttttcttcaggaaaatgctcaatgtttgttgaaaagcaaggataattctggctttacttttcatcccgatggctgcagagccttcgaccttccgagagcgaatggcgatcacaactcagcggaggccatgccctgcacctgagcgccccgctccggcagctgcactctgcagcatccggaacgtttcggcgtggccgcagggcgcggcggaatgacttccggggcgcccctaaagc

SEQ ID NO: 8075 - DNA, 703 bp, Homo sapiens
  source 1..703: mol_type = other DNA
acttgcactgatatggacaaatcagtgttaatgaccaaataatacaaaatatgataaaagtttacctcattcataacatcatttcatttaattaaaaaaattacagtgattatatcatgactgctttcaaatcaactctaaaaacatacacttatttgatagccttgaatttcagcagaaaagataatacttataagaggtatagactttaaaatatatcatatttgtgcagaatattttaagttataaatatgtatgcataaggcctagttgatgtaacattagtatagatgctacaaatgcaagttcattaaagaatattaagatattcttccctgtaaatctaagaaactgagtgtttgctcaaccgtaattgtgaagcaatcaattagctaactttgcagttctacatcgttgcaaaaaacatattgtgcctttactattaaagaaatatcattcagtgagttttttgtacacatttctatttgtgtggtttttttcactgaaaataatgcttttaaatttcagaatacaacagcttaacttatcacataatagagatatacatattgtatatcccttttaaaattagtgctaatgtagctcggagccccggccgagcttcggagccccggcccagccccggccgcgcacgcgcagtgacgcgccggccatgccggcggctgttgtcgggcctccagcg

SEQ ID NO: 8076 - DNA, 267 bp, Homo sapiens
  source 1..267: mol_type = other DNA
gaatatcttgagctcaggagttcgagctcgggaggtcgaggctgcagagccgagatggtgccactgcactctgacgacagagcgagactcttatatagatcaagcaggttttaaattcctagtaggagcttacaggggagggggaataaatatctacaccagtgagccgagatcgcgccgctgcactccagcctgagcgacagggcgaggctctgtactgttccgctcccagaagccccgggcggcggaagtcgtcactcttaagaa

SEQ ID NO: 8077 - DNA, 663 bp, Homo sapiens
  source 1..663: mol_type = other DNA
tgtatattctatataatatgtaatgacttgcactgatatggacaaatcagtgttaatgaccaaataatacaaaatatgataaaagtttacctcattcataacatcatttcatttaattaaaaaaattacagtgattatatcatgactgctttcaaatcaactctaaaaacatacacttatttgatagccttgaatttcagcagaaaagataatacttataagaggtatagactttaaaatatatcatatttgtgcagaatattttaagttataaatatgtatgcataaggcctagttgatgtaacattagtatagatgctacaaatgcaagttcattaaagaatattaagatattcttccctgtaaatctaagaaactgagtgtttgctcaaccgtaattgtgaagcaatcaattagctaactttgcagttctacatcgttgcaaaaaacatattgtgcctttactattaaagaaatatcattcagtgagttttttgtacacatttctatttgtgtggtttttttcactgaaaataatgcttttaaatttcagaatacaacagcttaacttatcacataatagagatatacatattgtatatcccttttaaaattagtgctaatgtagctcggagccccggccgagcttcggagccccggccc

SEQ ID NO: 8078 - DNA, 267 bp, Homo sapiens; identical to SEQ ID NO: 8076
  source 1..267: mol_type = other DNA

SEQ ID NO: 8079 - DNA, 427 bp, Homo sapiens
  source 1..427: mol_type = other DNA
gttaacttaactgtcttcccagcgaggactcacccaggctggagtgcaaggttggctcactgcaacctgggattcaagcgattcttcagtcccgagtagctgggattacaggcgcctgccagcacgccccctgggattacaggtgtgaaccatcgcaccctttcatatagtatatgtttttcttcaaatgcatcaggctcaaagtgctcaatgtttgttgaaaagcaaggataattctggctttacttcgatggctgcagagccttcgaccttccgagagcgaatggcgatcactccccaactcagcggaggccatgccctgcacctgagcgccccgctccggcagctgcactctgcagcatccggaacgtttcggcgtggccgcagggcgcggcggaatgacttccggggcgcccctaaagcggcg

SEQ ID NO: 8080 - DNA, 225 bp, Homo sapiens
  source 1..225: mol_type = other DNA
gtcccaaaacttgaaaaaaaaataagtgatcaattaattactcacctgaatacagttactacttcagcctggaagcttgaggctgcagtgagtaggatcgtgccactgtactccagcctgggcgacagagtgagacactgtctcaaaactagaataaaatacttctggtgtaaatcctgttgactcaagaccttagagcatttactggtaaagtctctaaaggac

SEQ ID NO: 8081 - DNA, 726 bp, Homo sapiens
  source 1..726: mol_type = other DNA
agcccatggttttctaaacatcatggttcaagaccccatttgggcgcttccctctcaaattttatatttatgttttgattcctagaaataaaaaatgtttttataaggaattctttgatcgtttatgttgaaacctactactttataattatgtttagaaacctactactttataacttcgaacattattgatgacagcttgctggcaccctcggcctcagcccactctggccgcgcttgaggagcccttcagcccgcagctgcaccgtgggagcccctctctgtgctggctgaggcctgagcgggctccctctgcaggcgcgggccggaacctgggctgcctgcggtgctcgcaggtccagcgcgacttccgggtgggcgcgggctcagcgcgacttccgggtgggcgcgggctcggcgcgccccgcactcttgagcggtcggctggcgccgccggccctgggcagtgagaggcttagcacccgggccagcagctgcggagggtgcactgggtcctccaacagtgatggcccgccggcgccgcgctcgaattttcgctgggcctcagccacctccccgcggggcaagggggcagggctcgggacctgcagcctgccatgctggagccccaaccgcaggctcccgcgcgccaccccgaggggacgggcgccacctcctgctacgcggcacccggtcccgtcaaccgcccaacggctgaggagtgcg

SEQ ID NO: 8082 - DNA, 380 bp, Homo sapiens
  source 1..380: mol_type = other DNA
caggcatgaggcacccacgccgggcctgatacattttaaaaatatcttgttcatttcttttactcacaataatttacaaggtttcaactataataatttttaaacaggctttgggaggccaaatgtggtcccagcaacttgctccagacgacgtgttttccagaaacacattcctctcctgggaggtaactatttctactcaatttagaatttctaaacccttcaggatcttcaaaagacaaaatcggccagcgatttcagagaagtggactttcttctgttcctcttttcaactactcctaaggactcctggagaagaaacttggtaccatggccgtcattctgcggcgctggctgatggcgcaatcagttgcggcgtc

SEQ ID NO: 8083 - DNA, 282 bp, Homo sapiens
  source 1..282: mol_type = other DNA
tacagttctggggttacaggcctgtgccaccgcacctggcccctggaaccagtttttctcagatacccagggacaactgatcctgaagtttattttaattaattatttatttatttttgagatcaggctggaggcaatggcaagatctcaaagaaattctcctgcctcagcctcccgagtagctggaactggtccgaacgctgggagcaaactgtttatcatgagccccagaatcgaggaatgcagtcttgcaagcctatctcttttgcctaataaatacag

SEQ ID NO: 8084 - DNA, 285 bp, Homo sapiens
  source 1..285: mol_type = other DNA
ttcttggcattgtgaacaaagttcttgggtccaaatacccactagaagtttcctagattggttgcaagccaatcagtctgattggttgtggacagcaaccattcagatacagtcactatcgtgatattatctacactgccgcaccgcttcgtgagggtcgatccgccggggagacctgctctcctgcgctcgggactagacgcgacctcgcggggctgaggctctgtcagggggcgtggcgcggcttgaccaatcgcgggcggcgcgcttaggcacgctctctgg

SEQ ID NO: 8085 - DNA, 353 bp, Homo sapiens
  source 1..353: mol_type = other DNA
tgacatactggtatatctttttaatcctagatctacaaaagagaaagttttgttcaaagtcatacaacttggatgggaaccagagcctggctctctacagagtaaggtgctcagcaaatgtggctgtctggaggcaacacccccttctcaccgccacacttggggttggggtgccagctgtcaccactgcccctcggcttcagctcaggcccctcggggagcatcccttgccgtgagactctgcgctgcccatctgtgcgcagagcctcgttcccaggcgcctggaacccggcgggcattgacgtcaagcgccggcggagcgctgcctacagacggttgacccgggccccggg

SEQ ID NO: 8086 - DNA, 572 bp, Homo sapiens
  source 1..572: mol_type = other DNA
aaaaacaaaaacaaaaaacacattttttagttcttctaaacacaaacaaaggcaataaaaattcccaatgctacaggtattttaaaagacatcaggtaattttgcttgaggaactatacattatagtcactgtaaccctgctgagtagagacagtatcttctctttattcttttgatactatctgttcagcaattaaggaaagaaattggtatctaatataatacatctgcatttctctgcctgaacaatagtaggcttaagttttgcatttttgatgtattctttaagtgaaggtggtaaatattgatattggtaaatatcagtaaattcgtcttggtacccacagccccgctggctatcccagttcccatcccattcccatgcacagacagggcgtcttcccccttcacggctgcagcaggagctcagcgggcgccccagccccttggctcgcggccctgccccgaccatcgtccctccagcttccgggccgcgggcgagatgatttgctgcagatgacatcagccccgggccaacggctggcagccaccgcgtgaggatgtgccgggtg

SEQ ID NO: 8087 - DNA, 521 bp, Homo sapiens
  source 1..521: mol_type = other DNA
actgtaaccctgctgagtagagacagtatcttctctttattcttttgatactatctgttcagcaattaaggaaagaaattggtatctaatataatacatctgcatttctctgcctgaacaatagtaggcttaagttttgcatttttgatgtattctttaagtgaaggtggtaaatattgatattggtaaatatcagtaaattcgtcttggtacccacagccccgctggctatcccagttcccatcccattcccatgcacagacagggcgtcttcccccttcacggctgcagcaggagctcagcgggcgccccagccccttggctcgcggccctgccccgaccatcgtccctccagcttccgggccgcgggcgagatgatttgctgcagatgacatcagccccgggccaacggctggcagccaccgcgtgaggatgtgccgggtgctcctctccgccgcgcactctccgcggcgctgggagagggcggagggggaggcggcgcgcggcgcctaccttcggag

SEQ ID NO: 8088 - DNA, 339 bp, Homo sapiens
  source 1..339: mol_type = other DNA
aaatttacatacatagaaaataatattttgctttaggagatttcagaatcagctgaatgtagcaaaataagacacataggttcaattaatctgtcacattttcaaaaagggcttccttttgagttccaaacccagctttgggagacgctgagttttgtggggaaaaggagaggctggaacccggctgcctttctttcctcagccgcctgcgctgagaacccgcccgcctgccgcaggaaagctggcacccacgggtatgccaggggtgggggcgcgtcagggcccctctgccaggcttggccagatgctggggcggcccagccccaggttacgtcgtcc

SEQ ID NO: 8089 - DNA, 328 bp, Homo sapiens
  source 1..328: mol_type = other DNA
tcttcatagagatgtgttttgaaaaatgaaaaacgtgccgttaagtcttttagattgttatggacggaggctgcagtgagccgagatcgcgccaccgcactccagcgaggcactgggggtatccacgacccccagtggtcaccactgcacccacgtgcaactagagggcgagggtgcgtgtggctgcgtggctaaagccgcggatacctccgagagggcagcggcagctgacagagccggagccgcctgcaggacggggcgaggaggcggagcgtcggtcctgtcgtcgagagcgacaaaaattctgggcgccccgagaggtcgagct

SEQ ID NO: 8090 - DNA, 357 bp, Homo sapiens
  source 1..357: mol_type = other DNA
aaatgtttatctgacgtccctctaaagacgggagaaaaatgtcccacaggaatggacacatccgagtagctgggattacaggcgcgcgccaggctggtctcgaactcctggcgatccgcccgcctcgcgttcccaaagtgctgggaccacaggcgtgggccaccgcgcccggcgcacatttgggtttttcgtggtcagcaaaagcaggaacaggaaggaaatggatcagataccttgtctccttccacttgccgcgccaggagcatcccgcgccgcactatggaggcagccatcttggagctcgacctctcggggcgcccagaatttttgtcgctctcgacgacaggaccgacgctc

SEQ ID NO: 8091 - DNA, 320 bp, Homo sapiens
  source 1..320: mol_type = other DNA
agactatgctgcttcacagtattttgaaaacaaattagaaatctccttccagttttcctcatccatcagtgatggaagctggaatttgatcctggaaaaactctaaggatttgcagcaatgctgagccaggagtcctggctgcccagcccagcaggctcaggagagcctgcctgtctggattggacaggacaggcctctgataaatccaacattttgtttaagagaaaatgagatgtctatcttctgtttccttattttttttcaggaaagcaaagggttgccttccttcttcccgaaggtactcatctgagaaaaagag

SEQ ID NO: 8092 - DNA, 316 bp, Homo sapiens
  source 1..316: mol_type = other DNA
agatatatggatagattagatagatagatgatagatagatagatagaatagatagacagatagatgatagaaaaatatctgtcagaggactcaatcaaaatcttacagggtcactgaatcagaatcattcttccccatttttttcacagttgggtgaaatgaggaaagactatgctgcttcacagtattttgaaaacaaattagaaatctccttccagttttcctcatccatcagtgatggaagctggaatttgatcctggaaaaactctaaggatttgcagcaatgctgagccaggagtcctggctgcccagccc

SEQ ID NO: 8093 - DNA, 639 bp, Homo sapiens
  source 1..639: mol_type = other DNA
gaactgctggtatttctactcacactgatcatgtgaggaatattatcacgggcatcatcaccttagaaaataaaaatcagctagctatgcaaattttaagtatttttatacagtaaattttacatataagaataatctgagggaaggaaactgatatttatctcattacctacagaaaatacaggacattttaatttctcgcttgttatttctaagagcaagaaactacagttttattgaacattttataaatcactgaattctaattacatagtagtttacgctggaacagtgttgttgaacaggccatccacctaggagggcccagcacagtctgggcaaccacaccggcgggccgttttgctcacagccccaccgcgccgggcagcgtctgcagctgctgcgtgcgagacccagaggctccggtcagcgcgccggccgcagggagtgcgagcacttgtgagccccgcgccgggccggtgaagtctggtgctgccgagcccgcttagaaagcacggccgcgcgctgtcggacgcaggcccacaggcccagccctagccccgccgccgttgccaaggcgaccgccgccgaatgttcccgccgcgggctccgccccccggccaatcggaccggcgctcg

SEQ ID NO: 8094 - DNA, 615 bp, Homo sapiens
  source 1..615: mol_type = other DNA
aggtagtagtttttttaagcccctactagcaagggacttttcatgttaaaaatcctctcctttatcaaactgtttggtttttacaaataaaagcatttagttttagtgaaaaatgtcattaatagcttcagttgactgtagcagatgcaactcatagtagctttaaaaacctatattcgtgtgccacatggaggcaaataatacctcactaggttgtaatgaaaatcaaatgagaaaatgtagtatgtgaaaatactttaatggaattaaacactacccagttgtaaaattacatcatttttattgtaaagtccttacttttggaatgtagttatttcataatggaatttatttcccttaataggagttcaaaagttgaagtttatgcagaaatgcaattttttttaagtcaagttctgcaaatgttgcatatattagactttttagtgccttatatatcaaattgaaatgtaaacatttttattgcttctaattattgctaattaaatttttcgttaattcaccatgtgtatgtaaaataatatacccaaaacagatataaggacttgactttttattagcccttaagtctaggacccagggggctcccgtgag

SEQ ID NO: 8095 - DNA, 485 bp, Homo sapiens
  source 1..485: mol_type = other DNA
atgaagataatttctcatgaattctcattgttttaagtcacctgaagaggtgtgatatgtacaataaatctataatagcgtttaactatttttttttaacttttctttttccaaaatgttcaagttgctgaagagaactaccgctcccgcaggcctgcgggccgccccagctggagaggccgaggccgcactcagtgcctgggtctcgcgcagctccagggctctcaggcgactggcccagactatagtccgttcgagatcctcgaaggccggaagcgagtgggcagccagcctgccgactccactgccgctggctgctgtccctgggccagtgcccgtcgcaccacacagtgcgagcagtctccccggtgactcctcaaggagcgcccgggatgcagggacagggcgcatgcgcacaccgtggccgtggcgtctaagtgctcgcccagctgcggcagccgctaggtggcgcatgcgccctggaa

SEQ ID NO: 8096 - DNA, 689 bp, Homo sapiens
  source 1..689: mol_type = other DNA
cagttggatccgtatcacgtgtcacggggctggttacaaatagcacagggattggcagggaggggcagagctggtccggcgcggggcttgccgcgtctcggcctcagtctcggagccaggacctcaggcctgaatggctgggtgtggcgatggggagctcgcagcgagtcgcttccctctgtaaccccactccagctccagagcaggggctgctgggtgtagtcgccccggacctcgcggtggccaaggccaaggcggccggggcacggtaccctgttcggcctgggccgcaaccacgaaggaggcggtggaggcgggggccggcgcttcctccgcgccccccacgccgccgctctctcgcgcccctatagaactgggcctcaggcctcgagggggagcgggcctcggcgggcggggcgcacagttccgccagccggcgggggcatctcaactcgccggccccgccaggtgtgcgggccaggcagccgtggaaggtgccagattcctcgcgcgcacggccacgagcgcggaggctgccaaacccgccagccctgggttccgaagccgcccctggctctccattccctcgcgggcgcgccccgggcccccagtggcggccagctcccaccggtcgctcctgcactgccctgccctgccctccccgggccgccgcgcccgcgcagcaccgc

SEQ ID NO: 8097 - DNA, 357 bp, Homo sapiens
  source 1..357: mol_type = other DNA
tattcaaccactggcagtgatgcagtgcataagaactgttattaaagtttaagtatcatcaacgcagtcaagaaataggtgtctgtctattcctaatgaactgaaccactaggaagggccccattcactgctggagaccctctgtacctcctggggccaaggcaggaggagcccagcctggcctatctctacaaaaaattttaaaaattggctgagcatcattgtgccactgcattccagctgggtgacagagtgagacccacagctcaataagttaatttttgaaacagcttgtcattgacttgcaaaaaatacatgagaaaacttcaggcttcatttctcagacctgtgttacac

SEQ ID NO: 8098 - DNA, 584 bp, Homo sapiens
  source 1..584: mol_type = other DNA
atttcggactcacttttgaatatgcaaagacatttcatggttaagaccacaaaaaggctgatcagagaacatttttatttaaattgccattttaaatatcagtcgttttatcttaaagcttgtcctgggtttaacaaagtttaactcatccacagcaggcagaaattctcctttgataattgtcaaatccatgccaattcggtacctaggagtcaatttttttgcctgataaacaagataattgtgtctgctaaattggctgaaatgcggattacccagggctcggggatacagcccccagaaattctgatttttgacaaaatgctttggaggggagagctgcttgagtggtgagcacaagctgggcacctccggcgtctccaggaaacgtgaataggccctttcttcggatcaggatcagggcccaatggagactgagcggacttaaccctaactgtgcacagagaggtacgggctgcgccccaagccagcagtctctcgtagggcctacagccggcagccgctggagcgcgcgtgcgcaagttcgcggcgaagtcagtttcctgactcttgaaggaagtggc

SEQ ID NO: 8099 - DNA, 340 bp, Homo sapiens
  source 1..340: mol_type = other DNA
atacaccacgataaataggtgtaacatatatttaaaaggtgctttaatgaaatacaatgaccaatgattgtatttcacagtacctaccaatgtgcaggacactgctctaggcagacatggtctgtactggcactagttaacaagatctgctgattttatctcccaaatattttaaatcacttcacctgaaaggcaaagatggaaatgtgtccattgccttggagagttgctgattactccgggaactaacaggaaggccgggtgtgagtgtgggcttccctcaatgggagccgccttcacagactcacgcagcccggcggcgcagaggcgggtcaggtgg

SEQ ID NO: 8100 - DNA, 356 bp, Homo sapiens
  source 1..356: mol_type = other DNA
tttgaatcaagcggccgcggcgattggctgaaaagcacgtggtgcgcgccccgcaggactgcgccccggctgcccctgcagtcgcctggcttagggcagagtccagccgggggtgccgcacccactggggaggtctctttggctctctgccagcaagaaacttaaaccgctgtctatgcgtgcccagggcctgtcctgcggatacccagaagcgcacagccccgggctgcgctcccctaaggtgggtccctcagatccgggacccgggaaaacttattttattctcggttcccggggttgcagctgccagcggctgagacagtgcgctcccctccccgccgcgccacttatagcgg

SEQ ID NO: 8101 - DNA, 345 bp, Homo sapiens
  source 1..345: mol_type = other DNA
ctaggttcacctcgatctgtcagagcctaataacaggagcccctcgtttcttcctgatcctggaattattctacaaggagaggaccagcgtcccgagacaggagcccgctgtctcccgctggaggggagactcttgcaggaaagaaagtccgttctgttccgcggcgagcggatcccgggcacaggggctggaggccgacccggctgaggccagcttcagggcctccaagcccgggcctggctaaaaaacgttccgcagcaatgcagctgaaggagtactacacagacagggtcatttcagttgaccacctgacccgcctctgcgccgccgggctgcgtgagtct

SEQ ID NO: 8102 - DNA, 478 bp, Homo sapiens
  source 1..478: mol_type = other DNA
tccgggctgtctctgtgaatcagcctcaagccgagactctgcattaaaaaatatatatattgaaaggttcgtgggcactgtctttctttgtttgcaaggagcgaaatttctcggcagtcttggtttcagcagtctggactctggacctgcgcctagtgttttaaagcaagtgggaggcgaagcggggcgcttggggacgcggggacccggggacggaataaactctgtcgtggggccctcactcgcagatgactacgagccaggtaaaacaagggggctggaccggtcatctattttaactcccagtggaaagacaagcctctagtgatcaccacgcgagattatttttgaatcaagcggccgcggcgattggctgaaaagcacgtggtgcgcgccccgcaggactgcgccccggctgcccctgcagtcgcctggcttagggcagagtccagccgggggtgccgcacccactggggag

SEQ ID NO: 8103 - DNA, 507 bp, Homo sapiens
  source 1..507: mol_type = other DNA
ttccttaggagggttatgaaatcaaacttgtcagttgggatcctttatatcgggacccacacagatgagctcaggattccttgggcatgctctgccccatgctgttacagaaaactcaagcttggcttctccagcttcaccgaagccagggatccacaggagagcgcccgtgttgacagcgtgagcggcgacccggtgtcggcctgggtcccaggctggagtgcagtggtgcgatctcggctcactgcaacctcccgggttcaagagattctcctgcctcagcctcccgagtagctgggacctgacctcaggtgcccgctggggctacaggcgcctacccgagggcacccctggaggaaattctcgaggtgacctggacagggcgggctgggcgaggacgctcccggggcctggaggcggagtcgggggcgggcgcgcgcagtcatctgactcggtgactcacccgcggccgcgcttcctctgatccgggccgggcgggaagtcggg

SEQ ID NO: 8104 - DNA, 420 bp, Homo sapiens
  source 1..420: mol_type = other DNA
tgcctgtaatcccaacactcccgggagttcgagaccggaggtcgaggctgcggtgagccgagctcgtgcccctgcactccagcctgggcgactgggcacaagcactaagaattaatgaaagtattcttttggtacagttctttttgttcatcaactgaatcagtatgatagtgtatttaagtagacgtactttctggtagttaattacttcttgacagggggccactaaatagtgcaccaatcagaaatttctggaatcagtcctgtacctccaaaaaaccagaatgttatcttcttcttttcttacactaagttttcacgtcgcagcctgaaaatacccagcgctgtgacagggtcacaggcgcgcgatgtctcacagctcggagggcattaggccgcgtgccgcaggccagctctcac

SEQ ID NO: 8105 - DNA, 216 bp, Homo sapiens
  source 1..216: mol_type = other DNA
tagacacgttttaaacacgcggccagtctattcgtattttaaggctgcaaaaataaaaatgctgctaccaactaactttgcagcaggactcagacgctgtgtgtcgcgagcgtccgaggcatcctccttaccatggtgacggccgcagagccgccaggagcagccgctggagaaccacgcagcggttccgagcctctgttttccgctggccggtac

SEQ ID NO: 8106 - DNA, 446 bp, Homo sapiens
  source 1..446: mol_type = other DNA
tccagcctgggcgactgggacaagcactaagaattaatgaaagtattcttttggtacagttctttttgttcatcaactgaatcagtatgatagtgtatttaagtagacgtactttctggtagttaattacttcttgacagggggccactaaatagtgcaccaatcagaaatttctggaatcagtcctgtacctccaaaaaaccagaatgttatcttcttcttttcttacactaagttttcacgtcgcagcctgaaaatacccagcgctgtgacagggtcacaggcgcgcgatgtctcacagctcggagggcattaggccgcgtgccgcaggccagctctcaccgctgggctcttgaagcaggaggcgcgagccgcgccaaaggcctcaacttccggcggtgtaccggccagcggaaaacagaggctcggaaccgctgcgtggttct

SEQ ID NO: 8107 - DNA, 385 bp, Homo sapiens
  source 1..385: mol_type = other DNA
gagataattatttttttccctgagaattataacttacgagctgaacatgtagaatatgttcccatcttttcagaatatagttggcaatagggaaaaaatcacaataatataaatttgttttctaactcttttcacattctgtcaaatacataatttttttgggaaaaaggaattattaaaaggtagatacaatatagcagatgctcatgatcttagatctcttatataagaggtcttggtattttatacagcttaccctggattaatgagcataaatttgtaaattagttcttaaggctacattaagctttctttggtttatctcatggacagagcataaagtacttgacattgatctgagttaagttacacatagcaacctata

SEQ ID NO: 8108 - DNA, 565 bp, Homo sapiens
  source 1..565: mol_type = other DNA
ttttcaacttgatgagtaaaagaaagtcttgacattaatacttagatacaatattgtttctcaatacagttattaaatatatttagactacaatacgcattaccttaaagacaatttatcatgttttaaatgctttctcagggttattctgtaccggttaaacggtgaaagagaaaaggtcgtatttccctgacattcctaacttgcatgcacctaagtggcaagtggtggggcggaggccggcggtcctcgcccgtgccctctgcacccctgtcccgaggccgggatggccgcgcccactctgggtccgcggcttacaggccattgccctgagctgggcgtcgcgctgccgggtgacggcggccggggcggagagagggggcgcgggtggcgaggcgggggccgcgtgacgcccccgggctggccaagcccgcacctgccgggccggcgcctgaaagccggggctggagggaggcagggcggcgtcccaggctccgaggaggggccgctccgcgctggcgggcggggggattcgcggtgggcgcgggcgcggagcggaagcgag

SEQ ID NO: 8109 - DNA, 659 bp, Homo sapiens
  source 1..659: mol_type = other DNA
caaagcttccccaaatggcaattgtttgggatttacacatagctctagaaatgtaaatacaagtcatataatttcattcctgctctattaaatctaattcattaagtttcattaaaatggtaaatgatgtgtaatagtaaagattttggctaattaaatattatacaaatgaaacaatagattcttatatggcagaaaagctttttttaaaaatcagggtcaaatatatctatatcaacaagcattctttgaagtattttttgatcttgctaattttgctaatcattagtaaattcgtgaaagttggtattgtgattgctaaatatttcccaggaatgaaagaagcaattttcaacttttctgatgagtaaaagaaagtcttgacattaatacttagatacaatattgtttctcaatacagttattaaatatatttagactacaatacgcattaccttaaagacaatttatcatgttttaaatgctttctcagggttattctgtaccggttaaacggtgaaagagaaaaggtcgtatttccctgacattcctaacttgcatgcacctaagtggcaagtggtggggcggaggccggcggtcctcgcccgtgccctctgcacccctgtcccgaggccgggatggccgcgcccactctgggt

SEQ ID NO: 8110 - DNA, 346 bp, Homo sapiens
  source 1..346: mol_type = other DNA
tggctgaactgtaaggttcgcacaggaaagcataataggaagtagtatgccacatactgcagcactgttttaagtaagacataataaagccctgcagagccatttaccggctaccggccagttacaggtttgaggtgcccgtcgcccactgaggctgtgggacactccacccgcctggtcccctatcgcctccgcctaggcagctgccatgcgtgcgcccccacagctctaggaccaataggcaggccctagtgctgggactccgttcgtgacgtagcgccgtcaggccgagcagcccccaggcgattggctagacaatcgaacgataagctcgtccagctccgag

SEQ ID NO: 8111 - DNA, 623 bp, Homo sapiens
  source 1..623: mol_type = other DNA
gccaggcctccgcatttcaaatattatcaacaagttgtattggttagctttacactaaggcctgaggcttagccaaagcttccccaaatggcaattgtttgggatttacacatagctctagaaatgtaaatacaagtcatataatttcattcctgctctattaaatctaattcattaagtttcattaaaatggtaaatgatgtgtaatagtaaagattttggctaattaaatattatacaaatgaaacaatagattcttatatggcagaaaagctttttttaaaaatcagggtcaaatatatctatatcaacaagcattctttgaagtattttttgatcttgctaattttgctaatcattagtaaattcgtgaaagttggtattgtgattgctaaatatttcccaggaatgaaagaagcaattttcaacttttctgatgagtaaaagaaagtcttgacattaatacttagatacaatattgtttctcaatacagttattaaatatatttagactacaatacgcattaccttaaagacaatttatcatgttttaaatgctttctcagggttattctgtaccggttaaacggtgaaagagaaaaggtcgtatttccctgacattc

SEQ ID NO: 8112 - DNA, 349 bp, Homo sapiens
  source 1..349: mol_type = other DNA
ctagtcttaaaacaaaaatatatttctaatacgagaaagtttctatatatccaacctttcctatctttgaggggcatggttaacgtggttctcagtaagatattcatttacaaccaagagaaaatccttttactttaaaaacctttctaacgtcattttactttctcttgtgagaaggtactaaggaaattcttcctttaaacgtcaaatgtgaattctaacttctaatgagtctggaaagcaggggacaagcgatccccgcgcgggatctacccgtcgtcacccgggagagccggaggtacgggaggaggatcccgaaggctcggcgtgtcgcgtcagacgccgggag

SEQ ID NO: 8113 - DNA, 521 bp, Homo sapiens
  source 1..521: mol_type = other DNA
ctggtcctcggctgcccccgacgagcccccgggcaacaaggaggattgcctcgctgcaggtgagtctggccaggggtcccttggcaccaggggttgctcaccttactgaggaccccgcagcgctccacaggcggcccagactccgtctctggatcctcctcgctctgattatccgacatggaggctcgacaaccgagcaggagaccggcccccgctccctcagctgcgccggaggaggcgcccagtcctcggggggagcaggaggagggacgaagtccgcccgccgcgccgccgccgcgcctgacaccgagcggagcgaggaaggaggacgagcggtgaaggaagcctacccttccagccgtcagccgccgccgccgtcgccgtgacccctgcgttgcgcccggcgctgcgccccctcgatgccaatttcaaatagggaagctcccggcgtctgacgcgacacgccgagccttcgggatcctcctcccgtacctccggctctcccgggtgacgacgggtag

SEQ ID NO: 8114 - DNA, 507 bp, Homo sapiens
  source 1..507: mol_type = other DNA
ttctctccaagaatatcataatcttgtgatagtacagatgcaaaaattcacatataatttttgactcggaagccttactaataaggtatacagttgattaatatgtattttgtatgttatatttgttctgtactgtatttttacaataaagaaagccagagattaagaaaatcataaaggagacaaaatatatttattattcattaagtggaagtagatcataaagatcttcatcttgtcttcatgttgaataaactaaggaggattcaaatataagtggatcctctctaagagtcacctgtaatttttaaaatctgagtaataatttttagtagctaaaaattcttaactgtcatttaaaaattttgttttgctgatttctatatcatttaacgttttaaaacttttttattgatgcataactcgctctgtcccccaggctggagtgcggtagcgcaaccctagtagctgggactacaggcgcatgccgtcaccatgctggtgaga

SEQ ID NO: 8115 - DNA, 268 bp, Homo sapiens
  source 1..268: mol_type = other DNA
ggaatttttttttttaatgtgttaaaacaaattttatttacaataacaggccccctgctgtagagcaaggtgagtgagtcacgcccttgaccttaattctgtgcctgaaatgtagcaacaataaatccatctaacaacaaattcttatgaagaaggtattacaataaattcttatgaagaagttattacaataaattcagtgacaagcacatgtgttaatgacaaaggtctctggttttcctaggcagaggtccctgcgcatctgttt

SEQ ID NO: 8116 - DNA, 271 bp, Homo sapiens
  source 1..271: mol_type = other DNA
cttaattctgtgcctgaaatgtagcaacaataaatccatctaacaacaaattcttatgaagaaggtattacaataaattcttatgaagaagttattacaataaattcagtgacaagcacatgtgttaatgacaaaggtctctggttttcctaggcagaggtccctgcgcatctgtttatttttcttagtacagaacaatatggagtctcctacattgtcatcatgttttttccagagaaccaaatatcccaggccagcccaagtcagggca

SEQ ID NO: 8117 - DNA, 418 bp, Homo sapiens
  source 1..418: mol_type = other DNA
tgcatcagaatcactggcagtgtgtgttaaaaattcagatttcctgacggaccgaaggaatcaacaccttcggccgggcgtggtggctcacggtgggcggaacacctgatcccagctactcgggaggctgaggcaggagaatcccttgttgcagtgagccgagatagtgccactgcacaccagagcacctccaagtgattctgttgctttatagagaaagagtgccgggattactggcatgaaccacacaccttagctcccggagccgcttagcagcctgcagccgctgaaacgggcgctgggtggggctccctaggaccccgccccctaccaacctgcggagccagggggcggggctctcggcttctcccggcagcatcaaacggcagattgctgaaacaaaggaccaatgcccagg

SEQ ID NO: 8118 - DNA, 595 bp, Homo sapiens
  source 1..595: mol_type = other DNA
tcacttttcttaaaataatatttccaaaggtaagtttcccaagaagggaatttgcacaaattgtttgattatgctcaacaggccccgctggggatttttcaaactaatattctcaatatgttgaatgaattgttgcacttatatatatctggaaaggattttatcttaaatatcaaggaaaaaagctaaagttagcttctactgttttagagcatttgtgcagaatgtcatcagatgaggtcgaggcagttctgtctcttttcaggtaggaaaaaatttctaaatttaccatgactttttttattttaaacaaatgaatgtaagggaaaactaggattttttaataattttttcatccatttacaagggagtttttcaatttataataatatcaaacttcaggaattaattgttttaacttttcagaaaatattgatgaactcttcatacactctgtacaaaggcttaggtgaaacaaatgttcaagaaacatttttttgtttaaatttttttcattttatatgaatgctactttcacttttaatgcaaattaatacaatatcaaaccatccaaagttctagagctcaagattcc

SEQ ID NO: 8119 - DNA, 392 bp, Homo sapiens
  source 1..392: mol_type = other DNA
atgtttgtttctgacaacacaagcaaaattctctctcctgcacgccaaggggagaaatgtttgtttctaacaacacaactaaggggcgtagacttagaagggggaagtaggcaacctagctctgcctggttgctccctggtcacgctggacctgacccggggcgccgccaagtgcgcaacgcacagtcacagttggtgactaaacgcagcagcgcctcagcaccgcgacttgccggagcaccgcgagtggcgcgcgggtcccgcctcccccgcgcgccgtgactccctgcgcaccgctggtactctcgccacgccgccgcccggcactgcagcaccagggggaggaggcaccgcagcgtgcaagccgggagccactttcccgcccctcgctg

SEQ ID NO: 8120 - DNA, 225 bp, Homo sapiens
  source 1..225: mol_type = other DNA
gggtcttgcactctcacccaggctggagtgcactggttcctgagtagcttgggactgcaggtctggaactcttgggctcaagggatccttgtgccccgccgcgcccggctctaaaaaaagcttagccggaaaaggggaaccctgttattttgtagacaaaaagtgaaccgcgctgtttgtccctcagtaactgagcaacaccccggacacgaagggctccctgtg

SEQ ID NO: 8121 - DNA, 320 bp, Homo sapiens
  source 1..320: mol_type = other DNA
cgccgcgcccggctctaaaaaaagcttagccggaaaaggggaaccctgttattttgtagacaaaaagtgaaccgcgctgtttgtccctcagtaactgagcaacaccccggacacgaagggctccctgtgaggcggggtggccgccacccccaggccaccagctgtgcgggggccccagctgcagggggtcccggcccagcgtccctctcggccccttccctctcccccgggggagaaggggcgggtccacgcggcctgggcgctgcgcccgacacgcggtaggggtcgctgcgtctcggcgcgcgctcccaccgcggtga

SEQ ID NO: 8122 - DNA, 469 bp, Homo sapiens
  source 1..469: mol_type = other DNA
attatttttaagcaaaaatctcatttgattgctgtggcttttatctatcaaggtaacagcactactaagttactataacacttctgttaagtatcttgtcataaaggacatataccataaccagaaaaggtatttcagacactaatatttcctttctggaatttgggaactttaatacagagtatttaatttatgagtttgatatcatgtttaggcaattcttcaaaatctaaaatttctaaaatacaccattgtaggaattgctcagtatagtaattaagtcatctgaggagctgagaatttttctctgagatctaattccatatctgagttgagaagctagctgctttcttactgaaaagtttacttttcccagtagaaccatagaatgttaatctttcttcaaataggatttcccttttatttataaacagaggaagtgatgcatatgtttatgacctcagcagct

SEQ ID NO: 8123 - DNA, 583 bp, Homo sapiens
  source 1..583: mol_type = other DNA
ttaagttttattaactacagaaaaatgtgttataatgcatttttttactgtatattaagtcatactctacagaatataacaattcataaaagcttatatgttgtacaacaatgtgaatgtatttaacattactgaactgtacacttaatactggttaagatagtaaattttatgttacgtatattttaccactattaaaaatatcttattgtagacttattccaacactcatggaataaagggagtcctcattttcatgatgtaagggttattgaatgccaggttctggccaggcactgacgacaaactgaaatcaatattacattgatggaaaattttcaaagtgattcaccgctcaatttgaatttcttaaaagtttgttttccatgattaatttataattatgtaaagtgtttaaggattaagatttgaggataatttattaagtagaaattacactctggaactgcatttttaaaacggataagaaatgaaatgtgggacagattcaaaacttactgctgttcaacatctgcattctttaaaagcaggcctgagtcatgcttactgaagcatctccttt

SEQ ID NO: 8124 - DNA, 568 bp, Homo sapiens
  source 1..568: mol_type = other DNA
agctgcaacccccagccgcgacgcccctgggggcccttagcagactgccaagcgatcaggcctggcgcggtgattcacgcctgtaatccccgtggcgcgcgcctttctgtggtcccaggtaatccggaggctggggcgtgagccgtgttggcgccactgcactccagcctgggcgacagggcagacacttggaaagttaccaggccttctctcctgggcgcccgcggccctagaacgccggcctcaccggcagacgcgcgccctcctcccagatgcgcaggtgaccccggcgggcggcgcgggaaagggaagagctccgcgaggccgcgcgggggggaagcgggagaagccgctcttcctattccactcgcagtctgcgaaataaagagagacgtataaaaggaattctgttcaaaagcagaagtcccttttagacttttagcgaaaactgaactttgacgggaggccacgccagggctgcggggctgcagggcgtggacgcatcctggccggggcgtccactgtcgacgtctccacatcccaggagggtcgagacggccgcgggaag

SEQ ID NO: 8125 - DNA, 681 bp, Homo sapiens
  source 1..681: mol_type = other DNA
gagccgtgttggcgccactgcactccagcctgggcgacagggcagacacttggaaagttaccaggccttctctcctgggcgcccgcggccctagaacgccggcctcaccggcagacgcgcgccctcctcccagatgcgcaggtgaccccggcgggcggcgcgggaaagggaagagctccgcgaggccgcgcgggggggaagcgggagaagccgctcttcctattccactcgcagtctgcgaaataaagagagacgtataaaaggaattctgttcaaaagcagaagtcccttttagacttttagcgaaaactgaactttgacgggaggccacgccagggctgcggggctgcagggcgtggacgcatcctggccggggcgtccactgtcgacgtctccacatcccaggagggtcgagacggccgcgggaagcagcctgcgagccgtgcggccccattccaaggaccccgccagtgtgagtcactgacaggacttctaggcccggcagtggccggcggccagggccccccagtagggcagggcggggcggggcggggcgcacagagcccggctgagggaccgcggggagggggcgccgagcggctccagcgcagagactctcactgcacgccggagggcgcccttcctcgctcgcgcccgcgcgaccgcgcgccccagtcccgc

SEQ ID NO: 8126 - DNA, 509 bp, Homo sapiens
  source 1..509: mol_type = other DNA
gaacttctttcagcgtaaaaaaaatgcttataaaatactattgttattaggaaattcaaaaacacttttctcactttctaattgctcttgggatacagaaaatatttgaccaaataaattaatcaaatttatttatttggtcaagtggccagatacttaaaaatagacaaatactgggatcccacagtgttcgagggagcccggtcctggggagggatctctctcttcaactcacttagaaggaatgggttctaggtaacaacaaaaccctgcgcacctcctggacacaaggccgggccgggggcttcacttttctcgcctgtaaaatgtgcaagaaaagcggttcgccactttatattttaaagatcgaaacgtttatttctttttgggggtggtcctgggagaaacacaactgcaggctcccccagggggcttccgggctgggcccgcgaagggggtggcacgccccacagcccaaatgccagtttggctttcggaggaaggagaag

SEQ ID NO: 8127 - DNA, 302 bp, Homo sapiens
  source 1..302: mol_type = other DNA
gagccgagatcacgccactgccaggagcgagcttatactggagttgaaatgtgataaacatttatacactgtgtttataagtcgtgtaactaaaatgggaagaataatcatacttattgcgctggttgttatatcgtggctttcccacagtcaggaatagcctaggcagggattaaccccccgcccgcaggcggctcccgcagtctaagggacctggcgcgagtccgcgcagggaagggggccgggggcgggaccagggcgcgcgttccggtcccggggcgtggcctcccgcaggtgagtac

SEQ ID NO: 8128 - DNA, 252 bp, Homo sapiens
  source 1..252: mol_type = other DNA
gccaggcgcagatgatgccactgcactccagcctgggtgacagagcaagactagactctggtgccagagtaattgctcttcaccatggagggcagcggcgagctcagctcactacaacctcctcaggttcattctgcctcacgagtagctggattacaggcgcccgccaccatgcctggcgagatggggtaccaggcaagtgctgggattagagggctttaggtcctaaatgggtgagtctggaccacgcag

SEQ ID NO: 8129 - DNA, 252 bp, Homo sapiens
  source 1..252: mol_type = other DNA
gtttccagttgtataaaagtatagaacatacaattaatacctgataataaacagctatgttactgcttagcctcccagaggcaggtggaaccacctcaaactcctgagctcaagcgagccacccgcctcagcctcccagaggttggagtgcagtggcacgatctcggctcgctgcaacctctgccctagtagctgagacctttaactgttagtttagcgtgtactcccaggcccttcagaaggcgttgttat

SEQ ID NO: 8130 - DNA, 461 bp, Homo sapiens
  source 1..461: mol_type = other DNA
gttttggacacaaagaagaaattctcttctctcctgataagcagagataagcttatacttatttccggatccctgcaaatttgctggtgagcagttacaataaagcttcctggcagttcgaaggcacgaaatggaatgacttaatctcatataattgcattactgcaatcttctgaaaattcaagtttcttactgagagacatgagaaattccatgaatactaaattctttgacaatttctagcatggtttcatccaaggttatgtgatgaggctgcataatataggctctatgtaactttgtcactttgatttgcaaaatggaaaattccctgaaccaacactttagtgcactaagttgtagtgactgaaatcattcttgtactctgtcaatgagacagggtaacccatggttactgagctcccagttaaggggcagagagcctccgctccccactgctc

SEQ ID NO: 8131 - DNA, 499 bp, Homo sapiens
  source 1..499: mol_type = other DNA
ccttgatactatctgggaggcctcatggttggtttcccaagaaaggaactcagataagaaagatgtaactttctgaagttttaagggtaaatttccaggtttattcaaaagaaaccataaacatcagttctataggacagttgggctgatttcacaccaaccagcattcctgtcctctgctttgccatttgacatcagagggctgaaaacttcaccattttttgaatatgtgcatgtgcatatttctcctttcataaatattcatgaatcctgttctcagcttctgaccagaggctatgcttccaagcctgtcagaaaggccaccctgcaggctgaaagcccttttctaaatttattaacctcctcattcttcagttgacataagtagagcatcatagtccccacaaatcatttctgggatactctgttcttatttgtaaaacaaggagataagggcttcggtagccacgcccctccgcaggccgagacgtcggcacgt

SEQ ID NO: 8132 - DNA, 684 bp, Homo sapiens
  source 1..684: mol_type = other DNA
ggttgatttagccagttaacagtgtatacctacatcaaaaatcatgttgtataccatatatacaatttttatcaattaaaataatttaaaaagtaattatgacttaagtaataatttaataaagactggtttccttttgacaggtatgtattgatgtaaaaaaagtcatccacagttgaactctgtcatataatattaacgtaggaaataataagccaaggcatgaagggttattgtgtaccattattctttattataatagcactgtaggatattactgtttcgaaagctcttaaaatttaaatagatgctttgaactagtaagaggtcatcttttttgacataaattttccccctaaatgcgtttattttttgttttctgatactaatttgaaaatgaatatgttgcattacacaataacatgaattttgttcctttgcaaaatttacttaatatttctgcatttgagattctattacaataatcatattgaaaaatcgagatgttcattgttcattttgcaatatcctttatattaatgtttatttcaacttctggttaattggaatgggttatattagttttttattaattaaataacattagttttaattttgtacaaaatcagatttagtggcttttttttaaccaaattttttttcagttggtccaacactaagtaa

SEQ ID NO: 8133 - DNA, 560 bp, Homo sapiens
  source 1..560: mol_type = other DNA
gagtatcatactttttatataaagatcagcaagttataacggccaaagactttttctagggaatgtttgttaagtgactaataagtcacttaaatggagctttattgaagcaaaaaactattgttgccagggtaaatgggttttttaaaataactactataggtcccttggaactttcagttccttagagaaaaggggagatagatttttttccccccaaacccttctttgaatactagtagttcatatgacaagatgagaacacagcattaagtcagaatatactgttattttcaccatgtcatcttcttatgtatatgtatgttgtggcataacttgaaatataaacattttaaagggaatagactaaaagtagcatatctaatatgacaatttcttcatatcttttttttataactttaatataaatcaagtagagaaatgctaggattataggcatgacattgaatcatattcgttaagtaaggcacatgtacagaaattgttttatttatttcctgaatgaatattttgtgtttattaagaatacagaatacgaa

SEQ ID NO: 8134 - DNA, 445 bp, Homo sapiens
  source 1..445: mol_type = other DNA
acactgccgtggggctggaagcccagcgccccagcttttgcaccctggctcctgtctgcatgctccacctcccataaggggtttcagcaggcaccacaaccctgttgcacgtcctgcaaagggctgtctctcctgtttcattgtcacaagacttgcaaggcttccttaagagaggggtacacttcaagcagcttgtgccagtcatcagtaattgttaaatttccaggaacttggcaagccacttgttggagtttgaggctgccaaagctccctgttcaatggacctttaagccactgaccagctggtacaccatgctggtgttttggtgaacaccaataagcgccgcttcatctgtcccaacctaggttggagggatttctctctgagactcaggcccgggttgttgtaaaacaatagttacatttcaaccggagcgactcccct

SEQ ID NO: 8135 - DNA, 313 bp, Homo sapiens
  source 1..313: mol_type = other DNA
gacaggtgacactatatttcaagtataaaaattatgcagaacagaagtaagcaggcttctttcattctaaagtcactccagcatggagtttatttaggaaaaacaaatgactttttaaacactatgtaaagatacagataagtcttgttgattcttttaaacattagccataatccaaaaaagaaaaaagtcttaggactatagtccaagcaatttctattttaatttaggttatttgagctgaattgtaaaactaaccattagttacctcagaagccattaattcactgtgttctctgcagggagcccccct

SEQ ID NO: 8136 - DNA, 497 bp, Homo sapiens
  source 1..497: mol_type = other DNA
ggccttgaggcatggtaatagctgcaagcaagatgccaggacccctgaaagtgtatgaaagcttcatagtgtctgcttagacatttgtccctacaattaaggctgagggataacttcagtcgagagatcctcccgccttggcctctcaaagtgtcaggattacaggcctgacttctacttggaggaaaacctgtctttattacatatgatgtgttatatatgtatagggaccaatatctctaacttgaaaatctctttaaaattatagtgtatatgattgtgagttggcaggcaaatctgatctttcagcgtgggaatccgaatcctgagtcccaagaaaggctccaggtttggcagctccagcgaggctggacttccctcgaggggccaggaaggtgttgcccagagcggagcagctcagcgggctcaaagtcttggctccacaccccgggaggggcgctaggacccaggcacccgccggcccggggacgcgtctg

SEQ ID NO: 8137 - DNA, 617 bp, Homo sapiens
  source 1..617: mol_type = other DNA
aactcagccttcggagtaggcggtgccatcactcggctgtagggcccctgccatttcgggaggggcctcccgagggcgccgaggcgcggtgccagctgccgcgcacaggggccccgcggcggagccgagccgcgggcacgctctgccctgtcgggagagctccgggagcggcgggaggggcggaggggcgcagtggggcccgggcggctgcggccgcggagccggggcacctgagcaggcaggcgggcaggcgggcgggcgccctggcccagggccgcgggtgcgggagcccggcgaggtcgagctgggcggcggcgggggccgcgccgagggggcgccgcggcggggagggtggcggccgctggtgcgcgcggggcgctgtgtatgcgcgctcccccgctcggggaggaagatggtgacgcgcgcggtccccggaggctcggcggggggcaccgcggccagcccgacggagcggcggacacacaggccggggggcgcgcagtccgggcgccgccgcggccgccccctcactgcaggtggcagcgggtgcgctgggtcccggcggccgcgggcgcgggcgggcgcgcgggggagcccggccgagggatgggctgcgc

SEQ ID NO: 8138 - DNA, 235 bp, Homo sapiens
  source 1..235: mol_type = other DNA
ggaaaccactgaagagatatgtttgttgaaaagaacacccagcttctgtgagctgagctagaaaagaaatattttgagatagaaaatgacatgagatagaagtgctttcttttgcagtgtagaaaccacagaaggtgaacagcttttgtctttgaagtgttagacctgtgagatattccagtaggtagaggggcccagaacagatctctgagcaactatggttaccatatatgac

SEQ ID NO: 8139 - DNA, 783 bp, Homo sapiens
  source 1..783: mol_type = other DNA
gagggcgccgaggcgcggtgccagctgccgcgcacaggggccccgcggcggagccgagccgcgggcacgctctgccctgtcgggagagctccgggagcggcgggaggggcggaggggcgcagtggggcccgggcggctgcggccgcggagccggggcacctgagcaggcaggcgggcaggcgggcgggcgccctggcccagggccgcgggtgcgggagcccggcgaggtcgagctgggcggcggcgggggccgcgccgagggggcgccgcggcggggagggtggcggccgctggtgcgcgcggggcgctgtgtatgcgcgctcccccgctcggggaggaagatggtgacgcgcgcggtccccggaggctcggcggggggcaccgcggccagcccgacggagcggcggacacacaggccggggggcgcgcagtccgggcgccgccgcggccgccccctcactgcaggtggcagcgggtgcgctgggtcccggcggccgcgggcgcgggcgggcgcgcgggggagcccggccgagggatgggctgcgcccccagcatccatgggcgtgatctactgccgggactcggacgagtccagctcgccccgccagaccaccagcgtgtcgcagggcccggcggcacccctgcccggcctcttcgtccagaccgacgccgccgacgccatccccccgagccgcgcgtcgggaccccccagcgtagcccgcgtccgcagggcccgcaccgagctgggcagcggtagcagcgcgggttccgcagcccccgccg

SEQ ID NO: 8140 - DNA, 303 bp, Homo sapiens
  source 1..303: mol_type = other DNA
gtacctggtaggcactcaataaataataaattcctagcacaacatctcttatataatgctctggtttgtttctttaattacataatgagagcttaattttcctggcaaagttaatagttttgttgtatctgagccatttgctaccagcacactcaaaatcttttcagagctgttcttgtgggtctccaagatccagtgggtaatgctcaaccttgcctccccatatcccagccgggaagaaatgcaggcatgctgtgctctacaatgacactgctgttctggagagtcaccacaccgccctgg

SEQ ID NO: 8141 - DNA, 536 bp, Homo sapiens
  source 1..536: mol_type = other DNA
tactcatcagaatcacctgaacaaagattattttaatgagtctgacctttgactacctaagaaaatgtagtagtcaaaaaaaggtatatgaactgccttctattctttagggagattctatgttaatatagcatacgatctttagacaaattacctaatcattcagagctttagtttcttgatgtgtaaaatagaggatataggtttaccatgaggatttatgtaaagccttagcacagtagctgtactatagcacacagtaaatgttggccggatttattcggctctggatttgtctggatgcagaagtctactgcggtacaccttcttcagcaagctcgggttgctgctccgcgcgcgtccaccaggggccgctcgagctacctaagctccgtgcgctacccggcggcgctcccgcgcgtgctcactcggagcagcgcgcgccccgcaatcgccgcagccgcccccgccgtcggccgccgcaccccaagggagcgctttggggacaaaaattctccctcaactggggctggacc

SEQ ID NO: 8142 - DNA, 547 bp, Homo sapiens
  source 1..547: mol_type = other DNA
gcttaaagtgggatttgctgaattaatgcattagcctacaactgctaggaggattatttgaacctaatacatatgcaaatatatatatttatacttttgcaaacatgatatgtataagtagtttgattttcagaccttgctactcatcagaatcacctgagacaaagattattttaatgagtctgacctttgactacctaagaaaatgtagtagtcaaaaaaaggtatatgaactgccttctattctttagggagattctatgttaatatagcatacgatctttagacaaattacctaatcattcagagctttagtttcttgatgtgtaaaatagaggatataggtttaccatgaggatttatgtaaagccttagcacagtagctgtactatagcacacagtaaatgttggccggatttattcggctctggatttgtctggatgcagaagtctactgcggtacaccttcttcagcaagctcgggttgctgctccgcgcgcgtccaccaggggccgctcgagctacctaagctccgtgcgctacccgg

SEQ ID NO: 8143 - DNA, 461 bp, Homo sapiens
  source 1..461: mol_type = other DNA
aaaagtctgcccttcaggagattctcttaggaagggactgtagatgtgcctcattttatgcaacaaatatatttttgaacatataaaatagtcaaatgttgttcagcatctacaatgagctaggtgttttaacccttatacctaatctgtaaaatggacattattatttccattttgcagactgatcagctgcaaggctaaacagcatacgtatcagtgttgtctagctaatagtctagctattattgtgtgcgacacacattcttgtaagttaaatatttaggatacactataagtgatcatctgaagaagttctgttagtcatttcctttgatacccttaatacattttttaggtcgggagcagggtaccgccctctagtaaacccgccccgcggggcgtggcggggacgacgggccgcgcagcctgcgcatgcgcgccggcgaccacgcctaaatagc

SEQ ID NO: 8144 - DNA, 277 bp, Homo sapiens
  source 1..277: mol_type = other DNA
agtgagtaacacgactggcgcgcgaggtggtccattttataggctggaatgcagtggagagatctcaactcatcgctacctcagcctcagtaaccatttgctttactgaagtatagcaaagagctgtgggccgggagccgggcagttagccacccgctgcctccccttccgcagtccggcgcagccgctggagcaggaaagtccgcgcaggcctggatggcccgggtggtaatctagcaggcctgcacactgcgcatgcgcagggtcggctcaggga

SEQ ID NO: 8145 - DNA, 512 bp, Homo sapiens
  source 1..512: mol_type = other DNA
ccaataatttaacacatcttttgataatctcatccttggtgttgattttcgaggattccggaggatgggagccacggccggcccctggtactatccttagcagcggccgcgcccccgccccggggaggtaatttgcggagggcggtgcagtagcctctccagtgcccgcgtcccacgacggcactgctcccggggtgcgcggcccacgactcaggctgcctcccgctgggccccgaggacctgatttgaaatcggtgttcagaagaccgagcccggctggacgcagctggcctccggctgagagcggaggggaaggatactctccgaggatcccgcgggtactcggtcgcagctaaagcccggagcgtgggatccgggcccggaggaacgggatggcgaacgcgagctgcgccgcggccaggagcccgccgcaccgggcatgctcagtggcgcggccggctgggtggcccgcgagctgcacccggatctgctcggcggcggcgacgtgagcg

SEQ ID NO: 8146 - DNA, 531 bp, Homo sapiens
  source 1..531: mol_type = other DNA
taagggatatcagttgtaatgatgcttagttaacggtcattaatgtcttttaaaaataatttccccaagtaagtcatgaactcttaaggttttttaattagtgtaaattattttgtctaaaaatcaccctgtgaaaaatggataaagtatagcatgtgattctttcctatttacctatgaagcaaacacacttatgtctctgctagtaatttaatttcgaggaaataaaagcggggtttgctactctctactgttaagcgcttggtcctaatagagttgattgccagtactttttccagtaaaagatgagggagcgggagccctgtcccaggacagtgccccctgggttgggagcaggacctggcactggccgcctccttccaacaaccgcctggcatgctagccaggcccggggcttgctggcagggttctgcgggcacgggccgggtcgctgcgcggcgggaaggcggggcggggcctggcggcgctgctaaccgccctccctctcccctaggtgaggccgcaggcggt

SEQ ID NO: 8147 - DNA, 371 bp, Homo sapiens
  source 1..371: mol_type = other DNA
agcccaagcattgttattgaatttcaaacgtggaatttattcagagtgaattgtaacatttgttctgtaggaatcaagacttctgtcaatgctcagaaatactgtacctgaagaaacaacccccagttttttgcatataacttctaggaaagtttttcaaggatcaagatgatttactggagactgcactgtggtgaccttaattaccatattgtgtgctacttccacatattggaagtcatggatgcaacatgttgttctaaaaccagactttccaaaatcgtgttacaggaaatgatgaaagaaaatcgagcaaaggggatacaggactcagtgttaaaaatggttgcacattctttttctcagcctca

SEQ ID NO: 8148 - DNA, 416 bp, Homo sapiens
  source 1..416: mol_type = other DNA
aaaatttccagacaaagtctggatcttcctaattcaataagcacgtgactgtccaaagggcaccgtgcaatcagactgtgtgtttggcctctaggacttgctagctagacatcatgagtcagaggtttaaccatttataagcttttttcttatgaaaaattggcactaattataatgtctaactgtgctttgtaaattgtgaagcgttattaaagaacacatcttttttttttaggaaaccacaggcaaatttaattgccggaagaagccgggcagcgggcgcccgcgggttcgtctctggctcctcctccgccacagcagccgggggcccgggtcggaggcggcgggggccgagcgcccggcctcgcaagcccacggcccgctgggggtgccgtcccgcgccggggcggagcagg

SEQ ID NO: 8149 - DNA, 385 bp, Homo sapiens
  source 1..385: mol_type = other DNA
taaagttcatttgtgtatatataaataagaattattttccattgttatttatctataacttataaagttgtaaacaacttccacggaaaatttccagacaaagtctggatcttcctaattcaataagcacgtgactgtccaaagggcaccgtgcaatcagactgtgtgtttggcctctaggacttgctagctagacatcatgagtcagaggtttaaccatttataagcttttttcttatgaaaaattggcactaattataatgtctaactgtgctttgtaaattgtgaagcgttattaaagaacacatcttttttttttaggaaaccacaggcaaatttaattgccggaagaagccgggcagcgggcgcccgcgggttcgtctct

SEQ ID NO: 8150 - DNA, 422 bp, Homo sapiens
  source 1..422: mol_type = other DNA
aaaagttcaacccttgacataatgagtcaaacagttctctcaaaagttattctttgaatttaatgctaaaattttcacttttttctgctaaatttcattgatccactagagattaaagaacataaactaatctatgcaaagaaaaaaagtgtatgtaagaggcaaacatttcatgtgtatacaaatataaaagtgaatacatgattttatttaactcattaataaggaaattggtaaggtgttaaataaagttcatttgtgtatatataaataagaattattttccattgttatttatctataacttataaagttgtaaacaacttccacggaaaatttccagacaaagtctggatcttcctaattcaataagcacgtgactgtccaaagggcaccgtgcaatcagactgtgtgtttggcct

SEQ ID NO: 8151 - DNA, 590 bp, Homo sapiens
  source 1..590: mol_type = other DNA
tcccttcctcccattctgaatgacagggctggagcggaggttgaggggtgctagcgaatcccacctaccctccaccctcagctctgggggcgtccttgcccaggactagtttcagaccagccggcgactcgcaaggccaggctgcttggccaggctgctgacttttccaaaacgcgaggggacagtccgaagagttcccggattctgatcctcgctccccgcggggctggacccgtgaccctgagctagtcgcctgactcgccgagcctcagtttcctcacctctctgtgcagcgcaccgagtaacccgtgacaggaggccaagtgttttgccgaggccccagggcttggcggacgccgggtgtgaacggagtcgctcgcagcccagcggccaggagctccgcgaggatcgaggggacgaaactcaccttcttggcccccgggcgtccagcaggtgccatggtgccgcggctctgtgggcgccgggttcccgggcgcgcggccgtctaggagcccgcccccagcccggggggaggatccgacccccgccccgccggccccgcggcctcaggctgcccgctggcctcggag

SEQ ID NO: 8152 - DNA, 532 bp, Homo sapiens
  source 1..532: mol_type = other DNA
tcgaatcaactcataataatgttgagtgatgctgactggcaaccaggaagtcgaaagatgttcagcattgctcatatttaaatacagcatttttacctatcagatttagcaaagataacaaaatgggctacactggtgtgcctttcacatgcacgttatttgcagtaataaacaaccaaaaaccatttaaatgttaatgaatagactaacgatagtgtagaatattgacaggatggaatctccaagatatattgataattgtaaaacctgtgtttgcctatgcgtagactgtctctggttagattcagaacactattacaattgtggatactgtttcactttataattaaaagataattcgagaagatcctgagcctgcctcagcctctggccgcagccgccccgtcgcctctgagcaggacggggccccactcacccttcccggccgcagacagagcgcgggcgcccgggggagccctgcagcgggcagctccgcagcaggaggccccgcagcagctgcgcgccgggacgg

SEQ ID NO: 8153 - DNA, 577 bp, Homo sapiens
  source 1..577: mol_type = other DNA
atttttacctatcagatttagcaaagataacaaaatgggctacactggtgtgcctttcacatgcacgttatttgcagtaataaacaaccaaaaaccatttaaatgttaatgaatagactaacgatagtgtagaatattgacaggatggaatctccaagatatattgataattgtaaaacctgtgtttgcctatgcgtagactgtctctggttagattcagaacactattacaattgtggatactgtttcactttataattaaaagataattcgagaagatcctgagcctgcctcagcctctggccgcagccgccccgtcgcctctgagcaggacggggccccactcacccttcccggccgcagacagagcgcgggcgcccgggggagccctgcagcgggcagctccgcagcaggaggccccgcagcagctgcgcgccgggacggagcatgactaggccgaggccgagggcgcaggcgcctgctccgaggccagcgggcagcctgaggccgcggggccggcggggcgggggtcggatcctccccccgggctgggggcgggctcctagacggccgcgcg

SEQ ID NO: 8154 - DNA, 388 bp, Homo sapiens
  source 1..388: mol_type = other DNA
ctgcgcttcggcttcgagcccagctctcctggccccaacgcgggcttagcctcccgccttggctcgggcaggcgcccgtcgacccttcggcccctttcgcccgccctggagctgggggcagggtgccagtggaagcgctcagacccgctgtgctctgaagagaggccgggcaccagccgggctccattgtgctcggcggcgggggaggggctgagggaggtgggatcgggtcccctcctccagctctccggcgtgcgctgcgcccccagcctgctgccagcctggggagaatgaatcctccgagaggtttccacccccggagacctggtgtggtgggccgagtttaagccggattctgcatttccctctctgtttgaacgttttgatt

SEQ ID NO: 8155 - DNA, 471 bp, Homo sapiens
  source 1..471: mol_type = other DNA
ttattctttcgtgtttcaggtaaccactaacaaaaagtttaaaagtccagaatggcactctataattgaaaatttagagcagtatttccctgctagtcaggacaagagaagcccgggggtgctgctgattctggcacatttgtggcctttaaggagaagtgagagcaggtgggcacacaggagctcgccgagtcctcctccccctgcatcccccgcacctcggtgacgtgagctgcgggtgacgtggtcctcctgcccgccagcggactgagggcctgccgccggcccagctccccacgagggccgctcggcccccccgccgccttgcggcgcggcccgctgctcgcaaggcccgtcgggctcccgggaccagtccgcgccccagcccccggccgcggctccgcggcggccaccgcctcccgtcccttcccgcgagcagagggagggaccgccctcgctccccgttctctc

SEQ ID NO: 8156 - DNA, 472 bp, Homo sapiens
  source 1..472: mol_type = other DNA
ctgtacattttttaaagtaatgtttttattattttaaaatcaatgtattctcattataaaaatattttggaaaatacagtgaaaattttgaagtcttcaaagtacatttctgcttccatttataaatgttaaaagtctgtccttgttaaatattacaaacatattcttattagaaactactgtgttattagtcattttgaacatacccgccatatactggatgtatatcacacaggagatcacactccaggctgaagatcttccagatctgagcatcgaatggacttctcagaggcctctctggcagcctaagtgcgtggttccacccatttgggtgaacaatctggattacctccttggcaggccaggttcccaacaggaggcgggcctgatgaagggctggtggttcccgcccaaggtccgtgttggcccgcgcggtggctgggaggccctccccacgcccaactgcggg

SEQ ID NO: 8157 - DNA, 394 bp, Homo sapiens
  source 1..394: mol_type = other DNA
aatttcagaacctgaggggtcagattttatagaacaataaaggaatacagctaacagatttgcattattaaacaatttagacatttctacaaattattaaagctcactcaagaggcgatatcaataaatatttgttgaattagtgaataccagctggctttagagagaaagaaagcatttttttttttttttttttttgagacaaactgctggagtgctgtggcacgatctcggctcactgcaacgattagtagcggggttaccaagggattttccttccaaagaagtaaagtttaatgttgctcggggcccagaagtggccctccggcgactgcctgccaacttgtgctggcagcagttaagaaacaggcggccaccggaagtgtgacctttc

SEQ ID NO: 8158 - DNA, 284 bp, Homo sapiens
  source 1..284: mol_type = other DNA
tcaataaatatttgttgaattagtgaataccagctggctttagagagaaagaaagcatttttttttttttttttttttgagacaaactgctggagtgctgtggcacgatctcggctcactgcaacgattagtagcggggttaccaagggattttccttccaaagaagtaaagtttaatgttgctcggggcccagaagtggccctccggcgactgcctgccaacttgtgctggcagcagttaagaaacaggcggccaccggaagtgtgacctttcgctccccgct

SEQ ID NO: 8159 - DNA, 343 bp, Homo sapiens
  source 1..343: mol_type = other DNA
cgagatcgcgccattgcactccagtctaacatggcctgttaggcaaccgttacctaaaggttagtttcagacaaaacttagctttttgctaacgtgggggaaattgctcctcctcaaggtatacacagtatatctggttcaaaactgggcttttgagcagtagcaatgacagcctgagctgctggagctcttcggagtctcagtttcctcgtgcctggtagtccagttgtccgaaaggcccgccagggatctggcgtgagcccgggccccagtcggttaaagtcgcggggctcgcccgcccccggcgccgggaacccgagccgcccccgcaggggcagggctg

SEQ ID NO: 8160 - DNA, 349 bp, Homo sapiens
  source 1..349: mol_type = other DNA
cagtcatatgtttggatcatagcatttccaagaccaaaatttcctctttaatagtttttctgagaaactgtcaggtttataggcccacacttaagaaggagcctttttaagcacagagccttgtgtggctgcacaggtcgtctgtagctacacaatttacctgacgttcagaaatactggtaaataccacaatcttgtaaatactgggtcatccctgttttacaaacaggttaacagatttaatgttcaaagggtttggaacactctagggatctaataaatattaatatttgaagaattactggtgggtctgacttaaggcacacaactcttaccctttaggccaagc

SEQ ID NO: 8161 - DNA, 558 bp, Homo sapiens
  source 1..558: mol_type = other DNA
cttgcactttgaggtattactcagaataatattatagctatatacctcacagctttagtgtaaaggtttacactatacctcttgaacctctccaggtgttatctaaagtttgcaatcgcgtaatgcaaagctgcagagcagctttacttcacagcgaaggcgactgatactgaggccgcatccctccccgtgatctcaagtagggacgcgggcgccagccacccggctttcgaggactttgctccccaaaaggtcctggggatgcagagtagggagggcgcgccccttgcttcggggtttcactccaccgcccagacagctttgtgaggcggagaagccttgatgtcgccgccggccttcggcggggggcccagggcaatgcagcgtgcagcggctcggccctcctggaccccgcagcgcagcgggaaactggggcaagtcagcctggcgcctccagccccgctgcgccctggcccgcgaggcggcctcagggactcgctgtgaaccgatgggagtccccagccgcctccccagcaactgagttccaagggggccgcc

SEQ ID NO: 8162 - DNA, 441 bp, Homo sapiens
  source 1..441: mol_type = other DNA
cttattaaactttgaaatggaattattacagaggagaaatttttgccactgtttatcaaatatttccaggaaaaggacgaatccttgagatgtgttttatctccattaaaaacacaacaactttcaaactttcactgtgtctcaaaatgatagagaaaaaaattcagcctttcaagtattcaagaaaagcttgaagaaatttggaacttcaggattcattcgcaagggaaccccaaaggatattcttctttttagaaaacaaaaggcaaagctagtgggtcagtgtcactttccctcgcgcgtcggggccgtgtctacacccaccccaggacctggtcggctcgctgctccagctgcccagctcttcccaggacaggggatcccgccaagggggccgcccccgccccggccctcccccgcccggccgcaccataaagcgcc

SEQ ID NO: 8163 - DNA, 479 bp, Homo sapiens
  source 1..479: mol_type = other DNA
aggcgcctgtaatcccagcgcagtgagccgagatcgcgtcactgcactccagcctgggcgacagagtgaagctccgaaaagaaataccttcattcctcttggtgggctgtcccagtcggcgcgcggcagagcgcagaccagcacccggcggtctggtctgtgcaggaaacgcttactaaggctccaaccttttagaggcgatccgaaggcggagaggcgctgcgctctcatttggcgagggcccgagcgcggccagaccgcgcaccagacccggagcgtggggcccaaaggctggcggccgactccggagctcggcgccccaaccgggcgcagcagcccacccgcctgacgccagcggaagtgcgagcccgggtcgagcctgctccgccgccgggcgcccgggaaggggcgggcacggggcggggctgggggcgggcgaggcggggccggcggcggggcggggcttggccgcacccagg

SEQ ID NO: 8164 - DNA, 438 bp, Homo sapiens
  source 1..438: mol_type = other DNA
gccagtagctgggacggcctgtctggaactcttgacttcaagcgatcctcccgcgccgggtctcatttaaatttataggaaacttgtggtagcaaatatacatcaagtgagtgacattttatttctacatttagacagggagacagctgttctaccagctgctttaaaataaaaacaaaaagttatgttttgccagcagcgcggagagcaggcctagcccgctgccgggaaggcgggtctgtccagtagagaccggaacgctgacgcgagtggcctcccgatcccgcagtcgagtggagaaccgagtcccgtcgtagtgcgcaagcgccccgggcctggagacggccgcggatgccgagggagggggcgtgtgagccgaagaggaaagcgtcctctgcgcctgcgctctctgcgctgcccggtggggcggggaaagaa

SEQ ID NO: 8165 - DNA, 268 bp, Homo sapiens
  source 1..268: mol_type = other DNA
gggggcgcccgccgatttttgaaagatcagtatgaactgtggctggaatgcagtgttgccatcagagctcactgcagccttgacctcccagccagtagctgggactacaggcctgtctggaactcttgacttcaagcgatcctcccgcgccgggtctcatttaaatttataggaaacttgtggtagcaaatatacatcaagtgagtgacattttatttctacatttagacagggagacagctgttctaccagctgctttaaaataaaa

SEQ ID NO: 8166 - DNA, 415 bp, Homo sapiens
  source 1..415: mol_type = other DNA
aaaaatattttatcaggtgatgttagttatcctaactctaccactggcagattgagttttttggttcactagtttggcttcaaaaagtaatgtcagctcggtaactttgtacaaaaacttatttatttatttatttatttatttgaagaccggagcgcagtggagcgatctcggctctctgcaacctcagtcccgagtagctgggattcggcgcctgggagtacaggcaccgtgcccggccagaaacactgatttttatcagtaatgattccacacccttttaggatattactaacatttagcagaccagcttccgaaacctttcggaggagcgcttcgccaccacctgcacggcgaagcggcgcgtaaacgaacctcgaacgccagcctttgcgcctgcgtgccgcggctcgct

SEQ ID NO: 8167 - DNA, 563 bp, Homo sapiens
  source 1..563: mol_type = other DNA
catacataaaatttctaagacaaaaattttttaataatggtaaatgaaccttgggaactgcatacagatcatacagaaggtcccagattaacacggaaaactttccatttaactaacatttgcactggtatctactgaagaggttgaagttagagaaacagcgttactcgaaacattatcccttgggctcgagctctaaggcacctgacaatgggactttgccctgggcgagggcgccgcagggcaaagacctcacgtcgggcccacccttcctgccagcgcagaccgcaagtctggccccatcctctcgccgggagtcggccaccccgaccgtgggcagcctgcgcccgtttgggtcccatcgccccggcccggcagatacctgagcggtggccagggcaggtccccgttcttgccgatgcccatgttctgggacacagccgagcccgctcgttacagcagaacgcgcggtcaagtttggcgcgaaattgtggccgccccgcccccctcgtccccatttgtgcaggcgaggccccgcccccccgccccggcgcacgcagggt

SEQ ID NO: 8168 - DNA, 316 bp, Homo sapiens
  source 1..316: mol_type = other DNA
tcatcactaaagatgtgacaagattatgaattttttcttggcagaaaacttgccaaaaagctaccctttaaatggtgggtgcaaaattttggtgaattcatgaaaacgggtaggtggctaaactttaaaaacaaaacgtaatttcagactttataatctaaactacaaaaagaatgactgctttatttcaaatatgcagtcttaaaaactggagacctaagggccacttttttaaaaaatcagagaatgggagtcaggagacctgagttcctgtctcaggcctgccctatcatcgggcggagggtccccgcctccg

SEQ ID NO: 8169 - DNA, 479 bp, Homo sapiens
  source 1..479: mol_type = other DNA
aggtaaaatagatgatatttttaaacatgggtcgtgtttaaatccaattggtcatgtccacgtggcctcagaagctgagtacgtgacggtcaccgtgcctaggcaggctcccttgaaatggcagggctgctgtccaaaatcctgctgtatcccccatctactgcagggggcctgatcttgctgtaattgtccctggatccaggtcccagacaaagacgctggaaggaggtccctccagcccctggctcagggcccggtcagctgctggagccaggcagctgtgccagagccctggcaaaggagcctccaggaccaggcctgggaagcaagactggctccgccttttacgtttcagagaaagggcaggtgcccacgggcctgccttcaagggtacagctgtgggggccggtgcgcccggaggtctacgctgggattggtgaggtcctctggccccgccccgccagggaggatttccaggc

SEQ ID NO: 8170 - DNA, 242 bp, Homo sapiens
  source 1..242: mol_type = other DNA
ataaggagttcgaatttcatccaaagcagtacagcagtactgctttaaatgtaatgatttacattttcaaaagttccgttcctacgacacggaaaatgcatttgaaatccagggttttcctcttaaaaagagaacttgtttggctacaaagtgttaacattttaattgaatgccactgtgagttcagacagcacggccgtctgtgacgccggaagtgacgcgctctcgggcactatgtgctt

SEQ ID NO: 8171 - DNA, 442 bp, Homo sapiens
  source 1..442: mol_type = other DNA
cgggtgtgtggtgcggccgggcgcctccacctccctgatccgccccatcccggcgggcgcccgagcagaggcagcggcccgggccggggcgggcgagggagggacgcgagccggggcaagcgggctgcgccaccgccggcgccgcgccgactttgcccagcgcgttgcccgaggacagtccttccccggctgccgccccagcccgccgcgggggctcggctcccgcaactttgggcgaagcggcggccggctcgggcgccctcgcggggccgcgctccacgcgggcgttgggggcttggggggctctggttagggcggagagcgtgcctcggccccagcccgcgcccctgccaccgcgcgccgcggcctcccgaaagcgggcggggtgccctgcgcgcggcgtggggaaagggggcgcccttcgccggccgggacctgagcg

SEQ ID NO: 8172 - DNA, 582 bp, Homo sapiens
  source 1..582: mol_type = other DNA
aaattatgatttctcaatacagaagtcattaaaaaggcattttctatagctacataatttgcttttaaaagttattttaatgccttttatataagtcagacttcatgcttgcctcagtgaaaacatgcaattcctatttatgattggattgtccttatttcttcactttcattttaaaaaaaatcttttaaaaaggaaagaaaacattctgatgtcgccatgctgaggcttggcaagccaaaaaacagtcaggagccctgggttccagccaggtgatcgggtcgcttatccaccaatccattagatgctggaggttttctggagacactgtttccctaattgtacagtcactgatagcagctctagaaagtgtaacagcttttttatctcaaaagctgttcgctccggctctcggggagccgccttccagacctgtctacccgggagccgagagcgctggttttcactcgcgatagtcctgggatgacagtgcgggccccctcactcgcagctcccaccacctggcggccaggggttcgcggcccgggcgggcggcgccagtgccctctggagctgggcggg

SEQ ID NO: 8173 - DNA, 539 bp, Homo sapiens
  source 1..539: mol_type = other DNA
taaatgactctcacagagttattggtagatggagtgaatatatgataatctatcaattcctaaattatgatttctcaatacagaagtcattaaaaaggcattttctatagctacataatttgcttttaaaagttattttaatgccttttatataagtcagacttcatgcttgcctcagtgaaaacatgcaattcctatttatgattggattgtccttatttcttcactttcattttaaaaaaaatcttttaaaaaggaaagaaaacattctgatgtcgccatgctgaggcttggcaagccaaaaaacagtcaggagccctgggttccagccaggtgatcgggtcgcttatccaccaatccattagatgctggaggttttctggagacactgtttccctaattgtacagtcactgatagcagctctagaaagtgtaacagcttttttatctcaaaagctgttcgctccggctctcggggagccgccttccagacctgtctacccgggagccgagagcgctggttttcactcgcgatagtc

SEQ ID NO: 8174 - DNA, 463 bp, Homo sapiens
  source 1..463: mol_type = other DNA
atttgtttaaatgataattaaatattcagaatgtgcttagtcaagacatttttattttcagtgattgtattaaaagcatatttaaaatgttcagacttaatttcaatctgcacaattctggaatgcgagcccagaattgtaaaattgcattcctattaggatatctttattctcctgtttaaattcagaaagccagaagaggaatcttgctgcaaaggaccatttgtttcctgcagcttgacaaaagccatgtttgacagaaaaaaaggcccattttcgtttcacagtgaaaagagtacatggaatagccaatcatgcattatcttgattaagtgaaacctaacttgctcattaagaaattcccataatttttgtgagtgccacgtgtcatgggttggatcatgggagcagtttcccccatgctgctctcgtgatagtgagtgagttctcacgagatctgatg

SEQ ID NO: 8175 - DNA, 638 bp, Homo sapiens
  source 1..638: mol_type = other DNA
agatctggcggggtgtccagggcgccgcggggctccgtgcaagaaggggttggggcaggggccgctgcggccgcaggagtcaccgggcctcctcgggaggtccgctcacctcttacagaggaggccgaccccaggccgggtgctcccctggggcgcagggcgcggccccgggcgccgccaccgcagcggcgccgagggccggaggtgcagcctttccccaggagagaaggcgagtcgctgtcggtcgctcagccagggtcgagggaaccgcgcgggtgtccctcgccagccggccctctgggaacagggcgggggcgacaccccagggaggggccccagggcggctgaggccgtggctctgtcgtggactcggcgggcgccccgaagtctggggccgccacggctccagctccgccggctccggccggagactccaggccgcagtttctcctcctcccggcgccttctctccagtgaggagctgagcgcgggcggcggtttaaaatccttctagaagtttctaattccccccttgcgcccgggttcggaggggggagggggaactgccgctgaggcttagccgccaccgcgcgcttcggaaggccagagggagggggaggcctgtcagtctcgcgcgt

SEQ ID NO: 8176 - DNA, 470 bp, Homo sapiens
  source 1..470: mol_type = other DNA
attttgagttttaaactatttcacatgcagtaaaatttatacctcttatgggttttgtcaaacagtggtttagtcacgtattctctccttttaaaaacacttattatttggaaataattatagacacatggtgacatcttacacaactgtagtacaagatcaaaaaactatgtcatgtagtttaaatttaactctgttgttagaaggagcactgggatatgtgccacagatggtactattgtcaatattcgaattcacctcttagggggatgctagtaacccgctccccctccgcggagggcacggagagctgcccgccaggcgaggggcggggccttggcgggggtggtcgcgggcggcggggaggtctcgcttccctcctctccacccgctcccagtcccggcctgggtctcagccccgccctgcccagagcgcgcggccgatcacgtcaccggcctgcgctaggcgg

SEQ ID NO: 8177 - DNA, 327 bp, Homo sapiens
  source 1..327: mol_type = other DNA
tatctccatatgcatttttgctaggacagggaagtctttcaagaccttttctggccaggccgggtggggaagcctggggccctcttctgcggcagatctggcggggtgtccagggcgccgcggggctccgtgcaagaaggggttggggcaggggccgctgcggccgcaggagtcaccgggcctcctcgggaggtccgctcacctcttacagaggaggccgaccccaggccgggtgctcccctggggcgcagggcgcggccccgggcgccgccaccgcagcggcgccgagggccggaggtgcagcctttccccaggagagaaggcgag

SEQ ID NO: 8178 - DNA, 527 bp, Homo sapiens
  source 1..527: mol_type = other DNA
tggtgacatcttacacaactgtagtacaagatcaaaaaactatgtcatgtagtttaaatttaactctgttgttagaaggagcactgggatatgtgccacagatggtactattgtcaatattcgaattcacctcttagggggatgctagtaacccgctccccctccgcggagggcacggagagctgcccgccaggcgaggggcggggccttggcgggggtggtcgcgggcggcggggaggtctcgcttccctcctctccacccgctcccagtcccggcctgggtctcagccccgccctgcccagagcgcgcggccgatcacgtcaccggcctgcgctaggcggcccccacggcgcgggaaggcgcagtgcgcacgctccgactcggccgtggcggacctgactgaaggaggccgcggacctgactgaaggaggccacggccacttctgggcctcggggcgcgctgtcctccgccctcgaggcccaccggcgcggcagtggcctcgcagggcgctgggtccctctcccc

SEQ ID NO: 8179 - DNA, 443 bp, Homo sapiens
  source 1..443: mol_type = other DNA
actatattttacaatttactagctgcttataagtatgaattaaggctcagaagtctaattcgtcccgctctcagtggcttgggcaagagcgcctgcgcggtgagcgggtcccataaaacgcattctgggcaaattagatatctctgaatttcttgcaaattaaataagacgcagattctcgtccccagcctcgggtcaggcgcggcgcagacagcggcgcggggtccttggctgggcccgtggcgccgacggctccatgggggagggccggggaagcgccgctccaggaggcacgtggtccggcgcggaaggggcccatgaggcgtggaggccgccgggtcggggtaccgagggacgcagggaggccagcgcttcctcccgggcattcgagaaaatgtttggcccacaggccaataaatagcagagccaatttttacggaaga

SEQ ID NO: 8180 - DNA, 326 bp, Homo sapiens
  source 1..326: mol_type = other DNA
gatcgacaccagccaggaaataaaaataaataaatctataagtaactttagggttaaaggcccaatctggctccaaagcttggggtttcactatattttacaatttactagctgcttataagtatgaattaaggctcagaagtctaattcgtcccgctctcagtggcttgggcaagagcgcctgcgcggtgagcgggtcccataaaacgcattctgggcaaattagatatctctgaatttcttgcaaattaaataagacgcagattctcgtccccagcctcgggtcaggcgcggcgcagacagcggcgcggggtccttggctgggc

SEQ ID NO: 8181 - DNA, 436 bp, Homo sapiens
  source 1..436: mol_type = other DNA
tttgcatgagaagcacctccaaaagggttggcctttagggctgtgcccaaatgagagcttcctagccctaaaaattaaatattttagttcttccgtaaaaattggctctgctatttattggcctgtgggccaaacattttctcgaatgcccgggaggaagcgctggcctccctgcgtccctcggtaccccgacccggcggcctccacgcctcatgggccccttccgcgccggaccacgtgcctcctggagcggcgcttccccggccctcccccatggagccgtcggcgccacgggcccagccaaggaccccgcgccgctgtctgcgccgcgcctgacccgaggctggggacgagaatctgcgtcttatttaatttgcaagaaattcagagatatctaatttgcccagaatgcgttttatgggacccgctcaccgcg

SEQ ID NO: 8182 - DNA, 296 bp, Homo sapiens
  source 1..296: mol_type = other DNA
actctcatttctaatactttattagaattccaagaactagcctgtttctccatcgataaaatgcagaaagaaaaacgaaaaagctaaatactactactgattaaaagttgccttgtcatttcaaaagtgcttcgcatttttttaaaaagaaagcaaaaagataaaaagaacagaacctcagatttttgttatttacagctacttccgccggcctgcgggacgtgatctaaccgcccgtcttggtaggcggtgccgtgacaagcccaaccggacggctggagagggcgagaagggca

SEQ ID NO: 8183 - DNA, 403 bp, Homo sapiens
  source 1..403: mol_type = other DNA
atgcatcctttgtccagaaatatacataacatttggcacatgattaaaacctatagcttgtaaagcagcattttcgagtttggtgccaaaaaacgcatttttttttcctaaacaaagtaggaaagcggactttgcatgaggggcgggctgccgacccagcagtcttcctcggacagtccgtcctgtctggttggccgtggagggaccacatggctccaaggcctctcagctccgggccgccggcgatgccgcagccacatcacccttccggggctcaggcggaagaggctgcatgtcccgtctgcccttctcgccctctccagccgtccggttgggcttgtcacggcaccgcctaccaagacgggcggttagatcacgtcccgcaggccggcggaagtagctg

SEQ ID NO: 8184 - DNA, 374 bp, Homo sapiens
  source 1..374: mol_type = other DNA
taatataattttctaagtagaggcttaaggaaaagtttgccaccatcctattgtataaactcatacttgacttcaaagaaaaggaaaatccaaagtccctcttttctaaggacacaatgactcttccatgtgttgcatatacgcatgaaagattatggtcttatttccggaaagtgatacttccaagaagtccctgttactcaggaaaattatcaaatattctactgaatccgacaagggatttgcctgggggaatttcctgctccccattgggcagttccctgggagtgcagtggggaattcctttccctctgagcctgacacttccctttgatgggtcccctaacccagaactagctgcacggggggcgggg

SEQ ID NO: 8185 - DNA, 365 bp, Homo sapiens
  source 1..365: mol_type = other DNA
cctattgtataaactcatacttgacttcaaagaaaaggaaaatccaaagtccctcttttctaaggacacaatgactcttccatgtgttgcatatacgcatgaaagattatggtcttatttccggaaagtgatacttccaagaagtccctgttactcaggaaaattatcaaatattctactgaatccgacaagggatttgcctgggggaatttcctgctccccattgggcagttccctgggagtgcagtggggaattcctttccctctgagcctgacacttccctttgatgggtcccctaacccagaactagctgcacggggggcgggggccgattggtacttcttgtcaggaagaaacgccaaga

SEQ ID NO: 8186 - DNA, 340 bp, Homo sapiens
  source 1..340: mol_type = other DNA
gcatatacgcatgaaagattatggtcttatttccggaaagtgatacttccaagaagtccctgttactcaggaaaattatcaaatattctactgaatccgacaagggatttgcctgggggaatttcctgctccccattgggcagttccctgggagtgcagtggggaattcctttccctctgagcctgacacttccctttgatgggtcccctaacccagaactagctgcacggggggcgggggccgattggtacttcttgtcaggaagaaacgccaagaggggagggaggcaggcggtccctaccgcaggcgcggggagctgcctttccgcccctccgcctg

SEQ ID NO: 8187 - DNA, 153 bp, Homo sapiens
  source 1..153: mol_type = other DNA
tgtgtgtgcgcgcgcgcgccctgagcagttgtttgttaagagaaatttaaactcaacatgcttggatttttcttttaagcagaggctaataaaacaaagcctgaggagtctgctcacatgggcacagagctatgaagtgcagtgcctaggtga

SEQ ID NO: 8188 - DNA, 502 bp, Homo sapiens
  source 1..502: mol_type = other DNA
agaaaggaagttcaccttaacgtcacagtctccagcatgtgcggagaaggtacaggcaatgcaggaatctcccttttctcttatagcagaaggagctgaaagaggaggcgggcgggcgccgggggagtggggagcgcgcctgccaggctcagactcacacgcacgccgcctctgtttgtacacagtgcgctcccggcggcccgctccccgcagccgccgcgcggagaacagcgacagccgagcgcccggtccgcctgtctgccggtgggtctgcctgcccgcgcagcagacccggggcggccgcgggagcccgcgccccgcccgccgcgcctctgccgggacccacccgcagcggagggctgagcccgccggcggctccccggagctcacccacctccgcgcgccggagcgcaggcaaaaggggaggaaaggctcctctctttagtcagaatttgtttaacaaagcgctgaggaaagtgctgctgccgcgacgacccctgac

SEQ ID NO: 8189 - DNA, 413 bp, Homo sapiens
  source 1..413: mol_type = other DNA
agatgtcctgcttgtagacagagcagcagagcagccctgtcttagagaaaggaagttcaccttaacgtcacagtctccagcatgtgcggagaaggtacaggcaatgcaggaatctcccttttctcttatagcagaaggagctgaaagaggaggcgggcgggcgccgggggagtggggagcgcgcctgccaggctcagactcacacgcacgccgcctctgtttgtacacagtgcgctcccggcggcccgctccccgcagccgccgcgcggagaacagcgacagccgagcgcccggtccgcctgtctgccggtgggtctgcctgcccgcgcagcagacccggggcggccgcgggagcccgcgccccgcccgccgcgcctctgccgggacccacccgcagcggagggctgagcccg

SEQ ID NO: 8190 - DNA, 341 bp, Homo sapiens
  source 1..341: mol_type = other DNA
agcacaattgtaagccatgagctgtatttttggttcaatcacttccactgcaaaaaccagtccatttattttggcggatagaagaaaattagatgtcctgcttgtagacagagcagcagagcagccctgtcttagagaaaggaagttcaccttaacgtcacagtctccagcatgtgcggagaaggtacaggcaatgcaggaatctcccttttctcttatagcagaaggagctgaaagaggaggcgggcgggcgccgggggagtggggagcgcgcctgccaggctcagactcacacgcacgccgcctctgtttgtacacagtgcgctcccggcggcccgctc

SEQ ID NO: 8191 - DNA, 302 bp, Homo sapiens
  source 1..302: mol_type = other DNA
cttctggtcaaagaccactctgtaaaatattagaaaatgcttattggatttgggatttttttctcctataccaaatcttaggtaaaccagatagggtgatgtccggtcattttttatctgtgttcagatgtgattacacagtgatcatattcttttcttaatgaacactgtcagagtgtgtacgttcatcaggcggacaccagttcctagtccagcccaggtcctagcatatactttatttttaaaaaagaaagaaagaagagaaacgtgaaactgcttcacttgattcaataaaatcgttt

SEQ ID NO: 8192 - DNA, 339 bp, Homo sapiens
  source 1..339: mol_type = other DNA
gtatacattttagtgtaaaagacaaaataacacccttctccttaattgtattaaaaatgagttttcagtttattgctacttttgaaacgatatataattataactagctgcagtcttttgcacacaaaccaggacaaaagacttataatggcataggtaagtatatgatgcaaatactggtagaaatcttacttcataatagtgattcccgggagacaggcgcgcgccgccggccacgccaacaggagatgcggccgcgccgccacacgcgcaagcgcgaccacgcaccgcgcgtccccgggcccggccccccgcccccgctccgggaacgcgcctgcg

SEQ ID NO: 8193 - DNA, 307 bp, Homo sapiens
  source 1..307: mol_type = other DNA
atagtgattcccgggagacaggcgcgcgccgccggccacgccaacaggagatgcggccgcgccgccacacgcgcaagcgcgaccacgcaccgcgcgtccccgggcccggccccccgcccccgctccgggaacgcgcctgcgctcactgagagctccaggtagtgcccacccctctcatctgcctggtggaggatgaagcggctgcagtggccccagcctcagcagcggcaccggcggtggctgcggtgtgggtggtggcggctgaaggagcggtagcagcctcagcctctttcagcgaggaattggc

SEQ ID NO: 8194 - DNA, 513 bp, Homo sapiens
  source 1..513: mol_type = other DNA
tggaggatgaagcggctgcagtggccccagcctcagcagcggcaccggcggtggctgcggtgtgggtggtggcggctgaaggagcggtagcagcctcagcctctttcagcgaggaattggcttcccgtaacccaggcagctggggagcctgggctgtggccctaggagggggcgcggcggcgggctctgggctgctcggagcccgggcctggtggcccctggggctcccgggcgggcagggtaggttcaacatgatggcggccgaggccggcagtgaggagggcggccgccggagctggaggaggcggcgcggcagcgggctccagtgcctatcccgatacccgcggccctgcctgtggcagccgccccctatcctgggctggtggagaccggagggggaggtactgctgctggcgtagctggtgctgctgctggcgggctctcaccaaactgcccacttcggccccctcccccttacctgccccctttgggggcgggcctcgggacagtgga

SEQ ID NO: 8195 - DNA, 506 bp, Homo sapiens
  source 1..506: mol_type = other DNA
cagaaccaccgttcataacatttccactgaaaggatgaggaacctttgaaatatttaaaatgggaagctaaccttatcagatttccgttttgattaccgatactgagttacttcactgattttagcacctgaattagtttcctaagggctgccttaaaaaaagcttaaaataacagaaatttattgaaacatttgctgtttttttacaacttggttggaagctttccaatcatattttaaaaagtctgtctactttttaatttataaataatgatatcacaactgtgagcatgtgcacacagcctgtcatgattgtttatactttaatgaagcaaagtacagttttagtttattaaatattttcctacagctattttgtgtaatgattagcgaatctataaagaaaatgaggcgtgatatatacccttcgttggatatataaactaaatttaatctagatagagaaaaatgttttacaattgtttaattcattgaattcattgaac

SEQ ID NO: 8196 - DNA, 348 bp, Homo sapiens
  source 1..348: mol_type = other DNA
ttatttatttattttttagaaaagctatttgccatagggaaatccatttttcggattggatatataataaatacatgagagaataaggtaaattttgaacctcacctgcaattttgaaagtcctattaatttaaaaaatagtaaataccttaattttcatgatagcttactgtaaggctgagatttctggtagtgcttcaagaatatttcacaaatgtcaacttcagtgaggcctctatttaaaaatgagcaccctaccgagaggagcgttctctaggctccgcccacttacgtctcagtgggcgccctaacgggctggccgcgtaatcgtgacgacagcgcgccagc

SEQ ID NO: 8197 - DNA, 361 bp, Homo sapiens
  source 1..361: mol_type = other DNA
atgaaaaagaaaaggctttccctttcttaagcccctaaaaacattttaatagaaagcagagttaaagtcatcctgccacttcttttatttatttattttttagaaaagctatttgccatagggaaatccatttttcggattggatatataataaatacatgagagaataaggtaaattttgaacctcacctgcaattttgaaagtcctattaatttaaaaaatagtaaataccttaattttcatgatagcttactgtaaggctgagatttctggtagtgcttcaagaatatttcacaaatgtcaacttcagtgaggcctctatttaaaaatgagcaccctaccgagaggagcgttctctag

SEQ ID NO: 8198 - DNA, 306 bp, Homo sapiens
  source 1..306: mol_type = other DNA
acctatctatctatctatatatatatctatatctatcgatcgatatctatctatatctatctatctagacttccctggatcccagagcatctatctatatagataggtatctatatggaaaacgtccatattggaacgtattaaagaggcagaattatagtgaagaaactgagacaaaatgacggccaaaggtggtctttaaagttgctttagaggacgtcctgcgtatcttcacctctgcgtggcgtggggtcgacggcgctctggagaagggaggaacttcctgtcccgcgcgcgcacaacttc

SEQ ID NO: 8199 - DNA, 344 bp, Homo sapiens
  source 1..344: mol_type = other DNA
tcgcagcgtccccggagagcaagcgagcgcgccgcagcgggagactaggttctctccgagcgtcctccgcagaggcgccgcgagaggagcagggagccgcagctcgcaataaataggtttgcgtatggcatgtgctatccaagatgcaattatcatttaaaagtgcttgattgaggtactgatgttcagtgatttattctgcataccatatacataattaaagtagtgtagtggagtaatttatcaatcatccgaccggctccgagcggcctcggcgcgcgcgaatgcgcggccccgcgccccccccctcgcgcgcgctcccctcgcgcgcgcgcacacacgca

SEQ ID NO: 8200 - DNA, 278 bp, Homo sapiens
  source 1..278: mol_type = other DNA
tccaagggtcgcgctccctgctggctggctcgcagcgtccccggagagcaagcgagcgcgccgcagcgggagactaggttctctccgagcgtcctccgcagaggcgccgcgagaggagcagggagccgcagctcgcaataaataggtttgcgtatggcatgtgctatccaagatgcaattatcatttaaaagtgcttgattgaggtactgatgttcagtgatttattctgcataccatatacataattaaagtagtgtagtggagtaatttatcaatc

SEQ ID NO: 8201 - DNA, 611 bp, Homo sapiens
  source 1..611: mol_type = other DNA
tctttttaacaacacttaagaaatcataattattaaggcaatatatcttgactattttatttatgtcagacatattaatgaatattgccctattttcctcaaaaggaatattggcatcctagattcccaatagttttagtgctatgagcatacaattttgacattcagtccctcagaactacacacattctaattttggtagtatgaataatctctcctatgtgataagttatttaaccttctaatatttcttagaatcgaaaagaacaaaaataacttttatgcttaacacaatttaataacctgaaatgaagtaagtatgtgctatgtttccattaaaaagtttccagccacaattaattgaacgaaaacttgtcttgttccaagattattcttggaaatgtaattttaaaatctgcttgaaatgaggaaacttacttttttataccatatgaaagcaatttcattttttaggaatgatcttccgattggatattttccattggaactctgacaaaggtctggttgtcagtgatacctttacagctaacacctcggcctgccagacacttgtgcagagagatcacgcatctcacggcttgacgatcaag

SEQ ID NO: 8202 - DNA, 225 bp, Homo sapiens
  source 1..225: mol_type = other DNA
cagtattttgtggattttcaaaagattccactcaatgtctcatgtgtgttaacagcttacacatacagctaaatcataaatagcacctgcctcagaatcacttggaaggcttgtgagagaaacggacatttgtagccggagggtggcctgccagtttctgaatggcggggcacagaaaaaaaatttttttttccttgattgacgtaaaacctacccaatgaaaat

SEQ ID NO: 8203 - DNA, 270 bp, Homo sapiens
  source 1..270: mol_type = other DNA
gctggcggggccacacccagttaaataaataaataaataaataataataaaattaaaaaaagggtggatatagaattttattttttataagaaaagacaaaccatattccatggattttgaatccaaacgcccctgaggcgctgcagagaacgccggcgcttgactgccgcccgttccacctcgggagaagcgcgcaccgacctgcacgcggcaccaggaccgcgaccccctcggcaaagaggtttttttgcccttggcaggccccgcga

SEQ ID NO: 8204 - DNA, 515 bp, Homo sapiens
  source 1..515: mol_type = other DNA
acactgagacatcagactcattaaaatgctttacattcattaattaaagtagttgcggcttttgccaaagtcatacataaattcaaacacattatgatactcatttaacacatttgtgataaaaatcatgtatgaagtcatgagtttatttaataagctaatattccatagagtccaatgatgactcagttaattttcaaaccaaaataagttagattacaatttgttgactcccttgactcctcgagccagggaaaacatttcctggggcctgacattctgctcttctgcagcagtctggagtcttcagcaaacatggcgcaattttctgaaaccgtgatgtcaacagtgtttttgaggtgtcctttagggtgcacccgacagtctctgccagcgctggccacctcaagggcggggctggggattggacccgcccccgggcccggggattggacccgcccccgggccccggaggagtccctgcgcctgcgtgccgggcgtggcggacgtggcgg

SEQ ID NO: 8205 - DNA, 432 bp, Homo sapiens
  source 1..432: mol_type = other DNA
ctgagaacccattttttttttctataaaaagcggtgagaggtgtactgtaaagagttgcactcctaacagccttatgagtaattaataatcctattttataaatgaggagacagacatatttcatcaatttatgctcaaattcttatggacgaaaaaagactcagtaaatgggttttttttccctgaaagaaaactaggaatttagtggagtacccagggcagtgtgcaccactgtccatggtcaagactcgcgcgctcctaagccgaggcaggtcagcctaggcgcctggctcccgacgccagagcgcggacctggctgcccgctgcggagagcagagtgcgcagcccggggcggccacccccgctccgctggtcaggtgagcgctgccccgggagccatgggtcctattgggggaggaggatggagccct

SEQ ID NO: 8206 - DNA, 306 bp, Homo sapiens
  source 1..306: mol_type = other DNA
aaaccactatgtcatatgccttttataaggtagtacacacaggactttttcttccttcgaggaagggttgcagcaaagcctattgattacattgtacttgctttgaccagcaaagtcgttagattatgctcaacaatcgctgcagtgccggtctagtagagtgcgctcggtaacgggctccagatagccggccagcagctccgtacccgggcgcgggcaagggagcgagcgcggcgcggcgcggcgcgggagggggcgcgcagggagggcggacagcagccgcggcctgcgcctgcgcactgtgag

SEQ ID NO: 8207 - DNA, 488 bp, Homo sapiens
  source 1..488: mol_type = other DNA
aaaattggattgattggaaagtttatttttaaaatcatctttgggataaataggaacccttgattccgatcgaatttgtggcaatagctgcaaattccaggagttaaaccttttaaaccaaggtatactttggattaaaaaatagggagatcctaccctgtttctacttgtttctaaaaaggatataaaatgagcagaatacttggattgtgcttatatgtgacaaatccagtatatttcacaaatcattaaaatggtgggggtttcattcccattaaaaatttttccaaacattttcaatgacaccgctcataaaatctaattttaaaaacttttcagaagaaatcaaaataatttccccgatctcaatgtaaattgcgctgaggcttggctaaccttagcctcagcagcccttctcttggctccttgacacgagctccatataaaaacgtgtcagtttcaatagtagtgtcaaagttcactatata

SEQ ID NO: 8208 - DNA, 574 bp, Homo sapiens
  source 1..574: mol_type = other DNA
tacatatattatttaaaatactaaaaaaagaacatttttgggcgtttctagctctgtgtgttatagcagacccccttccgggcagcgctgccttcctgaatggctggctgcgtccggccctggacctggccccccgacacccgcgcgccctgatcgccggcggcagcctcgcccagcgccctgctcggctcaccgcgctccccgcactcccgagcccggcgagggctcccgccgggacagcggcggcgccgcgggcggccccggcctccgctcgcgctccggctgcggccccgactcctgctcggactccggcccgggtcccggctcctccagcggcgctcgccgcagcagctccggcggcagctccagcggcgcctgcagccgcgacctcctcctcctccgccgccgccgccgcctccgccctcgccggcttcctctatgtcggctcagcccgcgcgctgcgcgtagcccgagcggccggcgggcgggcgcccggcgcgggtgagcgagcggagggcgagtgtgtgcgcgcgccgtggcccatgcccgccgcccccggcgctgcgccccgcgc

SEQ ID NO: 8209 - DNA, 449 bp, Homo sapiens
  source 1..449: mol_type = other DNA
gatctcttattttcaaataattgattattctaggttaatgaattaaacctaataatagtcagagtcctaagattagtcagttacctgaataagtcatctgattcagcccagaatcagtaatgaacaactgcaagttcatttcagcaagtcagagctgtaaatggctagaagatagttacggaatagatagctttgtataaagaacaatccagactcttgttattttattatacagagaatatatttgctagcagacaaaagcattatatagcccacaaaatacactgtgttgattataagaatactaaatagataaatctgtgactgtttgttcattcttccatccatcaaacaagctataatagaggtgctatgagtctttcacttttaaatcagttcaatttgcaacataaaggcacagtgaatgaatgttaccctacttaggacaa

SEQ ID NO: 8210 - DNA, 401 bp, Homo sapiens
  source 1..401: mol_type = other DNA
cactgtgatcattcagtcattcaataagtatttattgtctactttgtggacattaaaaagacaagattatgtcactaccatataccttagagagtctgagatctcctctctgacctcagaggagagggaactcagctctagtttagcctaattcattaaattaacagttttggactaaataaatgctctgagagtactatctaaaaattaccttgaaatacctttcaaacctgtttctggaaaaaacatatgataacgagaaaacttttgtcattaggatgctaatattaacttcctattttacatgtcctaattcaaaggtaaatttaatcttccgaaggcagccttcacaaggaagggcgacccagggcccgcgccccgcccgtttccgggttgtcgcc

SEQ ID NO: 8211 - DNA, 61 bp, Homo sapiens
  source 1..61: mol_type = other DNA
ggtacactacagcaatagctattggtttttctagtcaagttaggtctaataaaagtaacac

SEQ ID NO: 8212 - DNA, 594 bp, Homo sapiens
  source 1..594: mol_type = other DNA
agccttcaggcagctgaaacacagaccctcccttcagcgaaaagtgtatgtgtgttttagcagtttaaaaaaaaaattctactagagaggaaagaatgacacaattttcttcgtcacaggaaagtgggcctggggtcacctcgtccccatgggttctatggaaacgagagacgcggggggcctagcgccttccaggcggcgggccgagcggcagagctgcgcgtggctcagcccagtactgcagaggggcgctcggtggcagtccccgcagcggcacgggcgaagcgtcgcggggtctgcagctgcagcccaccaactccggcgccgagcgcgaagtcgggagagctggaacgaactgcagctggagaaagcgcgagagccagacaccgctgccgctcaccccagccgcttccttcctagcctcacagccgggaggcagaaacttcggaggtaccgcccggacagaatacactgtgtcggatgcttccttcggtggcagcggcggcaggggcgacgactgccgctgcagcactcaactgccgggctctgggaaacaatttcccgccgcgcgctaggcagccccggaagcgatag

SEQ ID NO: 8213 - DNA, 467 bp, Homo sapiens
  source 1..467: mol_type = other DNA
taaccattactaaaattaatgtttctttacttttttaatgtgactactaaaatattttaaattacatatatgcttcaccttatatgtctatttaactagacttttctccaagcatctatgtctatatttattgactgaggtatctaaatataataattcaatatttgatcaagcttaatacaggtaaaattgccacatttactagaggagttgtatcattagtcatgttcctttagaagggctatttccattctctacttagtgaaggagagcatgccacttcttgcatgttaaaatggaatttttttctacacattgtttttatacttctcacatccttaataacattaaattaattcactgcagagaacaagcagaatagttttctttgtgctaacagttttgcaatgggaaactcttcccttactgtcatatcctgtgaatctaaagctacgttatttaaacat

SEQ ID NO: 8214 - DNA, 633 bp, Homo sapiens
  source 1..633: mol_type = other DNA
ctcagtgtggacgatcggcgcccccacgagacccatcgagggccgatcgccagcgcggccagcggccagcgcacagcgagctgcctgggcaactgtggccggatcctagggagcaagctggcttcgggccctacctagctcccccggctcctaccggccctcccacctaggagctggaggatggtcccggggcgccccagggggactgctggtccccggagtctccagccagacgcgccttgttgtgtgagccgcgtgcgcgcccaatttggaggcagccgcccccgccgctgacaggtgctgcccagagggcgccgggtgcggtccctggcgcagctggacgcgcacgccccggtgcgtgcagcttcccgagctcggtcagagagagccaggctcgccccgcggagcttttgcaggcgccgcggccgggattcggttacggctccagcccaccccagcaggtgcgggaggaagaggcagcgccggagtcccgaggccagagagcctcggcggcggcggccgcttctttcccccgagcgggcactcccggtttctgctgctgcgcccgccgccgccgccgccgccaccgccagcgccgcggggacccgggaggaggtgcagatggagccccgg

SEQ ID NO: 8215 - DNA, 316 bp, Homo sapiens
  source 1..316: mol_type = other DNA
attaatgggtatatacccaaaggactataaatcattctactataaagacacatgcacacgtatgtttattgcagcacatgagttcatgtccctttgcagggacatggatgaagctggaattctcactcacaagtgggagacctacgtaacaaacctgcatgttctgcacgtgtatgacttaaagtataatttaaaaaaaatacattcctgattattttagagctgtctgatcctaaaaaagtttctaaaggtcttatagaagtatctgtaaagaaatgctcttctagagcagcactgcaaaaattggttaccagat

SEQ ID NO: 8216 - DNA, 372 bp, Homo sapiens
  source 1..372: mol_type = other DNA
tcatttgaaacctgggtaataaaaataaactttcttcacttttaaaaaaaaagatctgcaaagatgttttcagtgtttcactagtgtgagtacacggctcacataaaatgttctgctccccaaagcctgcagcacaggcggcggcggtgaggtcgccgatccccagcggggcgcccctcccctgcctctctccgcctctgctcccctgctccgggggccagtaccgccagcgccaaggacacccacagcagtagcatcgccggtagcggttctgagagcctgccgccgggccagccgcctccctctggcgttctctccctagcagagcagggcagggacagcgacaaaaagcttgcagtttggttgcgtgaa

SEQ ID NO: 8217 - DNA, 353 bp, Homo sapiens
  source 1..353: mol_type = other DNA
gagtattaaataaacaaatctgttccttactacaattatcttaggcaaaaaaaaacctgccagatattagtattcagttgacttaagtaagtagtataactcctcttttaactgtcagaatattaaaactactagtgtgatgtgcaaattatatacccgaaactagatacagaaattggaatttaaagagaccggtttttattctgcagcaaaacaatgatattgaaggcaaggaacagctatgctttgtctggcattcacggcgcacctgaggcggtccacccagaggccgccgcgccgcccccaaaatgaacagccccggcgcagatgctcctcttctacaaacgttcacg

SEQ ID NO: 8218 - DNA, 444 bp, Homo sapiens
  source 1..444: mol_type = other DNA
aaaattgcaaagttcataatatgaaagtgcactattgtttcttttgatttttcgagaaaaagtttatgtacatacctgcatgtttgtatttcaaaaaataattgtttacattaaagagaggacaccatatatagtattctacgctttgcctttaatattcattacatgagtatacagtacacagctacgaagtaattcacatgtctgtctacttcacagcaataaacattttttttttttttgagataggctggagtgcaacggcgcttctgcaaatatttttatagggtaaataactgaatgatttgaattgtaatgagatctgctatccacatttgtcaagtacacgagagagatctcaatgccatagaggcggtcccgggggcgggccttcttgggtcacgtggacggcctcgccccgcccccgtcgaggcgccgcgcacg

SEQ ID NO: 8219 - DNA, 462 bp, Homo sapiens
  source 1..462: mol_type = other DNA
catgtttgtatttcaaaaaataattgtttacattaaagagaggacaccatatatagtattctacgctttgcctttaatattcattacatgagtatacagtacacagctacgaagtaattcacatgtctgtctacttcacagcaataaacattttttttttttttgagataggctggagtgcaacggcgcttctgcaaatatttttatagggtaaataactgaatgatttgaattgtaatgagatctgctatccacatttgtcaagtacacgagagagatctcaatgccatagaggcggtcccgggggcgggccttcttgggtcacgtggacggcctcgccccgcccccgtcgaggcgccgcgcacgtctggagctctggctcgtgcagtagcgtcacgcgacagtaagttctgttctcgccgcgcagggggcgggctggcgggaccagctgcttccggctgg

SEQ ID NO: 8220 - DNA, 568 bp, Homo sapiens
  source 1..568: mol_type = other DNA
atggcatttgtgccatgaaagctctaaagtatagaagctgctccagggcttccgcagccccggccgtcctggagatactcgcctcctggagtctgtgtcgagaatttgcagcacctggacagccacgtgcagtctatgcaaacacaacttgaagttaggcatagctggaggtgccagctaacgcgctgtgagcgtttctaaacatttgacatgtgttaaagcatttatccaggtctagctcactcgtgatcacaattcaacatcatacgatggtgctgatttccagagcagctctgtgactttatataaaattattttttttaattcaggaccatctttggtgacaaatataaatatcaatactatatatatcaccaatatacatatttgctttgctaaaaggttgcaagcctcatgtttttataaaaacgtgggtgctactattatattcaaaggtatctgttattagccattcagagagataccaaaacatttctcttccctgcatgtaaaagcaagggtgtcatacttgagataagcattctgataatgtgtaggcaaagtttcc

SEQ ID NO: 8221 - DNA, 375 bp, Homo sapiens
  source 1..375: mol_type = other DNA
actttcagcagccgtggctttatgcttaatttctcctagctaacacggtgtcccagctactcgggacgccactgcactccagcctggaactatatatatataaaactaggcagtcaatcaatggtatcaagttcttcccatatttgatcgggggaactaatggtaattctgatttggcatcatatataaagcatttcttttaaagcacatgccattttttttcaaagggaccttttgttctcagatgatccattatttgtggtatcactgcagaatttgggacaaatttcaacttatatcatagaactccttagtgtactttattactcactgccagagtgatgtcagaagattctgtagcaggttctcgctatt

SEQ ID NO: 8222 - DNA, 586 bp, Homo sapiens
  source 1..586: mol_type = other DNA
tcaatgaccatttaaaaatatattaatggtttaatcacaacaaaaagttctctgattttcaactttttcagttttatgtacagaactaagtgattaaaatttttctttaaaaattcagtaaagtatgaagtacactcctctaatataactttataaaaagaaaatgaattgagtttaaacccaactctataatgattataaactagattaaattttactgtaatgtaatagttacccagttttttacttcaatatgaaaagccttttcattttcaatgattattttacagctaataactgtcaagaaaaaaagagttggtcaaaatctatctcaacagaattatatctctagtgttttttgatattccaaaaggatttagctatctccttacttttctgtttctgtaaggaaagtaaagggacaaaatgttacctataatgttttggggttcaacaattcctaaaacaacccatgtcccagacctttttttagactggtttgtaacagatcctttaatggcccacttgagtccatcaagctatgaagtcttcccatatggtttggatttgtgtccccacccaaatc

SEQ ID NO: 8223 - DNA, 421 bp, Homo sapiens
  source 1..421: mol_type = other DNA
atgttgaatcaccacaagtcatttgattcagtaaaacccctaaactttaggataattttatttgttatcttaatagtaactagaacaaacagggaatgccttttccatgttcttatcaatgtttaaagttttcttcatatagatctcatgcattattactgtaagtgaaatatattcttgggtgttgtttacatatatagattatgcatgcatacatttgttcccagacaatttacttaatttttcttggttttcctgttgattctcccactcccagcaaaaacaaaaacccatgtcccagacctttttttagactggtttgtaacagatcctttaatggcccacttgagtccatcaagctatgaagtcttccatatggtttggatttgtgtccccacccaaatctccacaaatgggtgga

SEQ ID NO: 8224 - DNA, 408 bp, Homo sapiens
  source 1..408: mol_type = other DNA
cccataataaaaagctgttgccctagtttttttgctgactggttagaattttaatactgtatggagggatattcatagcctttacttcagtgcattattatgaaagaatctaaagtatctttgcattaaactggcatttaactttaaaaatcccagcatttaaaatcctgaagttttcggtaaaatacgctaaatatagcttgaaatagtaaataatcccattagcaaattaattggtgtgtgaacaaagaactctttctgcagcagcatgaatgttgcctttattttttctcacaagtatgattttagaaaacagctgtacgggctggaatcccttccggagtgagcgggggccccatcgccccaccccccgctctggggcgttgtatttattaatttatattccgc

SEQ ID NO: 8225 - DNA, 538 bp, Homo sapiens
  source 1..538: mol_type = other DNA
agaattttaatactgtatgggatattcatagcctttacttcagtgcattattatgaaagaatctaaagtatctttgcattaaactggcatttaactttaaaaatcccagcatttaaaatcctgaagttttcggtaaaatacgctaaatatagcttgaaatagtaaataatcccattagcaaattaattggtgtgtgaacaaagaactctttctgcagcagcatgaatgttgcctttattttttctcacaagtatgattttagaaaacagctgtacgggctggaatcccttccggagtgagcgggggccccatcgccccaccccccgctctggggcgttgtatttattaatttatattccgcggcgccccgcgcgggcggctcctttgtgtccagccgccgccaccggagctcccggggcctccgcggggagcgcgtcccccgcatccgcccgacccccggggctggcacgtgctgcgcccggtccgctgagggggcggaggccccgatctccccgaccccccttctctgcttagagga

SEQ ID NO: 8226 - DNA, 590 bp, Homo sapiens
  source 1..590: mol_type = other DNA
tgttacaacccgtgtcttataacacttgaagtgaatgtggtgtctgagttacaacactacccagaaaaaaagattctcatttcatctgtagttttgtagccggtgtctcaggcatgggcctgtcgttgggacctgtggcaaaccaaagcggggcaacagctgtcagccccagcagcttccactaaaagcttttcagagagaagttttaagtccgaattgttttgtgagacctccagatttttaaatactgagaatgaattccataaaatgctgtgagagcaaccttcatgaggagtgcaaagtcacagtttcaatttcacttcttctaaagtctgtttgcattttaaaatacaactgtatctcctagagggaaaacaagaatttgctctaagaagtcactgccagcactttatgcttccccagaggtgactaaactctgatcattgccaatgggcaggcactccccaaatgtccaaggacaacgatacccagagtgtctttcatagctaccaatgattaaatagcaagtattgcattcctgggcattgctaactagtgaagtcctccagggaggttccttattaaatagg

SEQ ID NO: 8227 - DNA, 517 bp, Homo sapiens
  source 1..517: mol_type = other DNA
tttcaccataaaacttcctggggaaaggatgattcacgtttaaaggacatagtttttccttgatttgtttatttaagctgttacaacccgtgtcttataacacttgaagtgaatgtggtgtctgagttacaacactacccagaaaaaaagattctcatttcatctgtagttttgtagccggtgtctcaggcatgggcctgtcgttgggacctgtggcaaaccaaagcggggcaacagctgtcagccccagcagcttccactaaaagcttttcagagagaagttttaagtccgaattgttttgtgagacctccagatttttaaatactgagaatgaattccataaaatgctgtgagagcaaccttcatgaggagtgcaaagtcacagtttcaatttcacttcttctaaagtctgtttgcattttaaaatacaactgtatctcctagagggaaaacaagaatttgctctaagaagtcactgccagcactttatgcttccccagaggtgactaaactctg

SEQ ID NO: 8228 - DNA, 423 bp, Homo sapiens
  source 1..423: mol_type = other DNA
ctcaaactgaattagagaatgagaattgtcgaggtttcttttaatttagatcgtgactcctacatctaagagtcgactacttgctcaactacagtactaggagttttgaggagcagctctcagccgtcggggaacatcacggccatagtggaggtggagatcctcctctccaaaggtaaccagaccaggcaacctggacttccaattagcaggggagtccccaagccagcctggccaatctcggccggctagccaagacgaccagacgtgacgtcagacatgattaagttggcgcgtcacctagacgtcagcctcttacctctcggacgtcccgtcccaggagcaaaactctagtgactttgggcccgcccccgtgagagtggagggcggccagacgagcccggggcggggcgcggggccgga

SEQ ID NO: 8229 - DNA, 567 bp, Homo sapiens
  source 1..567: mol_type = other DNA
acagtgtgtcccctgaacgtggagcgcctgtgtccccaagtccctgggaatacaaggtcacgcggagcgcctgtgtcctggggcagctggtgcccgctccttccccgccgagggtagcgtggtcgggccgtcggaaagtcccgcagcggcagcgcagccgacccagggctgcggctgcctcggccccgccgccaggggccgcccgactgcccgcttccccaacgcccaggctagcccgggaccgcggcgtcagccaccctgcccggccctgccctgcctggccgctgcgggcgctgacggtagcagctgccagccacggctccgccggccccgcacccgggcgcggccaggccgtgaggggtgcgctctgcctctctgagcccagcctgccggccggcccgctcacctagccgtccgcacgaaaactccccggggtgccgccgccgccgccgctccggctctagcctccactgcggccgcggctgcttgggcttctgcagccgccgccactgctagggctccggccccgcgccccgccccgggctcgtctggccgccctccactctc

SEQ ID NO: 8230 - DNA, 378 bp, Homo sapiens
  source 1..378: mol_type = other DNA
tctgaaagggactccagattaggctccctcttttagccgcctacacaggaagcatcctgtggatggaatggaaagtatgccaggcactcaaactgaattagagaatgagaattgtcgaggtttcttttaatttagatcgtgactcctacatctaagagtcgactacttgctcaactacagtactaggagttttgaggagcagctctcagccgtcggggaacatcacggccatagtggaggtggagatcctcctctccaaaggtaaccagaccaggcaacctggacttccaattagcaggggagtccccaagccagcctggccaatctcggccggctagccaagacgaccagacgtgacgtcagacatgattaagttgg

SEQ ID NO: 8231 - DNA, 338 bp, Homo sapiens
  source 1..338: mol_type = other DNA
attttagaaagacgactttataataatttttatgctgttctttctgtatatgtgttattttcacaataaacatgattttaaaaaaagaagagctgattttgtctgcagtagatgggtttagactcaaaatgtgagacaagatgcagttattttcctttttgggtctcatttatttatttgtaaaaatatgggcaataacacctcctggcattatgtatgttatattcccagcatatagtactcaagtaaatatagttcttattaattttaatgatgaaaggagtctcctcagggaacttccagggatcgtgtagaacttatattaaatattgtcagct

SEQ ID NO: 8232 - DNA, 473 bp, Homo sapiens
  source 1..473: mol_type = other DNA
tcaaagcatatgtatatatataatatacatatataatatatacatataaataatatatattaatgtgccaagcattattatatgtatataatatacatatatataataatatacatacatatatatatataaacttttgtgaccttatctgccaggcataacatatcaaaggtgatattcattttaaattttattttatagacttttatcaccatctaaaataccacatgactttcttattgatttttaaaagagactggaatgtaagcttcaatatataaaatagtgcttggcacattaatttgttgaataaatgatgcttatattcttaagattaagcacagtgtatggcacagaataggcacataataaattttgtttttgttgttgtccctggctgctaggactattaaataggacagtcttgagcttgcattcattttgatgaaaaaaaaaaaaagcaacccttgctt

SEQ ID NO: 8233 - DNA, 354 bp, Homo sapiens
  source 1..354: mol_type = other DNA
ctgcccaggctggagtgcagtggttgcaatcttagctcactgcaacctcaggttcaagcatttcttgtgcctcagcctcctgagtcctggctctaaatgcatttttgaacaatttcttttttacaaatacaactttcactgatcatatcaatttcatatcattttacctttgctccatagtaaataagtgtgaaaatctaaggctgtgcactttattgtattaccaggtaaattcataagtccttgggggtgaaatccatggcaatgatttcatccttgagattatttagaagaataggaagcatgttccttgaaaatgtttcttagcaaacacattttgttagaaacaaaagt

SEQ ID NO: 8234 - DNA, 460 bp, Homo sapiens
  source 1..460: mol_type = other DNA
ggtggagaattccatttttccacaaagaggcattgtgcattttatgggaaccagctcagcaccagagctctagtaaataaaaactgctctttccctccctgaatccacaacagcttttgggatcctagatccccttgttgacgaattcttaaaaatatgtttttttaaaatcacatgattaatcattttactgataaacatcggagtataactactgatattgttttacgcttgaatggttaaaaattcatttttaatagtattgctttaacatagacatgctaattttctcagacaatttagaacagaattgggacaaaagaaagagccttgttcttcatgcccaaagggccattataagaatccggaagggagggaaagcactcccagcctttgatcttctctttgaaaagtgaaaatgtttctcacgggccccgccgggaataccattcggatctta

SEQ ID NO: 8235 - DNA, 324 bp, Homo sapiens
  source 1..324: mol_type = other DNA
cagaattctgttctgccaggctccatatagcatgacaaacagtctgaccaacgtggtgacgcgcctgtagtcccaagtgagattgcagcgagcagagatcgcgccaaaaaaaaaaaaaaggctctgccttctctctcttgtaacaaacaggttttctgtcaggcctgattgtgaaccagcagcaactgcaggctaaagtttattaaaattcgagcgtgcacgcacgcacacacacacagaccaatttgtttttgtgtccaggtgggcagatttgagttggtagaaagagtatctacttctcagggtcgaagcgtagactggcca

SEQ ID NO: 8236 - DNA, 418 bp, Homo sapiens
  source 1..418: mol_type = other DNA
aaaaaaaaaaaaaggctctgccttctctctcttgtaacaaacaggttttctgtcaggcctgattgtgaaccagcagcaactgcaggctaaagtttattaaaattcgagcgtgcacgcacgcacacacacacagaccaatttgtttttgtgtccaggtgggcagatttgagttggtagaaagagtatctacttctcagggtcgaagcgtagactggccacgcccgggtcccgctctcgttgcgggccgggaccagagcagtgctggggccggggcgggtcaccgggtgaggacccagggcaggagcccgggtccctccgcgggcaggaaggggagggcccatcggggctaggggaaccccggcgcagacctggggtggggtcggaaaagctgtttcatcgcccgctccctggcaggact

SEQ ID NO: 8237 - DNA, 653 bp, Homo sapiens
  source 1..653: mol_type = other DNA
gaaatgttagaatcttaaagttggaagggctcttatttcactagatttttgacagaaataaaagacaaaaagtaccttgaaaggtacatcagagggccctaactgggtacaaagctgtatggcatgactcgacacagcactgtccaactgtcctgaggtctgtgttcctcaaacagtgaagttcagggttcagagccttcatttattttaaaattttttataattattttctctaactcttatcattcaatatttattagttctatatgaaagagtggcttaacccctctatttattcattcatttatttacagcagtatagactcatgaatttatattgtattcaatagcttcaaatctattctaattttgaagtttgtaatatactataatataaagtaatcgggtagaattcttactgttaaactactctttaaagaaatccattacacagttttaactgcatttgcaaatccgggtgatgttcagccggcggtgcgcagcccacacagcacgtggtccgcatcacaggctgcgttagccagtctccagccaggcacggagcgggacctccctccccacgcatcccgggctcccggggcggggccgccgggcaggggggcggggagcatcctgcgtcgccttcccgggac

SEQ ID NO: 8238 - DNA, 417 bp, Homo sapiens
  source 1..417: mol_type = other DNA
gaaaggtatctttgaggcctacaaaatcaggtctcgttttaacccacaacgggcaatacattttgccgatcttaaggattaattctaccttctcaacatcatcaaattaatatttgtttcagaaaaaggaagagggcctcctgcagactcttcggtgagtttacatacatgtcttctgatctaaattaatagttttatattttggattatgacttaactcatctccaaatcaaatggagtttttaggatagaatattatgcatgttcataataatagaatgagaatgtaactcctttataatactcaatgagtagccactctcttcaaaacatacactttgatctaagttgtttcattaacacacctcatttggtagcaagggaattggaaaagtgcattcttcatttgctgcctgt

SEQ ID NO: 8239 - DNA, 180 bp, Homo sapiens
  source 1..180: mol_type = other DNA
aaaggggaggcatgaataatttcccccgctttccaaaaaaggccattttattcacatttacttggcccgtagtgcaggaaagtcctggcggcacgccaagagctctcagcccactggcagtggcgagatgacggacacccagcgagtccaatgggcgtcgaacgcgtctaggcttggtgg

SEQ ID NO: 8240 - DNA, 213 bp, Homo sapiens
  source 1..213: mol_type = other DNA
tccaaaaaaggccattttattcacatttacttggcccgtagtgcaggaaagtcctggcggcacgccaagagctctcagcccactggcagtggcgagatgacggacacccagcgagtccaatgggcgtcgaacgcgtctaggcttggtggcgccttagccaggggcttccccgcctgccgctagggctcgggccgaagcgccgctcagcgccag

SEQ ID NO: 8241 - DNA, 220 bp, Homo sapiens
  source 1..220: mol_type = other DNA
ctacactcccaggaggttagacattctaagtcacagaatgaaaggggaggcatgaataatttcccccgctttccaaaaaaggccattttattcacatttacttggcccgtagtgcaggaaagtcctggcggcacgccaagagctctcagcccactggcagtggcgagatgacggacacccagcgagtccaatgggcgtcgaacgcgtctaggcttggtgg

SEQ ID NO: 8242 - DNA, 129 bp, Homo sapiens
  source 1..129: mol_type = other DNA
aaggatgccccagctacttgagccagtgagctgggatggcaccactgcactccagggtgataactatatggttcaatcctagaaaacactattggtccatcaggctgttggaattacaatcttttctgt

SEQ ID NO: 8243 - DNA, 239 bp, Homo sapiens
  source 1..239: mol_type = other DNA
taactatatggttcaatcctagaaaacactattggtccatcaggctgttggaattacaatcttttctgttctgagaataatcacctctgataaagatcacagaagctgcccgggaggctttaccctgggaagtggcagccactggcgttatttgtgcattctacaaaaagtttcttgtcctttttgaaataaagtgaaccagctagtacttactgtactcgaagcatgcaaagttctga

SEQ ID NO: 8244 - DNA, 321 bp, Homo sapiens
  source 1..321: mol_type = other DNA
ccccaaaaagaactagtcgtggttttttattaggggcaaagcatatcatgtgtaggctatgcaggtcagcattacctggttagtatgaatcaattcaggctggagcagccttctgggcccaagctggaattctttaagtaaaaggcatggtttaaacattaaggggtgaggtgaagctaagccccatttcatgattggtctacaaatgtacaaaatatagttttggtaaatgagacctaaggagaattctaatggggaatttctgagaagggtttcccctagaaagagacacggaagagtaagttccttcttcctcccctg

SEQ ID NO: 8245 - DNA, 422 bp, Homo sapiens
  source 1..422: mol_type = other DNA
ggagatagctgggattacaggtgtgaagaaatcatttgtctctttgtcaaagaaatctcaaaaagacataatgatccacctatattcgctagtgcatttttttttatcacgtctctgcagagttgggatatgtaaaacaaaacacaaggtaacatgtttcacacttaaaagcatgatttaacaagctgcagtgttttaaatatcagaagagcgtcttatttaagcaatacaatgtgtgaagtatgttaacaaaatctagcttactatataatatctgaactgggatacagctctgaggtatcatatgatactctgtactgatcaaacacatcattcagtatggagtcatccttcacttattcatgcaaaaattatttattgtatacttatgccctcacaaagcttgcattcttgagaaggga

SEQ ID NO: 8246 - DNA, 328 bp, Homo sapiens
  source 1..328: mol_type = other DNA
agctctgaggtatcatatgatactctgtactgatcaaacacatcattcagtatggagtcatccttcacttattcatgcaaaaattatttattgtatacttatgccctcacaaagcttgcattcttgagaagggacttctttgcagaggtgacatttgagttcttgattctaagtgcagttggtatccactggaagtttcaaataacaacaggcagtttaaaatacaatattgtacttcgatttgacttcttcgaaacctagtttgaaagcctcagagcgtgtgacagttggcaggcgcagtgaggcgcagcccgagccaagtcaatgc

SEQ ID NO: 8247 - DNA, 473 bp, Homo sapiens
  source 1..473: mol_type = other DNA
attctaagtgcagttggtatccactggaagtttcaaataacaacaggcagtttaaaatacaatattgtacttcgatttgacttcttcgaaacctagtttgaaagcctcagagcgtgtgacagttggcaggcgcagtgaggcgcagcccgagccaagtcaatgcgggagggcggcggcctctgcaagcggttcccgacgagcctcctcggggcttatggggcccctggcggttcggcctcggaggctagcggggctgcccgatttggctcgggcctagcgccgcggagccttgctgcgggccccagtggtagcacccccgggaaccgcagtcggaacaggcgggccttctgcccacatcctgcggcgcccgcgacccgggccgggcgatccggcgccgggtttaggccgcaaggcagccgccagccccgggactggaccccagggcgccctcggccctgcgaggtccccgccct

SEQ ID NO: 8248 - DNA, 534 bp, Homo sapiens
  source 1..534: mol_type = other DNA
tcgggcctagcgccgcggagccttgctgcgggccccagtggtagcacccccgggaaccgcagtcggaacaggcgggccttctgcccacatcctgcggcgcccgcgacccgggccgggcgatccggcgccgggtttaggccgcaaggcagccgccagccccgggactggaccccagggcgccctcggccctgcgaggtccccgccctcctcctgaggcactctgatgcgggcgggcatgagcagtgatccctccccagggaaccagcggcgaggcctcgtctacatcaccccgatttaattcgcagcggggcactgactttacagactgaacaccgttcccggccggggagagcgccgcagccgggtccacttcaggtaggggctgggctttcccggccccgcctaggccccgcccccagcgcgaacccgctcacctcgcctgtccacggagcagcagggggtttgcagctgccacgaaaacccggaacggcggagcggcgccgcccctcgcggcacctccctggcagcccttgg

SEQ ID NO: 8249 - DNA, 410 bp, Homo sapiens
  source 1..410: mol_type = other DNA
ctggaaatttgcttgagtccagggctcaagcccctcacttgagtcaaggctgcggtgagttatgatcacgccactgcactccagagaaaatacatatatgtttcttaaggtagttattgaaagatttttttaaaaaattgagacagggtcttactttgtcaccaacacaatctgggctcactgcagcctcgactttgctggtctggaactcttgggctcaagcgatctgcccgcatagcactcctttaccaaagaagaattacactgaaaatttagatttatagggattatactgttacttgtcattcaggaaatttcctggagaaataaccttcctgattccatattcctggggggcacagcattcagacaaaatctggttggagaggaaagctgttttcaagcttccc

SEQ ID NO: 8250 - DNA, 371 bp, Homo sapiens
  source 1..371: mol_type = other DNA
atcgcgcccctgtacttcagtctgggtgacagagccgggctctgtctcaaaaataaaaaaaaaattcatttctatgccttcttatgtaagtacagaaagaaaaattccgtttaaatggagatgttcattggttgaagatggttaatcaaagacatgctgcattcggaggtaaggacgtctccggagctgccggagcagagagtagaagttgtttgcgggaaaaatttgctcctcccattaaataaaacgttcacttgttacatactatgtgtttcataagacatacaagtagttttattttcctatatcaatgagaacagcacttctaactagcgcgtgcgcgagccatctggcgctgtaaagcgcttaga

SEQ ID NO: 8251 - DNA, 474 bp, Homo sapiens
  source 1..474: mol_type = other DNA
acatcctctgggctggctcacttgtctttgtgaagggaaaagaaaaacacaagagactagcctttagtttctaaatcaaagctgtgctttggtggcttttcaaaagcaaaacaagtggggacattaaaattccttgcttttgtctttttaaattctcagatgcaaaagggtatttcaatgtgtcttacatttaccttgaaacaatctcagtatgtttttttccatttgactggcgaaagagaaggatatgtaaattttactaattaatgcctcttacagtcaggactctatgctgcctctagcgttagccggagaaactgttcttgcctaaggaggcaagaagtgacctccctgagtcaggatacttgagcatgacttgactaagagaagtagcccgctagttccaggcgttgaacgcgccaattagctctactttggaagatcaatgtaaggtagaaagttaatccctttctt

SEQ ID NO: 8252 - DNA, 468 bp, Homo sapiens
  source 1..468: mol_type = other DNA
ttcttgcctaaggaggcaagaagtgacctccctgagtcaggatacttgagcatgacttgactaagagaagtagcccgctagttccaggcgttgaacgcgccaattagctctactttggaagatcaatgtaaggtagaaagttaatccctttcttcactggcaccttaggtggtcaggtcggcgaaagtccagcggggctgccggcgggcagcggcagcgcatctggcgccttggccggggcgcggagtgggaacagcccgcacgcgtccgctgccgccctgcctggcgacgagtggcacaatcgcccaccaggaatcggctggtgccgcgggtgggcgaaggcagcgccgccggcccggagggcggcgcggagggtggcgctggcacctggacgcgggggtctgcggcgcccctacgcccccacgcccccagccgtcccaggccggagccggatagcgccggcagggg

SEQ ID NO: 8253 - DNA, 415 bp, Homo sapiens
  source 1..415: mol_type = other DNA
tctactttggaagatcaatgtaaggtagaaagttaatccctttcttcactggcaccttaggtggtcaggtcggcgaaagtccagcggggctgccggcgggcagcggcagcgcatctggcgccttggccggggcgcggagtgggaacagcccgcacgcgtccgctgccgccctgcctggcgacgagtggcacaatcgcccaccaggaatcggctggtgccgcgggtgggcgaaggcagcgccgccggcccggagggcggcgcggagggtggcgctggcacctggacgcgggggtctgcggcgcccctacgcccccacgcccccagccgtcccaggccggagccggatagcgccggcaggggctgcggggggctgagggatttggctccccgccctctcccctagatggcggagaaa

SEQ ID NO: 8254 - DNA, 548 bp, Homo sapiens
  source 1..548: mol_type = other DNA
ttaaggatattaacataaagcttaatatgaaaaattagcactcagttcagaaatgacgacttcagaaatgacttcagaaatgacgatttgtatgatcttttcattcctcacaacccagtattaaaactatctaatattgcaaaggatggtagtgtattcaacaaaaaggaatacacccttcaatatgtagtaaatacatatgtggagttatgttttgagatttttttgaaggatttgaaccaaactgtttaaacagctgaatatttcccacaagggaaaaataattatttggggaatgtatgttaccatgggattagaaacttttaattattattaacctcggccaccgggcgccgtggctcacgccctcgagctgatgaaaaaaataaagtgtaacagaattttgatttaaaaaacgctttcaaaaaagcatttcaaaatgctctaagtatgtttcaaaaatacacttaaaaatatgtttccaaagttacgatacaaactgtaagctaaaaggcagcaacttaagctgagacagttactaacagggt

SEQ ID NO: 8255 - DNA, 363 bp, Homo sapiens
  source 1..363: mol_type = other DNA
atttcaaaggcatgatggctttccatacccttgagatagttttcaattatataactggccagaagctttaaaaaatatttacgaaataacttacaatggtaaagttttctaaagtaattttttttaatatactttaagttctagggtatatgtgcacaacgtgcaggtttgttacatatgtatacatgtgccatgttccccggtgtcctacaaaggacatgaactcattacaagcaaatgctgcttaaatgacaccaatgaattcagattatgagtttccaatctctcacgtcctcgctttttacacaagtgcgcgtgcgcactgggcgctaggccttagcagcagtggccgctgagatgtac

SEQ ID NO: 8256 - DNA, 251 bp, Homo sapiens
  source 1..251: mol_type = other DNA
atatatataattaaaagagaggtccaggtctccaccacataaagcattcctctggcgggacggcgaggtgccctctcacctagcttggagctcccaggtccagagagctggtgtgcatatgtatgtatgtgtgtatgtatgtatatgtgtatgtgcgcgagctcgcaggcgcgtagcactgtgagcttcctctcccggcacagagcaggcagagccggggacgtccaagcagcctccgcccctggtgaagc

SEQ ID NO: 8257 - DNA, 662 bp, Homo sapiens
  source 1..662: mol_type = other DNA
gccttaccctaatattatgaataataggtctgaaaaacaatcctcatagtatcgatcagattgtatgattaaagctgtaactcaataccaagtttcattaatagtttcaaagacatgttatataatgtcttttctttctagatcaaacatggtctgggttagatggatatattagccatcaaatatcatctttgaatcagatagttgcaaaatttatgtgatattcttcagtgaactaaatcacaataatccatttattccaggcttacttgccatagcatgctagacaggtacattctgtgaaagcatttaatagataaggacttttctgctaccaaaaacaaattagtttgaatgtggagagatgcattattaatatactcaaaagagattagataaaataaactaccttatttcttctaactgaagacagaagacttaccttctcaatattaaaaagaataggaaatctaagaaaaaattcattatggtatcaaaattcaggagaaaataatataaatatatttatgtagaaaacccactttgctagttcaatatacatatttttactcagttaaaaatacttttcaacaatatgtggagtgcagtggcgtcggctcacttcagcctccggagtagctgggactacaggcgcccgccac

SEQ ID NO: 8258 - DNA, 529 bp, Homo sapiens
  source 1..529: mol_type = other DNA
ttgtcatcactgtatatcttacatatgcaatatacagcagagagacaatttctggtccttcagtttcggagaaggaaaagcaaagcagtggttatgcttccctttacatagggcatacccaaagtaaccaatggaatcctctagggggtatttaaactccccaaaatagaacctggacaccttctaccagtaacaggatgacaggcaagagtcttatcaagatgctcatgatacctctgacgtcttgattcttggagtccaagcctagactgctttggtaagcagcaaaggcaagatagtttcctgaacaatctcctgatgcaactagcttatggccagagactcccacagtctctgtgtgttcccagtgaggcggactccggtcgaaggctgtggggtgagaactctcgccccctctactcggccgccgccgggtggcacgcccacgccgcgccttccggttggtccttgaggcgacgggtgaggcacagctgagcgccaaagccacaggctggggcgctaacgcccc

SEQ ID NO: 8259 - DNA, 510 bp, Homo sapiens
  source 1..510: mol_type = other DNA
atttccctggtctaccaggccagcactattggagcagcacaaaatcttgttgaagagctaaattgtttttggcaacacaatgtctaatccataggagagaagatagtgccatctctcctggataagaagttgcattttcattaaaaaaagaaagccacgtttcattctttctcttcaataaagtttttatacctgaaaaaataaaagatgcaataatttctatgtgtaaaacacttcacttaaggacattcagtcggacatagtgagatttttcagttggaaagccaccataataatcaaaatctagttttagcttttttttttccttccgcacgtggaagaaaagaaggaaaacagctttggaagttctcaaccgtcaacccccgggaggacgtttgcctcctgccctaggagaaacgttcgctctggaggcttgggcggcaagagccccttgtggccaccgagtcctccgacgccctcgccaggctggcctttgggttggcccaggca

SEQ ID NO: 8260 - DNA, 379 bp, Homo sapiens
  source 1..379: mol_type = other DNA
ttgtgaattatacagttttaatttatgccttcagactaaaatttgcaggtttgataacatagttttaaatatattcagtcaaaatatgaatattttcaagtttaacctagttgagtattaatgtgacgttcttgatcataacctttgaagataaaactccaaacttaggaaaggatatcttttggaaggcatgccttatgagtacaaaattattattttgcttatgagatgcaggatttttaaatggttttaaaataattctgagaatccttgtagctctgtgatgcatgtatataagcatgcctttgttctcaaaagtctacaccggctctacaggggctgcgccggcattttccccaggcttgggcgcaaccttgtg

SEQ ID NO: 8261 - DNA, 345 bp, Homo sapiens
  source 1..345: mol_type = other DNA
ctccaaacttaggaaaggatatcttttggaaggcatgccttatgagtacaaaattattattttgcttatgagatgcaggatttttaaatggttttaaaataattctgagaatccttgtagctctgtgatgcatgtatataagcatgcctttgttctcaaaagtctacaccggctctacaggggctgcgccggcattttccccaggcttgggcgcaaccttgtggggtttgggtgatacccctcacagcccctgtcattcggcacccgcgcgtctagccccagcgccagggcacgcgagcggcgctggagggaggaaagcttccgcctgcgggccggacaaaagtc

SEQ ID NO: 8262 - DNA, 583 bp, Homo sapiens
  source 1..583: mol_type = other DNA
tcatttaatcttcataggctttattatcaaatgaaggaaccagttctaacaagtattaataccttcttttaaataagtgggtgtaagtcactaataaccatgaaaagtaggtaaggcttttgttcctttttaaaaaggtgttcaaactggatccaaacaataaagaaggccctgtattaatcctggtaccagaatcacttctgtcaacccactgatgtggctgtggatccaggcactggagccatttatgtatcagatggttactgcaacagcaggattgtgcagttttcaccaagtggaaagttcatcacacagtggggaaaggtacccaataagactcttaatctccagttgtaattcttagccagtatcactgggaactaaatattggccaatgtaattgtcccctacagggtcattgtaacctgggtcattgtatgcatccagttagcttgtctctaatctgtaatgtatttgtggataaaagacattataaaataatcttataaactgctttaccttatggtttactatcatgaatttagaaacatactagagagtcaaactttgggtgatttttaac

SEQ ID NO: 8263 - DNA, 300 bp, Homo sapiens
  source 1..300: mol_type = other DNA
tcaagaacctcgtgaatgagatccagggatcatcaccctggccccttcttcttcaaggcgcagaaggctgcggcagtgccctgcagcctcggtccctactatgaaaagctgcaacacatgaggtttgaagctcagcggttcccttttagctgatcttcaatttctggcgtctcgaacccaagaaatgcctcggtggagctgggtctgcagaggcacgaatgcggtcgtcactcatcccacgtaggctacttccttcagtaacagctatagggccactctcaccgggcggaacgatttccg

SEQ ID NO: 8264 - DNA, 338 bp, Homo sapiens
  source 1..338: mol_type = other DNA
tctattttaagctccaaaaaatggacacgcacaattttatgcaacgtcaaggacctgtaaatttaaatacacttctctgtaatctggttcacttcagagtacaaattcattgaacaaaaccttcatcgccatatgcattcacatgaagccacatgggataaatgcatttccactttaaaaagtatctactttggttcagaaatgttagataaagtggacatttttcttttatttaaatttggggcaaaatttctgataggttacgcctcactttaaataagcttcctctcgtgatgctgccggaggtcctttagacggaaatcgttccgcccggtgag

SEQ ID NO: 8265 - DNA, 230 bp, Homo sapiens
  source 1..230: mol_type = other DNA
gttacgcctcactttaaataagcttcctctcgtgatgctgccggaggtcctttagacggaaatcgttccgcccggtgagagtggccctatagctgttactgaaggaagtagcctacgtgggatgagtgacgaccgcattcgtgcctctgcagacccagctccaccgaggcatttcttgggttcgagacgccagaaattgaagatcagctaaaagggaaccgctgagcttc

SEQ ID NO: 8266 - DNA, 321 bp, Homo sapiens
  source 1..321: mol_type = other DNA
aaattatctatttcatttaagaattctcaatagcaaaacaaaattcaagaacctcgtgaatgagatccagggatcatcaccctggccccttcttcttcaaggcgcagaaggctgcggcagtgccctgcagcctcggtccctactatgaaaagctgcaacacatgaggtttgaagctcagcggttcccttttagctgatcttcaatttctggcgtctcgaacccaagaaatgcctcggtggagctgggtctgcagaggcacgaatgcggtcgtcactcatcccacgtaggctacttccttcagtaacagctatagggccact

SEQ ID NO: 8267 - DNA, 583 bp, Homo sapiens
  source 1..583: mol_type = other DNA
taaatttggatatgcatgccagtaaatattcttattgctgagcttaaccattaaatgtgcaaatcttcatcaaagaaaataatttattacaataatagacaagatcaacatttgtgcaaattaaaaaatagttaatccaatcagaatctgagtgctgagccctttaaggccggagtgttcccaggtccgcaagttggatagagagcgggtgttgcgactcctcctccttctgcagccagccggcccgcccttcctccgggtgtctgagagctgggcgcaggaggcgggctcagcgctgacgggctgcgcctctgcagccagaggggcgccgagcgcggtgggagaggagagggtacccggctggctcggctggcggcctctgcctggatctcggcgccgcagtcctgcgcctctcccgcccctgtctcccgctccgcagccccgggcacggcggaggcagcggagccctgggccatcggtaggttgcacggggacgacggctccgtcccttttgtgctgcagggggcttgggggagtgggtttgccccaggctccgatccccagtgccagccccgcggcgccg

SEQ ID NO: 8268 - DNA, 520 bp, Homo sapiens
  source 1..520: mol_type = other DNA
aacaagtgtgaatcaagactcgtttaaacttatattaatctactccagatttatgtcttttatgttaagataaagcattttgtcttttaaaaaataaaactctcttaaatttataacacttataaacaatcacattccactcagtaggcatatgacctaaactttctgcatttttaaaatgtggatagagatgtaaatttggatatgcatgccagtaaatattcttattgctgagcttaaccattaaatgtgcaaatcttcatcaaagaaaataatttattacaataatagacaagatcaacatttgtgcaaattaaaaaatagttaatccaatcagaatctgagtgctgagccctttaaggccggagtgttcccaggtccgcaagttggatagagagcgggtgttgcgactcctcctccttctgcagccagccggcccgcccttcctccgggtgtctgagagctgggcgcaggaggcgggctcagcgctgacgggctgcgcctctgcagccagaggggc

SEQ ID NO: 8269 - DNA, 332 bp, Homo sapiens
  source 1..332: mol_type = other DNA
ccaagatcgcactactgcactccagcctgggatacagcttcacagtgagaagtcaattgtaagagacccctgtagctgttgaacacctagttttgtaatctcggctcataacttctgtaggttttggagcataaataaaaaataacgacaataattttgttgtgggtgcaaggaggtgttttgcgcgcttgatacatactttttaaaggactactgaataagttagtcgtttaagagtgacttggtctagtcaatagtccaggattatttaacaggaaagaatgctttgagcactcaattgcattggacaatttaaaatcgtgggggccccc

SEQ ID NO: 8270 - DNA, 481 bp, Homo sapiens
  source 1..481: mol_type = other DNA
tacatttgccaaaaaatcagcattgtacattactattagttaaactccagtcaatgtcccacatttagtatatatattttattattagattggtgttatgaatattttggaaaagataccataaaggtaaagtacctttcttatgatttacttttgtttttctttttttcttaaatcacatatgaaaagttcacgggtcaaactgtaaaacttcagaataatctcaagtttttcccagaaaggtaaacagtttttatgctttcaattcttttttttttaaatataagcaaacacaaagatatgcatgaacacgtgtcagtacatgcctgttaacatcagtcaataatggcctcttttattcaagaaggttttctttttacaaagttaactttttctaactaataaaaaccttttcctgtgccttgaaaatgtttagcacatattatatggtaccgttttttattcacagatattttccaat

SEQ ID NO: 8271 - DNA, 669 bp, Homo sapiens
  source 1..669: mol_type = other DNA
tggacccgctggagtcgcagggacacttctgagagctcaccccgggctcttggcaccgcgtgtgggggctcagtctccctctcggaaggcgatcggagactgacatcggcagttggagggatccatttgaaagtgttcccctcccgctctccagccgaacagttgggttggcaggtttaggaatcccagctctgccaggccggctggtccgcgagaaatccccgaggctcggccagcccccggggtgccgactctgctgggggacctgccggaagacgcgaaaggttttcgaggcaagaccgcttcgaaagccggcgcagctgccgcttaaccagttccgacaaggctgggttgcggctccggatccccacccttctcggcgcaccccgtatctgagatttctgggggtcgccccgctaaggcacaggttctcagactcctggcgcagtgcgagggccccgggcggtggcggagccgtgcgtagcctgctgcgccgacgctgagccgggcccggcgggccggtgtatgtctccccgcggctgcggcgcgcaactcccggtgactgtgcagcgcgcgccgccgcctgccccgacccgcgctgcagccgcccggcccggcgcgcacctccctctcccggggtgaccggcctgccgccgccgcccgagacac

SEQ ID NO: 8272 - DNA, 841 bp, Homo sapiens
  source 1..841: mol_type = other DNA
ggccgctccgctgactgactgagccggctggccgggcccggactggtcgcctagccggcaggctcgctcatgtagcccccgtcgggcactccggcggcccgcagctgacgcccaccccccaccgtcgcgtgtgtgcccgttgcgcaggaagggcgacccctccgggggccgagccagcgagcggcctgccccgctgccgggagcccgcctctctgggtccaccttctctcgaaggagcgaccgcccgagccagaagaggcctcgctgttgcagttggtgccgccgccggcgccctctcctcaggctgccccgccggaccccagccaaggtgccccctcagccggcggcgccccggagccgggactgcttcttccgcgggccctgcatgctctgcttcatcgtgcacagtcccggcgcgcccgcccccgccggcccagaggaggagccgccgctctcgccgccgccgcgggacggggcctacgctgccgcctcctcctctcagcacctggcgcggcgctacgcggccctggccgccgaggactgcgccgctgctgcccgccgcttcctgctatcctcggccgccgccgccgccgccgctgccgcctcggcttcgtcgcccgcctcctgctgcaaagagttggggctggctgcggccgccgcctgggagcagcagggccgaagtctcttcctggccagcttggggccggtgcgcttcctggggccgcccgccgccgtgcagctcttccgggggccgacaccgtcaccggccgagctccctacgccccccgaaatggtgtgcaagcggaagggggccggggtccccgcctgcaccccctgcaag

SEQ ID NO: 8273 - DNA, 375 bp, Homo sapiens
  source 1..375: mol_type = other DNA
gcttcatgtttaaaatatacatacagtggtgccgcggggccgcatctgccactctgcccgaagcgcggtcagcgcccacactggcccttccggcggaacccgcctcgcggcttcgaagtggcctcgagcccagcggctcccggccaatggcagctctttacctcgagacgtcagctgtgtaaacggatgtcacacagctggggcggtgggagggaggggcgtgcgccgcaccccgcaagcccagagctccgtgccctagccggccggccccgtagtgccggtgtgacggccgtcccgggtgagcagccgggtgccggcgtccccgccacgagcgcgccaccgcaactggctccgccccctgccggaacgggccgc

SEQ ID NO: 8274 - DNA, 745 bp, Homo sapiens
  source 1..745: mol_type = other DNA
acggatgtcacacagctggggcggtgggagggaggggcgtgcgccgcaccccgcaagcccagagctccgtgccctagccggccggccccgtagtgccggtgtgacggccgtcccgggtgagcagccgggtgccggcgtccccgccacgagcgcgccaccgcaactggctccgccccctgccggaacgggccgcgcgctcctgcggctccgagcagagtcgcgggtgcgcgcgccggcggcggatccgcaggtccgagcgggacccggcctttccccggccgctccgctgactgactgagccggctggccgggcccggactggtcgcctagccggcaggctcgctcatgtagcccccgtcgggcactccggcggcccgcagctgacgcccaccccccaccgtcgcgtgtgtgcccgttgcgcaggaagggcgacccctccgggggccgagccagcgagcggcctgccccgctgccgggagcccgcctctctgggtccaccttctctcgaaggagcgaccgcccgagccagaagaggcctcgctgttgcagttggtgccgccgccggcgccctctcctcaggctgccccgccggaccccagccaaggtgccccctcagccggcggcgccccggagccgggactgcttcttccgcgggccctgcatgctctgcttcatcgtgcacagtcccggcgcgcccgcccccgccggcccagaggaggagccgccgctctcgccgccgccgcgg

SEQ ID NO: 8275 - DNA, 487 bp, Homo sapiens
  source 1..487: mol_type = other DNA
gttagtagacaaaacacttttattactgaataattgaacaataactagtcctcaagtaagaggacctgacatttgtgacattaactttacttaataattggggtgaccatctgtgttagttaattggttttatccagaggaaaaacaaacttctcctgtctttatgacggaatagttttgcaacacggagcaagttgctcaacgctcctactctctcacagaaactgggagatagggatatctagtcctcaagtggatttatacacatttcaaagagttgagaaagtacttaacaattaagaaagtacttaagttttctaaaaatctcatcctccattttcaatagggagaattaagcctcttatttaaaatttttatgttggtttttgtttatttagctttaaaacagtagacttaaaaaaagtccaacttaagatttatgtttttttatgtgtagggctgttctctacggttaaataaataaccc

SEQ ID NO: 8276 - DNA, 440 bp, Homo sapiens
  source 1..440: mol_type = other DNA
cgtccttactggagttgctgaaaaccattctaaaagtgcctattttaggggtgggggcctcgcggccctaaagcagcttcccttcccggagatttcagctccagggatcgcccagcgccctccgggcacccgccgagtaatcgccggtccggccacttcccggccgcggccaggcgagcctcccaactccacccgggctggtgagcgagcccagaaagcggcgaccgcagctccgcgtctccactcccagggcccgcagcttgggctaagcgtgcgcccacccagcctagggcccaagtcctgccccttcggggaccgggccaatcggccgctccccgcctcctgggaggtagtggaggagggggctgagggccgggcggctgcgcccgccttccgctcttgcccattggctgaggcctcgagggtgcccgctgtggcag

SEQ ID NO: 8277 - DNA, 322 bp, Homo sapiens
  source 1..322: mol_type = other DNA
cctcagggccccaacggccaagatcctgtccactcacctcctcagatggtctcacaatgggcatcaccgtgagacaatttgtgggccgtggcctcccctgacaaccagcagattgtctgtggatcatgagataaaactcacaggcttcagataagcattgtttctgtagattatagatttactaaaagtattccttactaattatctgcagcaggaacatgtccctcaggcacagtagcatgggagtcatggccatcatgaaggccagatttgggggcctgttcccaacacctgggtgtatgagagtcacagagtgggtgtc

SEQ ID NO: 8278 - DNA, 462 bp, Homo sapiens
  source 1..462: mol_type = other DNA
aaagcaattaacaaatcattatagaataggttatcaaaagtggaaagtgtttgtggcaaggaaatttaaaatttttatttctgttgagaccttagagatcatttacacataatttatattcttttcctttgaatgaagaattataaagtattggagagttatacctcaataaaattaagaaaagctttgtagcacagctatctgcaaggttttgtttcaagaagtgcttgaaagtctcagagaaaaacctaaaataagaagacttctatatgtttcttaggaataaaatcaggtattttatttatctaatttaaaaaatcaaaggcggatcacctgaggtcagttgaaaaaaaaaaatcaagtagaacagagatttatttcttagatagtgtttctttacttaatgtacaaaacgcaacatgagatagtatgaaataggagatccagatttgcacctctctt

SEQ ID NO: 8279 - DNA, 423 bp, Homo sapiens
  source 1..423: mol_type = other DNA
cataattaactaaactgttacccaggtttaaattaagcaaggcttgacaaacagcctcaagatgcaagctgggaggctgtggtcagcaaccttgttaatcaggtttccagtcgaatcaggatcgattttaatgttgttgctgttggaatttccgaaaaagcctaactgcgcctccccaaacgtcgcagtactgcagggaatcagcggtgaactccccctgagggatcaggttctgattgggcgtatgcattgtcccccagcagagaccctgtaagctgactggtcatctctgctatgggggaggggcttgcgtactctcctccttcgcctccaccgcggcgcaaggggcgggactcaccgccaccgcctctgcttccgccgccgccaccgccgccgccgccgccacagccgccagccgcttcg

SEQ ID NO: 8280 - DNA, 495 bp, Homo sapiens
  source 1..495: mol_type = other DNA
tctgcaaagcttgtggaagatgtgccctctgcaacttgctgcaaatgctcacctcctctacaaagctcctagagttgggcatgtcacagaaatcaggaagcaaaatcctttttttctgtaatgtctcttcagcgccctctgctgataaagcttcagtcactgtttaaaaggctcagatccgtttttacagtgcagtcaaagaagagaatgtgcaagccctcttctcttggcacgccaggcccgagtgtcctaggataggtggggtgtaagctcaacccctgttggacgtgggggtgctggcgcctgaacgcccccgaaggcctcaactcccagaaagctgcctgccaggtcacaagagccctgtgaggtcttcctatgacactgggaggcaggcgcggggcgggtccgccgggcgacgcgctgtgattgggcgccgtggggcccgccccctcatctcggagcgtcgggagggggcggggccagccgcccgctcgg

SEQ ID NO: 8281 - DNA, 701 bp, Homo sapiens
  source 1..701: mol_type = other DNA
gaagagaatgtgcaagccctcttctcttggcacgccaggcccgagtgtcctaggataggtggggtgtaagctcaacccctgttggacgtgggggtgctggcgcctgaacgcccccgaaggcctcaactcccagaaagctgcctgccaggtcacaagagccctgtgaggtcttcctatgacactgggaggcaggcgcggggcgggtccgccgggcgacgcgctgtgattgggcgccgtggggcccgccccctcatctcggagcgtcgggagggggcggggccagccgcccgctcggctcaggcgctgcgggcgcctattgacccagcggctgctgcgccgccgctgtctcctcctgctcgtggcgggcggtgctggagcgccaagtggcgctggagaaccggcgcttcctttcgccgcttccgccgccatctccgcgtttgtggggcgggaaagagggagggggctagcggctgcagctggagcgggcttctctgccgccgcccgccccctgcgcctccccgcggagcctgggtccgggagggggaaggtgcgagcggacgctagcctcatcaatccgtgagccccggagtccggggtgcacatcggcccagccgcagcgtcggcggcggcggcggcagcagcacgataggcgggggcggtgccggtgccgcgggggcgggcccgaccgtcccgcccagaag

SEQ ID NO: 8282 - DNA, 342 bp, Homo sapiens
  source 1..342: mol_type = other DNA
tggggtgcagtggggtctcatatagtattttacactggtgaacctttgtaaaatatatacagttgctcgttagtagacataggaattctacaaggatttttaaaggacttatattagataattctattgcatactacctttaaaaagaggcgttctttttttctatgtaaaaggaacttacgaacggcaatttaatttaaagacatgaagccgcttcttgtggcttcttgcaggatatgcaagtatgtacaatattcgaaacaaatcattactatgttctttaaaaacgaataaaggtctttcacacaacattgcatttattctttagaaattgaacacaaa

SEQ ID NO: 8283 - DNA, 254 bp, Homo sapiens
  source 1..254: mol_type = other DNA
aacaaagttgattatcataggaatcctgggcttccaacgagttgaagtgaaaccatggaagtcttcctcagatctggggagggagcctggcccaattcaattagaggtcccaattttgaacgatataactgggatttcaataaaactatagtttctttatattcgacgtgcacttcaacttttaaaaaccatatccggccgggatctcaccgggtaggctccacccgcgggttatctgtgtttcattaatccca

SEQ ID NO: 8284 - DNA, 359 bp, Homo sapiens
  source 1..359: mol_type = other DNA
ggtgcccgggctgaggccccaggctacgctgcgcggggctaagcctctgcgaggcagagcgcactaaagcgtgcgccgcctccgggagagctgagctcaggccgtgcggtcgccgctgggcacccagcagcgcggtctggctccgtaaaagttcttgacacctgctagaaagtgctagaggactcttcagcccctaaggtgctgtcgaagactgagacatatgcaaggactccaaatcctttccgtttcttaaaggacattcacacttatgaaaaattcctgatgactttactgatgttaaaattccatagattttttcctttcacatcatcaattcagaattctataaaggaagagaa

SEQ ID NO: 8285 - DNA, 456 bp, Homo sapiens
  source 1..456: mol_type = other DNA
tcatagataaactctctatttattacagaatatggtgtacttggaattttttttaacatacagtagtaatcattttgattaacctaattttcatgaatggccacagtacagatgcggacatccaaaggatggcattattaggtcgccctctctaatggctatttcactgccttgtcaatgacataggaaaaaggtacctgagtggaaactgttttcagggcacctttaaagcggctttctccagggagacgccaggcgaggtgcctgggctccgggacgccgccgccgggggaaagggtcagagcggggctgcgcctagcttgggacaacacttctgttccaatttagggagaggaagcaccacctgctggggtccggcgcctccgcgctcgggctcggaattttggcagcctccgccccctggtgggtgacagtcttttcgcgacgagtgccctc

SEQ ID NO: 8286 - DNA, 451 bp, Homo sapiens
  source 1..451: mol_type = other DNA
aaaacgttttcataaacgtgttgaactttggtcctgggctctaagcttaatgttcacatgctcagagattgtaagctggctcctgaggagtgaggcgtcttgacacccatcaggcttttgacagccgacctcagaatactgtaatccaggaatcccaataacatttaatatttatcttccttttctgggagatagttttcatctgtaaatatgtcaatatgtatccaaaagatgaggatctttaaaaacgtaatcataatgctactatcatatgtaaaaatgaaacataattccttaatatcatcagatatccagtgtttaactcatgtttttgtacatttttaaataatcacatgtttaaatcgggttctgtcggaacctaacgagcttccttccaccgcaaaagagctggacaagtcacgcctcccatgtgagctctggagggagttcg

SEQ ID NO: 8287 - DNA, 369 bp, Homo sapiens
  source 1..369: mol_type = other DNA
cttttaagaataataaatccataaattagattaaaatattggaccatattaatggtggtataataactgtcatagatatgtatcagaacatgactaattgttgttcgtctttgctgaaatctgaaaagaaaaaagtttatcatgctcttgggaagagaaaaagggcttttacatgtagcagtcttccctgtcatgaatgaggacaggtcctgccttaaggcagaggaaggccgaagacttcactcaaaggtgagtcagctctcactgggtccaggcacaggagccctgagggatcgtctcgctatccggcggggccgcccggacccaggtgctgccagggtacgcctggcgcccgccatcccagagcag

SEQ ID NO: 8288 - DNA, 510 bp, Homo sapiens
  source 1..510: mol_type = other DNA
ttatcatgctcttgggaagagaaaaagggcttttacatgtagcagtcttccctgtcatgaatgaggacaggtcctgccttaaggcagaggaaggccgaagacttcactcaaaggtgagtcagctctcactgggtccaggcacaggagccctgagggatcgtctcgctatccggcggggccgcccggacccaggtgctgccagggtacgcctggcgcccgccatcccagagcagcgtcccgctgcgcacggtctccctccagctccggtccccgcgggagggcgcgtgggatgatgcgcgggtccttgtgccttccccaagctccagcatccggagccgccctagccggcaccgcggcagccacagcctgagcgagggggagggagcctctctcctcagcggtgcagctagtctccctccagcgggcggcgactccgggttccccctcgcgccccccccttccccgcccaccgtccctgcgagcgcgggcggcggcggtgggcgtgtgcgc

SEQ ID NO: 8289 - DNA, 505 bp, Homo sapiens
  source 1..505: mol_type = other DNA
gtgcacaataaatgtaatgcactccccctgtctgtggaaaaaattatcttccaagaaactggtccctgcctgtagtattcagtatagtaaaatgctgtacaggtttgaagcctaggagcaattgactattccatccagcatagctgtgtagtaagctatactatctggttgtgtacaagtacaccctatgatgttcttacatgagggatgcatgactatatatattttcaatttccaatcagctaggaatcacattcctgtaactacttgattcttttaagaataataaatccataaattagattaaaatattggaccatattaatggtggtataataactgtcatagatatgtatcagaacatgactaattgttgttcgtctttgctgaaatctgaaaagaaaaaagtttatcatgctcttgggaagagaaaaagggcttttacatgtagcagtcttccctgtcatgaatgaggacaggtcctgccttaaggcagaggaaggcc

SEQ ID NO: 8290 - DNA, 481 bp, Homo sapiens
  source 1..481: mol_type = other DNA
ttaaaaatttacgaaatattatttattttcattgcaagtctatcagaaatcactaatggtgtagcactgcaaactacgtatcttagtaaacgcaatttgcagcaaaacgctaatcagtgcatcatggctactctggtaaaattcactgtttgccaagcatcccatcagatgggtgacttcacagccactggaagaaatctttctcatgttcgagtagatggaaactccaaaactgtgcagttgctaattggctaaaggtcaattcacatagtggcagggactttcgagttctgagtcaggctaagcaggaggcagagagctcgtcctcctctgcatatttggaccttatccctgcttgacaaaattctttcatccagggaaccctggcgcggctcgggccagcccacacctcagccccccctccccggagcccccgggatcgggccagggggcggggctgggggctcggcccgccttgccc

SEQ ID NO: 8291 - DNA, 674 bp, Homo sapiens
  source 1..674: mol_type = other DNA
tcaggggcgctccccgccccgggcttccccgcggaagggagtggggcgcgcgtacccagctgaggggcagggtccgacccgaggccgtggtgtctgagcgcggctccgcgccgccgcaggcaccaacataaaaggaaggcggctgccgcccgtcgccgtcctcttttcacgggccgcgccgcctctccccacggccctggcgggccgccgggctgtgcagcaccctggccgccttcacgcttggaaaagcaaccgcacgtcggaggaaggccggggatttgcgcgcgccgtgctcccggggcggggccggggcgcagagctgcgggtccgctttgtctccccggggcgccgcgcggtgcagtggggacggcgcggcgagcggggcgcccggggcgcgggtgcggggtgtcggggcgcgcgcgcctgttggccgctcgccgacggggcccagagccgccgattcctgccgagtaagcagtctggctcctaggcggctgcacagtggcagcaaggctggggcgctggctccgcgccagctccatcagagttcactagcaccctagcggactcttagagaaagagagagacacacacactcttggagagagagcgcgaggcagggagatgatctcctcctcctttttccaaggctgcacttcttggaagtgaagccg

SEQ ID NO: 8292 - DNA, 722 bp, Homo sapiens
  source 1..722: mol_type = other DNA
ccgatcacgccaggccgcagctctggctggtgtgcgcgtgtgactgtgtgcacgtgtgtgtgtgcacgcgcagccacaggacctctgggcccggccttcaggggcgctccccgccccgggcttccccgcggaagggagtggggcgcgcgtacccagctgaggggcagggtccgacccgaggccgtggtgtctgagcgcggctccgcgccgccgcaggcaccaacataaaaggaaggcggctgccgcccgtcgccgtcctcttttcacgggccgcgccgcctctccccacggccctggcgggccgccgggctgtgcagcaccctggccgccttcacgcttggaaaagcaaccgcacgtcggaggaaggccggggatttgcgcgcgccgtgctcccggggcggggccggggcgcagagctgcgggtccgctttgtctccccggggcgccgcgcggtgcagtggggacggcgcggcgagcggggcgcccggggcgcgggtgcggggtgtcggggcgcgcgcgcctgttggccgctcgccgacggggcccagagccgccgattcctgccgagtaagcagtctggctcctaggcggctgcacagtggcagcaaggctggggcgctggctccgcgccagctccatcagagttcactagcaccctagcggactcttagagaaagagagagacacacacactcttggagagagagcgcgaggcagggaga

SEQ ID NO: 8293 - DNA, 727 bp, Homo sapiens
  source 1..727: mol_type = other DNA
ttctttgttacaatggaaaacattgctttcagtgattaatggatggcaaatttagaagacactatgatcctttatatctttttttcttggaaaggcaatttaattaggaaataatcttctcctgtgacatctgagagttaccataaaatgatatcctgctttattggcaacagaaccagtttatttgagtttgttgcaaaattttgagctattacattactatgaaaagatagattttaaataagaagtttacaaaaatcagaaatggcaaagcactttattttttaaagcaatcctcgattttaaaaagtacaatccgatcacgccaggccgcagctctggctggtgtgcgcgtgtgactgtgtgcacgtgtgtgtgtgcacgcgcagccacaggacctctgggcccggccttcaggggcgctccccgccccgggcttccccgcggaagggagtggggcgcgcgtacccagctgaggggcagggtccgacccgaggccgtggtgtctgagcgcggctccgcgccgccgcaggcaccaacataaaaggaaggcggctgccgcccgtcgccgtcctcttttcacgggccgcgccgcctctccccacggccctggcgggccgccgggctgtgcagcaccctggccgccttcacgcttggaaaagcaaccgcacgtcggaggaaggccggggatttgcgcgcgccgtgctcccggggcggggccggggcg

SEQ ID NO: 8294 - DNA, 408 bp, Homo sapiens
  source 1..408: mol_type = other DNA
ttgaacatgatcatttcttagatgtttatatgagaaagttctatcttgtattaattcatatatcaaatttgattctctatgtaactataatatatgacatatacatttgctatgaacttttgcacaataacgcaattaaatactgttatttattgagaactaggttatcagactcttagtggtctaataactgtacaatcttatgtgataataattaatggcaaatcatttgaatgtgaatttttccatcctaattttatcttggaattcttacaatcaattatgttcagaattgttaactatgttttcaagtagccttgacataaactttgtctttgcctggggaagctcaggcaatagtcctcaacttatgttttagattatattacttaaaagaagaaggccatc

SEQ ID NO: 8295 - DNA, 748 bp, Homo sapiens
  source 1..748: mol_type = other DNA
tgtgcggcttggcagcgtggactcgccggcacctcgccgctgggaccacggtctctgcccccccgcccagaaggggctcccctgccgcggccagcgctggactggggggtccgcttcgttccagggctttttgcagacgcctggaccgggcccacatgcacctgggctgctcccgcccggggcgccaccactcgcgcggccaacccggagcctctgcggcctggcgcgcccagggcgcaccccccgctcgcccgtccgccgcgttcccagctggggcgtcgctcctccgcccgcaggcgtattccgccgccgcggcaggcattcccggagggagaggggagtccccggacgggagccacaccccgcgacgagctgacctcccctcgcttccggctcctcggcgcttgcggctgggggacggggtagcggacggagcgacgaccttcgcctctgcccctgcgcccatggtcggggcgtcgtggcatactcggcggatctgacccggggctgcggggcggggtcgcggctggaagtgcgcgcccgcgggggactccgcaggccgatcggacgccaggacgtcggggccgcgctcaaatccgtgcggcagaggtgcagcgcttccagggttttccaaggccggggagagcctcgaattccctgccaggagactttgtcgtccccaggactgcgggaggggccccgcgcccccgccttcggaggagctcgagccgcaggatgcgcggggacg

SEQ ID NO: 8296 - DNA, 774 bp, Homo sapiens
  source 1..774: mol_type = other DNA
gcttcagagctgtgcccctcagtcctggacgcggccgaccgcgcggagggcgtgggattgggaccgccgaaccgtggggtccgagcagcaccgcgtcctcttctccccacccagcctccaggtctctcgggggaaggacgcagcgagcgctggactgccccgcggcttgggcgcagtgtgcggcttggcagcgtggactcgccggcacctcgccgctgggaccacggtctctgcccccccgcccagaaggggctcccctgccgcggccagcgctggactggggggtccgcttcgttccagggctttttgcagacgcctggaccgggcccacatgcacctgggctgctcccgcccggggcgccaccactcgcgcggccaacccggagcctctgcggcctggcgcgcccagggcgcaccccccgctcgcccgtccgccgcgttcccagctggggcgtcgctcctccgcccgcaggcgtattccgccgccgcggcaggcattcccggagggagaggggagtccccggacgggagccacaccccgcgacgagctgacctcccctcgcttccggctcctcggcgcttgcggctgggggacggggtagcggacggagcgacgaccttcgcctctgcccctgcgcccatggtcggggcgtcgtggcatactcggcggatctgacccggggctgcggggcggggtcgcggctggaagtgcgcgcccgcgggggactccgcaggccgatcggacgccaggacgtcggggccgcgctcaaatcc

SEQ ID NO: 8297 - DNA, 714 bp, Homo sapiens
  source 1..714: mol_type = other DNA
ttggctacccagctaacaagcagtagaattctaactctaaaactcaatatagagttttttttcagctggagttgcacctgctccgaagcccagcggggctcagtgtcgtccgcagctcaacctcggctgcctgtgcacggggtcactgcagcttcagagctgtgcccctcagtcctggacgcggccgaccgcgcggagggcgtgggattgggaccgccgaaccgtggggtccgagcagcaccgcgtcctcttctccccacccagcctccaggtctctcgggggaaggacgcagcgagcgctggactgccccgcggcttgggcgcagtgtgcggcttggcagcgtggactcgccggcacctcgccgctgggaccacggtctctgcccccccgcccagaaggggctcccctgccgcggccagcgctggactggggggtccgcttcgttccagggctttttgcagacgcctggaccgggcccacatgcacctgggctgctcccgcccggggcgccaccactcgcgcggccaacccggagcctctgcggcctggcgcgcccagggcgcaccccccgctcgcccgtccgccgcgttcccagctggggcgtcgctcctccgcccgcaggcgtattccgccgccgcggcaggcattcccggagggagaggggagtccccggacgggagccacaccccgcgacgagctgacctcccctcgct

SEQ ID NO: 8298 - DNA, 431 bp, Homo sapiens
  source 1..431: mol_type = other DNA
gggattcttagtcagcctagggtgctgttgaggaggttggccaacaactgctctaactgcttgggctagcaggccagtccagggatccgcagtagatcttagtcatggactgcatctggggctccatttgaagaacaatttgtagttttacagcttcgattctggaagagacaaggcctgcagtgaagggaattatttagttttgaaaagctggtccagtaaaaataactgcaggcaaaagtatttttccttcttcggtggcttgccatcctgaggggaggaaactgtttcctggaggggattaccccatactaggagtccccttctataagcatttctaatggagggtccggatccctctctccatattgctgcatgggcatggaggactaggtaagcatacttagattctgtatatatatttacccttt

SEQ ID NO: 8299 - DNA, 358 bp, Homo sapiens
  source 1..358: mol_type = other DNA
ccagatcttccagtggctcctgggcccccatggtcagtcaggcttcagattaaatgtcaactctggagaaatgtctattctttcacactagaatgtaatctagagaacagtatctagtataatgatattgttcaattaatgttgaatgaaatgaaaccaaatttcccggaagaggtgtttttaaattaaaactacaaatagtgatattaactgggctgcagcacaattcagagaaggccagtaagtgctgcaactgagactcggctgcctaggcagcaatggctcacgggacagaacagcgaagcagtgcccggcaagcggagcgcagcacccattgcgcctgcgcataacaggctct

SEQ ID NO: 8300 - DNA, 720 bp, Homo sapiens
  source 1..720: mol_type = other DNA
aaagaaaacttgaagtatagtatccttttaaattttaaatagataatagaaactggtttccccccatttaaaccagaatttaagtttaactttatatattcttgacagtttgaaattggaatttaagcatcacctggttcgatttaaatgcaatgtagaatttgcattaaaatactacattaaagcctcagatttgtagtagcctatgtatgactgctctaaatacttcatatatattaatgttcccgttttatacagcaggaaattgaaacactgagaggttaagtaactaaagttacagagctagagtgacaggagtaaagcttcaactcaggcaacccagacttccagagttctgatctccactactaagctgctagcatagcttttctggtaactatttttaattcaaatataattcgagtgatctatctaacaagtcatcactctgacaactcagtgacttgtaatgtaaaattattcattgtaattcatttaatattattgtttctctgtgctgcaaaaatcatagcaatcgagatgtagctggggactggggccgcgagggcatacccccgaggggtacggggctagggggttgggcggggccctgtgccccactgcggagtgcgggtcggcagctgtgtaatccgctggatgcggaccagggcgctccccattcccgtcgggagcccgccgattggctgggtgtgggcgcac

SEQ ID NO: 8301 - DNA, 407 bp, Homo sapiens
  source 1..407: mol_type = other DNA
ccttaaatgtttcaaaaactttaatttacttgattttttaaaaataataagcacacagtctgccaaagagcagtttttctttgagtgcagtggtgtgatctcggctcactgcctggctcagcctcctgagtagctgcaactctaaaaagtaagtgttctaatctaagagcttataatgtgcactgactgcagaaaaatcttcaacataggatttcatgatatagtttttaaattgggaaactgaagctattgggtagaattgacaaaaaataacacctttactttttttagtgtgacagattagtactttaaaacattaaacattacatgaaaatttataggataattggtacaatcatattatgccttgattttatttcaggcaaatcctaagagatttattacaa

SEQ ID NO: 8302 - DNA, 350 bp, Homo sapiens
  source 1..350: mol_type = other DNA
ggatcagcctattgattatagtttaaaatatgcctcacacagagtagaagtggtcagcctcaaaaggctgccacttgcaaagtttcttctattaaccaagaaacaatacagacttattgtgtagaagatactccaatatgtttttcaagatgtagttcattatcatctttgtcatcagctgaagatgaaataggatgtaatttctgtcagctgaagatcctgtgagcgaagttccagcatccagcagactgcagggttctagttttcttcaggagcgaaatagatgtacttctgtcagttttgccagctccgttcagagtgaaccatgcagtggaatggtatcttgcagt

SEQ ID NO: 8303 - DNA, 225 bp, Homo sapiens
  source 1..225: mol_type = other DNA
tagatttcagatgatgatgatattgaaatactagaagaatgtattatttctgccatgccaattacaccgggcctccaaaattcttgcagaatgcattaattctgctatttcttctgcacccaacaaaaatcagttcaaaaaataatttaaatgctgagagagttttctcagacaacttccaaggtcttcaatgataagctctgatgttgacctttccagggaaaa

SEQ ID NO: 8304 - DNA, 312 bp, Homo sapiens
  source 1..312: mol_type = other DNA
aagcaacttctttcatttccatttgtaaaaaggcagtatctatccttcagaagttttaaaaggagtgcagtggtgtgatctcagctcactgcaaccgctgggattacaggcgtgtgccaccacactcgttggccaggctgctactttgctagttctaaaaatccattttgattaaacgtaaggagtatttccttcctagctagtaccacccatactcggtaaaggaatgagaagctttcatgattctctcgcgagaagggaagtcttcatgccacctggcgccgattcttgggcaggacttccggcggaaaa

SEQ ID NO: 8305 - DNA, 487 bp, Homo sapiens
  source 1..487: mol_type = other DNA
gctgccgcgcggtccccggccgaccaggacaggtgggttctgacggggcttgctgtggtgctgcaggtgctacaccgcgcttctccgcagaatggcctagtcgctctgtacgggccccctgcagcagcccagggctcctgaaataggtagcctagtgttttgtggacatgatatcaagtaatataatcacagtgtgagaaatttcagaaaggctcatttgtgaaattttaaggtttttaatacctcggacactttatataagagggcgggaatgtaacagtgataaagtttatttttaaataagttaaagtgaggtaatttaaagaaataacattaaatttttgaaaatgttttgaataaggaattgaacagcagatttattttaaacaaaagtacactccagcaagctacccaagagctttacagaattttctagggtttaaataccctctagaagtctgattggttgcccgcggccagtctgatt

SEQ ID NO: 8306 - DNA, 712 bp, Homo sapiens
  source 1..712: mol_type = other DNA
cgcaggccacctcgcagcgtccgcggagttgcaggcccgcccccgccagggtgtggcgctgtccccctggcgctgggcgggggaggaggggcgcgcggcggccgaggaggggcgcgcggcggccgggcggggcgagcggaggcgagtggaggacgcgtagacgcgccgcggtccccgcctgccgctgctccgccgcagtcgccgctccagtctaggaacagccccgagcggcgagacggtccccgccatgtctgcggccatgagggagaggttcgacctgcattctggccaagctcgaggccaaaaccgggggtcgccgccgctggtagggccacgggagccgccgctgccccagctgctggggaacaggctggcctcccggaaagcgtgggcatcggaggaccccgcgggggctgcccaggctgagggtcgcggggctggagggcagctgcggcgccgggcgctggcagctggaagggccagcgctgacgtatgtctgccccgcggcccggcgccctattcctgctgtcctgcgcggtgggcgcggacggcggggcccctgcgggcgggcgcgttgacggaggtacccggtcctacccgaccctccgtggagctccgcccggagagggcgcctctcgggtgggcgggggctgctactgcagcgtgtgcgggagtccgggcctctcgggacgctccccgctgagcgcagctt

SEQ ID NO: 8307 - DNA, 415 bp, Homo sapiens
  source 1..415: mol_type = other DNA
aatgctctgccgataataatacggagcttcggacaaaaattctgcagcagtgttctatgagctcctgcctaaggctaccatgaaaagatttaatgcagtttttgcttggaatcaaacatttcaattttttaggtcaaaaatgccttaggtttagaatgtaggtgccaaacaggcgggagcaacaaggacgcctgcctcctttctgcctgctttttcgcaggccacctcgcagcgtccgcggagttgcaggcccgcccccgccagggtgtggcgctgtccccctggcgctgggcgggggaggaggggcgcgcggcggccgaggaggggcgcgcggcggccgggcggggcgagcggaggcgagtggaggacgcgtagacgcgccgcggtccccgcctgccgctgctccgccgcagtc

SEQ ID NO: 8308 - DNA, 318 bp, Homo sapiens
  source 1..318: mol_type = other DNA
aacagatggatctagtttctccaatcccaaatggattggtctccattaagccagatcagagttcagcttaaatcagtattttctaagattttgctaggtgccagatactgagataaagtccttgtcttcatgtttggaaccaggctgcagatgtgtccggggtctacacctaagccccgacccctctgaacttcccagaagcgcgcaggaggcatggtgcgcatgcgtgaagcaggggcgtgactccgggggctccgccccgagccttggcccagtcttggggtccaaggctgagggagcgggacggaagtgagcggg

SEQ ID NO: 8309 - DNA, 180 bp, Homo sapiens
  source 1..180: mol_type = other DNA
gacattttgtccccattgttagaaagagactgatgaggtctcttaagctgttttgaagcatcagaacatttttctgtgcatctcaaattcattggaactttaagtttgtctctatcttcattatggacatgcagaaaatgtactctgccttgaccttattaaatcatggaaagcggctcc

SEQ ID NO: 8310 - DNA, 579 bp, Homo sapiens
  source 1..579: mol_type = other DNA
agaccaatcctggaagtggtatacatcagttccagcaacattccaatggccggaactcagccatgtggcccccagctaactgcaggagagttgggaaatataatgcctaggaagaaaagatacttcttgtcaccaccaggatctgttgttgatacacagtcctctttattagatccagatgtataggtaactcatgaactatgtaaatatgtactacatacctgcccccactcagctaccctgtgtagcgtgatagagcaagggtggcatacttgcattaaaatctcccattcagaaaagggaagaatgcaagacacacaacagtggctcattctttagtatatgtattttttatgatatttttccaaatattgcatgggaaatatatacactaaaaattattcgtttatctgaaatgcaaattattaagcattctgtatttttatttgcaatgtacatcgatacatgcttactgcaggaattaatgaaggactacggcgccgcacccgcagacagcctcctttaggcgcgcagcggcggccgcgctgaggtcacgggcgccggccctggtgacgtcat

SEQ ID NO: 8311 - DNA, 561 bp, Homo sapiens
  source 1..561: mol_type = other DNA
cggcttgatcccgcagcggccaaggcagggctcaggccccgggattctccccacacgctgctgcactggcgcagccggccagtgcccccgcagttacttggcgggcagccggcagcccactctcggcgggtggtcggggttccacaccgtccctgagcctgcccccggccaaggtggcccgacgtgctgcagtggctggcgcaggtgatccgggcagcgcgtccggcactagtcaagggggcagcggcacgggagggaggggcgcctttctcttttctcctccccctgcagcccagctgcactgcgtgggggctcggaatccctgccctggagcgccctggctctggactgcaaagccgcgcgcgccgcaaactcagtcttttggtgcgcccaaccaatcggacgcccggagccggcatgggcccttggccctgacatggaaaccccattgcagttccagcgcggcttcttcccagagcagccgccgccgccgccgcgctcctcacacctgccctcgcgcaccagcagccggccagcggcggcagcagcccatgcctccgg

SEQ ID NO: 8312 - DNA, 469 bp, Homo sapiens
  source 1..469: mol_type = other DNA
gggctcccacgtggcacttgaggagcagcccaccgctgcactgtgggagcccctttctgggctggccaaggccagagccggctccctcagcgcggggagttccgggtgggcgtgggcttggcaggccgcgcacgccgagcagccggccagccctgccggcccgggcaatgaggggcttagcacctgggccagcggctgcggtggttgtactgggtcccccagcagtgccagctcaccagcgctgcgcttgtgccttcccgcggggcatggctggggacctgcagcccgccatgcctgaacgcggccggagcctccacccaagggctgagtagtgcgggcgcacagcacgggactggcaggcagctccacctgcagcccctgtgcaggatccactgggtgaagccagctggatacaccaatcagcaccctgtgtctagctcagggtttgtgaatgcaccaatcgacactg

SEQ ID NO: 8313 - DNA, 319 bp, Homo sapiens
  source 1..319: mol_type = other DNA
aagttttcttttgaagagaagcggccatttcagctgtagcctcctagggaagctgctgttatatgcactgaatgcagttgagtatcaaaaaccttacacagagtgtttaaaatacaatccctgtatttgttctgccgagatgcggctccgctgcggtccgaaccgctgccgcgacccccgaggaggcggggcctccgcgcgcccggctccgcctggtgagggtttcacggcctctgctgccgccgccgccgcccccccgaccgctgcacccggatcctagcaagccgggcgaggctgcccgggagccctcgatggcctt

SEQ ID NO: 8314 - DNA, 603 bp, Homo sapiens
  source 1..603: mol_type = other DNA
agctggcgcgcgccttaacgttcagcagcactccccgcgggggtgcgggggtgccggagccgctcaggaccctctgtcctggccctcaggaaggaaagcgtaggcccgggtggcggggggtctctcccttgccgcggccagcatccgggagaggaatctccaccctgcaggcggtccgacaagccgggcggggccagggaaccccaggccgcgcctggctagggaccgcggagagggcgggcggggtctcactctggtcgcctcgcgcagctctgccgtgctcgccgcggccattccgcaccgtcctgtgccgagcctggaagcggggcttcgaaccgcgcgcagggccaggggccaggggccagggctgcagccggctgctctgctgcagcggagcctccccgccccggcgccgccctcggcacccgccccccagcctggcatagggcgacgggcgactacccgggtggaaggtggcggcggagggcgccgagtcccaaccgcgtgccacaccagccccaggcggccccgcctcgcgctgttgcctgggcaacgaccaggccacgccctgtccacgccccgcggtgccccgcccaggtctct

SEQ ID NO: 8315 - DNA, 268 bp, Homo sapiens
  source 1..268: mol_type = other DNA
gcaacactgtgaaatgtgtatgcttctggatttctggatcttttacacctgtaaaccaacttgcttaaggaaagtagtttcacgaactttggcagcttttttcttttctttttaaagaaaaaacatcaagcctttaagttttcttttgaagagaagcggccatttcagctgtagcctcctagggaagctgctgttatatgcactgaatgcagttgagtatcaaaaaccttacacagagtgtttaaaatacaatccctgtatttgttct

SEQ ID NO: 8316 - DNA, 324 bp, Homo sapiens
  source 1..324: mol_type = other DNA
ataagaattacattttctaagaaagctaacaaaattaaacccaaaattttattagctaagttgatcacagtcatgaaagtttaaagggcatagtataaaatccctatttttggaaaaaagaactagaagcatgtttaaattttttagaatgactcaacaagcagtcatatataggtatgaatatgcatgtttaagtgattcctggtatccagaaaggattaagatctgttagataaaagatcacaaggcctgcgaggtgtttacaagcctcgagggcttctgcggcgggcgcaggtcccctcacccggcaccctgtggtccggg

SEQ ID NO: 8317 - DNA, 602 bp, Homo sapiens
  source 1..602: mol_type = other DNA
ggaatgtaactgtggcattcctgcctcggtttttttctttaaaaatctaaaatatgatttattgttagaatccattgataatgttttttcatttagactcagtctcagtgtatattaggtaaaaatatgtatatattgactataacacgaataaaatttaaggacgatgtaagacaatgaattttcttgacaggtatgggactgcgacagggcagagcgcagcccccgccccgccccgcctacatctcggccccgccctgcatcccggccaagcccgcagcgcagggagctgtctgcagaggccagggtgcgcctgccacgaatccccaggcaccggtggccgccgcggcccgagtagctcggcgggtacatggccgcactgacgacggttgtggtagcggctgcggccaccgcggtagccggggctgtggcaggggcgggcgcggccaccgggaccggcgtgggagcgacgccagcgcctcgagagctgctctggcggcaggcgaggggctgcaggccctggctgaacaggtgccctctgcagcgccggcgggaggcgcggcgttcgcctcccctgctcggggcctggcacgcgctgggcg

SEQ ID NO: 8318 - DNA, 458 bp, Homo sapiens
  source 1..458: mol_type = other DNA
acctacttcatgaagttatttgtgaagattaaatgcaaaagtgcatataaagcacttataacagccctggcataaaggaattgctcaataaatacctatttgtttacttgttaaaggtgaaggaacctcctgacatatgagagctccatattgactgactgaatgaatcgatttcttcctaggaatgtaactgtggcattcctgcctcggtttttttctttaaaaatctaaaatatgatttattgttagaatccattgataatgttttttcatttagactcagtctcagtgtatattaggtaaaaatatgtatatattgactataacacgaataaaatttaaggacgatgtaagacaatgaattttcttgacaggtatgggactgcgacagggcagagcgcagcccccgccccgccccgcctacatctcggccccgccctgcatcccggccaagcccg

SEQ ID NO: 8319 - DNA, 305 bp, Homo sapiens
  source 1..305: mol_type = other DNA
tcacaggagactcagtgaacagagaattttgttttattaggctgagtggtataagcaagtttcctttttagaccccataggagcccctcacacaatagacaatttacgtaagctaatttgagtggatttcacagccactggcccctttaatgaggccgtctttggcagcctcagaaccctatcatagaaggcatcaagctataaatgacgactttttttttttcaaatgttagcctaagacactcagaggcctgagtgtctccaaacacaatagcaattcattgagtgcattgggagggatttca

SEQ ID NO: 8320 - DNA, 407 bp, Homo sapiens
  source 1..407: mol_type = other DNA
tccgatttattactcagagctcaagaacctgacctcattgactagaggctactttagaaagagagtcagtttgacagcctccaaaactaatcacattttctgaaatttcagtaatttccgtgtgtgagggtaatactggtccgcacccaaatttgaattttagctcccatgattcccacatattgtgggtaaatgcgagatctcagaactcgagctgcctcgggccgcttcgatgggcacagatccgccccctcgcagcgccccgccccccagcgcgttgcacgccgccccaccccggccgcgacgccccgccccgcgcctaggctgttgctggccgcggccgccgccctcccccggcccaatggcgtggcggcacagtcagtgatgtgacgctcaggcttgtccgg

SEQ ID NO: 8321 - DNA, 276 bp, Homo sapiens
  source 1..276: mol_type = other DNA
cccaaagagtcgtgaataatgaattgtgttgacacggtacataatacggtatttctcatttcactaagtaattactacctgaagtgcctaccttcagtaaggcatcaaggaggaaataactcttagctttacgcagcaatggggctttataaggcttcttaacgaacctgagaaaaaggatctttcgttttgggggcagaggctgatgtgctgcaccccctaatcagggaggagagtcgctgtacctcttctgtctcttttggggtacatgccaaa

SEQ ID NO: 8322 - DNA, 646 bp, Homo sapiens
  source 1..646: mol_type = other DNA
ctgaaaatatttctctgcagatggaatctgtattggtcagtaggagaagccctcattcttaggtatttcttttgaaaagctttttctcagataaaagaaccaccacaactcgtgttggatcataactacgttttgtattgctgtcctctaattaattttaggtactgaagaacttaatattggcaacatttttaaatccttactcgatgtacaatgcatattcccaaactgtggaaaggacacctttttttatttgtaaaggtggaaaattgggctattcatgttaaatattcaacaccaatgatctacttttaaccatttaagactacttttcttataggtagttgatattttaaaaactttagatttaatgtctacatgtgaaaattgccttttaattgttaataagaaaaccaaatgtaggaaaaataaatctaccataggaatgttagttaatattgatatatcatggtaaaattgatttctcactagcttagaaaatgtaactttataatttaaaccagctatgctattttttcataaaggcatttgtagtacacagaaaacagtagtttcagtagtgtaaaagagtttatacaggccttaaatatcagactttgtaacaggtagaaatattacagaataa

SEQ ID NO: 8323 - DNA, 458 bp, Homo sapiens
  source 1..458: mol_type = other DNA
tatacatatatacacacacacacacacacactgtatataggtgtgtgtgttctgtgtgtgtatacatatattctactttattagataatggcacattgttttccaacttgattaaccaatttacttaagtcgaccaatatctgttattgttacacttaaaattttgtttaatttaacaaactatgtaccaaccacttctaggtactttttccaaatattggtactttgtaataattctcaaatatttattattacttatgagaaaactccgcttgcaaagcgctaagccagcggaggttgcagtgagcgcagatcgcgccactgcactccagcctggacggcggccgccccccgcccctcgtcccaggctgcaacggaggcagagccaacgcactccaacgcgtgttcccggagaagaacgcatccgggtcacgggagccggtgtctcaggctccgcc

SEQ ID NO: 8324 - DNA, 499 bp, Homo sapiens
  source 1..499: mol_type = other DNA
aggaagaaatctacacttgcatttctcgtagaaacgtgtttccttatatgtatgtactagcaggctccttcaagcacatgcctaaggttgaaagattcaaatataattatagcctcttaaattatcatcaaatgaaatatcaggttatttgcactggatattttttaaaagaaaatatttgattttaaaatcaaagagttcttggttttccatcatttcactaattgtcttactagagacccgagtctcctttgtcaaaatatatttcagtacgcattttaaaaaatatgtgtgtgtgtatacttaaatatatatatatataaagtcttggacttattttcccagcgtcgcgaaccacagcggcggaggtcggctaaaacgcattgcgcggagcccacgcgatccctgggacgccggagacaacggggctcttgggaggcgcggagcccggggaagccggggatgtgcgcgtgagccgtgcccgcagggtctccccgcc

SEQ ID NO: 8325 - DNA, 615 bp, Homo sapiens
  source 1..615: mol_type = other DNA
aggggggcgagaagaacgagttccacgccgtcttcctcctcccgggctaactgcagccgcgggcggcaggaaggcagccgcgcggggtgggctcttggggactgggcgcagggctccgcggcgcggctgggctgcggctgcccgatcggcgagggccgggccccgggaagtctccagggcctcgcccgcgcccgacgggcggaggaaccgcccgggcaaagccacgtcggtggctgaccgcgcggcagggaggtgggcaccctgtccacacccaccaggaggctgacagctggcgagcgccaggcggccgggacgggacaagggccgcagcgcgccggagggggtcgctctgagaaagccgcgctgggcgctgcccgtcgccaacgactccccctcgcccggatcagcgtggagagccgcggcttcccgttggctgtgccgggccgaccgggtgggcactgggggccagggcgggggcgggcgcgcgagcctcgcctcgtaatctcgccccgccccctcccgcacgcgaccgcgcgcgctcccgagccgtcgggcggggcccaaggggcggggcctgggcggggcagtgtgcgcattcgaccgagcatgtgtaat

SEQ ID NO: 8326 - DNA, 691 bp, Homo sapiens
  source 1..691: mol_type = other DNA
ttgcagccagctggataaaaatattaggtcctcacatatcttccttttctaaggagacacctgaaagtcacactgggcagtctgtcacgtatcgaaacatgcagaaggggggcgagaagaacgagttccacgccgtcttcctcctcccgggctaactgcagccgcgggcggcaggaaggcagccgcgcggggtgggctcttggggactgggcgcagggctccgcggcgcggctgggctgcggctgcccgatcggcgagggccgggccccgggaagtctccagggcctcgcccgcgcccgacgggcggaggaaccgcccgggcaaagccacgtcggtggctgaccgcgcggcagggaggtgggcaccctgtccacacccaccaggaggctgacagctggcgagcgccaggcggccgggacgggacaagggccgcagcgcgccggagggggtcgctctgagaaagccgcgctgggcgctgcccgtcgccaacgactccccctcgcccggatcagcgtggagagccgcggcttcccgttggctgtgccgggccgaccgggtgggcactgggggccagggcgggggcgggcgcgcgagcctcgcctcgtaatctcgccccgccccctcccgcacgcgaccgcgcgcgctcccgagccgtcgggcggggcccaaggggcggggcctgggcggggca

SEQ ID NO: 8327 - DNA, 323 bp, Homo sapiens
  source 1..323: mol_type = other DNA
atgaattctaatccaggctcaaataattagctcctgtgttaaacttaaaggccttaaaaatcaaaaagtacacttcttttcttctgatgtaggacaggcgctcctcacggaaataaattcagttactttttttcttgttcctctgttcccggggaaactgcagcggaagacggtccttcccctccagcagcaattgaagtaggaagctgcaacacagactgcggctcctccgccaattacacatgctcggtcgaatgcgcacactgccccgcccaggccccgccccttgggccccgcccgacggctcgggagcgcgcgcggtc

SEQ ID NO: 8328 - DNA, 432 bp, Homo sapiens
  source 1..432: mol_type = other DNA
agtataaagagaatctgattttccccttttctacttatcttgaaatttagcaactccagcagaccctatattggagtgaatttgtgtacatatggactttcaagattttgtttacatctacaaagtttatttaaaaaatcatattcttaaatatgtttggggttctatttattcattgtactttagaaatactaagtgtgactgttgaagttcctttatctaagtataattatttttagttctctttttagagaaatcatgctatctaacatttctttgaaactctacagggcttaattaatttcatttaaaatcgttgcttatattgtcaaccagggtcaaaacatgtctttttttaatttttaaatgttaccattcaagaggcaaaagacccaggctctgtgtgctggtatccgaagagcaggtcttcaa

SEQ ID NO: 8329 - DNA, 284 bp, Homo sapiens
  source 1..284: mol_type = other DNA
aaccagttccagcccaggaatttctgggtggaaaaggtgtcccctctcccccggcttcaggaagggaaaccccggcccctggcttcctgagctctggaaaagttccgggcctccggagcatgcctcctgggcttatttaggaagcgaagttagcgccacacatttggctccagaaatttgtcggcgcggccgacgccctgtgtccgtgggaacccaaaggggtacgcgtctgggtgagccaggtccgcctcttccctggcgctggccgggggcgggggtgggta

SEQ ID NO: 8330 - DNA, 341 bp, Homo sapiens
  source 1..341: mol_type = other DNA
agttccagcccaggaatttctgggtggaaaggtgtcccctctcccccggcttcaggaagggaaaccccggcccctggcttcctgagctctggaaaagttccgggcctccggagcatgcctcctgggcttatttaggaagcgaagttagcgccacacatttggctccagaaatttgtcggcgcggccgacgccctgtgtccgtgggaacccaaaggggtacgcgtctgggtgagccaggtccgcctcttccctggcgctggccgggggcgggggtgggtagtccaggctcttccaggaggaaggtcgcagcactgaacaccctggccggggttttgacagct

SEQ ID NO: 8331 - DNA, 594 bp, Homo sapiens
  source 1..594: mol_type = other DNA
atggaaacattttaagatgttataatcaatttattttttaaataatgtatttcattttaattttttaaattttgttgtttaagagaatgtttgattcatagcatttgctttgaaagataaagaaataagtactcttaaaactttattccacccaattttgtccatttaaaaatcagttgtctaagctatatgatgattctatattatcaaacattataacatttctacttaatttcataaattaactaaattttagttttatatggatttaatgttcacgcttgttctcaactattagttttaacaaaaagagcccatgaaaatatgaagaagtctgaaagcttgaataaatttttctttatccttggaatttgataattttaccagaatctgtcccataatcatcatattctatcagtttttccaaaaaataatttgctctttcattagactgtatattcagtttttctgacattacagagaaatcaaaatggactttgtacaccaagtttggttaattccctcatgttgtgggagggactcagataattaaatcatgggggcggttcccccacactgttcttgtgctcatga

SEQ ID NO: 8332 - DNA, 552 bp, Homo sapiens
  source 1..552: mol_type = other DNA
gcttgggtgaggtctttgacatcactcactgcagcgattgccggcaaaccctgagggcaggaattttggccttttgtatctccagtgcctagaacagtgcttggtacacagtagcaagccctgcagatgcaggaggcaccacctctcctgaggggtgatgcgccgcttcctgggcaggctcgggggagctcatttatccaagtatgtatacacgggcttgcttaaacctgccctattaaaaataataatgtatatatttatgcacgaacatacacacatatatctatacaggtctgtacatagacttgcttaaacctaaatacagcccctatccaggtatgtacatacatatataatatataaatataaagacatatatatgcacagacttaactccattggagtgtcgggagggcaactgggctgccctctccgccctccaggactgcgggacaagtctcccggcgcccgggtcgcaggagacccggagccctaaaacggcccctgcgcggcttgggccttccggcttccgtccgccgcggccgccattgg

SEQ ID NO: 8333 - DNA, 400 bp, Homo sapiens
  source 1..400: mol_type = other DNA
taagtcatttaacttctctggaagaacagcttctttacaaagtaatcaagaaatgtatttattatgaacacgcatgcatgtgtgcatgtgtgtgtaactgttgcgaacacttaccttctaactggagctgcttccagctaagtaggtgttccaaataccaggctgctcttttggtttaaaggaacgcctctgcctttgtacagcacaaaagaacaccagttttgcttttttttttttttttttttttttttttaagaaatcacacggggactgaataaaaagcgccttgaagctattcaagagttgcaggacctgggactggtgccagtgtcctctgtggaagatcttggtcagacccaattttattgcaatgatgcattcccaacatgctgacagtgag

SEQ ID NO: 8334 - DNA, 388 bp, Homo sapiens
  source 1..388: mol_type = other DNA
aattgatcatagttctcacatttttcctattacatagaagtgagtcctgacatagaacaagtttagaagtacctacttctcagtgaaataccattgctaggaggggacactcactgtctctggaggttcttagagtgtcttgagtcaaaatcaccctaagaaatatcaaatggcaaatggtaggtgattttatttattttacgggataaaaatcctggttcaggctactagatctagtgaaagcagcagttcaatttaattcaatagataatttatttagcacctactcttggcaaggaaaagttctacacactgcagagatgcagcgatgaactagttcagaattttagagatgtgaaaagtctttctagtctagcctcctggtgac

SEQ ID NO: 8335 - DNA, 468 bp, Homo sapiens
  source 1..468: mol_type = other DNA
gataacagtaatcagaaaagaaaatcgatgaacggtgagggctgggctccagccagagtcgcccccgctgagcctccgcctagcgcgcggtggggccaggaatcgaagcggcgctggccagttggtccaaggctccacctgcattgggcgcaatccagtccgggacttggctccgcccgggagcggcggcctctccggtgacagaggagtagtgagcggcacggggtgaggctgcagccaactccgctccccgcgcactcggctgcccaggcgctcggaacccagcagcggcgctcctccgcggtgccggtcgcccgcgatgcccgcttagcagcgtgtagcagcggccagcatcaccacacccgcggcaccgcgctgccggccgcagagccgggccagagccttgcacccctgccccagggactcaccgaagtggaatccaagtggaatttggatttggagaagagt

SEQ ID NO: 8336 - DNA, 301 bp, Homo sapiens
  source 1..301: mol_type = other DNA
ggactgagacccaagagccgcggcgcgcagttgatttcggggcgccctgtaactgcaagactttgtagctattgaaagttcaagtggaaagaatgtgcctgccattcttcatgtgatcataacaatatttctaagaccagtccacaaaatgtgaacttcattaagttttaaaatagatcgccgtcgttaaaaacgccgataacagtaatcagaaaagaaaatcgatgaacggtgagggctgggctccagccagagtcgcccccgctgagcctccgcctagcgcgcggtggggccaggaatc

SEQ ID NO: 8337 - DNA, 576 bp, Homo sapiens
  source 1..576: mol_type = other DNA
aaacattttaagaaatacagtatttgctctattactgtgacatttaatctattacaactatagagttaagacaactgtgattcctaagcttaattcacatgattgatcaaaaccaagcttaattctgttttaatgttgtgtattgctggaagtaacacaaagcattaataaacaaaaggaattcgatacccattttgggtaaatagtattagatttcattttggcttttaaaaaacagctgctgtgctatataccgccgtatccagtagttgttaaatacctgggcaacatagcatgcttgatgtcttataagtgcatcagctgccgcacctgcgatgcatgcacgcgtggaatgcagaattccattttattttaacttttaaaggagttaaactctcggggaggtttccctttaggtgaacggtcccactgggcacggaccaatgggctcgttccttcccagcggcagggtgggacctccagcctgggcttcggagacccgccccccgtacgtggcgtgcgggcattgcgctacgcggcgcgggccggtttctacagcgcgtggcgccccccggc

SEQ ID NO: 8338 - DNA, 605 bp, Homo sapiens
  source 1..605: mol_type = other DNA
gggtggtaaggacccccctggggagacaagacctcgcgcctctgcccgtcgttctgggccaagctcggcccagaatgacgggcaaaggccgggccacgggcgacgcgagggcctccctcactcaccgtgaagcgctggtcgccaatgctgcccacggagaagcagtggtcgccagggttcacagccccggtcagcacctggtgcaggttcatgtcggcgccctagtcctgcaacggaccgggtcagcggctgcttccctccctccttccctcaggggcggcggccgctcttcggtggcgacggcagaagcagcgacaggcgcctggagccggagccgctcagctggggcccgcgactcatcccgagccccggagggcgaggcccggagggggcgggtcggcgagagggcggagcgccgcgctccttcgcgcacctgtcactccccgcgctagcccaggtgaagctcagggtcccctcaccggccacgacccggggccgactcaccggccaggaaggccgcgctgtcccttcctctggacctcgggcagccgctcctgacccagcccgagtggcgcaagcagtacgcgctcgcaccgactttttta

SEQ ID NO: 8339 - DNA, 308 bp, Homo sapiens
  source 1..308: mol_type = other DNA
gtttctatacacattcatgcaacatttacagtcctgttcctctgtattccaaagaggcttacggaaacagatgtttgtcaattataatacaaaacttgtgtcaaaatacaatgagagttgaatctcagtttgtagctgtgcttttccaaaacaaacgctcaatgcagggctggtgtgttgttattaccagcactatttcaaatcacgtgttaagataacttaggctaagaaaatagattaagctgctaacgtagacgtttcaagggtcacattttcgccgggacttgtagtcctacctaaaaaagtcg

SEQ ID NO: 8340 - DNA, 376 bp, Homo sapiens
  source 1..376: mol_type = other DNA
ttccaaaacaaacgctcaatgcagggctggtgtgttgttattaccagcactatttcaaatcacgtgttaagataacttaggctaagaaaatagattaagctgctaacgtagacgtttcaagggtcacattttcgccgggacttgtagtcctacctaaaaaagtcggtgcgagcgcgtactgcttgcgccactcgggctgggtcaggagcggctgcccgaggtccagaggaagggacagcgcggccttcctggccggtgagtcggccccgggtcgtggccggtgaggggaccctgagcttcacctgggctagcgcggggagtgacaggtgcgcgaaggagcgcggcgctccgccctctcgccgacccgccccctccg

SEQ ID NO: 8341 - DNA, 320 bp, Homo sapiens
  source 1..320: mol_type = other DNA
taaaacagggataatctatatcatagattacacatattaagttttactagtattattaatatttccatggctaccccgggccagggctcctggcggtctcgggtggcccctgaggagggcaagccttctgcctttaagatcatcatcataatagtcaataatgatggcagcagacactaacattcacgcgttcttgttaagtgcaaggcacagtgcaaatgtggagaggctcagtaccgtatcgtcctgttctccagcgcccagcgatctgggcctcgcggtccgagtccggctcccgggccgccgcccagcccttctcc

SEQ ID NO: 8342 - DNA, 510 bp, Homo sapiens
  source 1..510: mol_type = other DNA
gggaaaaccaaggctccaaaggggacttcctctcctgtgggccagacccgggggcagagctgcagcatttcaaatcctgaaaacctccccttcattttgaaggaatagggaaccgtgctctccccctgaggaaggtaactgcagcaatgagtgcccgggctgtgcttggagtaccagtgctcgcccggggctgtaagcagccccgtctgcttttgctgtgcaaaggtaagggtggaggccgctccactttcttcaaaataacataccaaagccgctttaaaatccgtaatttttgggttgcattggttctaccctatatgcatttgtttatgtaaaactacagtgtgctctgagatcgggagagtcggctgccgtctgggcctgtgccccacctgcgtgcgcccgggccgagccagccccgccaggtcgcctccgcccggctgccggcccgagcgcgcggctccgggggcggactcccgccgcccagctgactctcccgccccggggagg

SEQ ID NO: 8343 - DNA, 270 bp, Homo sapiens
  source 1..270: mol_type = other DNA
aagtttcccccatactgttctcctaagtgggatttcccatgaacaacatgtaggaaagtttggaacttccatggttttgaccaaaatgatgataatgatataaacactacagcaaaggtcactcttgttatgctttagcaaagacctaagagagatgatctgaaattggaacttatgttttttggaaaatttgcagctttctgctgcagaatttgtgtaagaaatggcctggcagcctaggaggaaaaactggttttgtggactgggccc

SEQ ID NO: 8344 - DNA, 370 bp, Homo sapiens
  source 1..370: mol_type = other DNA
gcaaagtgatctttccatagtgtaaatcactctctggagtaatcctacttaaaaccgttttcagcacagggagactctgagtagcttgaggatcctatcaaaactcaggagatgctcagtaaatgttgattgaactatgactgttctcaacagaacacttgtcaaaatgtttttgcccctctgttttgacagtcccctgatgtttgcatgtagaagtgcagggattattacactgacacaggggctatctctggaagcccctcaaggataggggccacccagaaaacgtttattgagtgaatgccagccgcagaaatggcccctggaaggcaagtcttccagcgagtggagggagccgcgcgctctgcgc

SEQ ID NO: 8345 - DNA, 580 bp, Homo sapiens
  source 1..580: mol_type = other DNA
catggttaaaaaacgccagttttgtgtgagttgtaagcaaatgcaaactaatatgcttgcttttagatgtaacttgttgatgtgtgtataatttttttaaaaagtatatactttcctccttcattgattttttagaattctgagggatttagcctttttagtatttgataaatttatacatttaaggaaaaacctgcttctatctaaatataaatgatgagtaaactgtatactgaagacaatgaatagttagaagtagcctcttttagaaaacatttaatacttttaaaaaatgttaaatcatttgtttagaagatatctaaaaggattttatttctgtcagcattttctagaggtattaactcttaacagcctttaagcactaaaaagattttagaacaggttaggacaaaacctggatataattttgaagcttctagtaaataggaaagttttccattctttctgaattggaaagattgagtttagataatgaacaaatcacagttaagaattttttttttcttttgccttactttcattggccatcagaactaaaatgaagaaacaattgtatcat

SEQ ID NO: 8346 - DNA, 333 bp, Homo sapiens
  source 1..333: mol_type = other DNA
tgcctgtacgcataatacaggcagccttttagaaacctagcactttgggagcctgaggcagtgtttgatgatcacttgagcctaggggctgaagtgaccctatgatcacaccactgcagagagagaccctgtctgatgattaacatgctattgctgctttatgttaacatctcaaaatattctgccacatttgaattcaagaggacttctattggaaaaaaggaattgtttttgaaaatgatgtctctgcagttgcacagactgtgttggacctaggtccgtagaacgccgtgatgtcatcattgatgtcagagaattggtgacctccttaac

SEQ ID NO: 8347 - DNA, 308 bp, Homo sapiens
  source 1..308: mol_type = other DNA
gaaggcttctttttgacagaacagtcagaaagttgtttcctatttgtttagtagcaaaagacaaattaataaatccggtattagctttgtggaatgttgtgagatgacatacagcaaggggggcgggcaggacacggacttgtctcccccaccttgatgccaaggtggcatctgggagatatctcgaagccctggcgcggcagcacggcgcccctctccgcgggcggggagcgagcgcgtgtgcgcgagagcgccgggcggcggcgggaggaggcgcaggcgcgctgctcgcccgtctgcagccccga

SEQ ID NO: 8348 - DNA, 261 bp, Homo sapiens
  source 1..261: mol_type = other DNA
ctttccacatctgtaaaataatagttcagagcagagtcagtgctgtgccactgcacaccaaacaaaataatattaataaaaggaaaataatttctatcttgttggatttttgacacattttaatggtcaatactagaaggtgttgacaattatatattacctaattttaaaaaggtgtgcttgttagaaaagcagaaatcttcacaaatactagatttaaaaaaataatcgttcattcaagtgatcatttcagaagagctc

SEQ ID NO: 8349 - DNA, 364 bp, Homo sapiens
  source 1..364: mol_type = other DNA
tgtggagatgaaagatggttctccacttctactcaaagtacaaatcaggccggcattttgaaaaagagacaggtttatatttcacttttggttattaaaatattcactgtaggaaataaatttgtaacccatttctcatattacctacacacagaaaaacaaaatttgatatcctggggtttatttgctggataaacgcgaggagctgtccgccttgcacgtaactttgcaaacgtgccagaaagtttaaaatcccgctctccgggactgccgcgccgctccccgttgccttccaggactgagaaaggggaaagggaagggtgccgccttgactggggaagggtctgaatcccacccttggcat

SEQ ID NO: 8350 - DNA, 613 bp, Homo sapiens
  source 1..613: mol_type = other DNA
gggtcgggcctttgcagctctgcgcgctagtgcactgcgcccctcccgccgccggccaacagcagcccccgcgcgagccgccggcggctccgggcgcctggcgccagcagatccaatggcgggcaggtgttcagcttgctgagcctgggctcacagtaccagcctcagcgccgccgggacccgggcgccgccgtccctggtgcagccaacgcctccgcccgatcctgctgatccgcgacaaccgcaccgccgcggcgcgaacgcggacggccggctcatctggagtcaccgctggccgccccaggcccaccgccggctactcgacatctagagcccgcgaagctggcgcctcgcgcgcggagaaccagacagcgccgggagaagttcctgcgctcagtaacctgcggccgcccagccgcgtggacggcatggtgggcgacgaccctctgggggcaggtaccggcccggatacggcactggctacttccagtacggtaagcacccgtgcacctggtccccagccgacgtggctgcctgggcgcggcgggccccggtcctcgcagatccgatccctcgcgcctgcagtggcagccctggaatccagtgcaaaccg

SEQ ID NO: 8351 - DNA, 516 bp, Homo sapiens
  source 1..516: mol_type = other DNA
cacagaatgtagtctctgccaagtttaaataaactccaaaggattattggtagcttgcaaagtaagaaacaaggagaagcatttctcctgctccatgaaaatgtgattcattccttcaatgaaaaagtcaggggcttgtgcaggcacaacagctgtggttgctgctcccacaaggggtcagtctggattattgctggaggctggcatcatcccacagtgacacaagataactggcaattgttttaggtgaagaccagctcaagtaaaggcttcagtgtctttgatctgggtctgagggttatctttgaagctcacactgaacagatgtgagcagtttagttgtctgggtaaatattttgattcatcaacctcagatgttttgggttcaactaaacagaatacatctatgtgatttatggaaaatagaatccatatgtttctgcttcatttacacttaaatcttcaaaaggttgtgtgaagagctttttgatgtcgaagatgcctctgcgcaaaagt

SEQ ID NO: 8352 - DNA, 439 bp, Homo sapiens
  source 1..439: mol_type = other DNA
agataaattaaacagcatgcgatgttttactgactttcagtatttaacagaggtgatttaatttttttttaaatccaaagtcaaacttctttataagatgaaggagaaaaatgtcttataaaatgcatatgtgaagatgccttctagacttgttctagtctttaatgaatcttccttgtagacactgtggagatgaaagatggttctccacttctactcaaagtacaaatcaggccggcattttgaaaaagagacaggtttatatttcacttttggttattaaaatattcactgtaggaaataaatttgtaacccatttctcatattacctacacacagaaaaacaaaatttgatatcctggggtttatttgctggataaacgcgaggagctgtccgccttgcacgtaactttgcaaacgtgccagaaagtttaaaatc

SEQ ID NO: 8353 - DNA, 323 bp, Homo sapiens
  source 1..323: mol_type = other DNA
ctgacctcaggtgatccaccggttacaggtgtgagcactggcccaagcgaacagtgcagccttcagtctgtgtccaaaggcctgagagcccctggcaaaccatgctctaaggcaggaagcatccagcggtgcccaccccattgacactcaatattaaccgttacagtattttttaaagtccctagaaaagatcaataagataatcagtaaatattgttttcttttcttctttaaaataaaacgctgtgtttctacatcaagaagagcctgtgacttaatgccaggatacatccaggcaacaaagactgcggttcctgttactc

SEQ ID NO: 8354 - DNA, 472 bp, Homo sapiens
  source 1..472: mol_type = other DNA
tgtaaaaattaaggatgtgtataataatcacgaagttcagactccagactgaatcatctttttctagaccttttgacttattgagaaaagaatctaaataggtaaccactggccacatgtggctaattagatttaaattaattaaaattaaataaaattttaaaactcagttgccagtcatgtcagaaaattctattggacagttctagagagatctaagagacagtagcgtgcaatccaagcccagagactggtgcccaggctcagaagatttaaaaactggtagtgccaacagaaattatttagcctcccagacttaaaggggcggggcgagcgcagcgccctccgggtgggcgccgtcaagaggccgggggcggggccgagcgcggctgggcggggccttgagaggccggccgggggcggggaggctggcgggtcggcgcgggcccagccgtgcgtgctcacgtgacgg

SEQ ID NO: 8355 - DNA, 730 bp, Homo sapiens
  source 1..730: mol_type = other DNA
ctgtttgaggccagacaaagatttctatgtgtattcatgtgggcacatgtgtacagcatgctaaaatcataagcatagccatgtaacaatggttctgtttcatgatttgaaagtcattgacagaccctcaattggaaaaaatatatatccatattgatcttactttgtaagttttcaatttctagaaattcttttcattttcaactaaaataatgcatgtgacatgacaccttggtataatggacaccttattcaaacagttctgtttgtatcttatttttagaaattataaaaagaagtatattgttttttcacctaacaaagttgaatttgggaaacattcattctgatttttcccctgataacgattttctttttaaaaaaaataagctaaaagtgtttccctttttatttcccatttttaagtcagtaatggtttttcttaaaaatgatagaaatgttgacaaatactgaatatatttcaattttcctcaaagatttcaaaggacatatgcctttcattccaattttcgtaacaattgggatacaacttgaaaatgttcagttcccaagtattttttatatattagttaaaggaatgggaaacctagaaataaagtttattcttttttattaagatatcttaactcattaaaggaaaaaagacatataaaatagctttcactgtgtattatggtataggcaatttatattgcttattaccttcatg

SEQ ID NO: 8356 - DNA, 502 bp, Homo sapiens
  source 1..502: mol_type = other DNA
ataatattatgaaacgtcgttgaattaaaaagtctttatttcagcctaggcaggcaaagccacccttgccctcctctccttggccacgtcctcaggggtgggcgatggaaccctggaatggaccaacagcgggagccggcgggcaggccgggggatccctgcgtgggccgagccgggggcgccgcggggagggtcgctgtcagtcaggccgagcggggctcgctggcctgggggcggccgcaggggcgcagcgcagcctgagggcgcggcggccccggcagcctccgcagtggcagtggtggccgcgcccccgtccccggccgggcgcccgcgctgcgttccttgtcccccagcgccggcttcgggccgcggccgcccaggctgcccccgcccgcgcgcgcccgttggggggcccggggagcggcgcccgcggccgggccgcattgtgacgtagcggggccgcggcagcgcctccaccgcccgcctacttcggctgaggctg

SEQ ID NO: 8357 - DNA, 311 bp, Homo sapiens
  source 1..311: mol_type = other DNA
tgctggtcacttctcagtgacctacaagtcacgtccacgtttgactaacttgataatcaagcagttaaaaagtacttcacagttaaaggcggcattttagaactgtctcagattcgacgtctaaggaccttcgaatcgaagttcaccgctgttaatgccaaacaaaagttaaaagcgccactctttctattctttgctgctccagccggagtccgcagggcagggagcgccgggtgcggcccagtccccgcgcccagcgcgttggcgcgcacaccccgtttccgggcccagctggttaggcccgaaaccca

SEQ ID NO: 8358 - DNA, 484 bp, Homo sapiens
  source 1..484: mol_type = other DNA
gctggtcacttctcagtgacctacaagtcacgtccacgtttgactaacttgataatcaagcagttaaaaagtacttcacagttaaaggcggcattttagaactgtctcagattcgacgtctaaggaccttcgaatcgaagttcaccgctgttaatgccaaacaaaagttaaaagcgccactctttctattctttgctgctccagccggagtccgcagggcagggagcgccgggtgcggcccagtccccgcgcccagcgcgttggcgcgcacaccccgtttccgggcccagctggttaggcccgaaacccaggcgcctggagccctgcgccctctgcttccggcccccggcacgcccagggcgcgggagcggccgggtcagcccgcagacctgagtccggcccgcagcctcggggccccgcgggcgcagcggggcgggaggcggggcggcccggccgtgggcggagcggcggccgcggccgtgag

SEQ ID NO: 8359 - DNA, 638 bp, Homo sapiens
  source 1..638: mol_type = other DNA
tatcaatagctatcaattctatctatagctactgtaaacgttgtacatctctttcaatatttaaatatatttaatcagaatttgtggttttgcaacccgaattttccatttaaaaatataataagaaattaatcttcctaaacataattcttaagtttgtaaaaaataagtcagtttatttactttgtttccccaggaaagaatcctacatgaccacgaatcatctcaaagagaggccgggccattggaactcggcggccgcggcggaggctgctcccaaggcggcagcaatcacaccgggaccggctgcagagttcccagtcccgcggagcgctagctgccgggcggacgcggaagcccgagagtcctggtcttcgtcctggaggtgctcccagcctagcccgctgcgcccggctccgcgcctgggcaacccgggctccctcccgtccctggcgccctccgcacccgcctaaggcgcggcggtcgagccctggctgcgccctgtgggcgcgctcctccgaatcccaagttcgggtcgcgagtctgaacttgggaggaacgcgccccgggtccccgcccttcccggactgcccgatccccatcccccgcaaccgggagcgcgcaggcgcagccggccg

SEQ ID NO: 8360 - DNA, 296 bp, Homo sapiens
  source 1..296: mol_type = other DNA
aagtttcaagctagataacaaaagaaccaagtcttgaaccgtttcttaaatctgaattaggaaattctcggggagtttacgtcagctttaacaagtacagtaattaccgtattgaagctacttgttagtttagatttaagtcattatttttttgtgatttaattttttaagcaaggctacgcagcttcaggaagcgtttaccgcctctcctcgtccggctagcagagggcgctgtgagggaaggcgtcctccttagggctctgggcgttcctcccctgggcactgggcctgcgggc

SEQ ID NO: 8361 - DNA, 354 bp, Homo sapiens
  source 1..354: mol_type = other DNA
aagggccttagaagtaattagtccaatctctacatattcctccttttcttttgggcagaaagcaaagaaggaaggaagaagaaaacaatagtgatattatattatttgctctcaaaataacttctaaatttcccagcgagatattatatttgctctcaaaacaacttctcaatttaagtttcaagctagataacaaaagaaccaagtcttgaaccgtttcttaaatctgaattaggaaattctcggggagtttacgtcagctttaacaagtacagtaattaccgtattgaagctacttgttagtttagatttaagtcattatttttttgtgatttaattttttaagcaaggcta

SEQ ID NO: 8362 - DNA, 334 bp, Homo sapiens
  source 1..334: mol_type = other DNA
taagtatattaagaatataaacgggtttgataaaatgaacatttaaaaaactttgaaaggcataagaatcacaattttaaaaaattatagtttccatgccttcatggtggatcaatttccatagaagtctaccaaaaggaatgcagtctttctaagaaacaccgatttcagtttgtgctatatagtcgcaaatgtgagccataattcacattccagtgatgtcatactcctaggccgggccctaagatttttttggaacctggcgggcttctagaaagacgggggaaagaaggttggtgcaatctcgggcagcttgggggccgccgccgctaaa

SEQ ID NO: 8363 - DNA, 554 bp, Homo sapiens
  source 1..554: mol_type = other DNA
cggcccagttggcccacctccctcgccgccccagtcgcgccgccgcggcccccgctgcgccctcagcctccgaccgacacccgcgcctgcggcgccgcccccgccgcaccccaccccacccgcccgggaccccagccccacccgggagggagggcgccgcggccgcgccgaggcagccgccgggccggggctggcagcggagcacctacgcgcagggggcttcctcaaaggcgcggccgcgagcagaggggtcggtcccgggcgcgggcggcgcccccagtccgtcagcgccggcgggggcagcggcggcggcacatcacacccgccggcggccggaggaggaacgcagcgctgctcggattcggtccctgcactgccgctggtgcctcctaccgccgccgctggccggagagtcgccgcccgagcctctgctgtcgccaccgatgcagcccggaggtcaaacatccttctgcctcgggcatccggatcgacgccggacccggatttagcggcggcggcccccaagctgcccgagattgcaccaaccttctttc

SEQ ID NO: 8364 - DNA, 654 bp, Homo sapiens
  source 1..654: mol_type = other DNA
gcctgtcaacatttcacagtcttgtgaaattacatttatgtttttaaggcccacgttaaatgttatataagaattaattgttttctgtaattataaggtaatacttgaataaatgaaaatcatatgataatatatatttaaaaaagactttgaaaattattaagtatatgaacatggggaatatatttttattaaggtattttatttttataattcattctctttctacttttaaattgaaaatcttatgttgactttattagtgaatgtatgttgatttatgaaacagtataattttgttcctttaatttttaagaagtaattgaatccctgatatctttgtttcgtatctttgttattaaggtatataaataaagggtagtggttaatttaaaagtatactgtggtttgatttcaatgggcatcaatagatagcaatgttatctaatttcccagacatatattttaaaattcttagttgactaattttatcagctcacatcattgaaaagataattttgaagacatgttttgctgaaaagacactaagaaaaattttactgctccagttaattgactacctactgcaatttgaatgttaacattacccatctggtacagttagtcttgattaaagaattcaaagtggagtac

SEQ ID NO: 8365 - DNA, 393 bp, Homo sapiens
  source 1..393: mol_type = other DNA
tttctggacttgaatcagatccttaagataatttaatgcttttaaaaaggtgattatccttgtgttgttgataaagggattttctttttagatattggactgtgaggacaatacatggttttttattctggtaacccccccttcacaggaaaaggtggagaaaaagaagaggaagattagaagattttttttttctttgagagaaagagcggagataaacgaatgtcccctcatctccaaagaaaagttcatcggatttttattctagagagctagtagcagcaactccaaggattgtggaggtccggcctccagtggggctggtgctaccgcagccttagctgatgggcctctgctccccaggggccttctgctgccttgtatgggattccc

SEQ ID NO: 8366 - DNA, 520 bp, Homo sapiens
  source 1..520: mol_type = other DNA
ctttaaaaaccgttttaactgctattgaactgtacagtcagtagcaccgtatttaagagagtgagcaattctctgacctaggaatatagaattgtttaaatgtatttttttctcaaaaggcaggtatttaactttttatataacactgtcttttctagagagaaatgctcttaaaagacatgcatatttcaaaaaagaaattgtaggttgttttttctgttccttactaggaacaaaaaacagattgccctaaattagaaataaggaaaatttagcaacattctattctgaaaacctcagaacttccagggtctggtcttctaaattgcaagatctaggacatgtgagatatcacatgtgctttctggacttgaatcagatccttaagataatttaatgcttttaaaaaggtgattatccttgtgttgttgataaagggattttctttttagatattggactgtgaggacaatacatggttttttattctggtaacccccccttcacaggaaaaggtgga

SEQ ID NO: 8367 - DNA, 229 bp, Homo sapiens
  source 1..229: mol_type = other DNA
ttttttaaagaccagatcagtattttctcacgacaaccaattgagccttgatcctcacgtgatgtgaaaggcttgcactgtaacaaagcttttagcttccaaaaaaagaaaacaaaaaccttattttgactctaattatctcagttcctttttcttaaaacaacataagtttcgaagactgttataactggtttatcagctcactgagggcggaaaaatgccacttccc

SEQ ID NO: 8368 - DNA, 261 bp, Homo sapiens
  source 1..261: mol_type = other DNA
ctgtttaacagttaatcttcctagtacatttaactttcataagtcgattttttaaaagatgagttaatattaagaaccattcacgatttttcttatttaatcagcgagtaaaaagagaggtcttgggagtttgttttaataaataagtgttttatgtgaatgatgtagtaattgaaagggctggttggaaaataaaacgcgtgtgtgttttatacgtgtgtaagcccagtttcataaaagctgctctctgaggtatagagg

SEQ ID NO: 8369 - DNA, 476 bp, Homo sapiens
  source 1..476: mol_type = other DNA
caaggatagagaatataagttgtttgcattctaaataatctcttgcatatcttagtatatcctatgcaagtaaatcatctccaaatgtacactttgttttgcaatggtcttagattaaagtgaattaagtacctaaaactatttaattatttgagttcagccaatcagatttttgtctgatacagagtgaaaaaaaagaaagaaaaactttaatgccatttcattattattctaattaatgagcaactttactgtggaagtttgagtaagttcagcttctctgtgaagtaaatattcattgagtccccacagtgagaaaagaatcatgatgagaacatattctaaagagaaatatatattccgattacagaatgcatgatcatgccattcaatagtgaatatcaatgaggtaacacacaatcactgtcttctaaagtgagaagctcttaaggcaaagacgtaacattatcttaaag

SEQ ID NO: 8370 - DNA, 308 bp, Homo sapiens
  source 1..308: mol_type = other DNA
gtcttataacagggtctcactctgttgcccagactggagtgcagtggtgcatcttggcccaccagcgtaagccaccgtgcctggcctatccttagtgttagtctctcaaaagtttgttcaatgaatgaatgagtgaatgcttccaattatcaaacaccaattttgattttgatgagaacagtcataacccaatatttgaagattttgatttacctttgttattcccacataaaaaattgaacagaagaggcagtccctcaatgaagcaatatcctgtttgaataatttagcaacagcgcatttgtgtg

SEQ ID NO: 8371 - DNA, 376 bp, Homo sapiens
  source 1..376: mol_type = other DNA
cgtgcctggctatccttagtgttagtctctcaaaagtttgttcaatgaatgaatgagtgaatgcttccaattatcaaacaccaattttgattttgatgagaacagtcataacccaatatttgaagattttgatttacctttgttattcccacataaaaaattgaacagaagaggcagtccctcaatgaagcaatatcctgtttgaataatttagcaacagcgcatttgtgtgacagggcgtcccactcagacgtcatctagagccggctgccctctaggctaaacagattgtgccttcttaggcaaatgttccacctgcttgggggaaagaggcagtgggtcggaccaatcgcgcccgctccgacgtgtccaggtc

SEQ ID NO: 8372 - DNA, 244 bp, Homo sapiens
  source 1..244: mol_type = other DNA
ggtgccattgcactccagcctgggggcccaggtcagcagcaatctaatatttatcattaattagaaaactttaatttgtaatctaccagaggcgtcaccatcgctgaggagctggttaggaatgtcggctctccgaccatattttgctgaaaagaattcccagcttccaggcaggattcagccgcaggctcctccggaagaccaggggcagaccccagtgggaggggtcgggtctgcccacccg

SEQ ID NO: 8373 - DNA, 343 bp, Homo sapiens
  source 1..343: mol_type = other DNA
ggtttctacaccttagcagaaagggttattatcatttaaactataaactaaatgtctcccaaagatctctcccactgccataattttctcactgttataattttcctggcctgaggaacaacaggttacatgaccttgtttgccatgtggcaaagtaaaacagaggattaggaataaatagtaacttctcttaaaagcaaaatttattcaaagatctgtgctaacattcttaaatatctgctagccataataaaaaaaaatgtactttatgttcttagctccgcctaaatatttgccctggagcctcttttaaaaagttctaagttgctaggttataaatgac

SEQ ID NO: 8374 - DNA, 375 bp, Homo sapiens
  source 1..375: mol_type = other DNA
aaatatttgccctggagcctcttttaaaaagttctaagttgctaggttataaatgaccctgtaccctttctgcagaaagtaaaaatggccttattcagtaagttaaatttatgttgctatttctttacgacaccggaaaacaaactgagaactcagtaatccctccttacattatgtgggggtgatccgcaggttcggcatccgtggatttgaaaggcttccctggcgtgacatatttatgtttgcacgaaaataaagtttcattttcccggggtagttggcctcaggccgctgggacaggctggcctccgcgcgggggcgcccgagcagccgagccgccgggccttccggctgccccgccggaagtgctctcct

SEQ ID NO: 8375 - DNA, 277 bp, Homo sapiens
  source 1..277: mol_type = other DNA
aaggaatttgtttgagagccgtggtgcaatcacagctcactgcagcttctgggaccacaagtacatgcttatttatttatttatttatttatttatttatttatttattgagatggggtcttgaatggactcccaaagcgctgggatttggaaaccaggctggtctttaaagccctgaaaatagctctgagctggctgcaacactgtaactgccgagagttactatgaagttagcaaaacattgttacatcagagcagcgttgtcatcataattaga

SEQ ID NO: 8376 - DNA, 633 bp, Homo sapiens
  source 1..633: mol_type = other DNA
gtagctgccagtgacatctctttttaaaagcaaaaaattatttcatcttaaattttcacaagttcagatttttatgtatgttttttgattttacaaacccttaaattaagaaacggatttaacactgttggcaaatgatttaaaatcagggttcactttcatggaaagaagttgcctgatacagttttccacccatttggaacaagtgccccaggccgtttcccgagccctccagcggagcgggggataaggttaccacgcccgcggtggccggggacactctgagtgccgatgggcggtggcgcagatccgtcccggaaacctccgggctccttcccgcctttctcaggcccggcccctccaaggggtccccgcggggcggcgggagggccctgggcccagagccgcgcgggtgggcagtcccaggcgtccttagccctgagcctggtccgggaaccgcccagccgggagggccgagctgacggttgcccaagggccagattttaaatttacaggcccggccccctgcctgctccccattggcccatggtagtcacgtggaggcgccggggcgtgccggccatgttggggagtgcggcgccgcggcccgcgccacctccgccccccgcggct

SEQ ID NO: 8377 - DNA, 623 bp, Homo sapiens
  source 1..623: mol_type = other DNA
cctgagaggtcgggatctccgagctcgtccgatgtctccatcccagccaggagcttgcgaaggggcctgggattttggaatcctggcggacccaaaagccaccccgcacggcagcccgcccagagcgacggtctcacaggttccggcgccgtcgagcgcccaagcctcctgttggccgccagctgtgtccgcgacgcgctgggtcgggaggaggagacccgaggcgccggtaagtcccccgctgcaggtggcccggaggggcttcctccgggcggggttccgatggggcagcccccccgcgctgcggtgctgctccacagcgctatgcgcgcggcggctccgagggctcctggtcctcagccaacggccttctggggccgccgcctccctctagagctgctcgggtcccattgcagagagtcccgcagcgcccgccggcagccacggcacttcgctccccgccgccggcgcgtcccgccagcctgccctcggccgcaggcgactggacggcggttacggggcggtcccagcgccaccacgactggctgtcggctccgccagtcatgggctgatgacgccccggggctggctccgcccctagcggcagccccgcctcccctcca

SEQ ID NO: 8378 - DNA, 263 bp, Homo sapiens
  source 1..263: mol_type = other DNA
gagtattactataattattatccatcatttgctaaggggtcctttcagaagggaaaagcactgcaaagcacttagctgaataaacccatggcctatttaataagggataatttcaggacagtaagcacctgaggcctcttattaaatgctcttcacgagtaaaggttcaggcgcggccacccttgagagcgacgcccagcggcagtgctgccggcgtggggcggaagtgcggggcctggggccggcgcctggtgggtgcgggc

SEQ ID NO: 8379 - DNA, 477 bp, Homo sapiens
  source 1..477: mol_type = other DNA
agaggcccctacccaccagcgggaaagcaagaacctgtgcgagcacgtgctgcagccagggtaggcccacaaggccagacccctgagaggtcgggatctccgagctcgtccgatgtctccatcccagccaggagcttgcgaaggggcctgggattttggaatcctggcggacccaaaagccaccccgcacggcagcccgcccagagcgacggtctcacaggttccggcgccgtcgagcgcccaagcctcctgttggccgccagctgtgtccgcgacgcgctgggtcgggaggaggagacccgaggcgccggtaagtcccccgctgcaggtggcccggaggggcttcctccgggcggggttccgatggggcagcccccccgcgctgcggtgctgctccacagcgctatgcgcgcggcggctccgagggctcctggtcctcagccaacggccttctggggccgccgcctccctctagag

SEQ ID NO: 8380 - DNA, 508 bp, Homo sapiens
  source 1..508: mol_type = other DNA
agaactttgcagcagtcaaatttgtatcttttggggtcacaaatggaaaagcccgttcatggttttatgggcctcccggggcctcctcggcgagtcggcagagggagctgccgcgcgaggcctccgaggacctggggggattttcctgcgcgtccggggagttctcccagttggccgctcgggcgccggccaccgtcgtctagaacacctcccagggactctgccgagggacttgcacccaacgtgggttgggaatcaggcgggcaccgacaccccttcggtcaccccctgcggtgaccccatgctaacttcgcgaccaggcctttggcggggtcacccaccaggcggtggaagccgctcaggcagggcagcagtcaggccgggaactgcatgttgcgctagggactgcgcgcggcgccaagcgacaaccccccagcggccactgccccggcagcagcagctgcagcagcggcaactgctcgaatcccggccccggctcgggttaccc

SEQ ID NO: 8381 - DNA, 543 bp, Homo sapiens
  source 1..543: mol_type = other DNA
agatggcgccattgcactccagcctgcaaaaagacaaaaagtttaaaaaattttcatatgctctattttatttgagtctaggcaactgtacaactggcattagagtagtctcagactcaaatcaagacttctgatttgaagttccactccattaatttatttaatgtacattattgaacaccaactatttcaggtactgtgttaggtgcagcatataataagaaagttgataatctgtctattttacaattaaaaaaagaatgtgcaattatctggaaatctttgactatacaggcctgtatctgccgcgaggtccttcctggaggcaaccagatgaccttggctaactgatcttatcccttgggccgctgtggcacaggatgacgcctggtaacaagagtgccactctcgtcaaagtttaacttgcagcgtcccggccgggttcacagcgcatgggacaggggcgatgcgatgcggggcggagcggggcggggcggcgacgcgcggcgcggtgcggcgcgcggccgacgtggcagccgcagg

SEQ ID NO: 8382 - DNA, 358 bp, Homo sapiens
  source 1..358: mol_type = other DNA
tagagcctttgggtataaatatcacgcaccccatcatttggtgggtgggtgtgttgtaacaaggatgctccgtcttaagcattaggctgaattcttcttagagaagtgtttttttaatgaagaattttatcctaaaatattttccaaatttacttatccaacggtaatttgaatgagaacaactttctctcacaaaaatcaatcttctgcccagtttactatgattttgatatttttaaatccttcccataaatgctgctttttggaaaggtcactttagttttctttaggaaaatgagccttttctctcctgttaattgagttggcctgaaggtcatcaacaataatcaatatttac

SEQ ID NO: 8383 - DNA, 550 bp, Homo sapiens
  source 1..550: mol_type = other DNA
tcccgcacccctgcgcgacagagcgagaaccaagtaattggaggacgccattcattgattttacttataggtttaaaaatcacagttatattcccttacattttaccgaagagaaactagagtacctttctgtttctatataagcagaggaattctgcaaacctcctggtaaggactccacgggtagttattgcctgagctgcatatcacttttggaaatgccttaaattaaaactcgtcttgaaacaacatgacgtctcaaagaattggaacatcagcttttaaaataaaggtgtcatcagaagtgtgtagacaccgcctggcagggtctgcaccctcctcaggcccggagttacgagcggagattcgcggcggcgggcgcacctcgcccgcggctccggaagcggctgcggccccgaccggaaagcccccagcatcgcccgaaggaatcgcggctggcctgcggctccggcccggcctcgggtaccacgcgcctagtgggaagccgcactgacgcctgcagcatctcgcgagatttcgggctcagccc

SEQ ID NO: 8384 - DNA, 586 bp, Homo sapiens
  source 1..586: mol_type = other DNA
gcaggcggacccaggcccgcctgccgccggacaacctgttcccgcagcgcgagctctgcacacgctcccaacccccggagagagggctttccgcccgctgagctgcggggctgcagctctaggctccagcctaggtgcgtcctgctgtcctcgccggcggacgcggctggccactgcggcaccctcctcgcgatactcgggcgctagaaaccccctgtagcggaccgaacctgttgcggcggcggctggggccggggcggcttgggcggaggaggctgaggctggccggccgtgccctgcgcccagagcaccacacagctggagacacagcctccgtcttctccccatcgccggcgccgaaagcgcgcggccgtagacccgcggagtaataagcccttcgtcggctccggggactccctcgggctcgggctccctgctctagctggagacctcgacagagcgccggccccctgactgcccgcgaagcgagacgcggggcgccgggtctagcgcagtgagcggcgaggcgcggcggaggtgcagccggcagccccgagcgagccccgagcgactccaggaccgtcag

SEQ ID NO: 8385 - DNA, 745 bp, Homo sapiens
  source 1..745: mol_type = other DNA
gcctggcagggtctgcaccctcctcaggcccggagttacgagcggagattcgcggcggcgggcgcacctcgcccgcggctccggaagcggctgcggccccgaccggaaagcccccagcatcgcccgaaggaatcgcggctggcctgcggctccggcccggcctcgggtaccacgcgcctagtgggaagccgcactgacgcctgcagcatctcgcgagatttcgggctcagcccgcgtgcgagagcctctgaagccgtggctggggcgctggggtggcagctgccgcgggagcatcagctaccggcgtgaggcgaggcagggcacgcgcgccgtccgcagccccgttgcctgggctgcaggtccactgacgcgcggcccctgggtggagagaggggaggtggcctgggagcccgctccttttcgccgcagagcgcggcgggggagggagggaggtagccgcgcggagatcctcccggcgacatcactgaggcggagcgtagccgcgcctgctccccgatcgcgccgttcgtgctgcccgcactgcccgaggccctttgcggactggctggccgccacggggcgcgcaggagccgcggagggccggatcgctgagggagcgtcagccgcgcgccgctgcgggaccgcgggtgggcgggctgaggggcggaggagcctccggccccgcctcccgcgtgctgctgccggagccgccgccgccgcagccccgccgaggctttaaacagcg

SEQ ID NO: 8386 - DNA, 528 bp, Homo sapiens
  source 1..528: mol_type = other DNA
ggaccgcggcgccggctggctgcctcggccccccgcggccgcgtgagctccctcttggtggtggagggcgcatttcaatctggaaactcccagccactgacgccgctcccggtggggcggtggggggaggtctcctccttcttggattgaggctgcaaccaacagcccccccatcccaggtcaggggccgggactgtccggcggggaagttcagctgcgggtcagttcagctgcgggtccggccaagcctggcgcgcttaggcaccctagtccctggtccgcggccgggcgaggacggagggggaggggaaggggctgctgcctcctttcccaaattgtacaggcagtcaaaacagagccgcctagcgcctcgccccctccagccggccccccgggcccctcctctcggcgcccggcactctgcgccggcctctcagtccgggttgagccccacgtgtggacggccgcgcccccactgacagccgccgcccgccggcccgccccgcgccccgccgggcctctaaaacc

SEQ ID NO: 8387 - DNA, 512 bp, Homo sapiens
  source 1..512: mol_type = other DNA
tgtgacttcaaagtaatcattttcagattaataaactggagctcgtctttggaattatcagtttttcttttattacagaatctgaggttataacaaggtgaggccttccttaactatttctaaaaaaaaaaagtgtaatgaaatgttctttagttttttgatctttagtaaaatttcatcttcgtataaaattttattaacccttagtttgaagacataattctttaaatgatctgtcgactgcaaatagcattataaactttgtttttatttttaaatacgaatatcgactgaagctctcaaatcaatcaatattgttgccaaattttgttaacgatagagttctaatataaatgtaaaaaccaacctatcaacatgttttcaaaaatactttttgtaaagaacagtacaattttgtggtgtccaaatattcctttctttcttacaaaatattattggatctgtggcagatcgactgtcacattcttccccgccggagacgccagtcgcgg

SEQ ID NO: 8388 - DNA, 547 bp, Homo sapiens
  source 1..547: mol_type = other DNA
cttagtttgaagacataattctttaaatgatctgtcgactgcaaatagcattataaactttgtttttatttttaaatacgaatatcgactgaagctctcaaatcaatcaatattgttgccaaattttgttaacgatagagttctaatataaatgtaaaaaccaacctatcaacatgttttcaaaaatactttttgtaaagaacagtacaattttgtggtgtccaaatattcctttctttcttacaaaatattattggatctgtggcagatcgactgtcacattcttccccgccggagacgccagtcgcggggcctcctccctggggtgtgagcaggtcggcgcgccacacttctctaggtggccggacgcgcgcccagggaggagctggcggcggggcccaggctgttccggctgcggcacgccagtaggctagcctaacgacactcggagtgcgagctgcggctggggtaggggcacccctttccagcgggcgcgtgggaggacagttctccgggacccgttgcgtcagagggactgggcgggggg

SEQ ID NO: 8389 - DNA, 524 bp, Homo sapiens
  source 1..524: mol_type = other DNA
tacctaaaatctaattttatgtttagtcaattccaaggaaattctgttcataatgcatgctttctaattccagttattttatttgaaagtgatcccttttacttacttaaaaacagatatccttagtttcaatataaagttcagatttttgcttttaatagtatttatattcccaaatccaagtcaaatccagtgttctgtgggaccgaaaaaacttgaaccttgactggccctacgggcagcccaggcgggtcttgggtctgcgagaccactaggcgttctgccggcagtcagaaccgcggaacgcagcggcccgggaagctggagggggcggacccggccggcgagcgcaggcgctccctggctcacgcgcgcaccccggcccccccacccttacgccgcggcccgccctccggggcgggtaagagagcgcgcgagccaggacacgccccttcgcctccgcgagctggcgggcgggctggcatcgccgggaggcggggccgcggcagccggctgggtgcgac

SEQ ID NO: 8390 - DNA, 465 bp, Homo sapiens
  source 1..465: mol_type = other DNA
tcctgggaaactttaaatttccatgacgaattacattatctccgggcttagaaaattaaaggcctttgataaatgaggcctcagtttcacctctacctgcacacgggggcaggggatggatgcaaatccccacgcaaagttccctcccgcgccgctgcgggtgagagccttcagctgcggagcttggcacaccaagttgctgagactgtgacaccagcctccgcccgttccgcgcgggtgcaggcggcgagcctcggctcggacaccacagctctcctgcccgcgccgggcagtcctctgcctgtccagaggcagcactcccggctctcggctggctgtggctccagcactagcctgctcggcctcggaaacctgccagggagctcgagggctgcggggccgcggggctgcctcccccgctcctcccccaacacccccgccagggcttcggcggcctcccggagt

SEQ ID NO: 8391 - DNA, 350 bp, Homo sapiens
  source 1..350: mol_type = other DNA
tacttgggatgccaaatgcacttcaggtaatttcttcctaacgtaactaaggcacaatgattttggccaatacagcttaacttttgacaattttcctccctcattggagaggtaaaattttcctgtctttgccttagaaaataaaacggttcataggcaagaataaaaatcatatcctccattttattttttgattgttctcatttcttgaacagatatcatcaggagagccgccccacattttccaactcaacattggggattgaaccccaatccctcagagattttcttaggagagaccctaacctggcggacctgggcgcccgaacttgctgggggctcccggaccc

SEQ ID NO: 8392 - DNA, 421 bp, Homo sapiens
  source 1..421: mol_type = other DNA
gttctcatttcttgaacagatatcatcaggagagccgccccacattttccaactcaacattggggattgaaccccaatccctcagagattttcttaggagagaccctaacctggcggacctgggcgcccgaacttgctgggggctcccggacccgagctccgccgatgaggtcagcggagcctaggcgccggtagagcccccagacacgagtgtcgggaggccagcgcgccggaggcggcccgacagggatcgtttccttccggagaggaggccggctctggactgaggcgcggacggggggcgtccaagggcgggtgacggggaaataccgcggcccgcgcttctctccggctggcagcggtgccgcctgcggctcctcctccgggccagctcggagcccggcggcggggggagcgggag

SEQ ID NO: 8393 - DNA, 515 bp, Homo sapiens
  source 1..515: mol_type = other DNA
atcactcgaactgccactgcagtcgagaaaaaaaaaaggcattgaggaggtatactttttcttaatacgtacacttagaggtctggtatgataactgtaattgtctatagattttataaatccttagactgtagaaaacttctttatatattaattgggaaaaattctttgcagagcagtctagggaggtttacaatctccaaagattcttatttaatggatctgggcacggggatttttaaaagctccccaagaggacttaaaatctgctgcagcagcaagaccttaaataatctaagtgctaagttgcagccagcaccacttaaattatcaaatcttgtcagttacaggaatctccttggagctcaagaccaggaacttccccaagccggaggtccctgaggcgctctagcgcgctggccgcactcgcagcccaggtcgccagtgcgcacgcgcaagattaggtggggcgccagagccggggcacctgcgcaggcttggctgcgccctctcgc

SEQ ID NO: 8394 - DNA, 431 bp, Homo sapiens
  source 1..431: mol_type = other DNA
agatctttcatttttaataagaagtcaattttacctaaaagttaacctgaaaggccgttagtaacgtgactacagagataagttgaaacgcacttaaatacttatgattgtttctaattatgatgctgctgattaattaccgtaaaactaggctttacggtcaggcatagcggatttgcatcccagatctccatttactaagaaataaatgagagaatatacgcataaaatttttaggagtcagtgttccaatcaatgcccgctgcagctgttaggacttggcttttatttatgcacatttccaaagagatagtcgaaacgttaaaataaaggttcttttacctaacatggcgtccaggtgattttagcaaacgcctttagcaaacgcccgtttagcaaacgcctcctccgtcctttggaggagggcgggg

SEQ ID NO: 8395 - DNA, 338 bp, Homo sapiens
  source 1..338: mol_type = other DNA
tacatgcaatgtcatggatgaatctcaagatatttatctattgtatgactcccatttatatgaaattttagaaactacaaactaattcatagtgttgccctggattcttgcaatccccctcatacatcctatgtagcattagcattttaaatcttcatgccctgggggggaagtccctagctccctgagggaggaagtgagaggtaagctagcacttaagcttaaggggcttttgttttggatatttgctaccctcaaatctcatgttgaaatgtaatcatggatccctcatgcatggcttagcaccatcaccttggtgatgattgtttaaaacagct

SEQ ID NO: 8396 - DNA, 579 bp, Homo sapiens
  source 1..579: mol_type = other DNA
atgaaatagacctgagttatgcttcctttcatttaatttctgcagataaatagtttcctgagcaatggatgctatgcctggataccagtaaaatgtaaactcagagtgatccttgtgtatattgctatagatttttctttaacaagctattttaaagataatggcattattatttccaagccatagcttgggctgaaggacaaattgaaattgtctgccaataccaaggatattcttgtatatttgaaaaataacttattatttgaattgtgtttgaggtcataaaattgtctctggtctgaccaaacagaagtcatctttacagcagagatgtgacttgatctcaatgtaggtcctgccacataatttccacagaatgaaattttgatgttaaatgacatgtatacaaattcttccttaagtgaaagttatgctgtctagagagttctggtctatagaaacccaaaactaaaatctctcataactcaagtatggaatactttttttaaagaaattcttatcatgggtgcgcttgtgtctgacctgacataccctgcagctctcagctggctgcagtaa

SEQ ID NO: 8397 - DNA, 532 bp, Homo sapiens
  source 1..532: mol_type = other DNA
tgaaggtacaaccaacaagctttcttgtttttggcctgagtaactagaaatcctcgccggcattacgctatcctatgtttctgatttctgagatatgtaaaatacacacctacatgtgtaattttcacgcattcaaaccaggtggtttagccagccttaaaccagttaatgactgattgaacgattctgacttttacatgaaaaagcagtggtcagaggatgggctctcaaccgctactgagagaaacgtgcgcagacgtcgctcctccgcacggatgtccgcggcccgggccggggtgggaaggggctcccccacgctcccgcccaggtttgcagtcccgcgcggctcgaatcccgggggtcccatcgcctgccggccgattcgcccatgccggaggtacggcgggggcggggcctggcggggggcggggccagcactgcggtcgctgcagctgcgcaacggcgcccgcccctccggccgctctaggggcgcgcgccgcctctcgctccgcccaacccgcgcgcgagcctg

SEQ ID NO: 8398 - DNA, 557 bp, Homo sapiens
  source 1..557: mol_type = other DNA
ctatttatgtggaatagccagaacagacaaatagatttacttttggagtgatgaaaatgttccagaactcagaactacagtattgttaaggtactaaattatgaactttaaaatcattaaaatgatgaattttatgtggattctaccacgatttaaaaaaaatgactcatttcttacattgttaggcatgttaaaatcagcttacattcgttaatttttaacttttctgaagcaaagtaaacgattctgcagtttgaaaatttacagtgtttataatgaaagaagtttcagatttgtaatgcccaggctggaggctgggcagggacatgaagtttgcattttaaggtgctacctgaaatagacattctgtgtacaggcttgtgtcttctcactgagtggacagtgtcctggctctgttacttctgtgcacagggaagcaaaagctcaaattaaaccatgcctttctgttagaatgagccttttttacacaaggttagacatgcttttggaatccacttgtgcagaaggaatgccattgtattattatgggtaaataa

SEQ ID NO: 8399 - DNA, 645 bp, Homo sapiens
  source 1..645: mol_type = other DNA
tttattcaagttatatatattgatagattctttttcaaagttaacatgtaactaccttttttaaaaagattcataaaacctttgtttttctctatagctggaaatcagtcatccagatggaaaagttgaaaatttgtttatgggaaatagttttggaattactccctgttttgtcttcctcaaaagaaaatagctttatttgagaattaggagtttcaatagctcacagttaataaaggaaagtagattttgtatctgcctcaaatatttgtggcatttaacaagctataagttttcaaaagagattataccaaataaatgctggtttgttacatttctatttgatattagccagctcagagtcctttatttaaaaaaaaaaaaggaaagaaataggaacttctgagttgtttgtttctaacttatcagttttgagagaagtggaagttcacttctccttttaaagagcaaaattcaaacagattagacttctttagtctcttcatacgtgaattgtttcaccttgatttttgttaaagattaaaggaattaagtgaaaaagaactaatgccgctagatttcttacctgtgatatatttatgtacttgattattggagaattttaaaccatgtggaaaaaaatac

SEQ ID NO: 8400 - DNA, 517 bp, Homo sapiens
  source 1..517: mol_type = other DNA
taaaatctttttctgtaatttctatagaaaaatggggcaattttttttagtcgaaagatgttgttctttctcaaagaagtaggtgcatgctgcaactatccctttgcaaaatgaaattctattgtttccatttaaatttactatctacctacaaatcttagtactagtttgtatattcttaatgttaatttagagtgatcctgaaggttatatctttcagaacagttatttgataaatagcaaattttgcaagcagatctgagaacctaggctgccttgtttatttggaatgcaatggtatcttatcagagcttataattttaccttgggaggacaatactgtattacatttgaataataataggaaatatggcttcccaaatatagctgtgtatcaatgtacagaattaaaaatcaaaatggatttttaaaactgtgaaggtgctcaagccaatttttttcttaaagaatttagctggggctacatctgcagatacagtagccaattgatctaatg

SEQ ID NO: 8401 - DNA, 605 bp, Homo sapiens
  source 1..605: mol_type = other DNA
aaaaccaccatttattatttattagatgtgagcttagttataaaggtagatttttagagcatatcaatatacctttataaaaatagttaatttaaaaaattatggtttgttctgtgagctagataggtctatattcctcctcaccttaaaaaaaattttttttttaattttttgagacagggtttttggctggagtgcagttgtgcagtcatagctaacagcagctttgaactcctgggctcagttgatcctcccacctcagcctcctaagtagctggctatcactgttgtgagactggaatgtcactaatatctggtttttctttgtctacaaagtagagacagtaataatatataaacaaatgttaattttccattttattttcttacaagagcattaagttgaaaattaaagaatattgcataaagttttcttgttttactttttaacaattaactaaaaccataaccaggattgtttgctaagtaaaatatgtgtataatcaggcagtttgtaattagaggaactcaagttgtaattattgattcatttctggtaagtgactttacttagcacaagagagactgtttcctggacggaaact

SEQ ID NO: 8402 - DNA, 409 bp, Homo sapiens
  source 1..409: mol_type = other DNA
gtgtacctagatgtagttacagttacctatgtcagcagctctctggctgttaccaagggagcagtgaaacaaaactggaagtattgcaaaagttgccactcgagagtctaaatctagttttttgacgctggccgcggcaccggctgcctatcccagctttcacaagagatctcgttttatttaaagagatatgaggtctacttccgcatattcaaagtcggcagtagaagttgcagaggagagcgcaaagccggacttggccacaccctgggcttccggatttgggcacaggtgaggtctcgcgaggtgtctttaaatctcacgacgttaacgtcacagtggagttactcccttgggcgtttcttagcgtgcgcgtgcgtgctgcgcatgcgcacttactctcccccgc

SEQ ID NO: 8403 - DNA, 341 bp, Homo sapiens
  source 1..341: mol_type = other DNA
acagctctaaggagctgctaggaatttccttctgactgccaagaagaaaatgctgttgatgttaaacagttaagaacttgctttgacgccaaatctgttccctccagataagattgtgcctgcttcattttcttgtgaggctcagacacagaacatggtttctgaacatttattcgacgaatattttaatgatgattcaatagtaaagaccattgctgtatgttagagttttcaaaaatattgtgtacaaaaaataacaagacaatgaattttgtaaatgtatagaaacagttccccaagattcatctccattcttgtcccccatggggataaagagagtt

SEQ ID NO: 8404 - DNA, 520 bp, Homo sapiens
  source 1..520: mol_type = other DNA
gataattgttttgaatatacattttcagtatgtgcttatgatcatgaaagatttaacatatcttacagatttcacagaagtgtttcgggaagggaataatccatccccaagatcaggtaggtatagtcatgattcttaattaaaagtggtaggtttgactacatgtgcacatgtgatccatgaatacttgtaaatgacctctttaaatgccattcagacacttattttcaatagcttgttcttaaaatccagctgctgcattaagtttgaatagcatcagatttcctttaatttaagaactaaaaggattcaatggccaaagggataatgccttgttgcaaagtataattttcttctggagtccctagaggggaatgccattcttttaatgaacatttttgaggctcatgaagcaaaataaagtttaacttaacctatttgtaattttgttaaaaagaaatttgtcattatgcttagtcattattgacttatactacagcatctctcagcagcttgctga

SEQ ID NO: 8405 - DNA, 526 bp, Homo sapiens
  source 1..526: mol_type = other DNA
acctaaacattaagatagatttattaaaaatctaaataattagcgtaaagggttagatatctgtacatatatgtctttagttgttggttaacaaggaaacagcttctaggcgctagtacaaactgcccgcagtgcctgtggcaggggtcccccgcgctgtccagatcccagacctctcgcgggccggcgcagccttctaagggcggtcctggggtcctgggctcaaagtccagccttggccgcggccccacgggtacgcttgtgggcctgctccaggagccgccagactctgcccggcgcggaatgggttgcccgtggttccctacggagtcgaagccttctgcactccaaggctacaggggaagatcgagactgacccttcacgccccgcccctgccacgtgacgggacccgccagtgagcctatgggaggcagctccgctccgcgcgccgccacgtgatgcggcccccctccagccaatgagtgccggccttgcctcgcgccccgccccgcgcgccgtggccgt

SEQ ID NO: 8406 - DNA, 488 bp, Homo sapiens
  source 1..488: mol_type = other DNA
catttagatatatgatgcatttagagttaatttctttacatgatacattttgtttaaaagactatcctttcaaaaatcaaattcctttaatatatattgttttttagatgaaataactagaatcatagttagcttacaattaatgggttacttatatataaaacttaaattttggagagaccagccaggatggtggcacattcctgtaatcccagctactgactcggtctcaaaaaaaaaaattaaaaaattaaatttttgagccaagaatgtaaaactttgaataacaaatttatcaccatcaaaaatattgtccaagatcaaattaaaatagtttaaaatattatgcctttttagttgtatgtagcagtcttatgttctagtaataatatataactaagcatgtacatttccatacatttcaatttttaggatttcacattgttttgtatcaaaagatttatcaatttttttttcctttattctac

SEQ ID NO: 8407 - DNA, 607 bp, Homo sapiens
  source 1..607: mol_type = other DNA
aaacctttttctggacgaggaaaaagttttttccaaaaaactctcgtttggaaggctgggcggctgccgcgctcctccgttttcccagaagcctctgcgcggcctcacagaataaaagcgcgggagcgaggcccggcggctccagttctgggctccctgttgatcctcaggaaggcaggccatcgagagtccagaggcacccgtggcctggggggctacgggtctatacccggggagggtcagaggctcaatctcaccccggacctaggctctccagcgaaggccgaggccccgccaggtaggcggctcgcccaccgtaagctcagccgagctgcctccgggacgggaccgagggcgggcgggggtgctaggcctcgggcccaggacccccccgaagccggtgggtaggtttcttgccctgaaacgtgccgccctctcctctgggccgttccttcaagccgaattttctgctagtagccttttattctaacagtcaaggagcaaaacaaatacagtactctgattttgctcttctcagaacgaccccaaaatttgacttcaggaagatttatttttaaaaaggggaaggcttgccaatttacgtaaa

SEQ ID NO: 8408 - DNA, 350 bp, Homo sapiens
  source 1..350: mol_type = other DNA
tgtgtgccccaaacacttagtagaaaactgtgagagacagtttgagccaaggtttgcccaagctggcccaaaagccatggctggagtagcccctgtccctagggtcagtcccatctgtgcctgggccctccctttgctggcggggcacagcagggctccctgtcgctcagccagtggccagccacagttgcatagacttaggagtctctgggcccctttctctgcaaggactagaaagtgctgactagccaagaccttctgaatccctgcccgggtagcccagggatcctggagaaatgtgaggggcaggccctcagagaggagacttccctgcggagcccactctgctg

SEQ ID NO: 8409 - DNA, 294 bp, Homo sapiens
  source 1..294: mol_type = other DNA
ggtctggtgcagcaacaagttgtccagaagcagcctcctagagcccgggatcttcagaggcttggttaagtcagttgcaggcccaggggactgaagttgattcctcagggagaagctccttgtcaccattactaaggccttatgcgtgcccagttgaattaagcatgcagcaaacctttttctggacgaggaaaaagttttttccaaaaaactctcgtttggaaggctgggcggctgccgcgctcctccgttttcccagaagcctctgcgcggcctcacagaataaaagcgcgg

SEQ ID NO: 8410 - DNA, 360 bp, Homo sapiens
  source 1..360: mol_type = other DNA
cggggtggtacagggcagccttgagcccaccctgccatcactgggctggcagacctgtagcctacaggggggtcccattggggatgccagcaccccaagcaaggtacagaacccttgagccaagctggctgtgtatttgctgtgccaacacggcctcacttagtggccgagaggaggatgccgcaggcccctggggcctgcttctctatgggcccactgtacccacttgggctgtagtgggtgagggtggctccctggctgccatctcaggagatgttggtcccccggggagcgcacacagcactccgctgagcccccagccccacttcgctctcactcagggtcagggcctggaggaaa

SEQ ID NO: 8411 - DNA, 365 bp, Homo sapiens
  source 1..365: mol_type = other DNA
ccagtgacagtgtcctcaggtacctgagctcagctctcggtgctaccagagggactgccaggggctgcagccgggcctcctgcagaggctgagtcccacacgcgggccacctggggcctgagcgccctcgggatgtttagcagcgtgaccggctaccagacaatggcctcctggccacccaccaggaccaagcagggcgggtgggcaggaggcctcagtgagctgagtcaggcttccccttcctgaagatgaagtgataccgtttaagtaatcttttttcttgtttcactgatcttgagtactagaaagtcatggatgaataatttttctatacctccccccgccttgcccggggttgtgggcac

SEQ ID NO: 8412 - DNA, 481 bp, Homo sapiens
  source 1..481: mol_type = other DNA
gttgtgtacgaagatcatgatttcctcatgagacacctgtgatactactggtgaacacatatggcagcctgtgatcacactgagtctcctgtgaccttggcgtccccagatgatctgggcactatcgtttgcagaggtggcacccggaggctccccatgtctgcaaactcgggtcctagggggcgttggtgtcagcgggcaacagcccacaggagtgtgcacctcctaggacaggtaaccgcgacccggctgctgccggggccggagagggctggttcgctctgcggccgggcccctcccccgcccgggagcttggcggttccgacaccgcggtcagtgcggggcaagccccagacccggccggccaggctgcagggcagggagtaaggctcggttgcgagtgcgcgccgcgccctcccccttgagccgtctccgcagcggcgcggggaggcgggagctgcggggccggaaatacccggca

SEQ ID NO: 8413 - DNA, 453 bp, Homo sapiens
  source 1..453: mol_type = other DNA
tggatgcagccacagccctggagccagcctgaagctcctggtgtcttctgggggctgctctgcagactcaggaaggtggctccagagccaagagtcagactctgggtcccgacttgacccagccacaccccctctgaagcttgctgagagtggctgcagtttccctctgctcacaggggcaggggtccccccttactggactgaggttgccccctgctccaggtcctgggtgggagcccatgtgaactgtcagtggggcaggtctgtgagagctcccctcacactcaagtctcatagcctgcccaaaggcccctgggaggcaggatggggagccctatctaagtgtctcccaccctcagagggagggggcagcctcaggcccattcagactgcccagggagggctggagagccctcagattaatgggaaggctcaccgttcccatgtgtggct

SEQ ID NO: 8414 - DNA, 208 bp, Homo sapiens
  source 1..208: mol_type = other DNA
taccccatttagtagggtctaagtcctggggggatccaagtcttggagaacagccaatggctggtgctctaatagcacatggcatctgcattggctggtgaagcgctgcatatatttcttccctttctcaggagacctgaccttgcttccagatacaagtcagggaccacctcttccaggaagccttactggcctccacaaactagtc

SEQ ID NO: 8415 - DNA, 602 bp, Homo sapiens
  source 1..602: mol_type = other DNA
gaccgtgcttcccctcattcatgagaggaaggtagcaggcgtgggaacctgcctggccgccagggcctcctcccgctcagactctttttggcccatggcataaagaagggtttgggcaacccagtgtgccccaaccagagcccgggactctctgaaacccactgagagctcggccctgggaatgggcctcccaatctcggtctccagggggtgggccccatgaccccagcctcctgggaagaaggggcccgtgtacccggcagggccccccaggcaatgggccctccagggacgctctccctacagccccggcgaggggatcgggtcgtggcgacctctccagacgcccaggggctgggcaggagggcgggccaaggcccgcaggtgggggcgccaaagccaggcgggcgcggtgcggtgggctgcgggcggcatgaagggcgcgggcggccagctccggctccggctccggctccggctcccgcgaggccgggtagcctgggcgttcccaggggtcgcagaggacggcgaaccccggcggagccaccggagctggggggcggcggctcaagtgggcggagccccggcagcggcccgaggcg

SEQ ID NO: 8416 - DNA, 551 bp, Homo sapiens
  source 1..551: mol_type = other DNA
catggcatctgcattggctggtgaagcgctgcatatatttcttccctttctcaggagacctgaccttgcttccagatacaagtcagggaccacctcttccaggaagccttactggcctccacaaactagtctggtccccggcccagtgctgcgcaaggccgcaggtgtgccagtcgggcccatgaggaggtatctgagctggggcagccccatcccccaagtgggccctccatccctcctcgggctggagcaccgcccctaaatcaaagggccggtgtcgactgggtttgggtccgcggcctgcagatccaaggcccgagcaggatccaggccgtcggggccgtccgaacgcggggatctctgagagctgagtgggggtgccgggttgccggcagccggggctgagggcgggtcctcagagccccccgaagtgggagggtcgggctggccgcggggccaatccaggcgcacagggagcgggggcgggggctgggccacaggggcgggcgggccgggggcgggcgcggcgtccaggcggcggcggcggctgc

SEQ ID NO: 8417 - DNA, 694 bp, Homo sapiens
  source 1..694: mol_type = other DNA
cctggactgggggcaggcccttctgctaacagaaagccttccagtcggagaaagctctgacagcctgccgcgataaagggccctgggggcggtgctcccgcaatgcgcaggctccatgtcctggcgcccgcccgcccatggacccggcgggggcttccaggctgggctcagccattacgccggcgtgcgggggaggaaactcgcctcccgggcactcggttgtcgtcctgaggacgctgtccgggcgccgccaggggtgaccgaatgctccctgtcggcgtgtgccagccgcctgcgcgaggcgccacaggagagggcgcgctcctgtcgctctgccccacgcgtggcagcctaagctcagcctccagattggaggagaccgcggagggaaccctgctggggtctgggcccggggccacgcggcccgagcagatcgagggccgacccctccgagaactcgctcccttgcgcccgccctcccacgtggggcccaggtctgggaatcagcgctcgggggtggctggggacaaccgagaacgagcttcttccccggcacgcgggcggaatggctgagcccagcctggaagcccccgtcaggtccttgggggcgggcgggcgcgcgaagcacagggcggagacagccgggagcccagcctcccgggctgggccgccctccccttccccgcgcccggcc

SEQ ID NO: 8418 - DNA, 399 bp, Homo sapiens
  source 1..399: mol_type = other DNA
tccgatatatgagaattccattacctgaatttcccatactcttgcctagacaggtcttgctcacattttcagttgaatttgggttccagaaccctattgctaaccagggttaatgttagccttctcagtaacacagccagtgtgccccatgggcatctgaggggaaatcctacctgcctgaaggcaacagctccatgaggatgctctcctcagaagaaaggtgtatcctctaaccacgcagggtgctgaggggctacagcccctgcctgcccctgtgctcagagaggtccctgagggccagggttccttgcacccaatgagcctcaggaggccatctgctgtcttagagaaatgatgcctccagaagtctgtggccagggaacccctcctcccatgcct

SEQ ID NO: 8419 - DNA, 664 bp, Homo sapiens
  source 1..664: mol_type = other DNA
atcaatgatttacatataacaatgtaaaatatcaataatttctatattgattatatgatgaaatgatcatgttctggatatacttgattaaatataccattaaagttaatttcatcttttatttttactttttaaatatgcagcattgcccaataaaatacaggacaaccagttacatttttattttatatattcctgcttgggacataatatttaaaaattattcattctatatctgaaattcaaatttaactaggagtcctatatttttatttgctaaatctggcaattttattaatatggctactagaaaagttaacataacaaatgtagctccttatcctatggtgaataaactctgcacggaaataactaatctgtggggaatatttaaccctaggctaggttatcgtgaagttaaatttttacatctgcatgaacaaaatggcttgttagggcccactcgctccccgcccggcgctagaggagcgagttcggactcggaccccaaggcctcgagtcccgctgccttcctaagccgagcccgggctacctcggtcgtccccagcaggcttggctggcagaggccgggcctcgccaggtccccaggacaggccccgcccgggcctcaggtgcactcccggcccgccccgcgccctcgcgt

SEQ ID NO: 8420 - DNA, 663 bp, Homo sapiens
  source 1..663: mol_type = other DNA
tgggacataatatttaaaaattattcattctatatctgaaattcaaatttaactaggagtcctatatttttatttgctaaatctggcaattttattaatatggctactagaaaagttaacataacaaatgtagctccttatcctatggtgaataaactctgcacggaaataactaatctgtggggaatatttaaccctaggctaggttatcgtgaagttaaatttttacatctgcatgaacaaaatggcttgttagggcccactcgctccccgcccggcgctagaggagcgagttcggactcggaccccaaggcctcgagtcccgctgccttcctaagccgagcccgggctacctcggtcgtccccagcaggcttggctggcagaggccgggcctcgccaggtccccaggacaggccccgcccgggcctcaggtgcactcccggcccgccccgcgccctcgcgtcccgccccagctccgccttcgccggcgccgctctgcctgccagcggggcgcgccttgcggcccaggcccgcaaccttccctggtcgtgcgccctatgtaaggccagccgcggcaggaccaaggcggcggtgtcagctcgcgagcctaccctccgcggacggtcttgggtcgcctgctgcctggcttgcctggtcggcgg

SEQ ID NO: 8421 - DNA, 748 bp, Homo sapiens
  source 1..748: mol_type = other DNA
aatattgtccaaactttgacaactattatcatggagatagctccaagttgatggactggccattagagaatgtctatcacaggtaaatgacttggttgctgccctcaaggaacccacttagaggctgtcagaaaattttaagtattttcttttctggcagtaggtatgattattattattcccatcccacaggggaagtaattaagtctaactacttgaatattttgccccaaatcactgacagtaagagacggccagacactgaaacctggaatctctaaatgtttagatattgatgggagaccagggagtccaaaccataggcaccgacgtcattgacttttgggttctccgctgaccccagatgagatgcctggtacaagtcccctccaacggggactcctcagaggcttggtcgctcagggcctcctcaggccagagcccgaggcgccgccagcggtcaggtcccgggccggctgccagccacaggcccccggtcggccgaagcgccgcgggcgcctttccacttacggcgggcctgcccagcctcccgcccagcccgggcccgggtcccgccgaggcaggtgtgcgtggcggactagctctcgggcactcggctggcccagctccaccccgaacgccaccgggccaggccacgcgcagacccgagcccggggcccccgcctctggctgccggcccgcgcccgccgcgcgccccgcgttcactgcgcgctcggccccggtcccg

SEQ ID NO: 8422 - DNA, 458 bp, Homo sapiens
  source 1..458: mol_type = other DNA
ctccttgagatgctctcacaaggacagattaacatctttgcatttatttaggtgattatttgactaataatagatgttcctcttatgtaagtactccatacaagaccagcctgtaagtcgcattggaacagaagaacaaacactcaatgaatatttagggaatgaatgtctgcaagatgctgagaatctctcatagagttttcatatgtgacccctctttgaaattgggtattatcaagttattcattttaatgattcaacctaattcagtaatcaggcaaattggcaggtaaacaagtgtaagttatttagagcagtgtctggtaaccacagccctgtgttgttaagaaatgcttgacgtgttgggatcccaagcagaaactgtttgtggcccagcaggtgtttccagcggcctgaggctgcaggtggcagcacaccctgggccccccactccccgc

SEQ ID NO: 8423 - DNA, 647 bp, Homo sapiens
  source 1..647: mol_type = other DNA
tgctaggagggatcagagctagcccacccctagggagtcccatcaaggtagggctactattattttatggtgggctgtgccagcagcggccaagttggccctggtccagcagccccagacagcacacggggcagggtaggctttctgccttcttcacttccccagggcaggtgagtgacctggagggagggggtcacccaacaggggtagtgctaggactgaaaccctccctcccactggcaagcttgaggagccaggctgccagtcgggagattcggcccagtgttcccactggagagggcggcaagtgcccgggcgatcccctcacctgcgttggagatatacccccgcccccgccccgccaggagggtgaaagatggccccaggagccagccggctgggacaacaggctggggccaggggcgctgggctgtcccgggcagccctcctccgggcaagccggagcaggggtggattgggagcgctcggggcgggcccgcggtggccccggggcggtggcgcccggccggagagggtggggcggagcagccgccctgtacttccccttcgcatgacggcacgcagccggccaatgggcgcccgcgcggctgtccgggggcggggccggccagggctggggaatcccg

SEQ ID NO: 8424 - DNA, 503 bp, Homo sapiens
  source 1..503: mol_type = other DNA
tattgtgtatctgtgacagatatttatgcttactactgggaccccacatttaccctggtcacagttcaaggatgaacatgtgaatttgaaagcttttgattaaacaatcagaaaagcacagcttgctttttcctgctgctcatgaacagaatacatatagatccaggagtctggacatcatcttgagacctcaatgggttaggtttttagtcactgccaaggcttgaatttcttttaagacagattaatctaaaaaaacattcccaatatttatgtattttagcataaaattctgtttagtacatcttttaagaggaagttaattttctgattttaagaaatgcaaatgtattaacccaaagattcttcgtaatagaaaatgtttttaaaacagggatttttattattaaaagataaaagtaaatttattttttaagatataaggcatctctatctgattgttagaaattattcatttcctcaaagacagacaataaattgac

SEQ ID NO: 8425 - DNA, 445 bp, Homo sapiens
  source 1..445: mol_type = other DNA
agagcacatacatttatgtattagtatgactggagaaacatttcctacatttttccaaggcaggcagaggcaaattataccactacagtaattccaaatttgtgtttcatttaaatgtcctccacttttccaagaaagcaatattctcagttacttctgagacaggtaacttctcagacttttggtcttaaagacgcctttacactaaaaaattaacgtgagttataattatcaacatttactcaattagaaattaaaattggtatttctaagcgcaagaatacacatgcgcacatcgccactgcaatggcgtcatcacatgttatgtgatcactggaaattattgggaagcgacgctgcgccgtaccgcacccggaagtcggagctgcgcacgcaccgcgggactctgatttcccggcgtgccccaggagagcggcgtggacgc

SEQ ID NO: 8426 - DNA, 411 bp, Homo sapiens
  source 1..411: mol_type = other DNA
atttaataagcattcttaatatattcagtataatattttttttctaggctggagtgcaatgatgcaatctcagctctatttttaatagagacagggtttctgacctcaggtgatccattcacagtgtaatattttcaaaatacaaattgaaatgtataaaaaacattttaagacagttaatgctctatatagtatctctaagtattctaaattattatatttaaaagtccaaatatgtaaaaaataaattctggcttcctttacatatcttttcatctgtgaaccgttaaatagtttaagagttacactttttagcacctttttttttattcttttaaagaagtacagtatgaattgattaagcaatagaatagatacactgaaggttattttacatatattcttgatttt

SEQ ID NO: 8427 - DNA, 485 bp, Homo sapiens
  source 1..485: mol_type = other DNA
tccaagaaagcaatattctcagttacttctgagacaggtaacttctcagacttttggtcttaaagacgcctttacactaaaaaattaacgtgagttataattatcaacatttactcaattagaaattaaaattggtatttctaagcgcaagaatacacatgcgcacatcgccactgcaatggcgtcatcacatgttatgtgatcactggaaattattgggaagcgacgctgcgccgtaccgcacccggaagtcggagctgcgcacgcaccgcgggactctgatttcccggcgtgccccaggagagcggcgtggacgcgtgcgggcctagaggcccacgtgatccgcagggcggccgagggggtcgctgtggctacggctttgcgtccccggcgggcagccccaggctggtccccgcctccgctctccccaccggcggggaaagcagctggtgtgggaggaaaggctccatcccccgccccctctc

SEQ ID NO: 8428 - DNA, 532 bp, Homo sapiens
  source 1..532: mol_type = other DNA
gcaggccactgagctccctgctcagagtcgagcaagctttggattaaagtatactcttcatgtaaatttgcctataggctcagaatgcattggtaactcaccatgaatttctagccttctcagtagtcctgacttaaaaaaatacattaaatagttacctttttaaggattaagtaactctaaatgcccaatgaatgaataattagaagtggaatttaattcctgcttctctcaggacttgggccaagttacttaatgtctctgaacttcagttaaatgagatcacttttactaaataatgtttctttattttcagaatcgtctaaaagaaattgaacataatcctattttgttctgcttcaaaattttgggattattgtaatgaactttatttgaatccattttgccatccacattggaaaaaaacaaatacagatcttgttacttctatgtatatgttaaaatgaaggatattgaataaggtttggtttatatttgatacctcaaagtgatcatattttcaaagatgaga

SEQ ID NO: 8429 - DNA, 636 bp, Homo sapiens
  source 1..636: mol_type = other DNA
tgcttcaaaattttgggattattgtaatgaactttatttgaatccattttgccatccacattggaaaaaaacaaatacagatcttgttacttctatgtatatgttaaaatgaaggatattgaataaggtttggtttatatttgatacctcaaagtgatcatattttcaaagatgagaataaagaatctaggcttctcaatcaggaaaaatcagaactgcttgttgaacagggtaggacaaaatgtttatttggtcgtttttcctactatgatgttatacattttctgtatgaatgaagaatctcaatcttaaaaggctatacacagtatgtttccatttatataacatttttataatgtcaaaattttagaaatagtggagaatcttgactgctatataggtgataaaattatatagaacttaatatacacacatccaaataaaattggggaaatttgaataagattgatgaattatatcaatatcagtattctggttgtgatattttactgcagttttgcaaaatgttatcattgggagaaactgggcaaaataagagacacactgcattattttttataactcgtgaatctgctatctcaactttttaagcaccagttgaaaaaaaaattatga

SEQ ID NO: 8430 - DNA, 647 bp, Homo sapiens
  source 1..647: mol_type = other DNA
caatataattttaaataagaatttggaatatttctgaagtaaattttttttaaaagattaaatacatattattgtttcagaggcatcagcaaaaatagtttttttcctgtaatttaaaaaatttttattttgaaataatgttaggattacagaaaaattataaaaataatacaaattattcatatatatccctttaacaatttatgtactctgttataatacagttatcaaaaccaggattaacattgatataatgctactaactaaattacagaccatatcgaatttgcaggatcccacgtagcatctagttggtcaatatgaccagttcattagtagaatatttctcagtttgacaaacaccacagtaataattattgcaagcaagatctgtcagtggatactaagcaagatatttacatagtctcaacatttctctcctaagatacttgttaattacaaagacataaggattaacatcatcagtaataagacatattgatatcatgattccatatccactgatatgataccctgaaaagaacacaatgtcacttctgtggtattcttcctaaaaatacataacctcagtctaactgtgagaaacatcagatactttatttttaattgtgttttctatttaggca

SEQ ID NO: 8431 - DNA, 560 bp, Homo sapiens
  source 1..560: mol_type = other DNA
taagatacttgttaattacaaagacataaggattaacatcatcagtaataagacatattgatatcatgattccatatccactgatatgataccctgaaaagaacacaatgtcacttctgtggtattcttcctaaaaatacataacctcagtctaactgtgagaaacatcagatactttatttttaattgtgttttctatttaggcaaagcataagtttaaggcagaataaaacttggttaaaaatagtagctagtattcagtagaattccccatcctgaatttcatagtttacatccctgggtttaaactttttaattcataaatttaaaaattaagacagttctgtttgtttttcatcttcatcatttgaattgctgataattaatttcacttttatcctattaaactttgctaaaattgtatctagaaatggtttataagtttagatttaaaaaataaatgataagagcaattaatttttaaagattttgaataatgcagtaagtttattaaaggaaatcattttgttatattcttaagatggaacttaaagatgttg

SEQ ID NO: 8432 - DNA, 306 bp, Homo sapiens
  source 1..306: mol_type = other DNA
taatacagtctgtgtccttctgtactcatagagactttgacatttacagtcaattttatcaggaatgtttttctgaaaagcacttactttgcacaacagattttgaacagtaggagagtatgaaataagctgtattctcttttccccaggctggagtgcaatggtgcaatcttggctcactgcaaccagggtgggtggggcccacagaaatagcatttgtggaaatgatacaaatagtattttctatgcccttacattaattactgtgataatatctgagaaacttcagatatccactaatttgca

SEQ ID NO: 8433 - DNA, 446 bp, Homo sapiens
  source 1..446: mol_type = other DNA
atttagatgatgaaatctctttatagaaaaattgagatttacaaatgtctcatgaggataaaatagacctatattgaagtaattactaaataattgtatctacctctatagattcactcagtacttcagaatcttaaagtgcttgaggacctgtggttatcatataactacgttgtagatttagtgttacaaggctaaataatggggacttctatttagtaaaatagtttattacttgaaagccccgttccttccaaaatagttgtggagacaccaacattagtttaacagtatgcttttattaccatgaaatatctgcgtagccttagcaggctaagcttaaggacagaagtgtttttaccatcatgttttcatctgaaaaagaaaagtctggattactaaagtaagataatggaatattatataatactttatcttttttatat

SEQ ID NO: 8434 - DNA, 410 bp, Homo sapiens
  source 1..410: mol_type = other DNA
gattactaaagtaagataatggaatattatataatactttatcttttttatatttttaggatgctaaagagcagcaggataaagtaagatttcatttatatatttacttatcaaatatctgtattaaacttatgttcatttatttcacatgaaattaaatagcataagataaatagtattttcagattcatggtataattttgacattagaaattcttgttagaacaaggatttgatgtaaattattttgctgcttgatctacaatagaagttaagaaatgagactaattaatcaattcctataactggaacccaatgttcataaccagtgtaaatttaatgaatatttttctacagctgaatgatattaaagagaaggttaaaaatattcatggctatatgaaagacat

SEQ ID NO: 8435 - DNA, 443 bp, Homo sapiens
  source 1..443: mol_type = other DNA
aaaccccaactaaaatttgaagtagttgaatggggtctcaaagtagagctctctctacagagaggaaattctccactgtgcacacccacctttggaaagctcacttgaggcctgatactggcttcaccatcaatcctgattcctctctaagtgggcattgccatgtggaaggcaagccaggctcactccctgtagggtgccacttctaagaaaagcctaatcacagtttttcctggaattgccagctgacatcttgcacacagaatgcaaccaagtcacacaccataccgggtcttgattcagtcacatggcatggtttttctcaactgggtccagaagagaattaagccctaaggtcctaaggcatctatctgtgctagagacaggtcctgatttctagaacccgtgactgttactttatacagcaaaggaaactttgcaga

SEQ ID NO: 8436 - DNA, 405 bp, Homo sapiens
  source 1..405: mol_type = other DNA
cagtggactaaggctgccagcctggcccagcccatacactttaaattaaaggggccagccactctgggcctccagaaagacctctgaatctttctggatctctcagtggagactggaaatcccaaaagaagtgaactttactcttctattgcctgtttgaattttgtatccaagcaagtgttacttaagtaatttaagagacggtagactgtggtcacagccacagtgcactaagactatctgctcagcacttctggtgacccaaaagggtctgaggacaggagctcagcaactgctggaactcagggcagcattgcaaatgccacgccgctctcagggccccttgcctgccgctggactggattttccacaaagtaaaatcaaggagaccatggtgtcaggcgt

SEQ ID NO: 8437 - DNA, 434 bp, Homo sapiens
  source 1..434: mol_type = other DNA
ccaggcatggtgtgagactcttatctctatcaaaaaataaaaataaaaatagcggctgcagtgatccctgatcatttcagcctgggtgacagagtgagaccctgtctcagaaagggcttccttatgggtaaggaccttatggacctgctaaacttgggagaacattgtcccccagtgctggggtaggagtctgcctgttattctgcctctatgcagagaaggagccccagagttaaaatacttttcaagtaaaactttcttgatattacaattaatctaaagagcaaattatggtgtaatttcctatgctgaaactttgtagttaattttttaaaaaggtttcatcacaggaacattttacctacaatctggtgtaacgaaaatttccaatgtaaactcattttcctttcagcaattttaaatctatatataga

SEQ ID NO: 8438 - DNA, 300 bp, Homo sapiens
  source 1..300: mol_type = other DNA
ggtagaagtggccaaattctggttccactacaaatacaacaggctgtatttaaagatagaatattgtgtatgtatttcaattctggacatgattaacttgaaatgcccattacacattcaagtggactagtgagaatactaacaatctccttaagagagctcactttctaatggtaaggagacaaaatgtacaattgctattactgattttaatattccgggtattgcaagggccagaagacgggcctaagagcagctcctcctcccaaccccgggcggggcgagctcggaatgcggctg

SEQ ID NO: 8439 - DNA, 273 bp, Homo sapiens
  source 1..273: mol_type = other DNA
aattcccatatatttttaatatacatttaatgtaatgaattttttaaacaaaatataacttagtctcagctacttgagaagctgaggtgctgcgatcacacccccctaaaatttatgtatgtatgtgtatacatatatatgatttgtatgattttccttattatacgtttatagctatatatgtatgtatagatacataaacatatatgtatatgaatgaatcaccctgagaggacatgcatgagatcacacagcgcgtctggaattccattt

SEQ ID NO: 8440 - DNA, 549 bp, Homo sapiens
  source 1..549: mol_type = other DNA
aattcccatatatttttaatatacatttaatgtaatgaattttttaaacaaaatataacttagtctcagctacttgagaagctgaggtgctgcgatcacacccccctaaaatttatgtatgtatgtgtatacatatatatgatttgtatgattttccttattatacgtttatagctatatatgtatgtatagatacataaacatatatgtatatgaatgaatcaccctgagaggacatgcatgagatcacacagcgcgtctggaattccatttacccagggtctgtgtccgggagtcctggcccaaggcgggcgcagtctccagccgccccacccctggctgggggctctgctcagggagcacggccggcagagggaagggagggggtccgccacccgcctgtgcgcgcccagtcctgccgcatcctgggtgcgcgccgcccacccgcggggcgagtgcccaggaggcgaggcgcggcccggtgcgccagaggtagctccaccgcgagcgttgtgggtggggcccgccgagcccgcctccccacctccc

SEQ ID NO: 8441 - DNA, 607 bp, Homo sapiens
  source 1..607: mol_type = other DNA
cctgaggttttctgaacgttttgagcagtgggagagaacgtgcacgcactgggagtggtcatcctctttgcacaatggtggaaccattaagatcccgcatcctgctcgtggtcccttgcccgggaaggccgcctggccggacgcgcgggtcccgccggggttcccgccttagctccggccggagcatcaggtggggcccaagacacccgcagactaggctgccgcggcctctcccggatccgacgggtcgcacatttgcaggctccagcgggagatctctagggcgcacgccgtgccccacttcccccttacgggaaaggctttccagcgcgcggacccaggagactctcacctaggctcggccccaggctccaggggacacgcagaggcccgccgggcaccagccccgagccccccgacactgctacaagtcccagcagtccccgcagctggcacctcccgcctcgccgcggagacccccggccgtccaagcggcggggctccggctgcgctcgtggccgggccgggcggggaggccggtcccgcgggcgggggcaggggcggctccgcggcttctcccgccgccgccgccaaggggagtttccag

SEQ ID NO: 8442 - DNA, 476 bp, Homo sapiens
  source 1..476: mol_type = other DNA
tttctgagtaggagaaacaggtcaggttgcttctcagcatacctgaggttttctgaacgttttgagcagtgggagagaacgtgcacgcactgggagtggtcatcctctttgcacaatggtggaaccattaagatcccgcatcctgctcgtggtcccttgcccgggaaggccgcctggccggacgcgcgggtcccgccggggttcccgccttagctccggccggagcatcaggtggggcccaagacacccgcagactaggctgccgcggcctctcccggatccgacgggtcgcacatttgcaggctccagcgggagatctctagggcgcacgccgtgccccacttcccccttacgggaaaggctttccagcgcgcggacccaggagactctcacctaggctcggccccaggctccaggggacacgcagaggcccgccgggcaccagccccgagccccccgacactgctacaagtccc

SEQ ID NO: 8443 - DNA, 517 bp, Homo sapiens
  source 1..517: mol_type = other DNA
atgggaggacacagcccctgagcccagccctgccggagaggctcatcaaagggtccccagcccctctcaggaacggagcatggaaggtgagggcctcgagcgccagtgtccgtatgcatatgcgccccctctcccccaccccggtagcaggctggagggcccagagcacgaggccctggcagctctgggggggaaagcgggtagccgtcaggcgcctaagggcccgccctggacctccccaccgagggaggtgtcaggccccgagggacccggcccccgagcatcacggacgcgctggaggccggtgggcggtcgccgtagtcgccctcccaccacctcgctcaggtttctccggcctggggcaagaggcctgtggcccgcgcgggaacgcactgtccaccctcagacctgggactgggccggcgcgcggacgctaccaagaggctgcggctcccgcccccgcggccggacgtggcgcctcccctgaggccgcggccggagcctggaggtggggtcg

SEQ ID NO: 8444 - DNA, 362 bp, Homo sapiens
  source 1..362: mol_type = other DNA
ccgtaagtgttataaaacacagccaactgttgaatgagactttccttgcttctcacgtggggagaagaaagaactggggcatcgtgattccccccacccggacgctggctgctgtcgaggcggcctcagcattcatcaattgacgattatttgatgccaggggactctaaaacagagtccaagagaagccttcgctcctctgctgtggggcggcccggcctcggggctcagaggcgctccgcaggccccaagctcctggccagcgctgccccggaggtcggcaggcccccaccccaccggcccgggcagggcctccaaggcttctttctgggacaaaggcgtcatcccttagagatcccgga

SEQ ID NO: 8445 - DNA, 338 bp, Homo sapiens
  source 1..338: mol_type = other DNA
cctgggaggctaggggcgccccgctggacccccgcggggactgcggcgcttcgcgaaagcgagccaagcgcctgtccaccctcggtcctgcagggccgccgccacaatgggccatgcggcatgtgatcagctacagcttgccgcgtgagtgccttgggcccgcgggagcgggaggctggaccccagcagcagcagcagtcactgcgcctcccctctgagcgctggcggccgggcaggcgccatcttacacggcccaaggtcactcgggtgattttgctttaaagaagacaagaggactgagacctttttttttctctctcttaatttttaaagagttt

SEQ ID NO: 8446 - DNA, 220 bp, Homo sapiens
  source 1..220: mol_type = other DNA
agaaagcccataattcaaggcttttaatacttaggagatcttgttacctcctcatctacatgtgcttaaaaacaaaaagaaacctataattattcaacagctgggtcgataagggccttatccaattggctgtatatttctgaagacttcattattggaattcactcaaagggaaggaagacattaacttattaaattgattctgattacaaatataaac

SEQ ID NO: 8447 - DNA, 602 bp, Homo sapiens
  source 1..602: mol_type = other DNA
gtaatcccaacactttgggaggcccaggcgaccgtgtctctattacccagctactccggaggctgaggtactagaatcgcttgaagaaatacctcttgaggactcgaggcttcgacacctggaagcaaagctccgggttgggccggatccccaccagaggcggccccagaaccggcatatccggttcggcccggccccgcccttcggaacctcactagcgggctacgcgcaggagggcgtgagctcccggatgtgcaggccctgtactgccgtggcagccctgccggacgcggccgcagtgcccagaggctcaggcctataccgctcgggcgggtcctttgcctggcccgggtcatcagaccccacagccgggaacgtcaccaccccgggcgtcgcctcccggcccagccggcccacagacccccgccccctactcccccagcggggaggggcgcagaggcatcacgtgacgccccgcacccgcccggtcttggtcacatggtggcacggccgctgcgtcagtcacagccctggctgcaggagtccagctgccgtcgccgccgccagcggacggggcggggatcctggtgccaggtcttcgt

SEQ ID NO: 8448 - DNA, 541 bp, Homo sapiens
  source 1..541: mol_type = other DNA
ttatatagctctatagagaaaatgcatataaagagtgaagcttagtaatcccaacactttgggaggcccaggcgaccgtgtctctattacccagctactccggaggctgaggtactagaatcgcttgaagaaatacctcttgaggactcgaggcttcgacacctggaagcaaagctccgggttgggccggatccccaccagaggcggccccagaaccggcatatccggttcggcccggccccgcccttcggaacctcactagcgggctacgcgcaggagggcgtgagctcccggatgtgcaggccctgtactgccgtggcagccctgccggacgcggccgcagtgcccagaggctcaggcctataccgctcgggcgggtcctttgcctggcccgggtcatcagaccccacagccgggaacgtcaccaccccgggcgtcgcctcccggcccagccggcccacagacccccgccccctactcccccagcggggaggggcgcagaggcatcacgtgacgccccgcacccgcccggtcttggtca

SEQ ID NO: 8449 - DNA, 333 bp, Homo sapiens
  source 1..333: mol_type = other DNA
ccagctattcgggagtgtgagacaagagaatctcttgaaccagggacccagaggttgcactgagccgagatcgcgccactgacacacacttcagaaaattatatatatttcagagaacgtgggttataatagctccgtgagctgacattagatgtaggtgcagctaaaatattctaaaatatttgtatagtccttttctgctcataaaaaacagaaataacgtatatgtttgcactccatggcttgctaaagtcattctttcaattgatggactacttctagttttctgaacaccaaagtttggaagccccgcccttccgaggagtttcccaa

SEQ ID NO: 8450 - DNA, 404 bp, Homo sapiens
  source 1..404: mol_type = other DNA
agaatattgtctgtagaaagttccatgtgtacacggattttatttgttcaaatgcctcagctcctaaaacattttaagtgttaattattaattgaaaaaatatgccagctattcgggagtgtgagacaagagaatctcttgaaccagggacccagaggttgcactgagccgagatcgcgccactgacacacacttcagaaaattatatatatttcagagaacgtgggttataatagctccgtgagctgacattagatgtaggtgcagctaaaatattctaaaatatttgtatagtccttttctgctcataaaaaacagaaataacgtatatgtttgcactccatggcttgctaaagtcattctttcaattgatggactacttctagttttctgaacaccaaagt

SEQ ID NO: 8451 - DNA, 424 bp, Homo sapiens
  source 1..424: mol_type = other DNA
agagacttggagattcagattctccttagatctctctgggtaatttattagaaatgcttacataggcttaacatttattaacttcatgtaaaggtctgagcggacctttcaggccaggagggcctaccaccgggtaggaggcttaaatcctgcgggcccctcaatctgatctaaggacagtgggctccttccctccgctggtgagggtgcgaataaaggccgcgttccaatggcggccttagcagaaggcaccctgcgggatctgcagatcagcttgcgtctcattagtttctttgatgttaagaaaaacggcggaagtaggtaaagggaggtgctccacatctctatgcagctgtgcagcgccgcaggttccatgcgccaggacgtgccgggatatcgcgagaacatcccgttcaacgagatc

SEQ ID NO: 8452 - DNA, 470 bp, Homo sapiens
  source 1..470: mol_type = other DNA
gcatttttatacactggggatttcaagtaacaaaatttaaaaagagaagcttattttaggaaatctgaaagttacaggctagagtgcagtggcatctcggctcccttcccgagtagctgcgattacaggcacgcgccaccgctgggagccactgcactacatcttgtatagtgtgtattttacaccatattgctaaatctttgttgaaaaaaaataaatgactgtcgggaaagatttttaaaaattacttataatcccatcaccgaaataggactacttaacatttgtgtttctttcgcctttgagagaggaagagcagttacttcgctttcgtgatcatctgttctacagctggatcttcctttttaaaatggctaaaaacgctatttttggctgtatagtatgcaggcggcagggaggggctcgctttggccctacgtcaccacgctgggacgtatgtgccgagggcc

SEQ ID NO: 8453 - DNA, 475 bp, Homo sapiens
  source 1..475: mol_type = other DNA
atagaagtacccggttcaaatatgtactcattggggtctcatgaatatggaattgaaatccattttactgttgtactcaccacagagtaagaagaaaaccgtctctttaaaagctgctatttaggtagctgccttcatggcagataaatcttttccacaggtttggaaaatatcaaagatgcatctgtttcataattacatggtggctgagaagaaagttacttcgtatttatttgtggcttaagggagaactggagccctgacttcacccctttatttgacctgggattaaaaaaaaaaaaaagacaacttgcatttcaaggtgagttagcttctgatcttaatataacttattttccttcaggaaaaaaaatgctaaatacgagggctggctggccggctaccagaagactgcaaaatcccgagtgacccagagcaactttgcagttgggcttcacactaatgtgtaagtgta

SEQ ID NO: 8454 - DNA, 796 bp, Homo sapiens
  source 1..796: mol_type = other DNA
tgggtcccgcaggacacgccccggctggtcgcgggggttacccggggtgccctcagtcggccggccggccataaccggcgtgatctcctcgcgccgagatgctagtagctttgctacaggagaaaatcgctaatctcgccgcgcgggcgggtcggaggcgccagacacattgtatccggagcgcggagctcgggagcaacagtcgccgcctctactctgtatctgcgccgccccaggcgcccagtgtccgcgctgggcctgggactgccctcgggggatggggcccacgcgggctttgatggggggccgggggccactttgtccacccaggcgaggcttgggtccagcgccggccacatcaactcccgggggatctagcagcgcggaggccaagcaggaggcccaggagccccgcgcgtcttccattagcgcagggacctccgggccacagctcagagaatcggaaggcctcctcccccttcccgagcgctgccactggggccgaggtttccagcaagaacccgcgtgtccctgcgcacgcacacacggtgcacacgtcagtccggcgcctccccgtgccccgactcacgcaggtcctcccgcgcgcccgcaacacgcccgcaggctcctgtgtctgctgccggggcagcggggcccggaagggtaaacgcggctcgctagcgggatggggaccctggcccggcctggacgctgtcccgggcggggcctgggggcggagcgcgccgggccgggcgcgcaggaggggaggcgggtccgcgccgccgccgtccgcgcc

SEQ ID NO: 8455 - DNA, 422 bp, Homo sapiens
  source 1..422: mol_type = other DNA
ggcccgcgtggacgcagacccgggtgcgcgctggaatccaggagcctggatcgagcgagggttatcccgcgcccacgtggctgcccaaagttccgagtctccgggctgctcggagccgtcgcctgactgaggggcccgtcaccaggcggcctagagcaacagcgccgcggagttccaacgctgccggttccctggggtagttcaaagcacagggcgcattggagcctgggcacgagccacgcccaagtcccaagggcctaggggacccccgccctccacagccggaggccgacgtctctctcagggtgcgctccggaagagcgagccctttaaggctatgccgagtgggcgcgtcccggcctctcccgggagaggagaggcggggcggacctgtgtcccgcccccggcccggcccgccccca

SEQ ID NO: 8456 - DNA, 481 bp, Homo sapiens
  source 1..481: mol_type = other DNA
gagttacgtccaggccgggccctggctgcctggttcacggcggaatccccagcaccaagtaggtacctactgctagatggagccatctctctagacttggataaggttcaaatccttctgccacttaaccgttccgaacctgtttcactgcagaggcgaaaacacctcggagcgcgcgcggaatgaacacacgcgcgtagaacacacacaccgctgcctgaaagacctttctaggccagtcggggtccggcacccagttgacgagacagcgcggcgctttcagagctggggagaggcgaaaactcttccggccccccgatcccccggccagccgcccccggcagctccttgccgcctcccggcctgggcccgcccagccgttctcggcctgccgtcaggcgatctcggcggccagcccagccgcgatgtgacgccgcgcgccccggggtcctcggcgcctgcgccctctcctataaagcag

SEQ ID NO: 8457 - DNA, 915 bp, Homo sapiens
  source 1..915: mol_type = other DNA
ggcggggcggacctgtgtcccgcccccggcccggcccgcccccagtgcccgccccgcccccggcactcggccggcggcgcctttgatgttccgacccgccagctcgcggagccgctctgccccgcgccctagcccgcgcctgcagcccgcccaggcggagtcagcccgcgctccgcccgccgcgatccgagctcggaggttcggactccgggctcgccgccccccgggccggctccgcgccccgcactcccggcgcccagcgccccgcgccccggcgggcggagcgcaccatgccgcagctggactccggcgggggcggcgcgggcggcggcgacgacctcggcgcgccggacgagctgctggccttccaggatgaaggcggacgacaagagccgcgacagcgccgccggtcccgagcgcgacctggccgagctcaagtcgtcgctcgtgaacgagtccgagggcgcggccggcggcgcagggatcccgggggtcccgggggccggcgccggggcccgcggcgaggccgaggtgagcccccgccggcgccggctcctcccccgcggtcgccgcgccgcgccgccccagttgcgcgcggccctcggggtctccagcgcgcagagcgtccctgccccggcgtcggccccgacccccgcggtccctccctccaggctctcgggcgggaacacgctgcgcagagactcttcccggacaaacttccagagcccctggaggacggtgagtttctgcccggcccggcttcccttcgtcgcgctcaggccctggcctcggtgggacggggacgccaaggaccgcggggagccgggtgcctcccccaccgcagctcaggaggcggcagaacccaggggtggagagtggggggcgggcttcccgggcgccgccgggtcgagtcac

SEQ ID NO: 8458 - DNA, 503 bp, Homo sapiens
  source 1..503: mol_type = other DNA
ttgtttgaaatttcagtcaaggtaaaaaccatgtttttataaaagcatagtacagttaacagaccattatcattaaggttctgttacattaagacaagccaaaattgaaactacatggaggtcgtggaacataaaccatgaaaattttaaattacagtattgccatgaaccatatatcgttaacattcaaaaaacttgttttcacatggaccaaaagatgtgccatataaaaatacaatttctttagaatgaaccagttcattgcatgctgaagcgacattgttggtcaagaaaccagttttttgctttctctgagagactgcagataataagatgtaaacattaacacctcgtgaatacaatttaacttccatttagctatagctttactcagcatgactgtagataaggatagtggagcttaatgaacatttttaaaaataattaccaaggcctcccattttcagggataccgtttaatttaattatatgatttgtctgca

SEQ ID NO: 8459 - DNA, 440 bp, Homo sapiens
  source 1..440: mol_type = other DNA
gtgcccagctcattttttaaaatttttgtagagacacacccagccaagaatgtttacaaattttttaggtgaggttaaccttttaaaccactcttttgtacatggtggtctctcgccatctatagatacagaagttccccatgaggtatgacttttatttgataaaattctttcagaaaacttattagtaattgtaagttcattagatgtattctctcatataattctcaaaaacaacttgccaagatcacaacagctgtgaagctgggcttattagagactctgaaatttgcataatataggcagattaaagtctgctggaaaatacatcttatttgatgcagatgtttgacttcaactgcacagtatgaattactcaaataatgtgttaaccatgtttgtaaaaggcattttataacttgaagttatttttatatttc

SEQ ID NO: 8460 - DNA, 365 bp, Homo sapiens
  source 1..365: mol_type = other DNA
gctctcctttaaatatgcatgctgggtgggacccaccagactagatttattaaataatgcctttcctcttatttagcggaagcatagcgagatttcgcttttttacatttaactcattttatagaagaaagcaaagaaagccctattcaataaagaaagcactccctaggcacttggtctagtgctacttaagcagttagggaggttttttttctttaaaaaagattactagcagttggaaaaaattagttcaagaaaagtttttgatttaagaaccatccagcctggccaaagcgacactgcagtccagcctgggcgacgtgaggaggctcgggtcgggaccctgcccatgttccggtcttgcg

SEQ ID NO: 8461 - DNA, 563 bp, Homo sapiens
  source 1..563: mol_type = other DNA
cctagggtatacgagctctctcttttaagcacgtatcacagctgcttctcacgccaccgagacgcggtcaggacaggtgcatccatcttctctgggcttcggtctctcattcccagagagaggagcggggcgcgtggaagcgagccgcggtccgaggccccatcgcgcccgacgagacacctaggtccggggacgggtgtgtgccgcggaagtcaggtgcactgcgcagcactcccccggaggtgggggtggttaatccaagcggccactcgctgcagatgagccacggggtcgcaatgtgaggagctgagttcatcaccagagcggccttcccaggggaaccagttacaggctgccagtggccccggctatccggtctgcgcctgcgcgcggcccaagccctcgccgaatagtgctcagggattagtccggttcgccgctgtgcgcactgcgcatgccccagtttgcgccccaactccggtcgtgcggccgcccggggagggctctgcagttgcgcagcttgctccccccgccgcctcctgacgccgggcgtgacgtcacca

SEQ ID NO: 8462 - DNA, 561 bp, Homo sapiens
  source 1..561: mol_type = other DNA
gctcccgcaggagctcatcgcctgggcgagacgccgggcagctggccgaaatggggccgaggctaggacccggcttccgccagtcccgctgggcccacagccggccctctgagggtcacaaaggggaaggtgtctgggatccacgccctgcagccccgcagctttgaggggccgtcatctaggcgaaggtgaaggcccttacagcctcctccgggccggggtcgacatgctccgcagctgccccggcccccccaccccccggcgcggcggccgaatcactgtggatcgccgccgccgccgccgccgccgccgccgccgagactgacatccgccctccgccgctaccacagtgtgagtgctgggggaggagggggcgggacgcgggagcgcgccttccccgagcccttcagcggggcgcggttcccgttctctgtgttcagaggttgtggattcaaagaccctccccgtcactagtttaggctcggcgggaagatcacgtgactgcccgcgccttgtcaacaatccacccctgagtgggagggggagaagtatctagaacca

SEQ ID NO: 8463 - DNA, 364 bp, Homo sapiens
  source 1..364: mol_type = other DNA
agagtccttagtataacaaagtcctgtctttgggaggtcaacacctctgaaccccctggtgagaaaacctgaagttatctcaggctagatatatatatttgtaggtttctttgacaaccaaccactcattgtatctggtagcttcaaggaaccatggctgccttagaagatcgtgcgatcctctcactcttcttatttttggtcccggtttaaagaaaacaaaacaagtatacctgtgataaacagaaaacacaggcgaggcgctcacgtgaccccgcgtcatagggacacgtggttctagatacttctccccctcccactcaggggtggattgttgacaaggcgcgggcagtcacgtgatctt

SEQ ID NO: 8464 - DNA, 561 bp, Homo sapiens; identical to SEQ ID NO: 8462
  source 1..561: mol_type = other DNA

SEQ ID NO: 8465 - DNA, 416 bp, Homo sapiens
  source 1..416: mol_type = other DNA
ttttctatgtctctaagtatccaataaaaggtaaattccagactcgggaggctatagataggggctttccagccagagctgaccagaaagcactggcagccggggtggccagaggggttcgccccaacacggctcctcggagaagacggcgggggctcccgcaggagctcatcgcctgggcgagacgccgggcagctggccgaaatggggccgaggctaggacccggcttccgccagtcccgctgggcccacagccggccctctgagggtcacaaaggggaaggtgtctgggatccacgccctgcagccccgcagctttgaggggccgtcatctaggcgaaggtgaaggcccttacagcctcctccgggccggggtcgacatgctccgcagctgccccggcccccccaccccccgg

SEQ ID NO: 8466 - DNA, 477 bp, Homo sapiens
  source 1..477: mol_type = other DNA
tatctggtagcttcaaggaaccatggctgccttagaagatcgtgcgatcctctcactcttcttatttttggtcccggtttaaagaaaacaaaacaagtatacctgtgataaacagaaaacacaggcgaggcgctcacgtgaccccgcgtcatagggacacgtggttctagatacttctccccctcccactcaggggtggattgttgacaaggcgcgggcagtcacgtgatcttcccgccgagcctaaactagtgacggggagggtctttgaatccacaacctctgaacacagagaacgggaaccgcgccccgctgaagggctcggggaaggcgcgctcccgcgtcccgccccctcctcccccagcactcacactgtggtagcggcggagggcggatgtcagtctcggcggcggcggcggcggcggcggcggcggcgatccacagtgattcggccgccgcgccggggggtgggggggc

SEQ ID NO: 8467 - DNA, 447 bp, Homo sapiens
  source 1..447: mol_type = other DNA
ttgggatctagccaggatccctgcctggcctactggctgaaattctccatttacttgagcaattatgcgagcagtctccagcacctgtgcctggcaagatggattactcgctccaggaaggcgggccccaaccttcgtggctgtggagacccctggaagtcgaccgtgacccgggccccctgatgtcgctcaggatgaggcggtgcccgggaaactctcagggcaagggcacagcatagctctggctggcatccagctgccaactggaagagggcgcgccctgggtagacccagggcaggagccacgggctgcggcggtctgaggagccaggagccgctctgtgcccccgcaggccgccgctccgggcgagggcgctccaggttggtcttctggagcagtcgtgcgctgatggggcccctctggccggcaggcggtggcgcagtgcg

SEQ ID NO: 8468 - DNA, 478 bp, Homo sapiens
  source 1..478: mol_type = other DNA
taaaaaaaaaaaaaaagcatcttgttctgtctgctagctccaggaggcgggggcctggaagctgggtgcagggctgaggcccctcactgggtctgcactgaacagcaggagcctcatggttgcagacatttggctttattagacagggctagctcaccctctccagcccctctggcaggaaagtaggagcacccccagggcttctgccccgggcctctgcacagactccaggggcacctgtggggctgagggcaagtggcagcacagtgcctccggccaggactggcccagccctcttccctgtgcccagctcctccccatggaagaaaggggagaacagagtgacagttctgggactctccctgctcccggtgaatgccagccagggtgtggggcccaggaggctccatgcccagccgctggcctgagagcctctcccctgggcagggtggggtcattgggctgccttagattcccc

SEQ ID NO: 8469 - DNA, 420 bp, Homo sapiens
  source 1..420: mol_type = other DNA
ccacctgtatatgtacgtacatacatatatgtgtatgtgcacacatggccagggagatgaattcacttgcccacaagccaggattagaacctaagtatttaactattttgttacacactccaagtaactggaaggtaatacccagaccatcctcttgccagacaattctcctcagagtttattattagatttatttctcctataagcaaatgtgttcacaacattccattgtcacataaatgtcatcttatgtaaattgaatatttatcttcccatttggagagggaaggcgactccggtgtccattcacaactcacccactttggggatgttgggccaggctccccacaacctcctggtaacaggaggccagtccttctccttcctcgagagaaggtgagctcggcggttgggtgggtg

SEQ ID NO: 8470 - DNA, 512 bp, Homo sapiens
  source 1..512: mol_type = other DNA
gggggcgacgagcccaatggggaccctctctacggaccgccatttggagtgggtgcggggaggagggccgcgccccctccccaagactcgcttcgattcgcattttaaaaccagcgattcagaagcagggcctagggcgagggtcttccagcgctggagccccggggggcggggtgctcagtgcaaacctcgttccttatttgcaaagaaacgtctttttgacgatggcaaattttaagtacgtcattaatatggcgccaaaagattttttggcgccgcccgggtctggacttgcacgggcgcagccgccgctcgggcccggccctggggacagggcgggctaggggcgccccagagtccatggggagtccgggcccagggtgccagcaggcgtggtggtggggctgcgagggagggcacccttcccccacggggcccgcaacgactccccgccggagccaaacaactgggcggggggttggggtttttttttctaaagagatcacaaggaa

SEQ ID NO: 8471 - DNA, 566 bp, Homo sapiens
  source 1..566: mol_type = other DNA
caaaagattttggcgccgcccgggtctggacttgcacgggcgcagccgccgctcgggcccggccctggggacagggcgggctaggggcgccccagagtccatggggagtccgggcccagggtgccagcaggcgtggtggtggggctgcgagggagggcacccttcccccacggggcccgcaacgactccccgccggagccaaacaactgggcggggggttggggtttttttttctaaagagatcacaaggaagtcttggtttaaaaagaaactgccgaccgcggccatcgagtagcgtccatggagttactttgcgcccaggtcctgcgggccgaccgtccccggcggggggcgtggggcctgggacgccgcgggcccggccgcctccctcgccgcgaccccggatggatgcgcgccccccgccctcccgcgccggccccaggagctcccggcttcgggagcatccttcccgcgccggtccctgcagcggcgcgtagccgagggcagcgcccgtcaggggggcaccgcggagagatccagcccccggcggatgggccctgcgcatc

SEQ ID NO: 8472 - DNA, 285 bp, Homo sapiens
  source 1..285: mol_type = other DNA
ggaattcaataagcacgtgtactttgaaaatgtattgagaccagcctggccaacatgatgagaccagcgcgcgcctgtgctcccagctactcaggaggctgagggtgagctgagatcgcgccattgcactccagccccgccgtgccactgcaccccagggcacgcaggcccctaaaatcccttcgggcgggcgggtgtggggagaccaggcggctgggagaccccaggaggcggaacctagggcgctcggcgacgcggtcctgcggactgtcgctagtgaggcac

SEQ ID NO: 8473 - DNA, 608 bp, Homo sapiens
  source 1..608: mol_type = other DNA
ttactgttttggtgaccgacggggctacaggtgcacaactgccgtggtcccctggcccagccaggtcagtcagccctggccaggctgcgccctccccccggacagcactcaccgttggtgtagggagaccccgaggccaaggcggctccgttctgggcctggaggctggctggggcgccgccggaggccggtattcccggctgggggcgcattaagcccgaggcatggcgccgcactctccccaggccaccggcggccacagcctagcctgggagctgaggcttgagagtcgggccggcggggccgcgaacgcccggctaggaggccctggccggaagtgcctgtcagccgccggccgcgcagccgcaatcaggacacgtggcacttccggctccgggctcgcagcagccgccgccgcgccggcgaactcttctctgccagccgggctgccccgaggccacctgacagctcctggtgccccgaccccgacgaccgtgcccggcctcgccgccacgtcaccgactctcacggccggccggaagtgccgtgtgtcaccgctacggaaattcccgccgttgtgaacgtgacctcgctcgcagagccaggat

SEQ ID NO: 8474 - DNA, 498 bp, Homo sapiens
  source 1..498: mol_type = other DNA
caggcatttggtattaaatgaattaggtaagatgtacttctaagatgattactcaatcattaattaactatgttgtcaaaaaaaaagtctacttgctctgaaaggaagtttgagttctttaccttactgtaaactcttagaagaggaaacaaaactaaaatcaaagacaaaggcctccttcttggcttgaaacatgtacactcccagtggtggtacggtctcaacaggatcctggctctgcgagcgaggtcacgttcacaacggcgggaatttccgtagcggtgacacacggcacttccggccggccgtgagagtcggtgacgtggcggcgaggccgggcacggtcgtcggggtcggggcaccaggagctgtcaggtggcctcggggcagcccggctggcagagaagagttcgccggcgcggcggcggctgctgcgagcccggagccggaagtgccacgtgtcctgattgcggctgcgcggccggcggctgacaggca

SEQ ID NO: 8475 - DNA, 401 bp, Homo sapiens
  source 1..401: mol_type = other DNA
gtttcaatgggaaattctaatttgaatgctccctttaagtgcggctcacaggcgaggccgcgggtctgtaaacaagcgactgttttgctcgagacagagtctcgctctgtagcccaggctggagaacagtggcgcgatctcggctcacaagagattctcctgcctcagcctcccgagtagctgggattacaggcgcgcgccaccccgcccgtggccaggctactctcgaaatcgtgacccactcccggccctggggttggggaggcacgagggcgtccagcgctgccctcactcaagatggcggccagagcctcgcgcttggtcgcgtggggcggtgcgtgagtgcttagctcacaggctccgggaccgcgctcgggggcgggtctatagtgggaagggga

SEQ ID NO: 8476 - DNA, 368 bp, Homo sapiens
  source 1..368: mol_type = other DNA
aaccacaggcgtgccagcacgaattcctgggctcgagccaccatggctagtgcaagcaatgttgagaactaatcttttgccaaagtatttttaatctcacctcagagttcacttccaagggaaacgtgttttagtctattattattactattttctttgcagagacgagggctacgttgcccaggtcttgaattgtatacaattatttagcgcaaacctctttggctctggcgcgaaacaccctcacgggccggcgaggctgacgcgctgcgctccatcgcactaatcagccgggcgtggtgcgggcgccgggaagactgggcggggcgaaggcatcaccgcgtggaagagcggcagcttccgcttcg

SEQ ID NO: 8477 - DNA, 438 bp, Homo sapiens
  source 1..438: mol_type = other DNA
agtaggggggaaaagggcaagcatcctcctctatctccattctgacatctggaaattcacaggaggaaggagtttgtgtgaggtgactgatatgtcagatatctcacaagaaaaacataatagcggtagtttgttgttccatcctttcctgtgattatggaataatgaatgcgacaatatcataggatgtcccataaaataaagcttttcattatcacatgatcctagtaaggaagttattaattccccatttggtgggttcctcaaccccagccactggggacggtccacgccggatacgcgcaagcgcagcctgccagcctggctccctcccaaagcttgcgtgcaggttggcggcgggagatcgggtctcgcgatgcgagtgagcgtgtgcgtgcgcggccctcgcgagctcgcgcacgccgcctctaacactac

SEQ ID NO: 8478 - DNA, 396 bp, Homo sapiens
  source 1..396: mol_type = other DNA
cacaagatggcacttgaggatccacagggacagattaatgatgcatctttctggcctaacatcagaattgtattattcaattaataatgcctaccactttgaaatgcttcctgtgccccaggacactgtataagactctatataacgtcatttccactttacagctgaagaaacttaactttaagttacataacctgctgactgtgaactatcacattaccattgctatgttaaccaatagactgatgtattttaaatcagtttctattttttcaacctcataagtttgaaaagctgcactctgcactgatttagcactgactggtggctgcttaaagcttgcaataccccaatcgaggtggctccacctccaccatgagccagagccaataagag

SEQ ID NO: 8479 - DNA, 485 bp, Homo sapiens
  source 1..485: mol_type = other DNA
aatagactgatgtattttaaatcagtttctattttttcaacctcataagtttgaaaagctgcactctgcactgatttagcactgactggtggctgcttaaagcttgcaataccccaatcgaggtggctccacctccaccatgagccagagccaataagagattgccctgcaaggtaaatcagttaaaaccaacctctcctgccctgagtggataggtttaaggtatatcccttatactataagggttatagtaaaaaatattcattatgtgaaattcaaatataactgggtatcaaggaaggctcctgggcctttctgggaggccatgggcctctgccagagccatgctctgcactctggggtcagcagagtcagtccagcgccgacggccagcggctagaggccgtccgcccgactccaagatggcgcccgccacagctgccaggtgttaagatggcggcgcggggccgcgcccgcgctcccag

SEQ ID NO: 8480 - DNA, 356 bp, Homo sapiens
  source 1..356: mol_type = other DNA
agatcgcgccactgcactccagaaaaagatacaagtgagtattcttaatagtatgtcaattacatctattcacctaaatctgttcacagctgtctgcagagctcggtcaagagaactgccgtggttcactgcgcccgcatggactgcgcgcagcgccgccaagcggggagcccagctcggtgctagcgcccgcgaagcggaggaggccggcgcccgaggctgggcgaagttcctcctagcgcagcgaggaccggagggcaaggccagcgcgcgccgggcgacctgcgtcccgggcacagacgcgacgggcccgcacggggcggggaccgcgcgcgcctgctgggcctacggctgtg

SEQ ID NO: 8481 - DNA, 544 bp, Homo sapiens
  source 1..544: mol_type = other DNA
agatcgcgccactgcactccagaaaaagatacaagtgagtattcttaatagtatgtcaattacatctattcacctaaatctgttcacagctgtctgcagagctcggtcaagagaactgccgtggttcactgcgcccgcatggactgcgcgcagcgccgccaagcggggagcccagctcggtgctagcgcccgcgaagcggaggaggccggcgcccgaggctgggcgaagttcctcctagcgcagcgaggaccggagggcaaggccagcgcgcgccgggcgacctgcgtcccgggcacagacgcgacgggcccgcacggggcggggaccgcgcgcgcctgctgggcctacggctgtggggcgcgcagagtccacctggcggccaagggcgctggcgaccgctgaagctcctgggggtgttcggggtccgggctgcgcctgtgcccgcgggaaggctgggcgcttcccacacacagaccccgctccgggccagccccgcagggagactaccagggctggcggtagcttcgggggcggctgtgggcg

SEQ ID NO: 8482 - DNA, 556 bp, Homo sapiens
  source 1..556: mol_type = other DNA
agatcgcgccactgcactccagaaaaagatacaagtgagtattcttaatagtatgtcaattacatctattcacctaaatctgttcacagctgtctgcagagctcggtcaagagaactgccgtggttcactgcgcccgcatggactgcgcgcagcgccgccaagcggggagcccagctcggtgctagcgcccgcgaagcggaggaggccggcgcccgaggctgggcgaagttcctcctagcgcagcgaggaccggagggcaaggccagcgcgcgccgggcgacctgcgtcccgggcacagacgcgacgggcccgcacggggcggggaccgcgcgcgcctgctgggcctacggctgtggggcgcgcagagtccacctggcggccaagggcgctggcgaccgctgaagctcctgggggtgttcggggtccgggctgcgcctgtgcccgcgggaaggctgggcgcttcccacacacagaccccgctccgggccagccccgcagggagactaccagggctggcggtagcttcgggggcggctgtgggcggccggcaggcag

SEQ ID NO: 8483 - DNA, 100 bp, Homo sapiens
  source 1..100: mol_type = other DNA
ctgaagctcaggctggagtgcaatggcagctgagattacaggaggccaccttagcctcccaagttgctgggattataagtgtttattaagggcacttggg

SEQ ID NO: 8484 - DNA, 445 bp, Homo sapiens
  source 1..445: mol_type = other DNA
ggcctatgcctgaagccctgggaagccaggacgcaggccccaggctaaaggctgccaaggccaaccccatgcctgccaaggccaggcctggcccatttggccaaggcctaaggtgtcagaaacgtttcgtctgattagaagagagcgcaggctgctgtcactcagccgggctgagttcccggggcaggcggcccctcgacgaggacaccgctgggagctgccggaacgggccccgggctctgcccccgccccggcgctggctcgaaggcgcccgctcggtgcgatcctgccaggtgaggcctgaggtgtgcacgagccgcccgggactcgcaggccagcggcgaggccgcggagtgagggcgcggcggcgcgggcggcttggggctggattccgcccgcgctccctcgctcccagcacccctggcgcagggactgctggaacctg

SEQ ID NO: 8485 - DNA, 481 bp, Homo sapiens
  source 1..481: mol_type = other DNA
cctgagggatgtgtattattatccaaacttccggctccacacttgggaggggagcagtttttaaaaaacgtgtgtggaaaggaatcactgtctacattagtaattcccaacttgggtccgaaagtggaagagcgatcgctggtaacagccattgtgccttcccactgggttagtgggaaggttcctaaagatgccgtggcagcgacagtcccgtgctcagagccaggcacctcgagacgcagagtctgggacgcgccctgaagaagctcctctccaggggcctggcccttcccaaggactgggctctgggcgtccccggggtcatgggtcagacctcgcgtccggggtgcgggctggtgcctgggcgcagagcggccggcgtcaacgggtagggcgcgggcccggggtcaaggccggggcgccgggcggcacgggcgcggaggccggacgctcggggccgcgacgagcggcgcgctaagcc

SEQ ID NO: 8486 - DNA, 506 bp, Homo sapiens
  source 1..506: mol_type = other DNA
ttcggcagggttatctggccacgaggcaacgctggggagccctgtggcctgagggtgggcaaaggacaggctcccagttcccttgcgtccagcccgtctcccagcggcagccagccaggaacggcctgcggggccacaggggtccgtgtgccctttcctcaccagcccagcccctgaggagagggaagaaggcaccagggcaggtcgggcggttgccccaccctgggcccagggagagaaagtgccccagggccaggctgggacccgctctggcttcgtccgcatgcggcagggcccctccacggaggtcccagggcgcgctccccggcctcgaggcccggccgccagccgcgcggaccccagcctacgccccgagggaggccaggacccctagccggcgggactgcgcgccgcccctctccccgcaggtccggccagtgtccccgccttccccgcgggcgacgggcggcggcggcgggaggagcgggccgagccgaggaagcccc

SEQ ID NO: 8487 - DNA, 196 bp, Homo sapiens
  source 1..196: mol_type = other DNA
tagaaccataatgctttgttttgggaccagaagcatcataagcatacaggagggcagagatttgtcacccaaatcgatgtatgacacaaaatacgttctcagtacttaatcgaattaacgaatcgcgcctgagggatgtgtattattatccaaacttccggctccacacttgggaggggagcagtttttaaaaaac

SEQ ID NO: 8488 - DNA, 211 bp, Homo sapiens
  source 1..211: mol_type = other DNA
tgcagtgcatgcaaataggcactgagaccctcagggaagtgccatgttgcctacagtttccttggactggcaggtggagaggaactttgcagataccctgggtgcaggtcctaaggtcccagaaggggccccacgctgggaaactctcagcagtggaattgcacttctgcaatgaaaaattacacttctattttctttcctaaagggaaaa

SEQ ID NO: 8489 - DNA, 406 bp, Homo sapiens
  source 1..406: mol_type = other DNA
ctgtgatgatctgcactttacagatgatcaatgtctaccagatgggagagtgaggactcctcctagtcagttccagtgatcacagtcaatgactttgctgctggacagtctatgacaagcccctgtccagaactggccttgtgttctggcccagcaggggcccttgggggtcaggcctgcaggcaaaaccctttcaggtctttgaggatctgagccctgggcctgggtctcccgccggctcggaaaagctggcctgccgggccatctccaccgtctgggctccccaaaggcagcgccgctgcgatagcgggtcctttcccggggcgggcgacgggcgggctgggaaggtctcctcccctcacctctcagtgagtcaccgagtgtaatgagctcgctcgctgcgagg

SEQ ID NO: 8490 - DNA, 199 bp, Homo sapiens
  source 1..199: mol_type = other DNA
cgagttattttgtggctattaacaaactgattctaacatttagactggcagtacccaacttcaagacttactacagagctgcagtgcatgcaaataggcactgagaccctcagggaagtgccatgttgcctacagtttccttggactggcaggtggagaggaactttgcagataccctgggtgcaggtcctaaggtccc

SEQ ID NO: 8491 - DNA, 371 bp, Homo sapiens
  source 1..371: mol_type = other DNA
gagaatcgcttgaggttgcagcgaacctggattgtgccaccgcactccagcctggtgacagagggagactctgtctcaaatgttactagtatgtagtaagttctcagtaaatgttagctactatactctttacttgatgtcatacagtgttatataagatctccaaagatacaggagcatggttgcctatattatatcagcatttcccataatgtaaaaagggaaaatacaactctcacaaccagaatccctgttcagtactcaactttttgaaaatcatcttttctgaggaatgatatttcctggcacagttgtttgttagtataaagtggccccaacttacagagaaaaagtgggagctttaaatacca

SEQ ID NO: 8492 - DNA, 443 bp, Homo sapiens
  source 1..443: mol_type = other DNA
gagggagtgatgctgcaggaaggtcccttcacctccaagtccccactctggacaggttggggtgtcttggctgagacccacagctgagtccctgctggaaactagcagaagtcttctggccacttctccagtgagcacggacccctggcctggggcctggctgaatgtagggtctgcctacagagagggagtttgaggtacagagcaccacctctgccttctgttggcccagggcggacagtgtagggtgagccagggccaggcgaaccaccaggtgcctgctctaggcacggggccacacagtacagggagatacgcgcattgccgtcactttcagttcaaaggcgctgaggctggatgagccgcgcggagcgcacccttatccacccagattaaggtccactgggggcgtgatgtcagccgccctccggcacttggggtga

SEQ ID NO: 8493 - DNA, 374 bp, Homo sapiens
  source 1..374: mol_type = other DNA
agtgccaagtaactgacaggtgattaatagatgcttgggtaagtatcacctctttaccattcctccagggcaggcaaaacctgccccacatttttggcgttggtgttctgggaatcagcactgcctcgcctcaagatcagtgagggaatcttcgggcccccagcatgcaggaccgaagcccccgagacagctgtccctcagtcccaaggtccccatttggaagcagccacaggaggcctcacgggcacagtgcgggagcgggtgggtgcccagggcagccaggggcgcacgggttgggaggcgccaggcggcccgccctccttgcacgggccggcccagcttccccgccccccgctcgcagcttacttaacctg

SEQ ID NO: 8494 - DNA, 476 bp, Homo sapiens
  source 1..476: mol_type = other DNA
agtatatctagagatctagctgtgttaatacatgtagattgtcttcatttaaattgttatattttaattctgttcttgcattgctataaagaaatacctgagattgggtaatttataaatttgggtggggaacagatccaaaccatatcaatgactatattataattaatcttttttcctttattgttttaatggtgttaacttaccattatcataaacaagaaaacatttaaaaatcacatatttaaggtgaatacatgcaattttattaaaatattaaagttatttgcaaatattacacaggtgaaatataattaaactgagaattcaaaaacacctaagggatatattaaggaatatgttctacacattattaatgaccaattttcttctgaaatatgtgctatttctgttaatatttagtcagtataaggcttttacataggccctacctgcaaatcaaatagctatccatg

SEQ ID NO: 8495 - DNA, 644 bp, Homo sapiens
  source 1..644: mol_type = other DNA
attccaaaatgaccccgattttgatttttacttattttaaaaagaaaacctataatagaccttttcaaataaaaacaaaattattcaaaagctttttcttactagtactattcaaatcgggtaccctatgtggtaccaatattatattctaggaaataactcagtggccccgcctgtccaggggctgggtccccacgggatctccctccccacaaggaggtggagagtatgggcagtcccactcctggaactccagggtggaggccctcaaggggtaagaagctgtaagatgctcagaaacatgttttgaagctactttgcacagaaagaagactcttcattcagatttgtattacagatcaataaaagtagctatgtttttgtttacactttgtatgtgacagaaaacctccagttgtctgtgtcaaggacaattacttaattttattacaatgtataatctgattcccattcccaggcctggccatcgacgcgaaggcctccagctgatcggaagtcggcgttggccggcgcggagcccggcgcggaggcttctttcagccgcccgggcaagacacccctcccgcagcggtcactccgcctctggcgcgcatgcgccgaccccagcgggcgtcctcccgggc

SEQ ID NO: 8496 - DNA, 816 bp, Homo sapiens
  source 1..816: mol_type = other DNA
aagaagactcttcattcagatttgtattacagatcaataaaagtagctatgtttttgtttacactttgtatgtgacagaaaacctccagttgtctgtgtcaaggacaattacttaattttattacaatgtataatctgattcccattcccaggcctggccatcgacgcgaaggcctccagctgatcggaagtcggcgttggccggcgcggagcccggcgcggaggcttctttcagccgcccgggcaagacacccctcccgcagcggtcactccgcctctggcgcgcatgcgccgaccccagcgggcgtcctcccgggctccctctccctccctccctcatccgggtcctgggcgagcgggcgccgtgcgcgtgtcccgcggccgagctgctacagcgaggagaagcgcagcgacggcgtcgggagagcgcgcctagccggctcgcgagtgagtgagggtccccggcgcgcgcgggcgaggggaactgggggctgcaggctctgccccggcggactcgggccgaggcgggggcgttcggccgcggacggagcggaaacgacccagggcctgtcgggcgggaggtaggccgagtcctggcctgccggggtcccggctggcggacacggtgcggcccagcggctgcggaggcctcgctggctgcccggggcgtcctgaggcggggccggggctggccctcgtcccagccccgctgttacttggagggaggcgtctgggacgccctggaggggaccccctgaccccgcgctgtcctggggaggactgcggtgctcggccgggcagcctgggctgctgcac

SEQ ID NO: 8497 - DNA, 246 bp, Homo sapiens
  source 1..246: mol_type = other DNA
tctgagtctaagcctctgtggctaggatatacacaagattatgttttagtttgggaaagaagatttataaataatgaattaattagtctaaattgaatcattaaattccaatatgacagattttaggaagatattttaggattgtgctaagatattttatacaagtgaatttccccaggtctccactgcaggccacagaggggcctcctcattccagcaatctggccaggctgacagactcatagc

SEQ ID NO: 8498 - DNA, 336 bp, Homo sapiens
  source 1..336: mol_type = other DNA
ttttacactgttggtgggactgtaaactagttcaaccattgtgctgggtatatacccaaaggactataaatcatgctgctataaagccacatgcacacgtatgtgtattgcggcattattcatgtggcagatgagttcatgtcctttgtagccagcatggcacatgtatacatatgtaactaacctgcacaatgtgcacatgtaccctaaaacttaaagtataattaaaacgggctggggcggccgggctgtcgggcaggcagcgcgcggccaccagggggcgccagagccttggctcgcgcgctcggcctcctccgcccgcggacgccgcgcccg

SEQ ID NO: 8499 - DNA, 645 bp, Homo sapiens
  source 1..645: mol_type = other DNA
ttacattgtgtgtgataagcaatctcttgcatgcataataacctttcctttcaatactgttttatagtggaattttaaaatgtatttgaagtaatattagggatcttaagttaaaattcaactgcatataatgttaacagttgcagaaaacccaactgggttggtaatcaagtaactggtgttccactaaatccacacagatttctttgaacatatattataaaatgaagccagatttcagacattaacatgtaaaaaacccttaaaatagaggaaatgtaatattttactattaatgatgagtgtaagtaacaggcagctttcatcttgtaagtttgcaagtataacttctacagtcagaggggctcagtttgaattttgacttccctacttaaacaagctgagaaccctgggcaagttatttatctcacaagatagacaggaatctcagttttctcatctgtaaaaggtgagtaatggtagtatagtatctaccttgtaaggttgctaaaaagcttagaatataagaagtgttcattactgtaagatactgttgttattgctgctattattatggttattactactagtactgctcctagtagtagtcataactgttgagggccccagtgtccccagccctgc

SEQ ID NO: 8500 - DNA, 350 bp, Homo sapiens
  source 1..350: mol_type = other DNA
ggggaactgaagccaccccatggagataattgcaattatttacttccctgcacaaaaatggaaatctaaataccatgatggtctctgtgacaagctctaattatttcttaagtgtttcaaaactctttcagaataaaagtacagaaacaccatcatgtttgagacctcaaatctattattgaatcctactctcattaggaaagaaaaaagacttcagatgaagaattatgcaatacaaatcaattgggagaagtcttagtataatagatagaagaactcccataataaagaaataagagggttttttttctatttttcaagttcgcaagcacatcagatgtcactgtttg

SEQ ID NO: 8501 - DNA, 607 bp, Homo sapiens
  source 1..607: mol_type = other DNA
cctttttgatgactattagaaatggtagcaatttagaaacatctggtacaaattgtacaatgaattgatgaagaaatggtctattaaaatgcctataataagaattaggtctccattgtcatgagaaaattgtttaatatagaagcatgatcctggcttatttgaccaaaacattaaaaaattcccctgtgatagttttgatgatgaacgtcaaaattttggtcatcttctcagacattagaaaatacacattgtatttttcaaaaggtatagagtaggctcgagggctttataaatattacatttttaagctgaaaatattttagataggaaaacatacatttctttaaaattaaaattttttaccttacttgtgatgttctgagttgtgttgcttgaaattaaaacaaagtaagaatgtttacatgcaattgttagcttagttacagttgaaaggaacattcctattttggctgtatttgaacagccctggtaagttctatatattcagcttttaagcccttaaagtacagattaatgggactattcaacaagtattatttatgaaaattagctaggacactccctggtgcatttgaaatgagtc

SEQ ID NO: 8502 - DNA, 511 bp, Homo sapiens
  source 1..511: mol_type = other DNA
ggagtgactacatgtgtatgtcatactattacagagtataaaatttgagatattttccccatatataatcagtaaataatttggttagaacaggttttctgaatcaactaatatttagcacttaatgggaaaggtttgaatgtactctatgaaagtgaagaactttaataactttaccaacattggaactacaccattagtaatatatttgattacatttttttgaaattaatccatagctgtattaacagattatggttttaattaggtaatatagttaatatatatttataatattatttatcctttgactgcagaagactatcttaaaatacaggattttaacatttaagtcatgcacatttaacaattacaggttataaattagtatcaactttttaaacacatctaatgcttgtaataacgtttacaatactaacatggtatagattatctgagtgttccacagttgtatgtcaaaagaaaataaaattcaaatatttaaaacgga

SEQ ID NO: 8503 - DNA, 227 bp, Homo sapiens
  source 1..227: mol_type = other DNA
gagacactgtggatacgaagctgcaggacgcaggtgcagccccgtggtcccggatctagggaatgggaaccgggcgccctgggggcctggccacaacccgccccgggatggcgcctggcccaattggggagaggaaccgcggtcctcaagcttgcaggacacagggccgctgcccggaatgctgtgggggtggggaccctcgccgccccgcccccaccagcggcgtc

SEQ ID NO: 8504 - DNA, 538 bp, Homo sapiens
  source 1..538: mol_type = other DNA
tatatactattaataacagatttttttttgccaggctggagttcagtgacgcgatctcgtctcactgccgattctcctgcctcagcctcccgagtagctgggactagcgatgttggccaggatggtctcgatctcttgaccttgtgatccccccaaagtgttgggattacatatcatgatgtcttctcgagaccggcctagcgacggtcactcgacaggtgacaacgcccagctcgagcctccggcaagaggcgagcgccacctcgctcagatctgtccctctccgcttccccaggggaggctgtgagggctaaaggtcggcagtcacatctctcaaacgaatttggggccgcagagttcctttcagggtgtctggacctcaccgcctcggtgccaccgtgacgcctcagccatggcggctgaggccgcggcgcttgcgcgctagtcttgcggcgcgcgctgcccggctctgacgcctgcgcgagcccccagctcctccagggcggcgagctactcgacaagtcgtcagcgcggctgc

SEQ ID NO: 8505 - DNA, 346 bp, Homo sapiens
  source 1..346: mol_type = other DNA
tgctttttatctacacataaaacagctcagggaaataacaaaagtggctttatcttttactttcagccttaatttacagccaaattagttgatgtgggtctgggccccaggactcctgtacttccagcaacagctctcggttaataaccagtttctgcaagtagcagcagcagcagcacatccaagacttggcccaccccagcagcccgcagcccgcctcgggcgaaaggcctcccgggctcctgcggcgcagccgcgctgacgacttgtcgagtagctcgccgccctggaggagctgggggctcgcgcaggcgtcagagccgggcagcgcgcgccgcaagactag

SEQ ID NO: 8506 - DNA, 272 bp, Homo sapiens
  source 1..272: mol_type = other DNA
agggccacgcccagtggcgcctataatccattgcaccactgcactccagcctggacagagcgagagactctgtaccctgggtggccctaaggttggttctcagatatataaaaaatcaactaactggagtattaaggaaatttcccagcagttgctagaatgatggactctgaagtgttcctgctctccatcacctcacagccttgaaggaagtggctctcactgcctacatggcctccttctcattctgggggcttttggcgaaaactgag

SEQ ID NO: 8507 - DNA, 192 bp, Homo sapiens
  source 1..192: mol_type = other DNA
tacttcttttcccctccaattatcggcaaaggggaagggaatgagagaagttcacttaatggaggtggtggcgcgggcaagagctggtaacccgggctccagcgcagagcacaactccgcccacgaggtgcagctttgttacagaaatattttaaaagacatttcttacctaagagcctaaaggaaagaggc

SEQ ID NO: 8508 - DNA, 244 bp, Homo sapiens
  source 1..244: mol_type = other DNA
caattattggcagagcagtctgtcttgcgtaccacaaccccaaatctgcagctgtggaccatcggacagcaagcccgctggcggagaatacttcttttcccctccaattatcggcaaaggggaagggaatgagagaagttcacttaatggaggtggtggcgcgggcaagagctggtaacccgggctccagcgcagagcacaactccgcccacgaggtgcagctttgttacagaaatattttaaa

SEQ ID NO: 8509 - DNA, 414 bp, Homo sapiens
  source 1..414: mol_type = other DNA
ttcttttctgggtagcatcatactttaaagaaaaaagtatagttgagtctatttgccaaaaaaataaacttgcaatactttagtgtttaaggttccttgctatgtgttccttaaccctttaggtactgaatatctccttggatttatgccataaatgttgcccacaccatcggcttgatttaaagacaattccattagatcttttctaagccttttactctataaataaatgtatttacacaataggaatattgctttttaatgacctgacacgggtcatttacatggataattgaagcatccttcaaacgggaagaaggatgaaataaggctggctccctttggttaaaacgaactggccagaagctgcaaggttccttgctgggattggctctctgcagccaccgtccccac

SEQ ID NO: 8510 - DNA, 482 bp, Homo sapiens
  source 1..482: mol_type = other DNA
tataaataaatgtatttacacaataggaatattgctttttaatgacctgacacgggtcatttacatggataattgaagcatccttcaaacgggaagaaggatgaaataaggctggctccctttggttaaaacgaactggccagaagctgcaaggttccttgctgggattggctctctgcagccaccgtccccacgctgattcagaatttgcaggtgcaacccggaaagtcccccacagagaggtccctgcgggacagggtcgcttcacagaggcagctggccgaggccgctcacccgccgctgtaatggtgtgtggttgcccaccaggccccaccgccctctgctgcctggggctgttgctgacatagtaggaatcctattattgagaccctgtatatagaaaaacatggcagtttctaccttcatcagttaataaaatcaagtacctactattgctattcttaatcataattacattgaat

SEQ ID NO: 8511 - DNA, 244 bp, Homo sapiens; identical to SEQ ID NO: 8508
  source 1..244: mol_type = other DNA

SEQ ID NO: 8512 - DNA, 177 bp, Homo sapiens
  source 1..177: mol_type = other DNA
gttaacccagaccccagatttctgggcccccaaacgttggtcttcacgtgtagagcgcaggtctctgaaaaccctgggctctgtaacagcctctttcctttaggctcttaggtaagaaatgtcttttaaaatatttctgtaacaaagctgcacctcgtgggcggagttgtgctctgc

SEQ ID NO: 8513 - DNA, 177 bp, Homo sapiens
  source 1..177: mol_type = other DNA
caggtgtgggccaacaataatttataaatatcacctcgtcaatgttcaaattttcattaataaccaatctttgaggattgccaggctccccgtgaggcggagcttaccccgcagcctgcgggcagcgagcccaataggccatgaggccctgggcgcgcgcgcggagattggctgatc

SEQ ID NO: 8514 - DNA, 389 bp, Homo sapiens
  source 1..389: mol_type = other DNA
ggctggagtgcaatggcatcaagcgattctcctgcctcagcctgccgagtagctgggatttctataaaattgggatgatacgaatatcatagtgctgtttttaggattaaaccagattatagttgtaaaagagcagaactgcaataaatgtgaaatgttaacaattattgttaaataaatgttacagaacaatgctctcacccccacctccccgggctacccggggtaagaaagggtagacagggaatcctccacatggggcgatacatcctcctattttaaggaagaatccagaggctaccatgcatctttcctacgtttcagaaataagacctatgattggtttttccggagcaagagccggccaatgacaggcgggcagctcgccg

SEQ ID NO: 8515 - DNA, 282 bp, Homo sapiens
  source 1..282: mol_type = other DNA
ggttaggggatgaaaccctccacttcggatcttgtgggaatcaggcccaggcccaataaatacccttggtccaaggaaatctctgctatttagtggagagtttaatcttcggggctgaattttggaatctaatgccccgaaatgcaagccgcaccaagcccggcggctcccggggcgccggccctcccccgcccccacccccgcggtccctcggaccagcgctggaggcgcgtggtgtggacgcgcgcttcggagttggagggcggcgcccaggaccctgcg

SEQ ID NO: 8516 - DNA, 327 bp, Homo sapiens
  source 1..327: mol_type = other DNA
tctctttaaaaaagacttaaattttcccattacctcatcctgctgaacagccctgggctatcctgagctttattataagtcctgggtttttaaggttcaggccgatccggcagctgcaagaggggctcctgggactccgagcaggccctaatcccagccttcacgccgcggacgggtcctttgctggggacgcggcccgaggggctttggagggggtgactcgttagtgaggaaaccaccccttcccaacagcgctgtccgagagacactttgagagggagccggagctgtccccctaggttcgcgccagcgccttttaagggcacc

SEQ ID NO: 8517 - DNA, 352 bp, Homo sapiens
  source 1..352: mol_type = other DNA
aaacaatctagccaaaaacctgtattaaatgcattcagataagagttgagtgctactaagagaacccctttacgttggtctatttccagtacatccaatggaagtaatacattggccaagacattgtgtctcatggaccacagcaggtaggagctcatatttttccctaccccggccggacctgcaattcccctccagaccgcagggggcactgcaggccccggggagattggggcggagcgctgcgaggggccaggagctgtcgccccgctccagagcgcggggggcgctgtgcggggcccaggctgcggctccgctcccggccacggggggcgctgcgctgcgccggtgg

SEQ ID NO: 8518 - DNA, 373 bp, Homo sapiens
  source 1..373: mol_type = other DNA
tgttccgctgcaaagcttaggaggggcaatattgcaaaaaaacaaaaaaacaggaattagctggtggtgttttgggcccagagattgtgccactgccaacatcatctggtcaggggagatcctctttcacaggtgcggctgtacctgtgactcaggagctcaggttcaacagattattgagccttaagcttctcattctcttcaaaatgagggagcgcctgcgatttcaggatgtaaccatggagacctccacgacaggaggcgcatgcccggccacagcaggtgccggggcgggggcgcgccgccgccgccgcggcggcctcccggcctcccctagagccgccaccgcccacggcccgccgctgcggcaggg

SEQ ID NO: 8519 - DNA, 599 bp, Homo sapiens
  source 1..599: mol_type = other DNA
ctgtatccccaggaaaacagggtccagcacacggtgttaagttctaaccgtatgtggatcagatacctcaggtctccaagagcccgtcctagctctggggcgagagaaaacaggcctctttcgcccctgcaggtgagggtcccggaccgcccggaggcaggttcctcatccagacctactggccaggactcctagcacttcgtcagcgaagaagccgctgagcgcgaggcgcttcttcgcggcttctcaagcaccgttcaaaccgcgcccaccctcaaggagaatggactgaaaagacgacgaccccggtcctctctctttaagaaccacccccattcgagcctgacgggggctctcagtaaactcgcgagagccaccggcttccgcccgcttcctcctctcgccttgccgggccggaagaaaggtggcacctcccaccccccagcccggcgcggacccagctgcagccaatcggcgggctcattgtaggaagtcgcggcggacgcccagcttctcgccttccactccgcccctggcggaggaagtgatgtcacaggccccatgtgagcggattgcaacacatgcagctgccggagaga

SEQ ID NO: 8520 - DNA, 315 bp, Homo sapiens
  source 1..315: mol_type = other DNA
cgagtagctgggactacaagcgatccgctcgcttcggcctcccaaaagtgctgggattacagcgtcctccaggagcgggagctgggaacacgtccacgcccggggggtgtgcacgcgcccgggctcgccccagggaacgctggcgtgcactcgggcacccagtgagcgccgcagttgcgcccgaggaccggggctgtccgaggagctcagagccgccgcagccgggactgagtatcctctggtcaggcggcgcgggcggcgcctcagcggaagagcgggcctctgggccgcagtgaccaacccccgcccctcacc

SEQ ID NO: 8521 - DNA, 681 bp, Homo sapiens
  source 1..681: mol_type = other DNA
cccccaaaggtgggctctttgccggcgggcctttcggttccgggggagcacaggggaccccaggcaccagcagccccatcccaccgacaggtggcagaggcaaggcagagacaccgtgccatagatcgaggcccggggtcaaggccccgcctctcctgggcggcccctgcccaggcgggcccagccgctcctcccccgcactcccggttcgctctcacggtccctgaggtgggcgggcgggccctggatgacagcgatagaaccccggcccgactcgccctcgcccccgctctgggtctgggcttccccagcctagttcacgcctaggagccgcctgagcagccgcgcgcccagcgccacacgccacgagccctccccgcctgggcgtccccggatcccgcgagcgctcgggctcccggcttggaaccagggaggagggaggccggaacaacccttatttgggcagcaccttatttggagtggcccgatatggcccggccgcttccggctcgcaacgcgggaactccggagctgcgcgggtcccggaggccccggcggcggctagagctctaggcttccccgaagcctgggcgcctgggatgcgggcgcgggcgcgggccctagggtgcgcccgttcccatatatggccatgtacgtcacgacggaggcggacccgtgccg

SEQ ID NO: 8522 - DNA, 503 bp, Homo sapiens
  source 1..503: mol_type = other DNA
acagcctggcaacatagtgagactctgtgtctgtagttccagctactccgggtgggccgtgatcgcgacactccaccccagctccacctcacatcagaccgaagctgtgtttccagaagactgtgactccgggacacctgtgacactcttgaggggagcgtgcccagtacccctggtcgcgtctctgggattccgccggggtgggggcccgcgcgaggccgcccctgagcctcacctgtgcgcggagcggtgactcacctgccctcgcgcagccctctccgcccgcgggctgttccagggtcactcccggcctaagctcccactaggggccggggaagaggtccctcgggggtcccggtccggcgttgccagactctcttcgcggtgggggccttccctttccccaaaagcggaggccggaacggccgggaggagcgggcggggcggcggcgggggccgggacaggggcgggggccgcgggcggggggcgggccgggggcggg

SEQ ID NO: 8523 - DNA, 413 bp, Homo sapiens
  source 1..413: mol_type = other DNA
aacctcagtaccagcggaggcttttagttatggaggacatttaaagatcaactcagcattattttttcaatcagtatggcgacaaaacattgttataaaataaaagagaaatctttttagagttcccctgaaattctcaaagaaaaaaataaccacatgctttgtttaaatcatagtcatactttgattttaaccaagcaaccttgcataggctggtgttaaatcagcacttcataaattgtgcaggcttctgcccatttagatgatctctcttgatcactgctgcttcctacactgaaggaatatcatgtttttaagtcagggcaacgaccccgatgctgttacaaagcatggtgctttataacagcgtcatccggtgacgtcagcctatatacagttctgtgtgcgcagcc

SEQ ID NO: 8524 - DNA, 425 bp, Homo sapiens
  source 1..425: mol_type = other DNA
ggcaacggtggcacgcgcctgtggtcccgacacagattctgtcttaaaaaaaaatcagaatcgcaagtgacctttattttattttattagattttgagacagagtttcactctgtcacccaggctggcaagtagccgcctggctactatttttaaaataactggtccttgtaaaaaatctatttgcgagaaattttatccaaactgagtcacaagactttctgagggtccttccgctagaaagaaatagcctggaagcaaaagcaggcgtgaagctatctcttcagccctccctccccccaaggggaggggcacgggggcagctcgggcggggctaggggcggggctcccacctcggtgcggggcggggggcgccgcgcgctggtctggcggcccgcgattgggcgaggccgcgagcggcgtgac

SEQ ID NO: 8525 - DNA, 321 bp, Homo sapiens
  source 1..321: mol_type = other DNA
cagtagttgaggtcttggcacgactactgcctccaatcaggtgtttactgagtgcccacactatacaggattagcttagaggactattagtaatagcagtgtgattgtgccactgcactccagcctgggtgcattctacaaatgagactgaggtatagagaggtttctcgcccagtatcatttggctagacactggttaggggatagagcctattgaactgctgtgaacaaagctaaacaaggataagctattggttttattgtctgcttaggccgtgcacacgggctggctgtggcagatgcaactgcaggtgagtgcaa

SEQ ID NO: 8526 - DNA, 333 bp, Homo sapiens
  source 1..333: mol_type = other DNA
ctttttcattatgaaagagctcccaggggttcacctggcaatggtcacctggtagccttgcaggcagtctgtcctgaccaaggactctgcctgactgtgccatggtgcagggcggaggccggtcctgcagaggtcagcagtatcccgaagaccgtggaccaaggtgacctgcgtggacgctcgtgagcggaaccagcgttccgggggcgctcagtgtgggcaggcaggaagcctggctccactaggacaccagcgatgggagtggcctttcctaggcggggtcaagggccccgcccaccgaagccacgcccagtagccgccccggggcggggt

SEQ ID NO: 8527 - DNA, 400 bp, Homo sapiens
  source 1..400: mol_type = other DNA
gcgcctgtagtcccagctactccggaggctgaggcaggacgagatcgcgccactgcactccagcctgggtgacagagtgagactccgtctcagcactgcttgagccaaggaccagcacagtttatttatgataaataaataaacatacctaaataaaaaccagccaaaatggtatcgttttccctttgctctcgcgaatccctctaaggcataccctatttaaactttgtatcatttcccgcctcagctggatgacggagagggtgcacgagcgaggtgcgcgcgctgagtagggggaggggcctggcgcgcgccgaaccagatcgagggggtgggggcgagctctctcgcgagagtggtcttgggctgcagccgctgccgccgcttctcgccagcgccg

SEQ ID NO: 8528 - DNA, 477 bp, Homo sapiens
  source 1..477: mol_type = other DNA
agcactgcttgagccaaggaccagcacagtttatttatgataaataaataaacatacctaaataaaaaccagccaaaatggtatcgttttccctttgctctcgcgaatccctctaaggcataccctatttaaactttgtatcatttcccgcctcagctggatgacggagagggtgcacgagcgaggtgcgcgcgctgagtagggggaggggcctggcgcgcgccgaaccagatcgagggggtgggggcgagctctctcgcgagagtggtcttgggctgcagccgctgccgccgcttctcgccagcgccgttgctgcgggggattgtgggagtctccgcgtcccgctcgctgggagagaggtacctctccttttccctctccctttccctaaggtaggcgtgttctccgtgtccgccgggaggggacaacgacggcgacaggggctgcggggagccggcggcgcgcctttcttgctcg

SEQ ID NO: 8529 - DNA, 648 bp, Homo sapiens
  source 1..648: mol_type = other DNA
acttaagcatcatactatagggtgtatttttattcttctaaaagaagaaacccatctatatttttactgaaattttgatgtactcagacatctaacctttcaatttacatgtttttaaactcagtatgaaagtccctttaatagttaagctttagcatgaaatactactttttaaatatctatatgcaggctctgcatacatcaggaatctgtttaagatatgtaataaattccttgtaagtttgagatcttaaatgttttttttttaaatcaacatgatgcataagtttttttttcttaaaaaaacggcatctgcttaaagggatttatgactaaaatgaagaagattctgctttttgaagcaaagttaacctagctttctactttttggccgtctttaaaaaaatttttttttttaatctataaaatagacaagagctagttctacaatgtcgtctgcggcaggaataggccttcttgctgctagtttaatgaatcttggaatgagttcttcattgaatcaacaaggagctcatagtgcacttaatttgcagtctatatttaacattggaagtagaggtccactccctttatcttctcaacaccgtggagatgcagaccaggccagtaacattttggccagctttg

SEQ ID NO: 8530 - DNA, 508 bp, Homo sapiens
  source 1..508: mol_type = other DNA
tttttgaagcaaagttaacctagctttctactttttggccgtctttaaaaaaatttttttttttaatctataaaatagacaagagctagttctacaatgtcgtctgcggcaggaataggccttcttgctgctagtttaatgaatcttggaatgagttcttcattgaatcaacaaggagctcatagtgcacttaatttgcagtctatatttaacattggaagtagaggtccactccctttatcttctcaacaccgtggagatgcagaccaggccagtaacattttggccagctttgctaatccttctacagcttaaaaggaggagaactgaagaaggccctaccttgagttatggtagagatggcagatctaacccagtgcttgattatgaccatggaagtcgttctcaagaatctggttattatgacagaaacctcgcataactatcataaatttgacctggccccttacaagagagatctctctttgagaaaaagagaggcgctcct

SEQ ID NO: 8531 - DNA, 446 bp, Homo sapiens
  source 1..446: mol_type = other DNA
gagtacctgacctcaggtgattcactgccttggcctcccaaagtcctgggattacaggtgcttttctatgcaatctcaagctttctcagcttcctttcacttaaagtctataaggtatctcagatacatcaaggtgaatgtagttttcctacagaaatgtctgaatttaaaaagtgcacgaatcctttattaatctgattttacaggagttacctcagtgtagagtccagggatatatatttttataaaactctttcataatagatcagtagtacagattattgaaaaagtttgaacctttaaacaacgtggaggattggatataatttctgttcagagctcctatgaaatagaagcatgcgtagtaggataacatttatttctctcccacaacttaagaatattttaagtaaaatctgaatatttttagttcagagaattgtaag

SEQ ID NO: 8532 - DNA, 538 bp, Homo sapiens
  source 1..538: mol_type = other DNA
ttccttagctattagccattattttaaaaagataatctagctttgagagacctggaaatagtagtttatagcttccaacattttaaggaaggtaccattctattcactcttgcccagactggagtgcaatggtgtgaccaagtagctggaattacaggcaccttggctaatttttgtatttttaataaagacaggtgctgggactgcaggcctgagccaccgcacctggcctttctttagataattttactagagcataggaatgtacctaaactgttgtcaggtaaatataaaccagttttttttttttttttttttaggagctcatttataaaataccaatccgcatgtaattggtacatgttttatattccaaatataattgtattgggtagttacagaaattacctcaatttgtgggagtttgtgaaacatcaataatagttgtaaagcaggaattgtaaaacaagactgctttataatcagtgtaataatagttcttttttttccatgtgcctggcaagacaactatgagact

SEQ ID NO: 8533 - DNA, 463 bp, Homo sapiens
  source 1..463: mol_type = other DNA
accacacccagctaaggctgtcatttattacacagaaaaaacattgcatgaaaagtgatggtaatcatatatttgtaagagcttcgtttttcagtaaaattgcttctttaagcaagtatagtgattacaagactgaaaactttctcttcccataattgggaatatgatttgacctaaatccttaccattgctgtaatttgaaaacaatcacgtttttctatggctttgataacagttaaaactttaaattttgtatgcccttatcttggaagctccagttacgcgtacaatatttaatttaaaaatcactacagagagtatgttttgacactttgaagttgatatgtagctttaaaattctctagaatgttatgagttgttttactgttaattatagattataaaaagtcctaatgcgtaagtttttttcccctaatggataggaaactagcagagtttcaca

SEQ ID NO: 8534 - DNA, 354 bp, Homo sapiens
  source 1..354: mol_type = other DNA
gtgctgggattacaggctgagccacagccagtctagagtgcagggaattcctgacctcaggtgagccacccgccttggcctcccaaagtgttgggattacaggtgtgagcagccctgatattcagtgaatttttaactctgtgctaaagattaaaatttttagccgaccagtctaatgcatgcctgcaagccaggattgcgccactgcattccagcctgggtgacacagtgagaccctgtctcaaatgaaaattttctaaccagtaggtagaatacataataaggttttatacaattttgtaaaatataatgtgcttttctttttaaggcttttattgagatggagaatattgt

SEQ ID NO: 8535 - DNA, 380 bp, Homo sapiens
  source 1..380: mol_type = other DNA
ggcaggagaatctcttgaaccaggttgcagtgagatggcgccactgcactccagcctgaaacaaaaaaacaaaaacatactctcttctttacattgcttagtgaatatatccacccaggatcacggactacaaaattcttgaacccggaggtcacgtgtggacaggagccacaaagaagttgcacatgtatttgtattttgcgtttgcatcttcaaaatgggcgggtgtgggaacagtggtacgcccccattcctgccgttcctgctacacccggcagccggccgtaggggcgcgctggaaaggctgctgcgcgtgcacacgtgtgcagccttggagacagacttcggggtcgcgcgttctcgcgcgcgctctctagtgg

SEQ ID NO: 8536 - DNA, 455 bp, Homo sapiens
  source 1..455: mol_type = other DNA
tcaccagctgaggagcctgagttcttagggcccctgccatctcaggccctagggccaggctgggctgggcctgccaggaggggagacaggctgggcataggactgccttcctgggtggtgcatagaaaggccccacgcaggtcccagaaattatgtggctgggaggggaaagggatctgtgccctgacacagagtgcagacccggctgggccagcctaggcagctctgcctgcagaggcccatctgctgcctgcctcagggaccctgaggggtgcagggtggtcagaccaacctgaattctgtttccttcgctgttaaaggggaaccatgtttcttggcacaaggccaaggccattcctcaataacgagaatgactatgatgatgatgataatgatgaactagttattaatcagggttacataatcccagcgcccaggcgcagatggtggagtaa

SEQ ID NO: 8537 - DNA, 330 bp, Homo sapiens
  source 1..330: mol_type = other DNA
gcctgtcagggggcccaggtccctagcagtccctgccctctgccctggactggaagctgactaggaccagctccgatggcatggagggccctggggccaccccaggtgtcttaatcactgaccatggagccatcatggcagtgcccttccacgcctgggtatggcctgggtggactcccaggaggctggcagccaacagtctcatttctcagatcagcacagtgcctgccacttggccagatcacaggatgtgggcagtacgaggacaatgcccacgtggcatcttcggggccctggaggggtgttctgtggcggtccccacaccacaca

SEQ ID NO: 8538 - DNA, 313 bp, Homo sapiens
  source 1..313: mol_type = other DNA
gcctgtcagggggcccaggtccctagcagtccctgccctctgccctggactggaagctgactaggaccagctccgatggcatggagggccctggggccaccccaggtgtcttaatcactgaccatggagccatcatggcagtgcccttccacgcctgggtatggcctgggtggactcccaggaggctggcagccaacagtctcatttctcagatcagcacagtgcctgccacttggccagatcacaggatgtgggcagtacgaggacaatgcccacgtggcatcttcggggccctggaggggtgttctgtggc

SEQ ID NO: 8539 - DNA, 455 bp, Homo sapiens
  source 1..455: mol_type = other DNA
tactagagtgaccttgggcaagttattcattctcattctcatagactagatgccacgaaatagtgaacacaatatatattcgctctgatgttctccaaacctaatcttatttgggtttccaagaaaaaaaaaaaagccttcttggtcgggtggtggcacatgactctagtgcagactctagtgcccagagcctggtatcagagtatgaagactttgattaggcttaggacccctaagtactaagtaaagatgcaggagttgcctatgctggttgcctgctcgcaggcaaggaaagtacaagccgggccctgccggcttgtaaacttaaatgccttaagggttgtccaggcggctcctttaagaggcggcccctcgccccgctaacataggaagtccccgccccccgttgccagggtgctctgtggcgtcgcattctcattggtgggcgacggcga

SEQ ID NO: 8540 - DNA, 315 bp, Homo sapiens
  source 1..315: mol_type = other DNA
ctatgaagaagatgaggaacagcaagaatatttatttcctcaggctcttcatgtccagtgcctgaggagctggggcagtagggacatactgagattgctgggttcaggcaggactctccttggatgtccctagggttaggcagggcgagccgtgctgcaggcagctggcagctggcagcagcactcttccacagatctcctgacgaaggtccacggcctctggcgcagagcctgccgggagttgtagtccagtgccccgggagcgtgccccgcgctccgcgcccccttctctttcagcctcgggcacgggggagg

SEQ ID NO: 8541 - DNA, 326 bp, Homo sapiens
  source 1..326: mol_type = other DNA
aatgaagacctggaccccttgcctaagaaacctttagtatgcaaatctcagcgtctcagagtctatgtgtacctaacctacgaaagcaatactgcagtattttttgaggcagggtctggctctgcctcccaggctggagtgcagtggcatggcacaatgatagctcactgcaacattagctgggacgctaatttatttaaattttttgtagaaaagtctcctgagtagctgggattacaggtagtcgaactcctgacctcaggtgatccggccacctcagctagtattttttaaataattcatatatatttgatttaaatctcaca

SEQ ID NO: 8542 - DNA, 256 bp, Homo sapiens
  source 1..256: mol_type = other DNA
gccccttccctgggggcaggaccagggtgacagtagcttaaggtaaacattagcctagagacctggagtcctgggcccttccttgtctaggtgtggcaggtcattggtgtctgccttccagcatggtaggcttagaaagccaaaacgtttttttctgagagtctcactttgcaggctggagtgcaatggcatgatctcagctcactgcatcccaagcagctgggattacaggcgtgtgctgctcctgagtagctag

SEQ ID NO: 8543 - DNA, 354 bp, Homo sapiens
  source 1..354: mol_type = other DNA
gcaggttgccacaggctggggtgggcccctggcacccagccgcctctgtccacccaggcctgggctgaatgctcccctgatgctgagagaccaagggagcagcagagccaggccaggggctgtagtccctgctcaagcagagggacgggaacccagctgggcggctccacttccccattgttcacaggtttcaagaatgatttcattgtggaaaatgagcaaatatgtggtgactgacccctctctgggccccttccctgggggcaggaccagggtgacagtagcttaaggtaaacattagcctagagacctggagtcctgggcccttccttgtctaggtgtggcaggtcattg

SEQ ID NO: 8544 - DNA, 245 bp, Homo sapiens
  source 1..245: mol_type = other DNA
agggggactcttgcttttctattaagaataacgatacccggcctccagtagctgagactacaggctgatctgcccactaataatcatgcgtatagggcctctctgaaatctgcattgggatcctagattccaggaaaacccccaggcggtctgtggtggaacctgatcattgtgcataggcactagaggccatgctgggtgggcacagtcgctgctgcagcctcacatcctcatctgggagcagg

SEQ ID NO: 8545 - DNA, 238 bp, Homo sapiens
  source 1..238: mol_type = other DNA
ctgaccttaaatcttttgagtttagttcaataaatgctgaggacctgctatgtggcaggcattgtgccaggtcctaggagctggcttgcagtctgcaacaacacctcaccccagtagggggactcttgcttttctattaagaataacgatacccggcctccagtagctgagactacaggctgatctgcccactaataatcatgcgtatagggcctctctgaaatctgcattgggatcc

SEQ ID NO: 8546 - DNA, 254 bp, Homo sapiens
  source 1..254: mol_type = other DNA
ttataacctacactcaaacaatgtaggggagtgcagtggcctaatctctgctcactgcaacgaactcctgctgaccgccttctgggcagaaaccggcaggctcttggccatttcctgcatttataaaaatagctcttgttaccggaaataactggactcaggcccagtcatcagggctttgagggaaggttcctacctcccttcctgaggaacaggaaataccctccttcccagcaccagtaaagctgcggttt

SEQ ID NO: 8547 - DNA, 199 bp, Homo sapiens
  source 1..199: mol_type = other DNA
tacctgaaacaaggtaaacactttattattattattattattataatttaggttgatgcatggattttataacctacactcaaacaatgtaggggagtgcagtggcctaatctctgctcactgcaacgaactcctgctgaccgccttctgggcagaaaccggcaggctcttggccatttcctgcatttataaaaatagc

SEQ ID NO: 8548 - DNA, 307 bp, Homo sapiens
  source 1..307: mol_type = other DNA
ctttgaaattcattcttgaccttctaattctcatgcttaggattaccaggagtcatgccaggtgtggttggcttacgcatcccagctcccacactctttttatattgttttatactcagtacctgttttaagaaaaaacaataagagcccagcgccaggccgaaaccaggcctgggcctgcctggcctaaacccaggttaaaaatcaactcataacttagaaactgatgttattcatagattccagccattgtatagaagaacattgtgaacggtgcatgcagcccctgtcgtgagcccttaaaagg

SEQ ID NO: 8549 - DNA, 426 bp, Homo sapiens
  source 1..426: mol_type = other DNA
ctggtctcgaattcctgacctcgtgatcgacctcaggtgagcggctatgagacatctccctcgtggcaggtgcccgagctgtagccacgcggcctcatgtgctaagtcccaggacttcagaagagctctgtgaccttggccaagtcccttcctccttcaggagcgctgcagtgggcctaagtgcctcctcccgggacacgcgcgtgggtttccagagcctgcagaactcgcgctctagatctcgcgagatctccgcccagggcttcgcagcgtcacgccctccggggccgtggcggcgacggcggtgcgtagcttactcacaggggcggcccgtatccctccgccgccggcgcggctcggccctccctcccgcccctcggtcgggcccaccccgtgctccgacggccccaccccggcggcgcagcc

SEQ ID NO: 8550 - DNA, 669 bp, Homo sapiens
  source 1..669: mol_type = other DNA
agcggctatgagacatctccctcgtggcaggtgcccgagctgtagccacgcggcctcatgtgctaagtcccaggacttcagaagagctctgtgaccttggccaagtcccttcctccttcaggagcgctgcagtgggcctaagtgcctcctcccgggacacgcgcgtgggtttccagagcctgcagaactcgcgctctagatctcgcgagatctccgcccagggcttcgcagcgtcacgccctccggggccgtggcggcgacggcggtgcgtagcttactcacaggggcggcccgtatccctccgccgccggcgcggctcggccctccctcccgcccctcggtcgggcccaccccgtgctccgacggccccaccccggcggcgcagcccgcccgcccgcgcgtccctcggtccacctgcagcagggaggaagacaggcaatccctccggctgtccgaccaagagaggccggccgagcccgaggcttgggcgaagaggcagctacggcggcggcggcggtggcggctagggcggcggcgaataaaggggccgccgccgggtgatgcggtgaccgctgcggcaggcccaggagctgagtgggccccggccctcagcccgtcccgccggacagatcgccgaggcggcctcaggctccccgcccccgtccccgc

SEQ ID NO: 8551 - DNA, 310 bp, Homo sapiens
  source 1..310: mol_type = other DNA
ttaatgacctaacctaaagtctgtttaagcttcttaaaatcctgtaatcccagcaaaggtcagtgagcctagaccgcgccgcgccactgcactccagtctgggcgacagagccagacggtgaatcacgaggtcaggagttgccaggcatggtggttcaagcctgtaatcccaggacttcacctgaggtcaaaaaaaaaagaaataataataataataataatccttgttggttactgttaatataaagttaagtaaaacttacaaagctgctaggcattacagtataaattcttagaattttctcatgtt

SEQ ID NO: 8552 - DNA, 551 bp, Homo sapiens
  source 1..551: mol_type = other DNA
ggtgaagacatctgcagcagcaggattaattagccgggcccaactctgtccccactgggcgcctactctggcaaggccatggtctcagggcaccaaagttttagccccgggactcaagagttgaggctgatgagagataaaatatcctttctcggatcagtttcctcacctgagaaatgggaacgggaatctccgccccttttctcccggggccctagtgcccactgaatccattaaggagctcttggtggggtcttggaacacgcgtctctctggcccgccgcgcacctgagctggggggcgcggccaaattctccctcccggtcctcgaagcttctggccccgctctagagggggcagaagaccgcctcaccaaagcggggaggtcgtcctttgtggaccgcgtcagggcgcggggagctcgaggcgcagcggctgcagctccggcctcagagcccgcggcgtccaagtggcccgagctgcgctgggagcgagtccggtccgggttttgccggcagcccccgggcagcgttcatagctcctgcccgggc

SEQ ID NO: 8553 - DNA, 683 bp, Homo sapiens
  source 1..683: mol_type = other DNA
gaccgcctcaccaaagcggggaggtcgtcctttgtggaccgcgtcagggcgcggggagctcgaggcgcagcggctgcagctccggcctcagagcccgcggcgtccaagtggcccgagctgcgctgggagcgagtccggtccgggttttgccggcagcccccgggcagcgttcatagctcctgcccgggcgggcgcgcggcggcggcggcagaggcggctgagcctgaggcagcagaggcggcactggcggcaagagcagacgcccgagccgcccctgaagccgggccccgcgtcccagccctgcccagcccgcgcccagccatgcgcgccgcctgctgagtccgggcgccgcacgctgagccctccgcccgcgagccgcgctcagctcgggggtgggagggggaggaggggcaggtgctgcaggctcccccccctccccgcctcgggccagccgcggcggcgcgactcgggctccggacccgggcactgctggcggctggagcggagcgcaccgcggcggtggtgcccagagcggagcgcagctccctgccccgcccctccccctcggcctcgcggcgacggcggcggtggcggcttggacgactcggagagccggtaggtgtcgggccacggccctccctcgaccccccccggaggccggccctccctctcctcccccgggg

SEQ ID NO: 8554 - DNA, 614 bp, Homo sapiens
  source 1..614: mol_type = other DNA
gtcaactatttgtttacttgaacgtgactagaacgcaagttctggactgtgctctcttcccatggtctaaatagtgcctagcacgtagtaggcactcaggtctcccagggaggctctgaacgctccctccgggagagggagggcacggcgcccgcccggggatgaggtccagacgggcagggcagggtagggcgcgcgacctcttcccctggtgggaaggtcctcccggcggggcctcctcttcccctccccggggaggcaggtggagctgcgtcctggcgcggcgtggcgggggcggggctgcgcccccgcggtgcccggagagactggcccgcccgcagctcggtcccctgacagctgccgagccgagccgggccggatggaaaacccgggctgtgcagggcccggcggggcgctgagcctctgcggcaaagtagacaaaggcggcccctccctccctgtgcgcgctgctgggggtcgccagaggtagcggccttcgccctcaccctgcagggtgttccagccgggaggggggcgcccttaatccctacgtgcccgcccaccccgctcccacgccggggccctgtctggggtctctgggagagtcaccccca

SEQ ID NO: 8555 - DNA, 460 bp, Homo sapiens
  source 1..460: mol_type = other DNA
ctctgagaggcggactctcaggactcccttgggagatggtttcctctgcccagggcacccccacagggatgtggattcttggttggacccaccgtgtgactctaggtctcaggggctcagtctccctctcggcggcgtctcccgggggggggtcactccctgaacagaccgcgggaggagggccaggacccgccccctccttcacctccagggcctggcgggtcccgagagctcaggttctggggcccagcgtggctaggagggggcagaaccccgggcgctcccctccccccctttcttaaagggcccgcgcggggcagagggggacaaggtgggccgcgctctccccggcacgctcggggtcccggggcgagcgctgcgctgcaagcggacagggctgggggccgcgcttccctccgggctccgcgcccgccgctcgcgcgcccgcagtgcccccgcc

SEQ ID NO: 8556 - DNA, 561 bp, Homo sapiens
  source 1..561: mol_type = other DNA
gacaggcttcttagagatcagatttttaaaagatgaggttgtacagttggggactgggccctttctcctcctaggaggacagcccaagaggcgagaggctggccggccaccctggccatggcaacctctctggctcctacagctgctggccaaaggcagggggcacgccctgcgtcccattaccacgttcataggatggtgcctcccgggagcaaagggtggcacgattcctcccgcgcccctgcgggctgaaggcgggcactgctccagcttcccctgcagaagccgcgctccctactcggtccgggggcagagggggcgcgcgtcccatcctccgcatcctcctccaggtcctggcgcacagggtgggagcgctgcgctgcgccgcgctgcgcatcgcggcccgcttgccgcctgccccctgccctagctgggccacctccccgggctgccggtggagggctaagttcccctcccaaggcggcggcggctgagcggcggagccccccaaatggcctggccagatgcggcaggtttgctgctcagcgctgccgccgccgc

SEQ ID NO: 8557 - DNA, 433 bp, Homo sapiens
  source 1..433: mol_type = other DNA
cctcattgataggctaatggagcaaactcttctgcctcttgcaagcatcagcaacaaaaaaaaccttttttatggagcagtctgacaggcttcttagagatcagatttttaaaagatgaggttgtacagttggggactgggccctttctcctcctaggaggacagcccaagaggcgagaggctggccggccaccctggccatggcaacctctctggctcctacagctgctggccaaaggcagggggcacgccctgcgtcccattaccacgttcataggatggtgcctcccgggagcaaagggtggcacgattcctcccgcgcccctgcgggctgaaggcgggcactgctccagcttcccctgcagaagccgcgctccctactcggtccgggggcagagggggcgcgcgtcccatcctccgcatcctcctccag

SEQ ID NO: 8558 - DNA, 597 bp, Homo sapiens
  source 1..597: mol_type = other DNA
gtgaaataggcagtgactctcacactgagacctccaggggatgttaaattttcatttctgatagtcttatctgggaagcctagagaaacaataggcatatacttatattagagtggtgcaaaagtaattgctgtttttgccatttaaaaaaaaaatgcaaaaaccacaattaaaaatcaatttctaaaatgaaaaataaaaaattttttgcaagtaggacttgcaagctaacttctcttcctgttggaacagaagaaggaaaccttcaggacagaagattctgtcccattacactctagctcgggagtaagcccccaaccctagttgggtctggaccaacaagacacgaggaggcagcagcccacagccgacccctcatgcgcatggacgctggcagcgcagctgggaggcccacgttgggaagtcggagaccgaccccgcctcccgactgcgccgactgcaagagagcgcttccggcggcgcttggagggggcggggctcgtgctgtgacgcaagcctcgcctcgccccgcgccgcgcgcgttgccagggtgatcaggtgactcccggttcgcggcgctgggagcggccgtgacgt

SEQ ID NO: 8559 - DNA, 390 bp, Homo sapiens
  source 1..390: mol_type = other DNA
caagtgacttgcttaaagtcacacaattagtctaaaggcagaccaagccttgaatctagattaggctggtttctctctttctttctttttttaaaaaataaaataaatttcctaattatttatgtagcactttctcttagctaacagtttttagagtaggttaacttttttttccatttccaaaagtcaattaactcaaaaaagtgatcgcaaaagtgcaaatttttttttgtttttaaacaaacgtgaacactccagacaagctttccaatagtactgtcatgcctgaggttctggacttactcttactcattcctgatttagcagcacatattaagctagctggcaaactgcttaaagcgccagacctgaccggtccatgcgcaggcg

SEQ ID NO: 8560 - DNA, 376 bp, Homo sapiens
  source 1..376: mol_type = other DNA
agggcccagaaggcttgtttcacaacctggggaattacagagactaagagagtactaacttcctttgctcacgtgtctaatttttaaatgatagatgaattaattattatttgatacttcagctcagcagtcagtcacaaggctgcagagtgacggaaccgctctccgccacctgccggtcagtagccctacccacaatcaggccgcggctgcctcggcctggtcccaacctcccgcccagtcctccgccgcgcccgcggggtcgggggctgcgctgccggcgccgcgagccgggcgagcttcccagcacgggaggagggagggggcggcgccgggcggggcggagcttccgcgcctcctggagccttattcccgg

SEQ ID NO: 8561 - DNA, 343 bp, Homo sapiens
  source 1..343: mol_type = other DNA
ttgagaccagcctggccaacatggtgaaaccctgtaggcaggttgcagtgagctgagatcacaccactgcactccagctagtcccaactaccttgaggtcaaaggtgcagtgagctataactgtgccactacactccagactgggtgagagagtgagaccctgtctcactcaattatttattaggtccctgtttgtcccccaggggtgtgttggtgacacccaaaacagtcctgggtgttttcctgtttctttacacaaaacacagtgggatccaggttgggcatttctggagagcctgggaaaggccagactagtcttacaaatactcttaaatgcaaccag

SEQ ID NO: 8562 - DNA, 463 bp, Homo sapiens
  source 1..463: mol_type = other DNA
ctagccttgttttgcaccacacagatctgattagaactagctagcaaaaatgagtctttcctgtaagttatattatcattatttgtactaatattactcccatttcacagaggagcgagttggaccttcctacgtgggacagttcccggtactgaggcatggcgctgtccagccctcaggcccgcagccgtccgcaagcaggagaacgcggccccgctgggcgatcctgcccgaaggcgcccgaactgcggcgcgcggccgggtcctggcgggcgggtcgagtctccccaaggcggccatcccacagacccgcgcgctaggctcaactcagaaaggcgggaggcgcgaagcgagatcggccttgcccctcgactgcatcttcacctgtcccagaggtggtgatccaaccaggcaatggcaggaaggtggagccttctattctccggccatagtctcggcgccc

SEQ ID NO: 8563 - DNA, 566 bp, Homo sapiens
  source 1..566: mol_type = other DNA
gaacgcggccccgctgggcgatcctgcccgaaggcgcccgaactgcggcgcgcggccgggtcctggcgggcgggtcgagtctccccaaggcggccatcccacagacccgcgcgctaggctcaactcagaaaggcgggaggcgcgaagcgagatcggccttgcccctcgactgcatcttcacctgtcccagaggtggtgatccaaccaggcaatggcaggaaggtggagccttctattctccggccatagtctcggcgcccagcggagagcgacagggtagaagtttcaccaagcgcagggtgaagtctactccaaatttgaccattcccgtcacctcagatgagggcgggatcaatggtaccaattgtaccacgcgacgtcccgcgacaaagtgaccgacactttatggcgccaatgaattctcccattgttcggggtcactatgacggtgttcgcaaccgcctaggcctgcgcgggtcaacgcagcttggcggctgcgagccagcgagcggcgggagcctgagcgacgggtcactttggccaatgatctgcagccgccagggtat

SEQ ID NO: 8564 - DNA, 631 bp, Homo sapiens
  source 1..631: mol_type = other DNA
ctcggcgcccagcggagagcgtagaagtttcaccaagcgcagggtgaagtctactccaaatttgaccattcccgtcacctcagatgagggcgggatcaatggtaccaattgtaccacgcgacgtcccgcgacaaagtgaccgacactttatggcgccaatgaattctcccattgttcggggtcactatgacggtgttcgcaaccgcctaggcctgcgcgggtcaacgcagcttggcggctgcgagccagcgagcggcgggagcctgagcgacgggtcactttggccaatgatctgcagccgccagggtatgggaaaggagacgcttcttcctcttgctgctctcgttcccgagatcagcggcggcggtgaccgcgagtgggtcggcaccgtctccggctccgggtgcgaacaatgctgactgatagcggaggcggcggcacctcctttgaggaggacctggactctgtggctccgcgatccgccccagctggggcctcggagccgcctccgccgggaggggtcggtctggggatccgcaccgtgaggctctttggggaggccgggccagcgtcgggagtcggcagcagcggcggcggcggcagcggcagcggtacgggcggaggggacgcg

SEQ ID NO: 8565 - DNA, 639 bp, Homo sapiens
  source 1..639: mol_type = other DNA
acacgtatacgtatgtaacaaacctgcatgttgtgcacatgtactacctacataaattttgacattaaaaatttgaaattaaagaaggatatttatggtgataggtagaattgatacccaccatgagaatattttattgttaatatgcagataggccatggtaaaaattttttacaatgaatgtctttatttttacatcattacaaaatctttgcctcattgcaacaaggtgttgtgattatttatgttggtgacataatcccaagtggtaacgacttcacataatttgttgaaatagatgtaatagatttcacagttttttgaacttcaaaaaatggaaatttaaaattatttggatttgtgactgttatgtcaccaagtctcattcttttggagaattttgggcttgctcaaaagttggttaaaataatttgaaaattacttaaaagcaatattgatgaacttttgataaggctcagatgagcatgataatatatatgctgtaaatctcaaaacaaaaaatttctctccttctttctttacttctgaaaatctgcaggatggacatgtagaggtggcacgtagtgaacatgcctgcagattcatttgaatctccattgacgctagcttgaattggca

SEQ ID NO: 8566 - DNA, 585 bp, Homo sapiens
  source 1..585: mol_type = other DNA
ttttaaaaaccacttaatatcaaatataaacgtaagtattctaagttgttatcttattacaacgttttttatttgttttttaacaagagaatcaagagaaagctttttcttttttcttttgttttgctggagtgcagaagcgattgcctgccaagtagctggtaatacctcccaaggtagtattaattatcctagtgaaagtataggtaacataagcgctagaagttcattaaagtaacttttaaacccaccttaaattatggagcttttactagtatattaagttggtgaaatctaaattcttttctacaaagtcattctgataccccaattgaagaaatatattacatttttgttttcttttgatccatgtagaatttgaacaagggtaaatgtacccctagctacaattggaacaagggagtaatgttatttccatttagcttaaaatcattgactatttgtagattctaatcattagtctcaaaaattattgcttggtgaaagctttttttaaaaaaagcttcaggaaacaaaagtgcatttggtatatgaagataacctaaaacaggatatctgtttcat

SEQ ID NO: 8567 - DNA, 593 bp, Homo sapiens
  source 1..593: mol_type = other DNA
tttctttgcttagaactgcaaggttcttagaactctgggtagaatttttaataattagtcaacagagaatctagtgctcatttgaaattagtgcaacatttacattcttttaatctaagtaatgaggaagtgtagtttttccttggctttttaccacacaaagagaaatgagtctttcctgtcattcaatttgtctttttctattacaagtattcattgtgtgcttaaaggtcctagtgttattttggatatccttatgcaaaaaatttataaagtgattttaatctacttatttttaatatctctattcattatgcaaagaaattatctgagtaaattcacaaaagtatagaagttacagaattgtttttagcatgagataacatgttttaagttcattctagcacgttttctacgctgtttagtaaaattcaaggcaaaatattgcttagctcttttatgagagccttaaaagttaattgcctcaggtttttaaagaaattatgtagcttagttttggtctacggaatagttaaaaaaagaaatgtaacttagttgcataatttattggtttaaactcttacccagcagct

SEQ ID NO: 8568 - DNA, 721 bp, Homo sapiens
  source 1..721: mol_type = other DNA
ttcattttacatcaccaatgtttgtttaatagatttattctaggagatactgtttttctacaaaagctttttctaatttcagtgggattaaattcaggagaaatataagctgaatgctgatcttatttttataattttaattttaagcttaatattctatttggaagtatttgcctttttattcttaaattggtaggcatatatgcaaaatcaagggattcctttgtaattctgttgttttactttcttttattcttaagaataataatttttcttttcatcatgtaaaagttgttcaatatttggtaaaggaagtaaatcagttcccttctgatatagaatgcatgagatacatagcaacaattacagataaggtaagtttaatatgctactgaagcacatttttgttctttgtggaatgatatgccaaagtgtgcagtatttgcaaaatagaggggtataatacttttgataaactattttgagatttctactgtggaccatagtcacagtgactacactaaggtactaaaccattagcctaatgagaaggcttcctaaggacttatttttgtgaaagattggactcaaaggataacttaatttggtttagtgacttttcagtttgaactttaacctctggactttaatgtgctcatcattatatatttacataattctatttcctgctgtaggaactgttgaaaaaatgtcatcaatg

SEQ ID NO: 8569 - DNA, 511 bp, Homo sapiens
  source 1..511: mol_type = other DNA
ttcaatggcagtgtaatttttaaaattaggttctctgaaactgcagagcaatgtaatttttaactttactaaattcaattcaatattacaagagatcaatttctaaaataaaaacttttaataatttcctctttagcatttaagaaatgttattctccaaaatgtccatgaacatacttactaagacatctttcttaataaagagacatttaatttcataagctcatgtgtattcttcattttatatattgatgtggaattgttgtatactgctagttctgagtagaaattataagaagcatacctttgtcaggtatggtataattaagaactttatttgattttttttttcccttaggggtggcacagaatcaacaaaatgcactcattcaagatcctgtgctaacttctcatctggagtaggtaccgcatttcctttgggcaacaacgttatctacgttccagcccgctaataaacttaataagaatgttccctcaaactatgcaacag

SEQ ID NO: 8570 - DNA, 475 bp, Homo sapiens
  source 1..475: mol_type = other DNA
gtttggtaataacaatggtaatgttttgttgttttatccaaataaatttaaaactttgttttcaattattctttggtcgcaatctgtgatggggagccaatggagagagatgattctggaatgtaacatttttggttttgtggatttttctaaagtgagttgacaaacatcactgtaacttgattgacactttgtcagccaatgtagtcacattaaggaataccttgtattgtcctgcccatcccccgaaaacacctgagggttagctcaagcttattcatgaaactaaaatatgggaaagttgaggttatttttatcaaatatgagaaatttcctgatgatttcatattgaaaagctttgcagatgcagataaacattttgttcttttggagttctttaaatgagaatattagagaagattatgggatttatagtaattttataatttatagtaattttaagattaaatctttt

SEQ ID NO: 8571 - DNA, 343 bp, Homo sapiens
  source 1..343: mol_type = other DNA
ccatattgagaaattttatttcaggtcagtaagtagaatttaaacatttggataaaacctagctcaggtaagaacttaattactttcaaaatatacaagagcctaaattctattttgaaattgaactcaagattctaacacaggatttcttcttgtgaatgagaatataagatatggaaatatttgaagccattagattgtttacaagcattggttctgataaggaatcgaaataaatcctgccattattatggcaacttgtgttcaatgtaataaaattccgctaccaataaaattattaatgttttaagaccctttaaacctattgtggctacagtgtgct

SEQ ID NO: 8572 - DNA, 419 bp, Homo sapiens
  source 1..419: mol_type = other DNA
gagatcaaagggcaggccttctgactggtgatgcctcagctccaggccatcaaggcatgtgtcacccaggctggagtgcagtggtgcaatctccgctccgagtagctgggtctacaggcgcatgctgccgcacccgttgcccaggctggtctcagactcctgggtgggattacaggccgtgagccaccgcacccggccttgtactgttactgttcagtcagatttgaatcccactttggctaatcatagtgctttactatccaaaagttggcgtaaatagctgagctgctgcagcactcaggcaggttggccagcgctgggccagcaggccgggctggcttcctagcagatagggcgggaccgtcgggttgagtgacggccggtggcccgccctgggcgtgagcagctgcacgtggtcg

SEQ ID NO: 8573 - DNA, 287 bp, Homo sapiens
  source 1..287: mol_type = other DNA
gtctaggtctcaccttcactggtgagaccaaagcagaaggcttgtctgctgagaacctagctgggcttcagagccgatgtgcctgagtctgggaccccagtcacctcggtacccaatcctgctggagcccctctctccaagctggaggagctgttgagttcaaatgccactgtgacacagtgcggggtgatgctgagcctgcagatcctccacaatttgaaatggacatctaatccagtgcagatgacctggcatgtggagttacagagggatccctcatgccactg

SEQ ID NO: 8574 - DNA, 256 bp, Homo sapiens
  source 1..256: mol_type = other DNA
ctgtgccaggcagctgggcactgggaatgtaatcaaggtcccaccttctaagactgtccgactggcctgagacattccagaaggcctcctgaagaactgacatctgaactgagaactgtggaccctcctttggtgccttgtgaccagggccctgatggttcaagccttcgagccgcagggtccccacagcggctcccgacggtggacgtgtctcaactggcccgcgtgaggggccgccccggaaatgacgcgctgc

SEQ ID NO: 8575 - DNA, 399 bp, Homo sapiens
  source 1..399: mol_type = other DNA
gattttgatcaggaggggacatctgggggatccacggctcctccccactgttgaggcagagaagggacatcctcactcctgagccgctccagagtccctcgtgccgactgccccggccatctttacggagggcgaagggggggaggtgctttcctagtggccaagtacgcctctctccgtcgagtctcaggctgcgtgtgagcgcactcacgaccggggcgcgatgatctcactcgtgcgcgagtgcgcgcggcgcatgttcggcgtcaggcgctggcgttcgtgggcctcccccggacccacacaccacgcaccacccctgggcgggctgtgcggctcaggccctcccccgggaccggcccgtgtcccgccccgtgtcccgccccgtatttgtgcggc

SEQ ID NO: 8576 - DNA, 474 bp, Homo sapiens
  source 1..474: mol_type = other DNA
cctgggctggaaagaccatgggtccggtccagtgaactctccaggctggagaaggatctctttggggggccgcagtcctttaacagcagacctaggtccagttcccaggttgggcgctgccactgggtgctaccgctgggtacatgccagtagtaagtacctgcagcatcgtggatcttcctccagccaggaggcaggccagcctccagagttcagaataacatgctgtcacttaggctgaagatccaggctcctcaatcttgaagacattgaccagaatgatggccagcatgtaatccttgcccagcaccccgccagcctctgccggcccgcactctcagtggagctactgcgcctgcaagcccagcctctctgcgccgcaggctgcggggccagctggcgccgcacaaatacggggcgggacacggggcgggacacgggccggtcccgggggagggcctgagccgcacagcc

SEQ ID NO: 8577 - DNA, 538 bp, Homo sapiens
  source 1..538: mol_type = other DNA
tcgtggatcttcctccagccaggaggcaggccagcctccagagttcagaataacatgctgtcacttaggctgaagatccaggctcctcaatcttgaagacattgaccagaatgatggccagcatgtaatccttgcccagcaccccgccagcctctgccggcccgcactctcagtggagctactgcgcctgcaagcccagcctctctgcgccgcaggctgcggggccagctggcgccgcacaaatacggggcgggacacggggcgggacacgggccggtcccgggggagggcctgagccgcacagcccgcccaggggtggtgcgtggtgtgtgggtccgggggaggcccacgaacgccagcgcctgacgccgaacatgcgccgcgcgcactcgcgcacgagtgagatcatcgcgccccggtcgtgagtgcgctcacacgcagcctgagactcgacggagagaggcgtacttggccactaggaaagcacctcccccccttcgccctccgtaaagatggccggggcagtcggcacgaggga

SEQ ID NO: 8578 - DNA, 344 bp, Homo sapiens
  source 1..344: mol_type = other DNA
gccccacacacctggtggggcccacaaacctctgttcccagggtgggagccctcaggcccctggatcctggagtgccagctgcctccagagctcctttgctcagggcacctgagtcagtggtccaatccacactgggctctctgggccgagggtacagtgtggccctgttgctccgggggagggaaacagaggcaccccgacttgtgcctcaggtgagtcccagaggagccaccagggcgcaggcctcatgcagctcaggggttaccttccccggagacttctgagaagcaagcatcctgttggtccccgcaagacctgaggtcaggagttcagaatcacttga

SEQ ID NO: 8579 - DNA, 475 bp, Homo sapiens
  source 1..475: mol_type = other DNA
tttcatataaatagaattatacactgtgtggccttttgaacctcctggagtttggccactccgtgagactgcacttctgagaacagtctcaagtggcttgacaattcactagaacagaactcaagtaaatgctacagttactgtgtctgacactaattctctcacaccagactgactacctggagttagtgtcaggtcctgtgagttaaaatacaaggcagctgcaagtgggatcaccaggctactcacacatttgtctgatcagtaattcacttgaatgactcgcagaactctgcttactattacctttttattataaaggatacaaatgaatagtcatatgaatgtccctgtggagtcagggtcgtttcattatgcaggcataattgagtaaatcactggctgcatgattgaactcaattccagccccattcccctccctgaagtcagggggagggactaagaatgccaaccc

SEQ ID NO: 8580 - DNA, 300 bp, Homo sapiens
  source 1..300: mol_type = other DNA
agtgacccagagacttggccaatgtgtctctgttaaatacatccactttgggtggcaggagttcaagaccagcctggccaaggttgcagtgagccgagatcatggcactctactccagaaggaagggggaatttttctttagaccaacttccttgaggcagttaaatatctgaggatattcagggacttggatttggtggcaggagatcaacggcctaaggcactgaggatcatcctgcgcctgagtcatcaggacacgaaacatccttcattgcaatatttccaggaaaggtgacatcc

SEQ ID NO: 8581 - DNA, 320 bp, Homo sapiens
  source 1..320: mol_type = other DNA
ctgtaatcccagctactcaggaatctgaggcaagagaattgctttgcagtgagccaagatcacgccactgcactccaaaaaaaaaaaaaaaaaagactttcatatagttctttccccagaggtctagggatgtggactggtgagttactaattaatcctccttcctagggcacagagattgtaccttgcttcacaatttgtaagtgacccagagacttggccaatgtgtctctgttaaatacatccactttgggtggcaggagttcaagaccagcctggccaaggttgcagtgagccgagatcatggcactctactccag

SEQ ID NO: 8582 - DNA, 405 bp, Homo sapiens
  source 1..405: mol_type = other DNA
taaagaataaaagattgatctaattatttgaagagaaacctcatggcaatggggcgcgatctcggccgagtagctgggattggccaggctgcggaccaccttgggcacatgttctcaggacctcctgaggtgtcaagggccatggtcactcatatttggctcagaataagtctcttcaaatattttacagagttggactcttttcttgacaattcaatgacgcttcaacaggatccgcattaatagtgaaacggcatcactttttttcctagaattggtaagacaggaaatcaatcagaggcagagcgacgcctctggctctggtctagtggtgcagcgtctctagccctcgccccgcccaccgtccccgcgaggcgtccactcgccgagcccccgccctgtgct

SEQ ID NO: 8583 - DNA, 209 bp, Homo sapiens
  source 1..209: mol_type = other DNA
agcacaaaatactcactggtggaaggagtgaggatcatccacatcgtggccaaaaaaaattgacgttaatttaatcagtctcttacgtgtcagatcctatgcaaaaatttgagatatagtaatcctgcgctggaggatcagagaagacttcggatggcctgagccttactatctcaacctcatgcagcctatgggctaggctttagggt

SEQ ID NO: 8584 - DNA, 376 bp, Homo sapiens
  source 1..376: mol_type = other DNA
agcacagggcccagctctatgtgcaagcctgcatacttatgttgcccggaaccctgcgaatataaatttcttccagacccctggcgtcccgcactcaccgtagcgggcccagagcttgggctgcacatcgagtccctgcggggccggagagagcgccgcgcgtgctgtgggcgggggcttccctcaacttcagggaggtcgaggtcgtgaccctggcgtcccgaagcccgcccgcctcaccacgccgcgcctcacctgacgccctggctgccgggcgagcgctcccagctgcgctgcggccgccgccatccttgttaatatcgaagtcgccaattcccgcggaccctaaagcctagcccataggctgcatgaggtt

SEQ ID NO: 8585 - DNA, 306 bp, Homo sapiens
  source 1..306: mol_type = other DNA
gaccagcctggccaacatggtgaaaccctgtcagtgctcgcattgcaagactcccaggcgtggcgtgcctgtagttccagctactcggaggatcgcttgagccgtctgtagacaaattgtaccagctgcttgagctgccgctgtcccagacgcagcgcctgacagcccaggctgaagggcattaagcctgtctggatgaagtagggaggagtcccggagacacttccggccccgccccccgaggcggaagcggagtgccaggctactcctcccgcagtgtgggtggttccgaggctgactaccctg

SEQ ID NO: 8586 - DNA, 429 bp, Homo sapiens
  source 1..429: mol_type = other DNA
ctgatgcctagagggctagaggaatggaagatgcttataccaccttcttctcccatcctggccaggtggatgccctctgcatctgctgaaagacaaactgcatatgtacttcaattgctttgcacttttccgtttcagcggaagggttattttattgattattactggcaaaaacggccatgtgctcgccagcctgagatggtcccatctgcagggccccgcaccagttggagcagatgcctcccggagtctgcgtgtgtcagtgatgcctagccccgccttccccagcagaccaatggttccagcgtccaccctgcggcttgggagctcctcctcgggaggcagcccccgtagaaggtctgagcgaagcccgggcggcgcacgtgcagtggatacctccacccccctgggaggcggggtcgcgctcag

SEQ ID NO: 8587 - DNA, 417 bp, Homo sapiens
  source 1..417: mol_type = other DNA
cttaagaacagggtgccagcttggacaccctctgtccctgaggacagcagaagccagccttcatcttctgcagttacagtactgtgagcccactgtatgccattttggcaggcccatgcccattcaagacctgaaaaagcctggcattgatattagtacaactcataaaagccttgagggcttaacctgttactgtgagatctccactgatgcctagagggctagaggaatggaagatgcttataccaccttcttctcccatcctggccaggtggatgccctctgcatctgctgaaagacaaactgcatatgtacttcaattgctttgcacttttccgtttcagcggaagggttattttattgattattactggcaaaaacggccatgtgctcgccagcctgagatggtcccatctg

SEQ ID NO: 8588 - DNA, 324 bp, Homo sapiens
  source 1..324: mol_type = other DNA
gtgtctgaggccctgggatccctcagatggctaccgtgactctctagcacctagagtaacatcttacattctaagaactatgaaaatagttttcctgaaaaagcagcagcatgtgccctggtggacccttaaggtactacatggaccagcctgggcaacatgatgagaccctgtctctacagattaaaaaaaaaaatttttttttttttttaaattagcgcttggaggtcgaagctgcagtgatcacaccacggccttcagcctggatgaagcttgaagttactgtaaaaaagctacctttactagggcccctgccctggtagc

SEQ ID NO: 8589 - DNA, 455 bp, Homo sapiens
  source 1..455: mol_type = other DNA
atccaaaactctctgacatctgaaaatgtttttctgagattcattttgaggtaaattctaagatgaactcagtctacttctgatctttagtcatctcatttactaggaatattcatatatttcgcttaaaaatgttactgtttgagtccaagagtttcagaaaaagtgtggatatgaattaaaatactcccttactacgcagaatggaaaagagggcaacggaccgccccggtgcacgaagcgcagggcggtcgcaggagctggctgagcagcgaagcccaggccctcctgggaagaagtccgagcaggggcatcgcgcggcaggacgccggctttccgggacagggcgcacctcactagtcacgaaggctgaggtgggatcctcccaagttcccttagtagccagcttcggcacttccgggaggagccggaaataatggcgtgcgacccagcga

SEQ ID NO: 8590 - DNA, 374 bp, Homo sapiens
  source 1..374: mol_type = other DNA
gctccatgagggtaggctatattgtccaccatggtatatattcagtgctttgtatagtgctagagacatagcgctaaatacacatttattgaatgaaggagtagcagcagcaggctgatcactttgccatcccagaatgactcaggtagaggatcctcctcaatgacctggtttaggtagagactttctcagctccctacgagcacaacacctcctcctcgatctgtggagggaaagaaggcgctgagctatccatctgtcacagctcggcgctggccttctgctgcttgaggcctgagccgcctgctgtctcgacctgcggtggttgccccagcctcagcctatcgagtcgctgggtcgcacgccattatttc

SEQ ID NO: 8591 - DNA, 340 bp, Homo sapiens
  source 1..340: mol_type = other DNA
tcactttgccatcccagaatgactcaggtagaggatcctcctcaatgacctggtttaggtagagactttctcagctccctacgagcacaacacctcctcctcgatctgtggagggaaagaaggcgctgagctatccatctgtcacagctcggcgctggccttctgctgcttgaggcctgagccgcctgctgtctcgacctgcggtggttgccccagcctcagcctatcgagtcgctgggtcgcacgccattatttccggctcctcccggaagtgccgaagctggctactaagggaacttgggaggatcccacctcagccttcgtgactagtgaggtgcgc

SEQ ID NO: 8592 - DNA, 268 bp, Homo sapiens
  source 1..268: mol_type = other DNA
agagtgcagtggcgtgatctcggctcactgcaacctccggttcaagagattcgccaggcttgtaacaacagtgcttcactctagtcaccactgttttgcgaacctcagtttccttgtttgtaaaatagttgaactaaatcttgaccctttaatgcttgttttgaaatccaaggcaaaaaacaattgcagtctccttggagcagaggcggggccaacatgtttccctccagtccttagctcgtttagaacacaagactccaagcggagg

SEQ ID NO: 8593 - DNA, 676 bp, Homo sapiens
  source 1..676: mol_type = other DNA
aaacaaataaattattaatttcaaaacatttgcaaacaattcaaaaatcacaaaacaacagtatatatacacatatattttcaatggactaaaatacctttgattactatgttcttcatttgaagaaatagtgaaaaatgctaataatgttcatggcagcactgttcacaacagcacgaatacttgaatgaataaacaaaacgtggtgtatacatatgttggactattattcagccttaaaaaggaaagaagtcctgtcacatgttacaatatggatcttgaggaaccatccacggatgcttgaatgaataaacaaaacgtggtgtatacataatcttgtcacatgctacaacatggatgaaccttgagattgtcacttacacgaaatatctaaagtagtgaaattcataagagtttctgttttccaagatgaaaaatttgtaacaatgtgaatatacttaacattactgaaatgtacatttaatcatagttaatatggtaattttaaatattatgttgtgtgttttttaaccagagtaaaaaagggtaaaaaggtaatatattttagggcttaaaatagttatttttttccaagatgaaagctatgagtaaacttaaaccagaaaatcgactagttttaaatctacagaataaacagtattctctaggaaggaaa

SEQ ID NO: 8594 - DNA, 741 bp, Homo sapiens
  source 1..741: mol_type = other DNA
ctggtgtccaccttcaagaattactactcgttggtgctggacagcgccctggaccgtgaccgcacgggacgggggctcgccttcactgtgggccaccaccagcgtgtccatcgaggtggccgacgtgaacgacaacgcgccggcgttcgcacagcctgagcccgccgggctgccacatcttcacggtgtcagcgtgggatgcggacgcgcaggagaacgcgctggtgtcctactcgctggtggagcggcgggggagagcggcaaggtgtacgcgctgcagccgctggaccacgaggaagtggagctgctgcagttccaggcggatgcgggcgtgccgcctctgggcagcaacgtgacgctgcaggtgttcgtgctggacgagaacgacaacgcgccggcactgttggcgcctagggctggcaccgctgctggcgcagtgagtgagctggtgccgtggcgcgcagtggacgctgactcaggctacaacgcgtggctttgaggcagcgctcgcatcccgttccgcgtggcgacacgtgccctagacgaggctgactcccctcgacaccgcctactcgtgctggtgaaggaccacggcgaaccagcgttgacagccacggccaccgtgtccaggcacccaaggcctcgtcgcgggcgtgggtgggcgccgcgggctcagaggctacgctggtggatgtcaacgtgtacctgatcatcgccatctgcgcggtatccagcctgttg

SEQ ID NO: 8595 - DNA, 671 bp, Homo sapiens
  source 1..671: mol_type = other DNA
tcatcaaaaacgtaattactttatattgttaacattttagtatatacaggtaaattcaaatacataaagagtgtggaaaaattaaacctaatatattcttaattgatgtgatgtgagtgtaacaaatatacaaatcacattcccacaataggaaacaaatttctttacattctacaaatttaaaaaaccataaatgtacatattttaagaaattaacagttgctgtaataacataaaagtagatatatgtatgttttaatatatacagcacacacacacttttaaatacttcaacatctcaatgttttgatgatcataaatctgaaaggatctgatttttctatttgaatcagattgaaatcccatcgtaccaagagataatatcgttttacttaacctctatgtgtttataaaaagcgaataatattaaaacttatttcagaggattgtgataatttaacgggataattccattaagacaagctgtcacatgggaaatatttccaatagatgtccactgttaaaacaggaatcacaatattttagtgtatgtcatgaattagcacaattgatagtgaattagtataaaagttctaaggaaatatttagataaaatataaggaaattagaagatacgtttacatatttaatacttacacgtttagccacat

SEQ ID NO: 8596 - DNA, 687 bp, Homo sapiens
  source 1..687: mol_type = other DNA
tgtttataaaaagcgaataatattaaaacttatttcagaggattgtgataatttaacgggataattccattaagacaagctgtcacatgggaaatatttccaatagatgtccactgttaaaacaggaatcacaatattttagtgtatgtcatgaattagcacaattgatagtgaattagtataaaagttctaaggaaatatttagataaaatataaggaaattagaagatacgtttacatatttaatacttacacgtttagccacattcctctctaaaatttaacaccgaggagtttaagaaatgaagcgaattatttttaaactttggatcaatgtaaaggcaatctaatatttggaaaatacttgcaatgttgttctcctggcgagaagatcctggagcccagtctcttctgctcctcgcagcctcggaggtggggagcggccagctccactactccgtctctgaggaggccaagcatggcaccttcgtgggccgcatcgcgcaggacctggggctggagctggcggagctggtgccgcgcctgttccgggtggcgtccaaaagacacggggaccttctggaggtaaatctgcagaatggcattttgttgcgggcggagcgcggagtgcagcatccacctggaggtgatcgtggacaggccgctgcaggttttccattaaagaat

SEQ ID NO: 8597 - DNA, 526 bp, Homo sapiens
  source 1..526: mol_type = other DNA
ctgttcaattggtttgatcatatgaacatgcttgtttattaaaaaaagctatgtttggctaaaatatataagagtcaaaatgagtaccagcgtttctcatgggagcaaatgagttccaatgaataaaattatttggaatgcttttccatgcaagctatttgctataactcagccctgacatgactcaaggaagacatctaattaaatgctgatggtctttgatccttttataaaacatctgcaatcttggcaccagaagttcccagggtgttatcattaataaaaaaaaaccctggaattcttgggaacacaggaatcttctaatcaacagtttacagttacatgtttacaaagtgtatagttaggtctctgtaatacttaaaacctgtgttgaaaaaattatttctactgaagtaaaagttgcccctactcaatcaatcagtggtacaatgtgtaccacagtagtacaaaatgtattcctattctccgttaagtaaaggaggaagaagggaaaattccttctatt

SEQ ID NO: 8598 - DNA, 842 bp, Homo sapiens
  source 1..842: mol_type = other DNA
cccttcaagctggtgtccaccttcaagaattactactcattggtgctggacagcccgacgggggctcgccttcactgtgggccacggccagcgtgtccgtggaggtggccgacgtgaacgacaatgcgccggcattctcgcagtccgagtacacggtgttcgtgaaggagaacaacccgccgggctgccacatcttcacggtgtctgcgcgggacgcggacgcgcaggagaacgccctggtgtcctactcgctggtggaacggcgggtgggggagcgcgcgctgtcgagctacgtgtcggtacacgcggagagcggcaaggtgtacgcgctgcagccgctggaccacgaggagctagagctgctgcagttccaggtgacgcgcgatgcgggcgtgccgcctctgggcagcaacgtgacgctgcaggtgttcgtgctggacgagaacgacaacgcgccggcactgctgatgcctcgggtgggtggcatcggtggcgcaccgcggtcagtgggtgcgggtgcgcgcagtggatgcagactcaggctacaacgcgtggcttgagctgcagcctgggaccggcggtgcgcgcatcccgtttcgcgtggggctgtacacgggagagatcagcacgacccgtgccctggacgaggtggacgccccgcgccatcgcctactggtgctggtgaaggaccacggtgaaccctcattgaccgccacggccactgtgctggtgtcgctggtggagagtggccaggcacccaaggcctcgtcccaggcgtccgctggcgccacgggcccggaagctgcactggtggatgtcaacgtgtacttgatcgtcgccat

SEQ ID NO: 8599 - DNA, 475 bp, Homo sapiens
  source 1..475: mol_type = other DNA
agcatccacctggaggtgatcgtagacaggccgctgcaggttttccatgtggaccggactctcggtttccacaaccatttataaggtgagattactagaaaatgttcctaatggaacattggtgaattttattcattctcaaatgatatttcgccaaatgtgaaatccaagtttcacatagatccaattactggacaaattattgtaaagggatatattgactttgaagaaagcaaatcctatgaaacattgtagagttattgtggaagtagaagacaacaacgataatgtcccagatttggaattcaagtctttatcacttccaattagagaggacgctccactgggtacagtcatcgccctgatcagcgtatgggtgtcaatgggctggtcacctgctccttgacgtcccacgtccccttcaagctggtgtccaccttcaagaattactactcgttggtgctggacagtgccc

SEQ ID NO: 8600 - DNA, 685 bp, Homo sapiens
  source 1..685: mol_type = other DNA
aaccatttataaggtgagattactagaaaatgttcctaatggaacattggtgaattttattcattctcaaatgatatttcgccaaatgtgaaatccaagtttcacatagatccaattactggacaaattattgtaaagggatatattgactttgaagaaagcaaatcctatgaaacattgtagagttattgtggaagtagaagacaacaacgataatgtcccagatttggaattcaagtctttatcacttccaattagagaggacgctccactgggtacagtcatcgccctgatcagcgtatgggtgtcaatgggctggtcacctgctccttgacgtcccacgtccccttcaagctggtgtccaccttcaagaattactactcgttggtgctggacagtgcccgaccgcgcgagacgggggctcgccttcgctgtgggccacggccagtggcgttcgcgcagcccgagtacgcccgccgggctgccacatcttcactgtgtctgcgtgggacgcggacgcgcaggagaacgcgctggtgtcctactcgctggtagagcggcgggtaggggagcgcgcgccggcaaggtgtacgcgctgcagccgctggaccacgaggagctagagctgctgcagtttcaggtgagcgtgccacctctgggcagcaacgtgacgctgcaggtgttc

SEQ ID NO: 8601 - DNA, 649 bp, Homo sapiens
  source 1..649: mol_type = other DNA
cgtccccttcaagctggtgtccaccttcaagaattactactcgttggtgctggacagtgcccgaccgcgcgagacgggggctcgccttcgctgtgggccacggccagtggcgttcgcgcagcccgagtacgcccgccgggctgccacatcttcactgtgtctgcgtgggacgcggacgcgcaggagaacgcgctggtgtcctactcgctggtagagcggcgggtaggggagcgcgcgccggcaaggtgtacgcgctgcagccgctggaccacgaggagctagagctgctgcagtttcaggtgagcgtgccacctctgggcagcaacgtgacgctgcaggtgttcgtgacgaaaacgacaacgcgccagcactgctagcgcctcgggcgggtggcactggtggcgcagtgactcgggctacaacgcgtggctttcgtacgagctgcagccggggactggtggcgcgcgcatcccgttccgcgtggggctgtacccactggtactggtgaaggaccacggcgagcccgcgctgacggccacggccactgtgctggtgtcacttgtggagagtggacaggcgccaaaggcctcctcacgggcgttggtgggcgctggtggatgtcaacgtatacctgatcattgccatctgc

SEQ ID NO: 8602 - DNA, 747 bp, Homo sapiens
  source 1..747: mol_type = other DNA
taattaaactaatataaagatagcctggttaataaaatgatattcttttcaacatgattatatttactggaacctaaacattttgtgaaatagtatgtcatatagacaatattaggattttgacttgttatgtaagtacaaaggtatgtattttacaatttttaataattgctttatcagtaatagcaacttgaagaaatgctatctagatgcttctaatttgaaaatagtgcaaagacgatttaccaaagtcgttctattatgcttttgatttctagaaagctgaaatatccccattacagtttttgagtcaatacaaaaagtagataggtgttatagataaagaaataggttttcatcgatttgaaaattaatgccattaaaatagttttagttgtttttgaaaataacatcaacaaaatgtcactattaaacagtgaaattggaataaaaatttgttttatgagtaacatacagaaaaaactcaaaagttttaattagatatgtttaaatagagatgagaaaagtcaaaactttaactcttaaaagttatttttatcagtttggaaatatataaactcctccctatataaaatacacacaaatttctctagtctgtaatattttaatgacgcacttatattgacgcattttaagatagagtttaatgatatattttgactagagataagtgatttaaagaataagaatcatgtcattgaaagtgagaatacttgagaaatattg

SEQ ID NO: 8603 - DNA, 695 bp, Homo sapiens
  source 1..695: mol_type = other DNA
aatttttaataattgctttatcagtaatagcaacttgaagaaatgctatctagatgcttctaatttgaaaatagtgcaaagacgatttaccaaagtcgttctattatgcttttgatttctagaaagctgaaatatccccattacagtttttgagtcaatacaaaaagtagataggtgttatagataaagaaataggttttcatcgatttgaaaattaatgccattaaaatagttttagttgtttttgaaaataacatcaacaaaatgtcactattaaacagtgaaattggaataaaaatttgttttatgagtaacatacagaaaaaactcaaaagttttaattagatatgtttaaatagagatgagaaaagtcaaaactttaactcttaaaagttatttttatcagtttggaaatatataaactcctccctatataaaatacacacaaatttctctagtctgtaatattttaatgacgcacttatattgacgcattttaagatagagtttaatgatatattttgactagagataagtgatttaaagaataagaatcatgtcattgaaagtgagaatacttgagaaatattgattttccttagacagaaaggaaaagaaccttccatttttggctgtgccaataatataaaaaatatatagttaattgggaattgaatttacaaaatacattgtgt

SEQ ID NO: 8604 - DNA, 615 bp, Homo sapiens
  source 1..615: mol_type = other DNA
aatatcaacaaaatgtcactattaaacagtgaaattggaataaaaatttgttttatgagtaacatacagaaaaaactcaaaagttttaattagatatgtttaaatagagatgagaaaagtcaaaactttaactcttaaaagttatttttatcagtttggaaatatataaactcctccctatataaaatacacacaaatttctctagtctgtaatattttaatgacgcacttatattgacgcattttaagatagagtttaatgatatattttgactagagataagtgatttaaagaataagaatcatgtcattgaaagtgagaatacttgagaaatattgattttccttagacagaaaggaaaagaaccttccatttttggctgtgccaataatataaaaaatatatagttaattgggaattgaatttacaaaatacattgtgttgggatcccgcttctccttgcctactggaaggcagggagcggccagctccgccttcgttggccgcatcgcgcaggacctagggctggagctggcggagctggtgccgcgcctgttccgggtggcgtccaagggccgcggggaccttctggaggtaaatctgcagaatggcat

SEQ ID NO: 8605 - DNA, 583 bp, Homo sapiens
  source 1..583: mol_type = other DNA
ccttcgttggccgcatcgcgcaggacctagggctggagctggcggagctggtgccgcgcctgttccgggtggcgtccaagggccgcggggaccttctggaggtaaatctgcagaatggcatgtgcagcatccacctggaggtgatcgtggacaggccgctgcaggttttccatgtggcaagaacaaagattattcattttagagtcaagaatgcattattggagcaaatgcacaattgagatacaggttaaatccaaacgaatattttgacttagatgttaaaacaaatgaagctggttttgaggaaatccaactaacaggtacagttcagttgttgatccagaatttgataaatccatttataatgtcagattgttggaaaatgcaccaagtgggacattattcctcaggcatcaataaggaaatagtgtatttctttagtaatcttgttcttgacgatgtaaagtccaaatttataattaattctaatactggtgaaataaaagttaactataactcatatgaaattaatattgatgccatggataaaagtacattcccattatcaggacactgtaaagta

SEQ ID NO: 8606 - DNA, 652 bp, Homo sapiens
  source 1..652: mol_type = other DNA
catgggaaatgctcatgtcattaaaaatatgaatttaaaaatttgaatttggggattattaataattgctcatgccttgctatttaacaaactattttctaggagtcagcatgagatatggatttgtaaatacctcaataaaagtcttattcaaaacttggaagtaattccactagaatttgaagaaaatattttaaatcctaatataagctgcagataaattaaatgtgataaagaatatgctctagaattttatcttccatcattacacagaagaaccttaagagcatctgatatttattgaacaaacatggacttcaataatctataaggctttaaaaattcaaccaaaatttgataattttaagttacattttttccctagagcactatataatagcatgtcctaggaaagacagatgtgttcttttctaccaagagtgtagaatagtttacatttctgatttaaaaagcagttccgttaacacttaaatttgctgaactggttgatattaatgttgcaaatattggtagaaaagttgtttagctgtgaataattagatcccttactttaaattaataaaagaagaaagtagagaaaagaagatactgttttaaaaatatatggtatctaccatgaagttatagctag

SEQ ID NO: 8607 - DNA, 562 bp, Homo sapiens
  source 1..562: mol_type = other DNA
ttagatcccttactttaaattaataaaagaagaaagtagagaaaagaagatactgttttaaaaatatatggtatctaccatgaagttatagctagccaacacatcattccctgactgttgaagattaataaattccggaacatacagtattttatctttatgcggaagatcttctaatggaaataaaagcttctgctcctcgcagcctggaaggtggggagcggccagctccactactccgtacccgaggaggccaaacacggcaccttcgtgggccggatcgcgcaggacctggggctggagctggcggagctggtgccgcgcctgttcaggatggcctccaaagaccgcgaggaccttctggaggtaaatctgcagaatggcatttgctgtgcgggcggagcgcggagtgcagcatccacctggaggtgatcgtggacaggccgctgcaggttttccatgtggacgtggcgacaacccgcccttgttcccggtagaggaacaaagagtggcagatgttggctcaaattccatcttaacctataaactcagttctagcgaa

SEQ ID NO: 8608 - DNA, 623 bp, Homo sapiens
  source 1..623: mol_type = other DNA
cataattattccattgggaacattggagtgaaactcacttgatcaaagtgctgtatgtgagctgagcactgaaatttatctaataaaataaacttacattttaaaagaaataatacaaatcatatttgagattgtaaaaataggcatatattcataacaaactcctgaaacagtatatatagattctgctaaagcaaaaaattcaaaagaaaacacacacacattctaagtttctctttcatcaatcagtagattcttgagatcctgggtccctaaaagagtacaggatttttcttaacaagcgatactgaatcaagaatatgaagtttcctgggatctagatcaaaggaatttaaacttgcagttgtttaaattcatgttgtcacttaggtttctatctttatttaaaactgtgtgaaaaaaaagtttttctaaggcatgtattcaaaagtcgcctaagaatgcttctaacaatcatgagaaatgctattttaacctttaacaacaatgaagaaaaaaattcagagtttgaaataaaacttttcatctgattaatagtttgtaatggtttgtaattcttacttcgtaatcagcaaaaggaagtcattccttttcgcactgga

SEQ ID NO: 8609 - DNA, 477 bp, Homo sapiens
  source 1..477: mol_type = other DNA
atggaccttaagtggtaaatgacaagtccaccttcaagaattactattcattggtgctggacagcgctctggaccgttctctgtgggccactgctagcgtgtccgtggaggtggccgacgtgaacgacaacgccccggcgttcgcgcagcccgagtacaacccgccgggctgccacatcttcactgtgtcggcgggggacgcggacgcgcagaagaacgcgctggtgtcctactcgctggtggagctgcgggtgggcgagcgcgcgctgtcgagctacggcacgcggagagcggcaaggtgtacgcgctgcagccgttggaccacgaggagctggagctgttgcagttccaggtgagcgcgcgcgatgcgggcgtgccgcctctgggcagcaacgtgacgctgcaggtgttcgtgctggacgagaacgacaacgcgccggcactgctggcgcctcgggtgggtggcactggtggcgc

SEQ ID NO: 8610 - DNA, 694 bp, Homo sapiens
  source 1..694: mol_type = other DNA
tggtgtccaccttcaagaattactactcgttggtgctggacagtgcccgacgggggctcgccttcgctgtgggccaccgccagcttgtctgtggaggtggccggcagcccgagtagaacaacccgccgggctgccacatcttcacggtgtctgcgcgagacgcggacgcgcaggagaacgcgctggtgtcctactcgctggtggagcggcggggcgccgcggagagcggcaaggtgtacgcgctgcagccgctggaccacgaggagctagagctgctgcagtttcaggtgagcgcgcgcgacgcgggcgtgccgcctctgggcagcaacgtgacgctgcaggtgttcgtctggacgagaacgacaacgcgccggcgctgctggcgcctcgggtgggtcgcggtcactgcgcgcagttgacgccgactcaggctacaacgcgtggctttcgtatgagctgcagcccccggcaagcagcgctcgcttcccgtttcgcgtggggctgtacacgggctccgcgccaccggctgctggtgctggtgaaagaccacggtgagccggcgctgacagcgacggccacggttctggtgtcgctggtggagagtggcccgtcatcacgggcgtcggtgggcgccgcgggcccagaggcggcgctggtggatgtcaacgtgtacctgatcatcgccatctgcgcg

SEQ ID NO: 8611 - DNA, 498 bp, Homo sapiens
  source 1..498: mol_type = other DNA
agaatcactatgctataaaaattgtgattttttaatgattattcttttaaccgactcatttttggtaaatagagatatagagaaatagtgtaaagaatatgcacatacatttttattactttagtaaataaaacggttcaggcaatttgacatttattgaataaagaaaagcaaaaagttagaattatatgctcacctcagagtaatatataccagtgtttctggtgaccaaataaatattaatgcatttcttccaccatttctgatatccatgacatacaggtcatacttaaatttattattaattgatacgatatttgaaatattgggaagaaattcctttccttatgaagaagaaatacagtatgaatgcctctgcaattgataaagttaaggatttactattaaattatgataaagaaatagaaggaagtaattcatgtaatcattaccttttgaagccatgatgtcgctgtctaccaagaagttctggttggt

SEQ ID NO: 8612 - DNA, 510 bp, Homo sapiens
  source 1..510: mol_type = other DNA
tggtaaatagagatatagagaaatagtgtaaagaatatgcacatacatttttattactttagtaaataaaacggttcaggcaatttgacatttattgaataaagaaaagcaaaaagttagaattatatgctcacctcagagtaatatataccagtgtttctggtgaccaaataaatattaatgcatttcttccaccatttctgatatccatgacatacaggtcatacttaaatttattattaattgatacgatatttgaaatattgggaagaaattcctttccttatgaagaagaaatacagtatgaatgcctctgcaattgataaagttaaggatttactattaaattatgataaagaaatagaaggaagtaattcatgtaatcattaccttttgaagccatgatgtcgctgtctaccaagaagttctggttggtcgattaaaagactctgaaagtacagtcgttcatctttatattaagataatattttctgataggaaacgactatt

SEQ ID NO: 8613 - DNA, 509 bp, Homo sapiens
  source 1..509: mol_type = other DNA
cttgagatacactaaaatctagatttaattaatcgacttggacgttgtttgtaatgaaattaaaacatattgtaataacattacacaaactagattattcatagattataaagcttgattgtataaatgctacaaaagagaaaaatatattttctccccacgcaacacaagaccttaaagtcaattctcgtttcttgcaatattttataccttttcaattcatagaattactcaagaaaactacctcagttgaatcctatttagccatatgggagattctgaattccagaacaaaagaattttgtaatttaaaattcgtgattgctcaatggaatcattttaattgttacttcatttctgtcgttatttaaaacttaagtggagaatcttctgtttcaacaatcattacttaagaaaaaattaagaaaatgaaataagttttgcagaataactgtgaaatttttattcatgaaatatgtactgacaaatacagcccttttcccatggga

SEQ ID NO: 8614 - DNA, 608 bp, Homo sapiens
  source 1..608: mol_type = other DNA
cagaaataataaatttcttaattactttattcagaattataattaagattctttttgccgtgtaagatattataaaatgaaacttcttgtataaaggatttttctgtaatagtacttttctgttttcttaaatacagaaaccaccattatctataggtaataattttgcctgatgagccaaatttggtattgagcctcatgaaaacaaatgtggccaaattacttactatattataattccgtattactattaggccaaagttataaaattggccaagtcatgtggctagtgattgaagctaatgatctctaaattctagtgatgactagatcttcggagttataaacacctttagtgtctaaataaaccttattaaatctcaaaataatgagaaagagaagtaagttaagtgtcagaacttaaatggaactaaagttgtcatttaataaaatattagtatactcagtagtatgcaaatattaagggcattttgaaattcggctatcgtgggatcaacatttattgttattaactataaagagacgtaatgctttgaaagtccatagacatactgtcgtccacaaaatagctttttagaacaaaggca

SEQ ID NO: 8615 - DNA, 678 bp, Homo sapiens
  source 1..678: mol_type = other DNA
tgattcaggagccaacaggtcaccgtccacctacaagaattactactcattggtgctggacagcgctctggaccggtgaccgcgcgggacgggggctcgcctccgctgtgggccacggccagcgtgtctgtggaggtggccgacgtgaacgacaacgcgcctgcgttcgcgcagtccgagtacacggtgttcgtgaaggagaacaacccgccaggctgccacatcttcacggtgtctgcgtgggacgcggacgcgcaggagaacgccctggtgtcctactcgcgagcgctcgctgtcgagctacgtgtcggtgcacgcggagagcggcaaggtgtacgcgctgcagccgctggaccacgaggagctggagctgctacagttccaggtgagcgcgcgccgtgccgccgcagcgacgctgcaggtgttcgtgctggacgagaacgacaacgctcccgcgctgctggcgtctcccgctggcagcgcgggcggtgcagtcagtgagcccaacggcacgcgcgctctggatgagactgactcgccacgccagcgcctactggtgctggtgaaggaccatggcgagccgtcgctgacggccacggccactgtgcttgttggagggcagccaggcacccaaggcctcgtcgcgggcttcagtgggcgtggcgcccgaggtggccc

SEQ ID NO: 8616 - DNA, 723 bp, Homo sapiens
  source 1..723: mol_type = other DNA
ttcaacaagaaacaaactattttcatgaatataactgaattagattaaggaaaccaatgttggtgacttggaaataccatcagggtgattttatttattttataaaatgataataaaatttattttatagttgaaaagcctatttctgtcatatcattgattctgttacataaagtgctaaattttgatatctcatattatgctactatggcttacattagaaataatatatgtcaaataaaaactcatctagatcaatagacttttcctttgtggattcttttttaaaactaccaagtttgagaatatgaatatatttgtttttcatattgttctgcaatgaatataaagtcacttataatcagaaagcaattaaatgtaaatataaacactaaagagctgcttttataaaacttcaattttttctttgagttccctagcagccaaagtaactgaaagtaaaacaattcaaatttgatagtatttttatatgaggaacaacactttcaggaaatgtttaaccctagtttttgtataagtattttagataagtaaaagaacaatgttataatgttaagtcaaacatagacacaataatttaaatttgatgttaatcgagaaatacaatgccatttccatatatatttagtttcaatatgacttataatctgaatattccataaataagcacgttggaaatatttgggcagtgcacagtactca

SEQ ID NO: 8617 - DNA, 680 bp, Homo sapiens
  source 1..680: mol_type = other DNA
ctcaggtgtcaacggacaggtgacctgctcaagctggtgtccaccttcaagaattactactcgttggtgctggacagcgccctggacctctctgtgggccacggccagggtatccgtggaggtggccgacgtgatcttcacagtgtcggcgcgggacgcggacgcgcaggagaacgcgctggtgtcctactcgctggtggagcggcggttgggcgaccgcgcgctgtcgagctacgtgtcggtgcacgcggagagcggcaaggtgtacgcgctgcagccgttggaccacgaggagctggagctgctacagttccaggtgagcgcgcgcgatgcgggcgtgccgcctctgagcagcaacgtgacgctgcacgtcgcgccggcactgctggcgactcaggctggcagcgcgggaggcgcagtgcgcgcagtggatgcggactcaggctacaacgcgtggctttcatgaattgcagccggcggcgggcggctcgcgcatcccgttccgcgtggggctgtacacgcctggacgaggcagactcgccgcgccaccgacttctaggatcacggtgagccggcgctgacggccacggccaccgtgctggtgtcgttggtggagagcggacaggcgccaaaggcctcttcccggactttggcgggcgccgcgagcccagaggctgcgc

SEQ ID NO: 8618 - DNA, 603 bp, Homo sapiens
  source 1..603: mol_type = other DNA
tttctcttaaagctgatcttgaattaatgaataaactcatgaaaggtcttttgatctgattttctgaagagaagcgcaaaaggttgatatcaagttcacattctcttgactttagtcaatgagattaggctccaaaaccctttaagagatctttaatttggaggcttcaactaaacattttacattaaagtgctttacttttgctagagtaaaactttccagaatctattcctgagatttgttttaacatgttatggaaatgagagcagttatgtgaaaagttatcacatatatttatgatgaattctaactttcatcagatttatgaataagacaatttatataaatgaaatattgtttggtattagacatattttagtttcttatcttgttaaatacaaattcctaactttctctaaaatcttacgattatattattctgtatatcattttccatgataaagtgttatttgaaagatttctactttgaagcagaaaacatttttaagctacagcgtaataaaattgttgatgttttgttactaatatcatgtatattaactaaacccgcatttataaatgatccgatgatgtgaaacagga

SEQ ID NO: 8619 - DNA, 675 bp, Homo sapiens
  source 1..675: mol_type = other DNA
aatgattttgccaaatgtatgttttcaataaatccagacacaggtgaaattagaatttatggtgaactggattttgaagagaataatgcctatgaaattcaggttagccattgataaagggattccttccaccctgaagtaacttcactgtcgctccctgtgcaagaggatgctcaggtgggtaccgtcatctggagccaatggacaggtcatctgctcggtgtccacctacaagaattactactcgttggtgctggacagcgccctggaccgcgccttcgctgtgggccacggctagagtgtccgtggaggtggccgacgtgaacgacaatgcgcctgcgttcgcgcagcccgagtacacagtgttcgtgaaacaacccgccgggctgccacatcttcacggtgtcggcatgggacgcggacgcgcagaagaacgcgctggtgtcctactcgctggtggagcggcgggtgggcgagcacgcactgtcgagctacgtgtcggtgcacgcggagagcggcaaggtgtacgcgctgcagccgctagaccacgaggagctggagctgctgcagttccaggtgagcgcgcgcgacgccggcgtgccgcctctgggcagcaacgtgacgctgcaggtgttcgtgctggacgagaaaacgcgccggcactgctggcgactc

SEQ ID NO: 8620 - DNA, 767 bp, Homo sapiens
  source 1..767: mol_type = other DNA
ggtgtccacctacaagaattactactcgttggtgctggacagcgccctggaccgcgccttcgctgtgggccacggctagagtgtccgtggaggtggccgacgtgaacgacaatgcgcctgcgttcgcgcagcccgagtacacagtgttcgtgaaacaacccgccgggctgccacatcttcacggtgtcggcatgggacgcggacgcgcagaagaacgcgctggtgtcctactcgctggtggagcggcgggtgggcgagcacgcactgtcgagctacgtgtcggtgcacgcggagagcggcaaggtgtacgcgctgcagccgctagaccacgaggagctggagctgctgcagttccaggtgagcgcgcgcgacgccggcgtgccgcctctgggcagcaacgtgacgctgcaggtgttcgtgctggacgagaaaacgcgccggcactgctggcgactccggctggcagcgcaggaggcgcagttacgcctccggccgagttgcaaccggcggcggtcggcgcgcacatcccgttccacgtggggctgtaccgagatcagcacgacacgcatcctggatgaggcggacgctccgcgccaccgcctgctggtgctggtgaaggaccacggtgagcccgcgctgacgtccacggccacggtgctggtgggccaggccccaaagacgtcgtcgcgggcctcagtgggcgctgtggatcccgaagcggctctggtggatattaacgtgtacctcatcatcgccatctgtgcggt

SEQ ID NO: 8621 - DNA, 548 bp, Homo sapiens
  source 1..548: mol_type = other DNA
taacaatagataaaagtaagatcctctcttttccttgctaaagatatgttaacatctttgtctagcgaaaattaaagtcaatttaaatgacggcaaaactttaacctcctggttaaattctatttaaatgaattgcagccggcggcggtaagttaaattctattaaatcaataggatattagttccaggcatattttataaaaacagaatccaaaaccttacattgttgtggctaaattattgtgtttatgcacatacacacactcacatacaattgactgaacactttcttttgaatataaatatcttatctacatctcaagtcacattgagggaaatttattaatatgatgtgcttattcaaaatctgatatatcagttaccaatatttttgtcttaaagttctgcatggaattcttacacatggaaaaataaatttgtggcaaaatgaaactcatcagggaaggtaaacatttaatcttcaattacatatttgcagtgaaaatgtcagtgaagactgagtcatacttacagagaacgtttccgcg

SEQ ID NO: 8622 - DNA, 501 bp, Homo sapiens
  source 1..501: mol_type = other DNA
gtgggccgcatcgctcaggacctggggctggagctggcggagctggtgccgcgcctgttccgggtggcgtccaaaagacacggggaccttctggaggtaaatctgcagaatggcatttgtgcagcatccacctggaggtgatcgtggacaggcctctgcaggttttccatgtggagggaaactcgatttccactagatggcgcatccgatgcagatattggagtaaactcggcattgacctaccgactggatccctgagcaaatgtcttcattatcacttgtactgaggaaattactgacagccagtgatggaggtaaacccgagctgactggcacagttcagctgctcatcacgattctggattttaccaatccgtttataaagtgacggtgttagttcaatgatatatgcatttaccataaatccgaacaatggaaggaaatattccaatggcgggtcattgtaccatgataacgccccagaggttaccatcacttctt

SEQ ID NO: 8623 - DNA, 407 bp, Homo sapiens
  source 1..407: mol_type = other DNA
aatagtcaatgagtttctcaacatggcgcatgtatacatatgtaacaaacctgcacgttgtgcacatgtaccctagaacttaaagtataataataataataataataataataataataataaagcgagggtgggtacatggtgttttctaaatatttacagaaagaaaatttacagagtagtttcctggtcaaactggctccgctgcctcgaaaagccagagtccggaggcagtttgatgcggagcagctcctgggatacaagagggtgcaggacagacttcaacccgcagcaggatccagcgcggaaagctctgcagcaggatccagcgcggaaagccccccgcagcacttctttcggggggggcagctccacgctgagtcccgccctctccgccggagaggtgc

SEQ ID NO: 8624 - DNA, 664 bp, Homo sapiens
  source 1..664: mol_type = other DNA
actcctgggatacaagagggtgcaggacagacttcaacccgcagcaggatccagcgcggaaagctctgcagcaggatccagcgcggaaagccccccgcagcacttctttcggggggggcagctccacgctgagtcccgccctctccgccggagaggtgcgccggggtcagagcgccgggacccgacgcgcggctcccaaagggcgccagctgggctcagctcggggcgtctcccaggctccgccctgcgcccgcagccagcgtggtggtcgagaccccagcccgctgctactggagacagcacctctcgcgcccgggcgggcggcctcgtctctgcacccctaggcggcgctgcgctccacccggccggctccgctttcccagacggctgcccagcctccagcctagcaagcccggctcccagctggccagccccggcaatgccggcgttcgggaggcgcaacgtcggcggtcgctgagtatccagcccgcagcagtgacggccggcaggagcgtgctcttccccgcggctcgtgctctccaggagtccggagcatggtcctttcctgcggcgctgcagcgggacagctcgagtactcagtgccggaggagacgtagccgtaggcaatctctccgcggacttgaggctgccagcggccgctatg

SEQ ID NO: 8625 - DNA, 475 bp, Homo sapiens
  source 1..475: mol_type = other DNA
tccagcccgcagcagtgacggccggcaggagcgtgctcttccccgcggctcgtgctctccaggagtccggagcatggtcctttcctgcggcgctgcagcgggacagctcgagtactcagtgccggaggagacgtagccgtaggcaatctctccgcggacttgaggctgccagcggccgctatgtcctcgcggaacgagctctacttcggggtggatctacccagcggcaatttggtggtcagagagccggcggaccgcgaacagctgtgcagggccaaacctggtgctcgaggacccgctggagctgcacaagattcggattcacgtcctggacaccaggcgacgtgcagctgcacatccccgagttcctgacatcgcgaacagcgcgccacccacctgctggtgcttacagctcgggacggcgggctacctgcccgctcacatcattgtggtggacacaacacaccccttggat

SEQ ID NO: 8626 - DNA, 495 bp, Homo sapiens
  source 1..495: mol_type = other DNA
caatagatttcaaattcctgtggagcatggaaagatttcctcaaggagtcttatatttaaggaagataagctgcagtcattgaaattgctggttattgtaagataaatcccagttaactgcaaagcattaatggaatccaaattccagcctggcttaggagatcaacagtaacgctcttgatttaatggttttgcagactcttgaagacattgtcatccattaaagaaaaaattttaaattactcttgaaagaaaatgtcttgggtgagaaaaagcttgagagaagaatctctttaaaaattttaccagattttccccattgtcgccaaaatgggtcaaataatagatttgcctacagcttcatggagactatttttttaaacagagcattttaaacatttaaatattggttatttgccaaggcacacatcttggatcccaggatgctggttggaaagagggcagcatttgatacttagctaaggcccctcagtt

SEQ ID NO: 8627 - DNA, 426 bp, Homo sapiens
  source 1..426: mol_type = other DNA
tcttggatcccaggatgctggttggaaagagggcagcatttgatacttagctaaggcccctcagttgactaatctccttaaagaccctgttcctgcggtccgctgggatccggcaggtccagtccgggttcgctgtccgccacttcggcgcggaatcagagcaggacttgctgagctccctccccctggagctgtagcggcagcagcagcaggaagccgagccgggttgagcgactcggaggagcccttgggagggcctacggagggagcggccccaggcgctttctagagccacgagcggaggcggggcccgggcgtggggcacggctggggaagctgccgcctccggccctgcccggctgcctccgccgcggccagtggctatggagcaggcgggcaccagacctgcggcgacagagcatccac

SEQ ID NO: 8628 - DNA, 410 bp, Homo sapiens
  source 1..410: mol_type = other DNA
aatattcctgaggttgtcttatatcattacagggtcagaatgcatgcaaggaagccatctgtttatggttcttgtgagaagcaccatgcccctcagtaattgtatgttcctgggaccattattctctataaaatggggagaataatcagggtttagtaaatagtagctatttttaaatgattttctacagcttcaaaatttagacccaggttgttctgagtattctctgtgggaagaatctgctatagagaagatttttttaaagtgactctgtggaaaatggacagtttatgtgccccatggaaagactccatggagactccatcccagaaagaaagcatgattcttaagttttttagaatctctgccgttgtcatagcaatgacagtcctgggatatccttattagga

SEQ ID NO: 8629 - DNA, 368 bp, Homo sapiens
  source 1..368: mol_type = other DNA
ccctaaagtccagaagcagatctgatgtgtttcctatacatcactttattaaaaattcttttgcacacaatgtttatgaaaaggccagatccttttccaatacttatgcaaaagcaaaagaaaaccccgacacctcacctttcgctgtttgttgtttcatagatttatttaaaaaaagagaaagtctatagctataaatctttaaagagaaatatgaatacaattcccctaaactctcctcaaaagagacatttaaatgatcattgctgctacagaagtgctttaagagaattgcctgaaacatctgtatttgataaaattgaagaaaaatattgttttctcatacagtgagcagatttttcaatcta

SEQ ID NO: 8630 - DNA, 447 bp, Homo sapiens
  source 1..447: mol_type = other DNA
ccctaaagtccagaagcagatctgatgtgtttcctatacatcactttattaaaaattcttttgcacacaatgtttatgaaaaggccagatccttttccaatacttatgcaaaagcaaaagaaaaccccgacacctcacctttcgctgtttgttgtttcatagatttatttaaaaaaagagaaagtctatagctataaatctttaaagagaaatatgaatacaattcccctaaactctcctcaaaagagacatttaaatgatcattgctgctacagaagtgctttaagagaattgcctgaaacatctgtatttgataaaattgaagaaaaatattgttttctcatacagtgagcagatttttcaatctaatatacttatatgtgaaactattacctagagtgaactttaagctttattgttgaatgtaattccattatatttcctttt

SEQ ID NO: 8631 - DNA, 541 bp, Homo sapiens
  source 1..541: mol_type = other DNA
tggtcacagaataaaatattttaaatcagtgcttctcaaactcattgtaaaatatagattacatctatcttgctaaataagctcagcttaaagcctttatcttcacaaaattctgtgactgttactcacttttgtcttgacattatcctcataatagtcacatctaagaatctgtgattctaatactatttgccttactcctaggttcaatgtaggttcacactataaattacttgatacaaaacaagatacctgtctattcacctgtattactatttgcacattaaagtaggaaaatagaaccttatagagaacatcttaaattcttagaaaagaacatttataactactaagaattgaattgaaagtgtataaaaattactgtaattaaataaccttttaaattatgcagtttaatgtaacaaagtttgtaaaaattctatgctcttaaaaatggcttttattttaaaacttcccaaatacgttgtcttgaagttgttaatttctcaatcaagacgcgctcgcgcgtattcttctgtgt

SEQ ID NO: 8632 - DNA, 450 bp, Homo sapiens
  source 1..450: mol_type = other DNA
taatttgaattatacagtatcatcagactggattctttcactgagaaatatgcatttaagtttccttcttgataacttctttatattaacattaaaaaagaaacaaaaagcatttttgaatatttactggctatttaatattatgaaattgataatattgatacatttacaatcttggagagtttcatgaggctcagacacatcaaagtggagactatttcagtgcccattaaaatactcttatttggatggtaatctaaccaccatagaactttcttagtctaagcctgctaggactgagatcactcccttccaggttctgaaatttattttttccagtttgaaaaaaaaaaaaagcttggatttgtgagggaagtgaagatttatttattctttcgattgccatcagcctgaaagaaagcactgggattttcttaaagtttaggagaa

SEQ ID NO: 8633 - DNA, 409 bp, Homo sapiens
  source 1..409: mol_type = other DNA
tttacatttacatctaaatcaagcccctacagggaattatatttaaaaatacagcttaggtggggtagtggaaaccaatattgtgccactgcactctagcctgggtgacagcctgttatatagtaagctgcatgttcctcactccattgttgggtactttgaaatccattgtatagtagctacacattcttgtattggcaccagataggctagactctagggaacatcttggaacttccaagctctaaatagtttgaaaccaacgaaacactgtcatttccatcccggaaaaacaagttctcgcgaaaagatgagtttcacgctgggcagcgtaattgcgctattgcgcctgcgctagctggggctccgcccttccgcccggaggggctgtcactcacagccgcctccc

SEQ ID NO: 8634 - DNA, 671 bp, Homo sapiens
  source 1..671: mol_type = other DNA
ttaattagtaaccctttgctaatagtgcagtgattaaaaattctcttggagaaaatattaagtgcgattatagaggaatacatattataagagcctatctaaaaataaagatgagaccatttttcttttcagctgtgaagaataatatcatagactttgtctctgaaatttgaaatctaaattatatattcatgtgacttttcaatgaaattccaagagcccagttttatttttttcaaaatatattgcctttggtgaatcttaagaattttttaaaaacccacataatgtaaaccatgctcttcaaaatcccaaggtttctgataaatattcaaatcataatgggagatttttttaaagtctagcttatattctaaaagattatttttcctcaaaggggagctgctctatgtggcctgggaaattaagtggtcaaactttactacagaaaaagtggagagtttactataattccctgaatagcaaacttggaaagcagataacatgggaatacttggattctcctgtatatttcaatttggtgacatttaggcacatttaaagaagtgaacatatagtttctctttttcatacatatattgtagaattatttccttgacaatagactaaaacttaagaaaataacaagttaatgagaaggttttcagtat

SEQ ID NO: 8635 - DNA, 570 bp, Homo sapiens
  source 1..570: mol_type = other DNA
tcaatgaaattccaagagcccagttttatttttttcaaaatatattgcctttggtgaatcttaagaattttttaaaaacccacataatgtaaaccatgctcttcaaaatcccaaggtttctgataaatattcaaatcataatgggagatttttttaaagtctagcttatattctaaaagattatttttcctcaaaggggagctgctctatgtggcctgggaaattaagtggtcaaactttactacagaaaaagtggagagtttactataattccctgaatagcaaacttggaaagcagataacatgggaatacttggattctcctgtatatttcaatttggtgacatttaggcacatttaaagaagtgaacatatagtttctctttttcatacatatattgtagaattatttccttgacaatagactaaaacttaagaaaataacaagttaatgagaaggttttcagtatacttctggatgactctccagtcagaattctcctgaaaattgggttaatttcagctcagaaaacgaaaaagctgactggctgcagcaggctgatgcttctg

SEQ ID NO: 8636 - DNA, 435 bp, Homo sapiens
  source 1..435: mol_type = other DNA
cactgcattgtattttacaagcatttgttcagaggttctagaacacttcttcagctgattcagcttcaatcaatacaattaagtgtctgatgattcaataatttaaaggcagattttgaaggtaaatgcaaagccatcaaccataaacgttcaaaatatataaccttagaagaaaacgtagctaacgtttcttaattgatcttactgcttctgattatacaataagaggtggcattgattaatgccttgagcagtcaataatactttcctagcaactattatcaagatcatgttcatttataccattcttattaatcctgataaaaagattcctgttttgaaagatctaattctagggtatcttagagctgtaagattctttaaagcgccttgaaagtcaacaagaagtaacttaggttttcctgagattattta

SEQ ID NO: 8637 - DNA, 446 bp, Homo sapiens
  source 1..446: mol_type = other DNA
agcatttgttcagaggttctagaacacttcttcagctgattcagcttcaatcaatacaattaagtgtctgatgattcaataatttaaaggcagattttgaaggtaaatgcaaagccatcaaccataaacgttcaaaatatataaccttagaagaaaacgtagctaacgtttcttaattgatcttactgcttctgattatacaataagaggtggcattgattaatgccttgagcagtcaataatactttcctagcaactattatcaagatcatgttcatttataccattcttattaatcctgataaaaagattcctgttttgaaagatctaattctagggtatcttagagctgtaagattctttaaagcgccttgaaagtcaacaagaagtaacttaggttttcctgagattatttatttggccctaaagcctgaggaataaagatt

SEQ ID NO: 8638 - DNA, 412 bp, Homo sapiens
  source 1..412: mol_type = other DNA
tccccaaacatattgtctgatgcctaattatgtgtttgtttaatgaatattaaataacaacaaatatcgaaacaaacttaaagaaatataatgtataaatatggctgatttctgtgtgtttgtctcagctcttagagagttaagagtatttatcaaataaccctgataaatgtagtaagtataagataaagtgtgtttcttaaactgaacaattcaaaaaagttaactccactatgtttgaagcaatattggtggcattaaggttagttaacttgaggtgacactgtttaacatatatcgattcaattatgttcaatcaacactcttatctctgacaagaaggatttcagatcttggataattcaaaaataataatgtgaactagtccaccatttccttgctcctaaaatgc

SEQ ID NO: 8639 - DNA, 450 bp, Homo sapiens
  source 1..450: mol_type = other DNA
aatacaattaagtgtctgatgattcaataatttaaaggcagattttgaaggtaaatgcaaagccatcaaccataaacgttcaaaatatataaccttagaagaaaacgtagctaacgtttcttaattgatcttactgcttctgattatacaataagaggtggcattgattaatgccttgagcagtcaataatactttcctagcaactattatcaagatcatgttcatttataccattcttattaatcctgataaaaagattcctgttttgaaagatctaattctagggtatcttagagctgtaagattctttaaagcgccttgaaagtcaacaagaagtaacttaggttttcctgagattatttatttggccctaaagcctgaggaataaagattccacactgcagaaagctggtcctgctgtgcttccttttggcgaccctgtgggaggc

SEQ ID NO: 8640 - DNA, 400 bp, Homo sapiens
  source 1..400: mol_type = other DNA
actagtccaccatttccttgctcctaaaatgccggctgcctcacctcttagtcaaccagctgtttgacctgtgaattagacttcgttaacaggatccggtcagatccgccgctaacgacctggggctagagccccgggagctggcggagcgcggagtccatccgcaaagcggcagcttggtcaccgcggagaggatagaccgggaggagctctgcgctcagatcccttaacttgttgaggataaattgaaaatttttgaagtagaaatagaaattaaagatattaatgataatgctcctaatttcccaacagaggaattggaaataactaacggttcctggaacccgatttccatgatggtggcgaccctgtccactctggcaacttgcacatccaagtg

SEQ ID NO: 8641 - DNA, 478 bp, Homo sapiens
  source 1..478: mol_type = other DNA
tgcctcaacctcccgagtagctggcgttacaggtaccccaaagtgctgggatcacaggtagagtatttaatatacattcatataaaaaagaagcactggtttcataaaacaaatgtacattatatgagattctttaacaaaatatcagactttgtcctacttaactggaaagattatctatattttataaagaagagaaataacataatagtaaggctgtgatttcctcttttttgcaaaaactatttttgaaaagtattactgaattgataacatatatatggagagatttaaaatacgtattttagtcaactaaaaatataaataaaaattatcaattcacttatttggatacaagagtttataaatatagtgaaatcactgaagatttttttttaactgaaaaaaatggcagtgtaccttgtgaattttttaaatgaaaaaagaatacgaattttccgacaacctctgggcttct

SEQ ID NO: 8642 - DNA, 535 bp, Homo sapiens
  source 1..535: mol_type = other DNA
aacatttccttttactggctatttctaaaatgagagctaaagtaaagttagaaattgtaaaataatactgaatgtgtcatgtgaaaaaatcactaaactattatctgcactttatagttattcagtctaattgaactggtcattcatgaaacattgaaaggtttcataaaaattactactctatgaaaggtattgttctaaagattgagaacacattgtgaacaagatagtcatatgcatagcttgtggccaagaatctactgtacacaaaattaaggagcaaattctcttcccactctttgtctttaggagagataattatgtccctcacacaatacgctatactgagaatgggtcttaggaaaaaaatcgtcatattttctctaagaaaataaataacttcataaagtttattgtacaggaagacttggatcattcttgaattttcattgcaaatcaaaaacaggaatttgactttattatcttgatagaaaagtgtataaaaaataaactttttttaaccaagaataaattg

SEQ ID NO: 8643 - DNA, 379 bp, Homo sapiens
  source 1..379: mol_type = other DNA
gacgtattctttccggaaagtaagagacaaaatatcacagctatttcagttgaattctctgagtctatgacatagatgtagaagcccatgatacgtgcatgacagtgactcaggaggaaatggcctagtcacatgttctattccagataatctgccattcacacttgaaaagacctatggaaattattgatggccatatgctctttacctgcagctgctgatgacagccagtgacagtggagaccctccactcagcagcaatgtgtcactgagcctctttgtgctggaccagaacgacaatgtccctccactggtgtggagctggcaccccgctccgcagattccggctacctggtgaccaaagtgggagactcaggtc

SEQ ID NO: 8644 - DNA, 603 bp, Homo sapiens
  source 1..603: mol_type = other DNA
agactgatatgcctcaatttgacttacaaaggctacatggttttgtaagattgtttaaagtaattaagccataaaatataatttggaaatgctcaattgtcaagataggaatatattccagaatgaaagcagtagataatttataacctaaaatcaaattttttaaaaaatgtgtttttgttagaatggttcttttagcaaataacaattttgattaaacaaattgttgtatattcatattacggactactagataactatattatgggccactagataactataagaaataaataggaaagctctctatgtactgatatgatctttaagatataacaactaaaaaagcaatgtgcagaatatggtatgttgtatgcttacatttgtgtaaagaaggagacagaatatttataaaaatccgttgccctatacagatctccggaagaaagcatttctcctcatctaaagcagagatgaaaggaagaaccagcatcttttgaatttggaactatatgaatatttcacatattttaaaacaaatgaagactttataaattaaaaaagaaaaagttcttagcaaatattgacaatgagcgtcgctgt

SEQ ID NO: 8645 - DNA, 444 bp, Homo sapiens
  source 1..444: mol_type = other DNA
caagttgaaattcttgatgacaacgattgtgcacctgaagttattgtgaagtttattttgaaatcttcctcaaagaactatttgacttgggccccagtggccaagtcgccgtgagcgcgcagagcggggtggtgttcgcgcagcgcgccttcgatcatgagcagctgcgcgccttcgagctcacactgcaggcccgcgaccagggctcgcccgcgctcagcgccaacgtgagcctgcgcgtgttagtccccgcgctggggccgccacgcgccgcagagcccggctacctggtgaccaaggtggtggcggtggacgcttggctgtcctaccacgtgctgcaggccagcgagcccgggctcttcagcctggggttgcgcacgggtgaggtgcgcacagcgcgtgccttgggcgacagggacgcggcccgccagcgcctgctggtcg

SEQ ID NO: 8646 - DNA, 562 bp, Homo sapiens
  source 1..562: mol_type = other DNA
ataattataaggacttacaatcctaataacgcatcattgttaggctacttgagaagaaacagtacatttcaggacaattgtgatgtagtatgaaaaaacatcctttgtaaaagtttttcattttatagaaaaaaaaagttttcaatcatacttatttaattaaaagtagacacttggaaacaaaggaaaagagaccctcttgctttttactatacttctattttataaggtacctttaacttcttttggggggagataataaagaaaactaaaagctatgacattataacttttagaagttagaagttcaagcaagatattattatgaccattttatgaaaatggaaaccctttgacaagtaaaaggtacttgatttggatggataataaaagaaataacagactaaagatatagtaagtatatttaatgttttttaaaagtccttttaaaatgggaagaaagtatcactcctaactagctccttatttggagctgatttagtcaccattactgcagttctgcagcagaggcgccgggtgccgctcttggctagtgctgtgc

SEQ ID NO: 8647 - DNA, 587 bp, Homo sapiens
  source 1..587: mol_type = other DNA
ttctatgaaagtgttattaaataaaatgactttctgaaatgtccatttttttcaatcaagtttttctatttctgttgtcatataaagatgatagcagtaaatatctgtctcaataaggtcactcagtacttctcgacaagtatctgctcatgctttcctgcatggatgatgaaataaaacctggttgtcactgctacaaatatttgagctgtctgagatagtggagagactttctcaaagtcctcacaagtaacaaagatctttatttcttctgcatatgacagctaatataacttacataaatcagtattcttatatgcaaataagcacgttttcctaaatttatcctaataaggagatgaaatcttgaatcctacaaaggtaagaatttgaatgtcctaatttaatggactaaatatagataaaaataaaatttttgtaaggtattgagatctaataatcatattttcagaattaaagctgaattaacgaaaattaagatatggcaacattattagaaataaaattataactaaacttaggagaaataaaaatggaatttctgccgcagaggcgacccgactctg

SEQ ID NO: 8648 - DNA, 559 bp, Homo sapiens
  source 1..559: mol_type = other DNA
acatccttgatgtcaacgacaacgttcgagcctcggatcccgacttgggagacctggagccgcgggagctgtcgtcctacgtgtccgtgagcgcgcggagcggggtggtgttcgcgcagcgagccttcgaccacgagcagctgcgtgccttcgagctcactctgcaggcccgcgaccagggctcgcctacgctcagcgccaacgtgagcctgcgcgtgttggtggacgaccgcaacgacaatgcaccgctggtgctgtacccagctctggggcccgaaggctctgcgctctatggtgccgcgctctgcagagcctggctacctggtgaccaaggtggtggcggtggacgcagactcgggatacaacgcctggctgtcctaccacattgtgcaggccagcgagcccgggctgttcagcctgggcctgcgcacgggtgaggtgcgcacggcgcgtaccttgggcgacagggaggccgcccgccagcgcctgctggtcactgtgcgtgatggaggacagcagcctctttcagccaccgtcactgaccctcaggcggagctag

SEQ ID NO: 8649 - DNA, 604 bp, Homo sapiens
  source 1..604: mol_type = other DNA
aggaaattctttgtagaatttcctgtagaatatctgttctttcatagaaagataaacttttcttaatcctaatacactataatctgaaacatttttaatacagtattatctcacactgtcattcctcacaattaagtggtttacttagttttaatgcagtcaatcctaaaatatatgaaacattatgtatatcttaacacatttttaatgtaacctgtatataatatttttacttccctttgcatgtttttaaaagtatacacagatgttgcctatgtcagggcagtttttaacttctatgctaatcaaaagaaataatggcatctaaaagacagagcgagactttgtctccaaaaaaatgggactagcataaatggtggtgaaatgtgatgataattcaaaatttacagaagattgtaatattatttctgttccccaaggtcctaagagatattttcataaaaatgaatggtaaacttcagagaacatttaaaattattcaaaataatctcttacactcttctaaatgcttcatatattatgagtgtcatctctgcagatttagcagaaataaaatcctctgtgtgatagtttcacaaaacga

SEQ ID NO: 8650 - DNA, 508 bp, Homo sapiens
  source 1..508: mol_type = other DNA
gaagtctcccatttgaattggaaaaatcagttggcaattattatcgattagtgacaaatgcagctctagaccgggaagaggtattcttgtagccagggggcgacctacagctgtgggtgacagccagcgacagcggggacccgcctcctggacggttccactggcgtggagctggcgccccgctccgcagagcccggctacctggtgaccaaggtggtggcggtggacagagactcgggccagaacgcctggctgtcctaccgcctgctcaaggccagcgagccaggaccagtgggcctgcacacgggcgaggtgcgcacggcgcgcgccctgctggacagagacgcgctcaagcagagcctagtggtggccgtccaggaccacggccagccccctctctccgccactgtcacgctcaccgtggccgtggccgacaggatccccgacatcctggccgacctgggcagcctgtacctggtggtggcggtggccgcggtctcctgcgtct

SEQ ID NO: 8651 - DNA, 593 bp, Homo sapiens
  source 1..593: mol_type = other DNA
actatggcagaactacggttataaggtattttgtaaaagaaaatctcctgaccaaaatttattagatgcataaaattgtttttaagcaatgagctattgcaatcaaactttccagggattgtttccttcaattcagaggtcaccaaggaaggaagcagtgcttcagtgcagcagatctcagtgacttaactttgaagatgaatgttgtatttcataaccagtaaaataattgtgtaatactgttcaagaatcacataatattcctgtaatagataagtataaattgcaccttctaaaaggcaattttggtattactgatactgaaagataaaatgtatccagtatatttctaatgagtaagtatggaaaattacgttatggctatctttatatagatagtgcatttatgtcaataaatgtttatgtacttaatctacatgatttgcctaaaaataggcattcctaagagtacatttttagacgtcattaaatatacagacgtatcttaggcacacaattataattattgcactggttaacttgggcgccgctgttggccaaagtggagagcttggcgctccagatctcctcgc

SEQ ID NO: 8652 - DNA, 508 bp, Homo sapiens
  source 1..508: mol_type = other DNA
aataatcaggaacaaggcaaggcaattccctctttctttctttctctggagtgcaatggtgtgatctcggctcaccacaagcccctctcattttttaaacggttaaaatgaaggtgttagaccgtctctaaggttctatacaatcaaaaatttattaaaataggtctatatattttacaacaattttgacttttagaacatatgtgttcaattaatactgaattaattaaaatttatatacactgatgtaaatattttctaagtaaaatctttcatatgtatttaaataaaatttacctttttgcctcaataacgtgtgagtcaggtcacttgaaagttgcaaggcaaagcagttttttaaaaattatctaagattatcaaacaccggtccatgaacacttcattaattcagtgtcttaaaatggatttttaattatcagggataaattttgaaagatgaaacaattttctatgaaatcagtgtattgtggcagtaacttagagcgcc

SEQ ID NO: 8653 - DNA, 638 bp, Homo sapiens
  source 1..638: mol_type = other DNA
ttgtaaattggaaggtgatgttccatttaaaatattaacttcttcaagaaacacgtataaattagtgagatgctgttctatcaccctgcacattggtgatgtaaatgacaacgtgctatttcacaagtcagggcttctgatccggacttggggcccaacggccaagtctctggccagcggagagcggggtggtgttcgcgcagcgcgccttcgaccacgagcagctgcgcgccttcgaactcacactgcaggcccgcgaccagggctcgccagcgctcagcgcgaacgtgagcctgcgcgtgttagtggagcaacggcgccggtgctgtaccccgcgctgggtccccgatatggtgccgcacgctgcagagcctggctacttggtggacgcagactcaggacacaacgcctggctgtcctaccacgtgctgcaggctagcgagcccgggctcttcagcctggggctgcgcacgggcgaagtgcgcacagcgcgtgccttaggcgacagggacgccgtccgccagcgccttctggtcgccgtgcgtgacggtggacagccaccactctcggccactgcgcacctggtcttcgccgacagcttgcaggaggtgctgccggatatcactgaccgccgtggc

SEQ ID NO: 8654 - DNA, 595 bp, Homo sapiens
  source 1..595: mol_type = other DNA
ttatcatatattcatctgtacctttcaagtattcaaatagaaaaatataaacaatgtaaataaaatagaaaacaatgtaatatctcataaaactgcaatggtaaaagcatttatcctattgaaattccacaatttttatttgaaaatattatcgacatgtaattcaagtggcatttagaagaataatttaaaagcaacaactctatagaaagcttgtaaaatgattaagtagtttaaaccaaataaaacaatttctgtctattttagtctcaagataaattcatttctggtgacaactgaagttcttagttatttgttagtatatattggagacatttacaataaagcttgggaaatgaaagtatcatgttttttttaagaccaaatgtattgcagaaatgtgagtaatttaatccgatgctacaatctgatcattctgatctaatctgatcatttaataacactaaataaaaccttcatttcttttaaaatatgggtttacggataaatcaaataaattcaaaacaaagtaataagcaaatgatttttttttctcagtaatctagtagagtattacatttagaagtaatctgtc

SEQ ID NO: 8655 - DNA, 713 bp, Homo sapiens
  source 1..713: mol_type = other DNA
tagttgtttttattaatctgacaaatggactaaagaaggttgaccaatgtccacaaatttatgtaaatgaacttatgagcttcatttatccaattccaaagtcatttcagataggataataatgcaatccactagaatatccctttgtaccttgtattgcagaatagataagcatttcccaataactcttaagaatgaatttatgtactgtaaaagatatgacataagagaagtatcttcatatgggcagtatacttgaatgaatatttcctgaagtagaagagtaaagaaaaattatttttataaagaatgttaatatattggggattggtataaaattgccacaactttacaaaatagttttaaatagtatagatttccctaatatgtgtaatataaaacactagaaataatgataaaattgtttccatagctaataaaaaatgaatttttgaaatcagtatagtatcaagaactgtatcatattaattattatattgccagtgacaagggcaatacttagttctagtgcaggtttgtataaaaacccaacgtgatatttctaacaatttggaaaacagagaaagataccttaaagaagttgttataattttttattaagtatatggacgtaaaaagttaacttgaagccgcagaggctgtggcgccgctgttggccaaagtgcagagcttggcgctccagatctcctcgc

SEQ ID NO: 8656 - DNA, 630 bp, Homo sapiens
  source 1..630: mol_type = other DNA
caataactcttaagaatgaatttatgtactgtaaaagatatgacataagagaagtatcttcatatgggcagtatacttgaatgaatatttcctgaagtagaagagtaaagaaaaattatttttataaagaatgttaatatattggggattggtataaaattgccacaactttacaaaatagttttaaatagtatagatttccctaatatgtgtaatataaaacactagaaataatgataaaattgtttccatagctaataaaaaatgaatttttgaaatcagtatagtatcaagaactgtatcatattaattattatattgccagtgacaagggcaatacttagttctagtgcaggtttgtataaaaacccaacgtgatatttctaacaatttggaaaacagagaaagataccttaaagaagttgttataattttttattaagtatatggacgtaaaaagttaacttgaagccgcagaggctgtggcgccgctgttggccaaagtgcagagcttggcgctccagatctcctcgcgcagccgcagcgcgctttccagggcagccccagctcagacctcggaaaaagaatcgtttcctaaactatttgtaacctggcgtctccaggctggtg

SEQ ID NO: 8657 - DNA, 783 bp, Homo sapiens
  source 1..783: mol_type = other DNA
ttcttataataccactttttcccaaattattatataagtttaagtgatgcttagaataatgtttaagaccactttaaaattgcataatttattgatgaaggattaaaatagaaacttgcttttcagtgtatatgcatttgaatcattgaaacacagtctgtgcatgcattacatattcacattaaaaaactaagcatttttgaaatagcagaaaagtttaagcaattacaaaaatgtgaaaatttccaactttaatcctgttaatatttagcaatattaggcgagaacatctgtaactattgctgaattaatattacttttataatacaaaaatttaaaataaacgtttttccaggaattttatcatcaaaataaaccccagaaaataatttcaaagtggataatctatccttatatatgtattaatacaattatatattttacatttacaaatatataggtataaaaattaaaaatgaatgtacttccaaacaagattgcacataaaaattacttcagaaaattgttaagatacacagaaaaaattgaagcatcataaaaaggaaattataatagtttacatatctaagaataagaataaattaatattaagcaatggtttgtgattttataatacacttacagaaattttattccactttatttacaactcagatatctaaaaaatagattgcttttgaaatacaaatgcaataaaatcataattagaagagagtagtgttttctttatcagccatctgatatcagatccggatttccagt

SEQ ID NO: 8658 - DNA, 550 bp, Homo sapiens
  source 1..550: mol_type = other DNA
ttgctgaattaatattacttttataatacaaaaatttaaaataaacgtttttccaggaattttatcatcaaaataaaccccagaaaataatttcaaagtggataatctatccttatatatgtattaatacaattatatattttacatttacaaatatataggtataaaaattaaaaatgaatgtacttccaaacaagattgcacataaaaattacttcagaaaattgttaagatacacagaaaaaattgaagcatcataaaaaggaaattataatagtttacatatctaagaataagaataaattaatattaagcaatggtttgtgattttataatacacttacagaaattttattccactttatttacaactcagatatctaaaaaatagattgcttttgaaatacaaatgcaataaaatcataattagaagagagtagtgttttctttatcagccatctgatatcagatccggatttccagtttcttcctcagcatctccaaggacctggctctggagccccgggagctggcggagcgccgagtccgc

SEQ ID NO: 8659 - DNA, 641 bp, Homo sapiens
  source 1..641: mol_type = other DNA
ttctgtggaaatgaagtttcagttgctttatttttaagaaaaaaaagctgaagtgtctgggaatcctttatgacatacagacattttaattatttcaaacacaaagcatacttcaggctcatatttttaaccatgcaacaagaaaattgttacaatttctgttctgtagccttcatacttagtatttataaatattgaaatgtatgttaatttggggaaaacataacagatatccatgaaggcttgtatgtcatggtaggtagttactattaatctttatttctgtttttcttaggctatgaacataagctgaaagataaaattcttgaccttaatgtctcatcttaaaaagaagcattggctcgtattacttaaaaataatgggggagcgcagtatatattaaacaaagatatatgtataagtttgaaattgtgcataatagatttatttaaaacacaaagcatagaaatatctactataatattatggtgagagcaaaatttgatacacctgcattttcgaagaatatatacatttcggagaccgaattcaactgtcccgcacggagcctctgggcgccgctgtcggccagtgcagagcaagcgctgacgccggggatccgtcagcctctggcctggga

SEQ ID NO: 8660 - DNA, 644 bp, Homo sapiens
  source 1..644: mol_type = other DNA
aagcatacttcaggctcatatttttaaccatgcaacaagaaaattgttacaatttctgttctgtagccttcatacttagtatttataaatattgaaatgtatgttaatttggggaaaacataacagatatccatgaaggcttgtatgtcatggtaggtagttactattaatctttatttctgtttttcttaggctatgaacataagctgaaagataaaattcttgaccttaatgtctcatcttaaaaagaagcattggctcgtattacttaaaaataatgggggagcgcagtatatattaaacaaagatatatgtataagtttgaaattgtgcataatagatttatttaaaacacaaagcatagaaatatctactataatattatggtgagagcaaaatttgatacacctgcattttcgaagaatatatacatttcggagaccgaattcaactgtcccgcacggagcctctgggcgccgctgtcggccagtgcagagcaagcgctgacgccggggatccgtcagcctctggcctgggattccctgcgcagccaagcgcagaccagcacagcggattgccagctccgagacccgggactcctcctttagcgcggtagagtgcactttctccaactggaaaagcgg

SEQ ID NO: 8661 - DNA, 396 bp, Homo sapiens
  source 1..396: mol_type = other DNA
tagaaatttctgtcaaggataccaatgacagagacgaatatagaattagtcttagtgaaaatctgttgcaagtgacagccactgaccaggaaacatatgttctcatttgagaaaacaggtatgattaagaataaccagtcatttgattttaatcatcacttctctctctgatcaatttcttcaaaacacgggatctggatttcggaggaaagaaacagaaagatttattcttcttctgacaggggcaagccgcctctttcttccagtagaagcatcaccttgtatgtcgctgacatcaacgacaacgacgtggtccacgtgggcgcaagtgagcgcctctgacccggatttggggctcaatggccacatgagcgcgcagagcggggtggtgttcgc

SEQ ID NO: 8662 - DNA, 760 bp, Homo sapiens
  source 1..760: mol_type = other DNA
gaaccactggactttggcctctgatacaaactgcctaagagaagagattatttatactggtattaatgctctgatgaaaacaggtcatttgacataaacacttacttgttaaaaacctatatcactacatctaactttgttttctaaaacttttagtacttcaaattctacgtatttcttttctcattacaatgcaaacagtttaatttgcaactgtaatatatgttcattttagtttgtgattacctgcttaatcatttaaataggtccatttaacttgtatccctgtaagataaagtatgttttacacaaaaaggttaattaaggctcagtaaaactattctagaagagtactttaaaaacctcttacacaatcctaagctaaataagtttaatgaattaagtagttacaattataaagcttcagagtgaattatctcatgagtttatttaatataatctttgtatgaatgtatactaaataaaattggcctattcaaatcacaattttaaattataagacttttctgaatttacctagacactaatatgacctaaaataagtattatttaccttttattaaagtgtgtacattttgttgggaaaacgtgttgcaaatatatatttaaccaaacattatcttgaaatatttacaatattttcacaacctacatatagtaaattatttaaagataggctatgtaaaatataataatccaacagaatagtttactttccatccgctgttcctactaggag

SEQ ID NO: 8663 - DNA, 549 bp, Homo sapiens
  source 1..549: mol_type = other DNA
cctaagctaaataagtttaatgaattaagtagttacaattataaagcttcagagtgaattatctcatgagtttatttaatataatctttgtatgaatgtatactaaataaaattggcctattcaaatcacaattttaaattataagacttttctgaatttacctagacactaatatgacctaaaataagtattatttaccttttattaaagtgtgtacattttgttgggaaaacgtgttgcaaatatatatttaaccaaacattatcttgaaatatttacaatattttcacaacctacatatagtaaattatttaaagataggctatgtaaaatataataatccaacagaatagtttactttccatccgctgttcctactaggagagaaaacgcacggattccccacaaaccggctgctgggctgcagggatgaggactttgcagaattctgtaaccagactacggattccatgggaggctggagccttcctgagctccaaggacttgggtctggcgccccgggagctggcggagcgcggagtccagcg

SEQ ID NO: 8664 - DNA, 384 bp, Homo sapiens
  source 1..384: mol_type = other DNA
atgtaaaatataataatccaacagaatagtttactttccatccgctgttcctactaggagagaaaacgcacggattccccacaaaccggctgctgggctgcagggatgaggactttgcagaattctgtaaccagactacggattccatgggaggctggagccttcctgagctccaaggacttgggtctggcgccccgggagctggcggagcgcggagtccagcggggaggagctctgcgctcagagcgcgcggtgcgtggtgagagaagtaactgatatcaatgacccctgcagagctatcagctcagccgtgcgcgtcaagtacccggagctggtactggagcactccctagatcgcgaggaagaggccattcaccacctggt

SEQ ID NO: 8665 - DNA, 746 bp, Homo sapiens
  source 1..746: mol_type = other DNA
tcattggaggtactgatgagttcatttagttcaatgaaaatagtgacgtattaggtagatctcttaattttattactagtattctactaaatgtggtagtataaagtcaaaaagcattccgaagtttctcaagacccttataattccatgtcatagttattaactattaaaccattgaaactattattttatatttgtgttaatgagagtcaaaattattgtgcattcatctcaaataattctattattttgaaaaatacaggttttttttttaaaaaaaactgctcttgacattgtagctattgtgagaaaatattttgattataattatttaaaagcaatactccagtacttaagtatgaaataaggaattattactttctgggtgaatataggctagaattgaagacaaaaaaatttgttgcttatcttcagtacttccagcttcatagataattactcttaaaaggaacaagaatgatgctatattattttgtgcctttttaaattttgaagaaaaaatattcatttattcaagatatatgtaaattcagtaaataaaaagatatgatagttatgaccaagtggaaatatatttcctgattgaggaaaaagattaaaatattttggctgtcaactcgtagtttaaaaaaaattccttgaaagcccacacagagcctctgggcgccgccgtcggccagtgcagagcaagcgctgacgccggggatccctcagcctctagcctg

SEQ ID NO: 8666 - DNA, 443 bp, Homo sapiens
  source 1..443: mol_type = other DNA
cagaactgatattagtatgaattcgctgagcaaataccaactaagtcctaacgagtatttctcatgacaatcctgatggtggcaaatatccagaattagcgctcaccacttggtactgaccgccttagatggtggggaccctccccgaagcggtcaggacgtgtacagggttagccttcgggaagacgtgcctccaggcacctccatcctgagagtgaaggccactgaccaggacgagggcatcaactcagagatcacttattcctaacattctaactcagcagcctttggattttgacacggtgtaaagtaattgtagaagttgtagacgaaaaccgtcactctctgatcagattatggaggattcccctccaggagtggagtagaggtgttccatttaagattcattcttcttctaataattactacaagctagtaacaga

SEQ ID NO: 8667 - DNA, 475 bp, Homo sapiens
  source 1..475: mol_type = other DNA
cgctcaccacttggtactgaccgccttagatggtggggaccctccccgaagcggtcaggacgtgtacagggttagccttcgggaagacgtgcctccaggcacctccatcctgagagtgaaggccactgaccaggacgagggcatcaactcagagatcacttattcctaacattctaactcagcagcctttggattttgacacggtgtaaagtaattgtagaagttgtagacgaaaaccgtcactctctgatcagattatggaggattcccctccaggagtggagtagaggtgttccatttaagattcattcttcttctaataattactacaagctagtaacagacggttttcggacagtcagcctacctgggtcagtgcctctgacccagacttcgggctcaacggccgtgtctcggagtcacgaacgctgtcgtcctacgtgtccgtgagcgcgcagagcggggtggtgttcgc

SEQ ID NO: 8668 - DNA, 655 bp, Homo sapiens
  source 1..655: mol_type = other DNA
ctggggatcaaatgaatccagaatttaattttttcacaaagatagcatgctactggctagcattttaactcccagcataagaagattcttaaacaggtaagtatttaaaaatgtatttaatcctttttatattacaatatgccaatatattccaatatagtggtattattttaagattctagataacttcttcatagagttcgcaaaatataggtcaaatttatggttatcattattaaaacaaaagtttaaattaaatggacatttttatgaagtaaaatacctttcggttaaaaatataaaatacaggtatatttttacggcatggtattttaattgaaaaagtatttcatcttcatttactcaataaaggaaccttgtaagaattatagttaggcatcctacctgatgattttattccacttccagaaatgtcgttcctttcagtcggttaaaatcaattggaaccaactacaacctacaagttttcagctccagtaatattttgaaaactttttaaaaattaagcaagcccttttaataattactcctttcgcaggtgttcttggtaaagtttcgtttttaagctctacaaatacgtgtgattcacaaagctggaatttcttagtagggaatgggaagctgcgcgccattg

SEQ ID NO: 8669 - DNA, 720 bp, Homo sapiens
  source 1..720: mol_type = other DNA
atatttcttcccaatttaaaatatattattttattttatgcctagcaaatatctttacagtataaatatttacgctcatgaaagtacgtagccagttatttcttagggagaattttttccctatattttgatgggcttccaaaagtattaccagtaattctcagtaattacaattaggtcagttacccaggaaaaggtaagtctgtaacattctttggactaccaattttcttttactaagtttcctgaacaataaatatttttgaaatataatgtattaatagaattctggagtacttccattatttccagtcaatgcaagttggaatgcttctactttatgctaaaaatattaatgtttcttgattctgataatgtatacaatcacatatcatttttaggtttccataatatcatgaaaatttgatttttaagcgttacatgtcaaaagtaatccttccattcaggatcattcaaggaatctatttaaaaatattttccccaaattatagctgaatcagaaagtttaaattattatattatatgatttgtcaaaaagagaaactcctaagatgttaatctcaaagcagatgcactaacattataagattaaaatcattgtttatagaaacttccaattcatttaaaagctccccttttgaagaacagtaggtggagctatttaagatataaaaacgaaatatcctttggagagaaaag

SEQ ID NO: 8670 - DNA, 468 bp, Homo sapiens
  source 1..468: mol_type = other DNA
tcaattaaatctagacattacattaacgacaatgcgccttactttcgtgaaagtttccctctaccccacgcctgggatccggatatcgggaacagagctacgagctcagccccatcgtgcaaaatggctcaccacctggtccttacggcctccgacgggggcgacccggtgcgcacaggcaccgcgcgcatccgcgtgatggttctggatgcgaacgcaccagcccagcccgagtaccgcgcgagcgttccggagaatcttgcggaagtgaggtattccttccggtatgtggcgttttcaaactagattgtaattcagcctgatcactgttctggacgtgaacgacaatgccccagaagtcagagggacattaattgcccttttaaatgtaaatgaccaagtctgtttcatccaaccctttaaattagaaaaatcttacggaaattactatagtttagtcacagacat

SEQ ID NO: 8671 - DNA, 557 bp, Homo sapiens
  source 1..557: mol_type = other DNA
ggtgacaacaattctaaatgcagaaaagttaaggctctttattctgtgactaaaggctttgtattttctaaagatttgtggagctttgctgccattatttcaataattttataaagatcctaggtggtaaataggcctggctttttggtacccaaggatcatgctcatttcttattgctccctggttcttaagaaatgagagctaacaatgacatccagttttaaaagaaataaaatctgaattgtacttttaaattttataagccagagttaaaccaatagattgtaactcctgctaatttgatagtagctccagataatgaggaattcatttggtaagagataaaactgaaattattaatgtcttgtctgtcttccaacaagccagatttgttggttcccctttcttgtgatcaaagaaagtgattcaaatgtttaatgagtcttgatttggattggagacttgcagaacggctagcctcacagcaaggcgctttggctggccagagagcccggcgctagaagacgctggagatcgggcccctgcccgtcccctt

SEQ ID NO: 8672 - DNA, 533 bp, Homo sapiens
  source 1..533: mol_type = other DNA
cttttactaagtttcctgaacaataaatatttttgaaatataatgtattaatagaattctggagtacttccattatttccagtcaatgcaagttggaatgcttctactttatgctaaaaatattaatgtttcttgattctgataatgtatacaatcacatatcatttttaggtttccataatatcatgaaaatttgatttttaagcgttacatgtcaaaagtaatccttccattcaggatcattcaaggaatctatttaaaaatattttccccaaattatagctgaatcagaaagtttaaattattatattatatgatttgtcaaaaagagaaactcctaagatgttaatctcaaagcagatgcactaacattataagattaaaatcattgtttatagaaacttccaattcatttaaaagctccccttttgaagaacagtaggtggagctatttaagatataaaaacgaaatatcctttggagagaaaagtcctgacttcaggcagagggcctcctggggactctgtgggaga

SEQ ID NO: 8673 - DNA, 554 bp, Homo sapiens
  source 1..554: mol_type = other DNA
aagttaaggctctttattctgtgactaaaggctttgtattttctaaagatttgtggagctttgctgccattatttcaataattttataaagatcctaggtggtaaataggcctggctttttggtacccaaggatcatgctcatttcttattgctccctggttcttaagaaatgagagctaacaatgacatccagttttaaaagaaataaaatctgaattgtacttttaaattttataagccagagttaaaccaatagattgtaactcctgctaatttgatagtagctccagataatgaggaattcatttggtaagagataaaactgaaattattaatgtcttgtctgtcttccaacaagccagatttgttggttcccctttcttgtgatcaaagaaagtgattcaaatgtttaatgagtcttgatttggattggagacttgcagaacggctagcctcacagcaaggcgctttggctggccagagagcccggcgctagaagacgctggagatcgggcccctgcccgtcccctttctgcgccccgggatgaggcag

SEQ ID NO: 8674 - DNA, 396 bp, Homo sapiens
  source 1..396: mol_type = other DNA
caacaagccagatttgtttcccctttcttgtgatcaaagaaagtgattcaaatgtttaatgagtcttgatttggattggagacttgcagaacggctagcctcacagcaaggcgctttggctggccagagagcccggcgctagaagacgctggagatcgggcccctgcccgtcccctttctgcgccccgggatgaggcagagactgagccatgtcggactcggcgcccagcgcccaagcgctaacccgctgaaagtttctcagcgaaatctcagggacgatctggaccccgctgagaggaacgtcaaggcttccacggtcattcactatgagatcccggaggagtgtgggacactgccctccgggaagtggtgatccaggacatcatttccctaccc

SEQ ID NO: 8675 - DNA, 376 bp, Homo sapiens
  source 1..376: mol_type = other DNA
aacctaagtgtctgggaccccgacgtcacaataaatcgtgacaatggcatagtgtcaatatcagcgatgggggcaccccggccaccaacatcagcgtgaacatatttgtcactgatcgcaatgacaatgccccccaggtcctatatcctcggccaggtgggagctcggtggagatgctgcctcgaggtacctcagctggccacctagtgtcacggcagactctcacggtcttgatcagctaccctcactgtgtcagtaaccggagttcccctctggctctgccccccgggagcagaaaaaaaatctcaccttttatctctagagacctataccgagccccggtgagctcactgtaccccagggccctccttgcacg

SEQ ID NO: 8676 - DNA, 443 bp, Homo sapiens
  source 1..443: mol_type = other DNA
gccagagagcccggcgctagaagacgctggagatcgggcccctgcccgtcccctttctgcgccccgggatgaggcagagactgagccatgtcggactcggcgcccagcgcccaagcgctaacccgctgaaagtttctcagcgaaatctcagggacgatctggaccccgctgagaggaacgtcaaggcttccacggtcattcactatgagatcccggaggagtgtgggacactgccctccgggaagtggtgatccaggacatcatttccctacccaggaagcgaggccgtggctccggggacgcgctttccgctcgagagcgcgcacgatcccgaccgaaatgaatactttgcgcttcgcggacagcaccaagtacgcggagctggtgttggagcgcgccctggaccgagaacgggagcctagtctccagttagtgctgacggc

SEQ ID NO: 8677 - DNA, 276 bp, Homo sapiens
  source 1..276: mol_type = other DNA
tcttttgaaatggtcttcgttggtaattaacaaaagatcaagaataccatcattcaaggaagctattaaatctaatgtccttgaaatcaatgaatggtaatttagtgtatctagtgtaacatgtagcataaatttaataagagatggatccgtttctgaatattctgcagaagggcatccaatacaatcagactgagccgcaggaaaaaaaatgtatatatatatatatgttgtctgcctccccaattggctgagcccgggagccgctgtctgcca

SEQ ID NO: 8678 - DNA, 435 bp, Homo sapiens
  source 1..435: mol_type = other DNA
gtcttaggactcatatcaagtccctactggggataagtgaaatcacttatgtcagaaaactggtttacagttggctgattcatagaaaagttgagttctcctgaatttggtgaaaccatgaaacctagaagccaagccatccatgcttggcctctgaccctgtaacactcattccacatttggggtctggggtgtcagaaaagctaagtcccatgtcagctgacattgagatttccgcaaagcattgctggagagtcagggcaagactttacaaggttcttcctctcccagacaagattttgctggttcaagcaaagtggtggaagcttctcgaagcttctgtgacacagatttgcagcctgtgttattgaattgagagcacacagactttttggccatctcagagctgaggtgggagatctgctcttccagccc

SEQ ID NO: 8679 - DNA, 380 bp, Homo sapiens
  source 1..380: mol_type = other DNA
gagttctcctgaatttggtgaaaccatgaaacctagaagccaagccatccatgcttggcctctgaccctgtaacactcattccacatttggggtctggggtgtcagaaaagctaagtcccatgtcagctgacattgagatttccgcaaagcattgctggagagtcagggcaagactttacaaggttcttcctctcccagacaagattttgctggttcaagcaaagtggtggaagcttctcgaagcttctgtgacacagatttgcagcctgtgttattgaattgagagcacacagactttttggccatctcagagctgaggtgggagatctgctcttccagcccggcaaacctccgagcagtttttaagaggtggggccca

SEQ ID NO: 8680 - DNA, 377 bp, Homo sapiens
  source 1..377: mol_type = other DNA
cccgcaggaagtgaaagcctcgagcgccctggctctcaacccccagagatacaggctcacaatgtactatctgacctctggcagatgggctctgccagatagtaaaaaacacaagtttctccaactattttgaaacacccccaggtgattttgataagagaaacttactatataaagtgacttgctcaagtcttgcacttggaactttaaaagcttacaggagccttcccttttaggaccttacatgtggggagcagtccccgcagcgcaaacttggccaggccatccgtgccctttggcagccccagaatggtgctggtgactcccgatacacctggaatgctaggtttctgggtgccactggcagttccggagct

SEQ ID NO: 8681 - DNA, 216 bp, Homo sapiens
  source 1..216: mol_type = other DNA
tgtgatgggataggatcagccccttgggagtgggagctggatcccgacagagatagatgtcccgggacttggatgccctaaattaataatgtattgcagccatcttgctgcagattgaataaattcattcaaggggccatttctttaggaaaggagtttctggtacctcagacctctgagacctgaggtgtatccctaggggctcgggtgacattc

SEQ ID NO: 8682 - DNA, 411 bp, Homo sapiens
  source 1..411: mol_type = other DNA
agtactatttcagcataagtcagtctcaaatgttgcatgagacataatgtactaaaaaaaaaaatgctcattgtttacctgaaattcaaatttaactgggatctgttggcctcctgaggcagagctgtcccaggtctggtggggctttggcctcttgagggaaataaacaggtatatttagctgttgtggccttgcgccctgaggccaggaagcagctttttagcctaaatccagatgttaaaaacagaaatgaaatcagtatttatgacagggcctgaccctcgtctaagcctgcgccctggggaacggaccctgggggtggaggtggtgggtcaggccctgctctcacagtccagcccagccaggcctgtggggggcttttaaaataaatgcagctcagccagctgtgt

SEQ ID NO: 8683 - DNA, 372 bp, Homo sapiens
  source 1..372: mol_type = other DNA
aagaggtggttaccattatcatccccattttgcagatgagaaaactgttgtgaagagagactaccttggtgacccctatattcccagtgctcagcgtggtcaaggcatgctgtgatcttcctctgtctctgcagaagctgctgatgggagctccaccctgggagggggtgccggcaccatgggattgagcgcccgctacggacctggcaagcgggatggcgtggcctcagagtttcagggctaacccccagaatactggtaggggccaaggccatgctccccttgggccttcccccccagggggttgaatatgcaaaagcagttccgctgggaacccccatccaatcaactgctgtacccatgggggtagtg

SEQ ID NO: 8684 - DNA, 343 bp, Homo sapiens
  source 1..343: mol_type = other DNA
ctcagagtttcagggctaacccccagaatactggtaggggccaaggccatgctccccttgggccttcccccccagggggttgaatatgcaaaagcagttccgctgggaacccccatccaatcaactgctgtacccatgggggtagtggagtaaggtggttggggtgttgaacaagtaacctacaagcctcctagttctgaaaagttggaagggcatcatgattggaggacatgatcaccatccccatggttgctaccaagcctcttcccaacgccctggggtaggaggctctgtatgtcctcaggggactgacaacatccaatagggctcagcccaggcagcc

SEQ ID NO: 8685 - DNA, 628 bp, Homo sapiens
  source 1..628: mol_type = other DNA
cacctggccgacccggtaccggtgatttggttcgctccaggggcgtcctagtgcggctcagggcccccgacgcccttccggcgccgcctcaccggccccgggctgtggctgcggatacccgcgccgtggcaggcgggggctgagagcggtggcaggctccgggcaactccggccctgggtcagggagatcgcctccgcagccgccctggcccttcacccgtcgcgggcccaggaccagggggcggagcgcaggtgtgcggggcggagagcgtgagctctgcgcgcgcgtgactgcgccgggcccccccggggcaatgtgcggcgccgagtctgggttacgcctggcgcagctcctgccctcagatgccccgaccgagcggagagtcaggaatcttctccgagggctgggggaagccggctttccgcacctttggggcaagcggctggagggatggctcggcttcccgaggatctgacccccggccggagacaaatggccctcgcatcctaggaaccgggagagctgagccgggcgaggggcggagctcccctgggggcgtggcctgggtgtggatggaggcggggccgcaacgcccagttccgcagaggccggctacgtgcttgcgca

SEQ ID NO: 8686 - DNA, 432 bp, Homo sapiens
  source 1..432: mol_type = other DNA
gaaaaaggaatatttccaccctggagccctagctccttgctaaccctaggccaagggctagtgtgcctacccgatactctaggggcgggtcgcacttcatgcactcccccggccgaggcggcgtcaatgccaggcgatggggcttcatagctcctgggggtggggagaagagagttcgtcagctctcaccccttagtggaagttgcccacgtcggggtcgtagaaataggccacggtcttggccatggtgccggcgggagcaggccccgcacctccgccgcccgccgcccgcggccgccgccagcccctccccggccgtgcgtgctgcgcaagcacgtagccggcctctgcggaactgggcgttgcggccccgcctccatccacacccaggccacgcccccaggggagctccgcccctcgcccggctcagct

SEQ ID NO: 8687 - DNA, 293 bp, Homo sapiens
  source 1..293: mol_type = other DNA
ggaggtttaaaagctttaaaagttgactgggacaggtgcctgagccaaggtggcaggggcttcctgcgcatctcctggatccggtgcccagtgactcagtttccctggatctacatatgcaaatgaataattatcaataattacaggctgaatcagtggtcgcccagcggacgctgcgtccgccccgcccgccccgccacccggaccctgccggcttccgcgccctgcgacgtcgccggacaagtcgtgggcgggcagagggcggggcctgacctggcctggggcggggctcc

SEQ ID NO: 8688 - DNA, 616 bp, Homo sapiens
  source 1..616: mol_type = other DNA
tactctaggggcgggtcgcacttcatgcactcccccggccgaggcggcgtcaatgccaggcgatggggcttcatagctcctgggggtggggagaagagagttcgtcagctctcaccccttagtggaagttgcccacgtcggggtcgtagaaataggccacggtcttggccatggtgccggcgggagcaggccccgcacctccgccgcccgccgcccgcggccgccgccagcccctccccggccgtgcgtgctgcgcaagcacgtagccggcctctgcggaactgggcgttgcggccccgcctccatccacacccaggccacgcccccaggggagctccgcccctcgcccggctcagctctcccggttcctaggatgcgagggccatttgtctccggccgggggtcagatcctcgggaagccgagccatccctccagccgcttgccccaaaggtgcggaaagccggcttcccccagccctcggagaagattcctgactctccgctcggtcggggcatctgagggcaggagctgcgccaggcgtaacccagactcggcgccgcacattgccccgggggggcccggcgcagtcacgcgcgcgcagagctcacgctctcc

SEQ ID NO: 8689 - DNA, 246 bp, Homo sapiens
  source 1..246: mol_type = other DNA
ggattttattctgaagcaagtgcattttaagcaagtaaattatgagatcttatttccctttaaaaaagaaaaaaaaggttgatcacggaggtttaaaagctttaaaagttgactgggacaggtgcctgagccaaggtggcaggggcttcctgcgcatctcctggatccggtgcccagtgactcagtttccctggatctacatatgcaaatgaataattatcaataattacaggctgaatcagtggt

SEQ ID NO: 8690 - DNA, 220 bp, Homo sapiens
  source 1..220: mol_type = other DNA
ctgggacggagagggcgtcctggtcaccatggcatttcacactgccaaatcgaacagcatgtgaacatgctgccggtgggcagagagtccagaagcctctggagtacccctgaccagaggtcaggcctcatcggactggttagggctctcccggcagcctgaccaaagcaggcaggatgtgaaacaagagggagggggcgtctgcacctccttcctccta

SEQ ID NO: 8691 - DNA, 553 bp, Homo sapiens
  source 1..553: mol_type = other DNA
tgctcagagagggaagtgcctccgcccctgggagacaggctccaggaccggggttcaggagagaagggccattcctcttcaggcctccccggcatcccccctgaaattttagggtgggagttggggagaaggggcggcttctcccatgaatgaaacagctgcttgcttggtcactgagcttgcagggcgtcaggcagccccaaaccttggtttggaagtagggatgtgccttgcggaccttcatccctcgaaggaacctaggccgggaacagacgggtacccctctgctgggcctctgcgcttttgtccagccacccttccgggcgtgggagaggtgccctgggtcgacctttcctcctcccttttggcaggactggagggcatgggagcagcggagaggatgcaaagccgtcccttctcggcctgcgagagggcagaccaagaagcccaaaccctttggaggcctgcgcttgcacaaggagtggccggggccccgcggagggaaccggccgggcggggcggggctgggcccgtcgagggagggcagagggga

SEQ ID NO: 8692 - DNA, 485 bp, Homo sapiens
  source 1..485: mol_type = other DNA
tactcagagacctctagatggcgccagagagcagtgtgtgagacactgcgtgtgacaccgtgtgtgatttggcactgcgagggcgtgtgacacaggccgtgacactgcgcggcctcgcggggcagggacccggtgaggccgcagcactacgccgtgcagagggcaggtgatcaggggaccctcgaatagcctaagctcaggggcttgctgcggccaccgaggctgaccgctctgcggcttcggccggagggggaggggtggactttccccgagcgcagcgggaaggcacttcccttgcctccacggcctgtgtactgggcctcggagcggtgctcggggtcccctcccagccggaccggagcggtcccgagctccacctcccggccggagggggggcggggaggcgggcgggcgggagggagggggcgggccgggctgtgcgctccgctctctgctggctccgccgccgccgccgccgccgccgc

SEQ ID NO: 8693 - DNA, 227 bp, Homo sapiens
  source 1..227: mol_type = other DNA
ttggccaggctggagacgtattggggccccgatcgggccctggcctggcatctccaggcaggtggccttggacggaagcccggcctactggcttctgggaccccgggggtagggcctggagaagccctgaagccgctccagcccacttcccgaaggtcccgcttccgggtgcacctgcggtcccctgcctcggcttgggaacgccaaggacatcccccacggaggcc

SEQ ID NO: 8694 - DNA, 462 bp, Homo sapiens
  source 1..462: mol_type = other DNA
ggttccccagacagagactcagtctggaccagttcttgcagcttctggaatcaagaccatgggtgtgggcagggactgccccagggccaatccaagattagggtgtgacaagttgtgcagattacaacactcaccccttgcacgtcactgcctgtgactcggggccaggcccaggccaaagcccgttaagtgacttgtcccagactggtaagttgcaaagtcagaatttgaactcaggcagttctgttaatcacagctgctttccagtcgggaggggcatcagtccacgtgcaagcaggtggaggtgatgcagaggctccctttccctcagcagccgccttgctgcgtggacagcagcttcccatctggcctgtccccggagcctagcttcacaggaaatgctctttctctaattggcattggggtttccataggaaaaagctgcttctctgtttccccagc

SEQ ID NO: 8695 - DNA, 419 bp, Homo sapiens
  source 1..419: mol_type = other DNA
agtgcagtgactcactgtaaccctagtagctgggactacaggtgcccgccacctggtctcgatctcctgacctcgtgatccatccatatttagttaatttgtgaggaaggaagtgtataattttaattcctgcttagcctgacatttccttatttgtaaagtgagaataacagatagaaaatttacgtagagcatttatcacactgcttgaagcatcctaacctagagtctctgcccagagcctcctgtgagcacagggctcgggggtgacggtggtcgcgccggcagcgccgccttgggcctgcgggaggcgcccgagaggcaggggcgaccacggcggctgcgcagagtcctccctatgccggcggtcgcgccagcgggatccgcctggctcagctgacagctcccgagaacggaag

SEQ ID NO: 8696 - DNA, 579 bp, Homo sapiens
  source 1..579: mol_type = other DNA
acactctgttgactggaaagaataagatggatctctttttctgaccagctgggaggcagtgcccgctagcggacaagggaaaccacttgtgcctctggccaagttaattttaataaggattaagtgaaataatgcaggtcaaatatccgagccttgatatatataagcctcatgtgtatgtgttcccatttatgtaaaataacagtgtaagcatattcaaagaaagcaattcagaatgtactcttaaactaactttttctctattatataatgctgcaaagtttgatctttaaaaaaggacattaaaaagcccaattgtactttaaacaacacaagttttaatacttgggtaaataaatgccccccggccccagccccaaggtccagggggttgtattcctgggggcgacccggcgcccctcaagctgttccagggcctgccggggccagggaccgaggtgggactgagtggccggaactcctccacctgggagagtcggtccgggtagctgcggccaagctgagtcagcccggcgggcggcgcacgcggcgccgcgtgacccgcagccacgtgacccg

SEQ ID NO: 8697 - DNA, 453 bp, Homo sapiens
  source 1..453: mol_type = other DNA
accttgcaagcctgctatatagctatactgtgctacatggcattgggaggtaataagatttaaaagacaaatactcttgtcttcacaaactgggtaagaaagctggcttaatggagttgtattccatctgtgaaacactgataattgtatctcctatatgaaagatggccaaacccttcaagttttgacttcatgtcaccgagtcagggattttttggaaaatattgtttccgattcaatggcataaacatgaggatgctattataatcatccaccctaagtaggatttgaacaaactttttctgtaaaatgtcagatagcaagtattatagggtttgcaggccatatgttccaataaaactttatttatggacactgaaacttgaatttcatgtactggcagactgcctcgcttgaagattgtcaacctctctggttgccaacgacctcgag

SEQ ID NO: 8698 - DNA, 518 bp, Homo sapiens
  source 1..518: mol_type = other DNA
catctgtgaaacactgataattgtatctcctatatgaaagatggccaaacccttcaagttttgacttcatgtcaccgagtcagggattttttggaaaatattgtttccgattcaatggcataaacatgaggatgctattataatcatccaccctaagtaggatttgaacaaactttttctgtaaaatgtcagatagcaagtattatagggtttgcaggccatatgttccaataaaactttatttatggacactgaaacttgaatttcatgtactggcagactgcctcgcttgaagattgtcaacctctctggttgccaacgacctcgaggaagctcagtgcttggcacgaggtgctcatcagcagcatcgcctcggaggctcaggtcgtcggagcaactacaccagggccggtgcacctcggggcggcggcgcaggactaggctaggccgggccgggccgggcagggcggcgcgagtcgggggtggggcggcggcgcagcgccgtcgtcgtagtcccc

SEQ ID NO: 8699 - DNA, 323 bp, Homo sapiens
  source 1..323: mol_type = other DNA
catagtttctgtcccagggtctcagagactagtcagtgaagtaaacgtagttaaattacattcatttgcccattcaacagatgtttatcaaatgcccatcaggtgtcaggcattttgcgaccaattggtttgtactatcatggagctgacagtccagtcagacattaaataatcacaagagtgaatgtgtaattaaacactggttgaactaaaatttgaagactgaacctcccagagtcctgcaggccacagcaaggcttttgtttttgtcccagagcaatgggaactcgaggaggaaatatccgaaatatccagctaaattt

SEQ ID NO: 8700 - DNA, 612 bp, Homo sapiens
  source 1..612: mol_type = other DNA
cagcgaagggccgtgggccttcggtggaccgaggctcctcaggccagcgtcctgcgggcagacgcccgggcactgcggacattgcactggggcggctgggaggcgagggccaggcttcctctggctgagttgccagaatcgccccggggggtactggagccggaagaggcctgggcccagtcactgtctacacccaaatgatggacattttcctaatttttggcgcctggcgtctctggtctagagcaagagaaggcccccagtaggggtcctcccgcccccccttttgactgcctgcggggggcagagatccccagatctaggtgtgccctccaccacccacccgggatccggaggccgcagcgtcccccaccccccagcgacactgacggttcctgcaggcccgcagtggcgtgaaggtggcctttacctcctctcgcaggctgggagggggtgcagcccgcgcagctggcccagctgcagcagtcgccgccgcctccacccctctttgtaaaagaacgacggctcctggtggccgccccccattcataaaaaaaggagcggagcgcatgcgcgctcagggtgaacggcacgcgtgcgcactggcgctcc

SEQ ID NO: 8701 - DNA, 240 bp, Homo sapiens
  source 1..240: mol_type = other DNA
aagagttatttgtccagacagctgagagggaggacagagctgccacctctgcagcccctggctctggggatggcacagaaaaaggcctccctttcatccagcagcccaggattctgctcagataaaggcaggtcccctctactgataaacaaggaccacagagccctagggacgggtagccagctctgtggcatggtactggaggcaggccagcaacctgatgtgcatgccacggcccgt

SEQ ID NO: 8702 - DNA, 344 bp, Homo sapiens
  source 1..344: mol_type = other DNA
cccttcagaaggcacatggatggcttccccacacccccatgctctgtggggagtgtggggaacaaatccatcctctctacaccctacccagaggaggtaacaggtcgatctgtacctctctacctgaatcatcaggtgagcaggcttgtgtacatacatgggagtgcatgcgtgcacacacacacacacacacactcacaattattggaaactattaatcataagagttatttgtccagacagctgagagggaggacagagctgccacctctgcagcccctggctctggggatggcacagaaaaaggcctccctttcatccagcagcccaggattctgctcaga

SEQ ID NO: 8703 - DNA, 264 bp, Homo sapiens
  source 1..264: mol_type = other DNA
atcaaccctaagggttttgttttccctcttatgaagtgaaaacaacagtgaaatgtctctaccctctccaaagcttaggtgaggagcctttccaaacctggcagcggtgttgtgaggattagcatcttgccaggcatgacattttcaaaactttccattcatgtctgaagaggaaggattctcaatgttgtaagttttacggggctcccatcctggtgttgaaaagaggatctttgcatctaaaatagtgtgttttgtgtccag

SEQ ID NO: 8704 - DNA, 398 bp, Homo sapiens
  source 1..398: mol_type = other DNA
gtcctgcggtcgaatccattcatttattctacatttatgcacatagtaagtgctcaatatctgttattaaatgccagcccagtagactgtcatcaattttaagatgcaaataacatttttctgcctgttgccccgcagtgcagggcaggcggtggtgaactgcagcccaggctcttcggcccccaggaccagcagactcgccatgcgtggctcggattcggcgggggcgggtgcacagcaacgctcacccctaggtttcggggtccgctgcggacctaggcgttggcgagggccacgcccccagccgcagaccctgcctccaggcaagaccgcggaagggccgggcgtcctcgggcggcctgagggtcgggcaggggagggggcccggcggggaatcg

SEQ ID NO: 8705 - DNA, 733 bp, Homo sapiens
  source 1..733: mol_type = other DNA
ccgctcgctcgcccaggccgggctgccctttcgagctcgtgtctgtgacgggagcccgagtcaccgcctgcccgtcggggacggattctgtggggagacgccgcagccggagcggccgaagcagctgggaccgggacggggcacgcgcgcccggaacctcgacccgcggagcccggcgcggggcggagggctggctttcttaaataggggctctccccccacccatggagaaaggggcggctgtttacttcctttttttagaaaaaaaaaatatatttcccttcggcgcggacggtggcgggcgagcggctcctctgccagaaagcgaggcgggagggggccggggcgcgctcgctcccccgaggtgccgctgggaccggagacaactcgggggccgccgcgggagcctacaaacttttattgaaagggcagcgcgcgggtgacagcgctggcctcttcctctccctccgcaggcgtcccctggccgggccgagggggaggaacctgacctcggacggcgagcggagccctgtcgaactgccgggggcttcgagcctctcattcctcgcgggtccctccaagggggtcgcccgacacccgttttcgtggtgaacgctaagccgcgtctgagtgcacgccaccccggcgcgcccgagcgcgagcccgggctccggggaggccccggcggcgcctggcttgaggagggcgtgcggggcgcgtgagggtgcacacg

SEQ ID NO: 8706 - DNA, 738 bp, Homo sapiens
  source 1..738: mol_type = other DNA
gcaactcggcccggcggcggcggcgcgggccactcacgcagctcagccgcgggaggcgccccggctcttgtggcccgcccgctgtcacccgcaggggcactggcggcgcttgccgccaaggggcagagcgagctcccgggagccgcgcgccgccccagagagaccaggtcggcccccgccgctgccgccgccaccctttttcctggggagttgggggcggggggcgaagcgcggcgcaccgggcggggcggccacgccaggggacgcgggcgtgcaggcgccgtcggggccggggtggcggggcccgcgcggagggcgtgggggcagggaccgcgggcgcccctgcagttgtcgttccccgcggccgccgcgcggcccctcgggcggggagcggccgggggtggaggtgcgagtgtgtgcgcgccgtggcgccgcctccacccgctccccgctcggtcccgctcgctcgcccaggccgggctgccctttcgagctcgtgtctgtgacgggagcccgagtcaccgcctgcccgtcggggacggattctgtggggagacgccgcagccggagcggccgaagcagctgggaccgggacggggcacgcgcgcccggaacctcgacccgcggagcccggcgcggggcggagggctggctttcttaaataggggctctccccccacccatggagaaaggggcggctgtttacttcctttttttagaaaaaaaaaatatatttcc

SEQ ID NO: 8707 - DNA, 675 bp, Homo sapiens
  source 1..675: mol_type = other DNA
agctcgctggaggttggttgaacttggcaggcggcgcctccttctgccgccgccgccgcctcgcagactcggggaagagggtgggggatctcccagtgcgagagcgcggcggcggcagctgaagacccggccgcccagatgatgcggtggtgggggacctgccggcacgcgactccccccgggcccaagcctccccagagggcgtgtcaggccgcccggccccgagcgcggccgagacgctgcggcaccgtttccgtgcaaccccgcaactcggcccggcggcggcggcgcgggccactcacgcagctcagccgcgggaggcgccccggctcttgtggcccgcccgctgtcacccgcaggggcactggcggcgcttgccgccaaggggcagagcgagctcccgggagccgcgcgccgccccagagagaccaggtcggcccccgccgctgccgccgccaccctttttcctggggagttgggggcggggggcgaagcgcggcgcaccgggcggggcggccacgccaggggacgcgggcgtgcaggcgccgtcggggccggggtggcggggcccgcgcggagggcgtgggggcagggaccgcgggcgcccctgcagttgtcgttccccgcggccgccgcgcggcccctcgggcggggagcggccgggggtggaggtgc

SEQ ID NO: 8708 - DNA, 591 bp, Homo sapiens
  source 1..591: mol_type = other DNA
tcgggggtggggcctgcaccgggaacttggacgcgggccctggccggggctgctttccttaatcataataataaaaaaaaagtgcaaagaaatccagctcgctggaggtttggttgaacttggcaggcggcgcctccttctgccgccgccgccgcctcgcagactcggggaagagggtgggggatctcccagtgcgagagcgcggcggcggcagctgaagacccggccgcccagatgatgcggtggtgggggacctgccggcacgcgactccccccgggcccaagcctccccagagggcgtgtcaggccgcccggccccgagcgcggccgagacgctgcggcaccgtttccgtgcaaccccgcaactcggcccggcggcggcggcgcgggccactcacgcagctcagccgcgggaggcgccccggctcttgtggcccgcccgctgtcacccgcaggggcactggcggcgcttgccgccaaggggcagagcgagctcccgggagccgcgcgccgccccagagagaccaggtcggcccccgccgctgccgccgccaccctttttcctggggagttgggggcggggggcgaagc

SEQ ID NO: 8709 - DNA, 516 bp, Homo sapiens
  source 1..516: mol_type = other DNA
atggcggcgggcggcttccgggacgcgcttccccaatcgtcttcagaggagccgccgtcagtctgagcgcggcgggaggtagcgcccgagcaggattaggtggagctgcggcagcccccgcccgtgtcaggagctggcaagcgatgtcacctgtgggggcgcaaaagttacctccccaaaaatcataatctgtgccgcacaaggtaggaggctcggtcccggcatcgtccaagccttcccgacgcggcgagctggggaagggagctggggcgggggcttcccgcacgggcacccctcgccccacttccccttggactgagggggaagctccttcgggggtggggcctgcaccgggaacttggacgcgggccctggccggggctgctttccttaatcataataataaaaaaaaagtgcaaagaaatccagctcgctggaggtttggttgaacttggcaggcggcgcctccttctgccgccgccgccgcctcgcagactcggggaagagggtggggga

SEQ ID NO: 8710 - DNA, 473 bp, Homo sapiens
  source 1..473: mol_type = other DNA
ctcttgtgaaatcataaattatttaagcagaggtattgtccccttaattatatacatatatatgtatataatatatatgtgtatacatatgtatacatacatgtatatataaatagaattcttaatcattttaagcagtgtacaaggataattattagcatgggctatttaactcacttttaaaacgtgtaaaacattattgactgttggtagtttaggggccaaattaacgaaagacatctcattctagtgcttgaggctctctagttgacttgtgccaagggacaggagaagcggagtctgccttctgggtccagacccttcataaatccagaatcctctggaggcggcccccgtagatcgtctccggacaagaggcttgctgaaagcctgccaagatggtggccgcggggacgggctggcgacatggcggcgggcggcttccgggacgcgcttccccaatcgtcttcaga

SEQ ID NO: 8711 - DNA, 384 bp, Homo sapiens
  source 1..384: mol_type = other DNA
tttagggggaacaaaaggtatgttaatattttattcatctccaaattaactataaattgtgcattcttgcatagatcctctgaatgcctaaaatcaaaataaaatttgtttttctggcacccaatgacaaaattgcccttgaacccaagtgcctatgcagacatttgagtagaggcgaatcacttagatcttctgataccaaatcactggaccttagaaggtcagaaatctttcaagccctgaatatgcacgcattcatttataggagagtcactgtatttctctccaaaaaaaaaaaagagacaggatcttctgatctgaaattttcttcacttctgaagctggcttcttctgaaaaaaggaatctgcgtcatatctaagtca

SEQ ID NO: 8712 - DNA, 362 bp, Homo sapiens
  source 1..362: mol_type = other DNA
tttggaagttttaatatattttcttaaagaagtctctttctcagcattgtaagacaattaactagattcaagtctcagagttgttaagttattttatctctagcttcatcattgccattgttctttaccatagcccatgggacaggtatttctaagtaagaaatgttcactcctggagcctgcattctagtgtgcattaagaaattcatgagtaaataaagataatttcaggcaataataattactcgagagacctccaatagcaggaggctgctctaggggtccttgactccagagtcattctggtccaattctgcagatcaggaggccgaggcggcttgccccgcatctcagaagccggg

SEQ ID NO: 8713 - DNA, 271 bp, Homo sapiens
  source 1..271: mol_type = other DNA
tgctaagcactcaaaatgttaataatgctgaagttcagagctatgaatgttactctttcaaagaattatggaacactaaagcaatttcacatgcatttgtacaggtgggtagatgtcactcattaggttgtaaagattaaataatacatacaaacactttagcacagtgcttgaatcacagtaaatctcctcctcctacctacgagtaagcagcaattgctacgcctgcgctttcctggttcgcagggcgcctgctaacacgcctgcgcga

SEQ ID NO: 8714 - DNA, 364 bp, Homo sapiens
  source 1..364: mol_type = other DNA
gttcacatattgttttaggcagaaccaaatattctaaatatgtgttttcactgcaatgtagactaaattaattgccaaagatggcctgacattgcaaataatctgtaataaaagagaaatggcaaatattccttataaatagaaacacaacaaatattttttcagaaaatgtatattcttttaagttgcgacaactccaccttaaagtaacaacaaagatgatttttcaccttagctgacaaggcgactgcttccttgcctgcggcctgccagacactgtgccacgggcctgggtcactcacgccccgttgctacgtgtcacagggctccggggcacgcccgctcgcgcaggcgtgttagcagg

SEQ ID NO: 8715 - DNA, 331 bp, Homo sapiens
  source 1..331: mol_type = other DNA
gcctgacattgcaaataatctgtaataaaagagaaatggcaaatattccttataaatagaaacacaacaaatattttttcagaaaatgtatattcttttaagttgcgacaactccaccttaaagtaacaacaaagatgatttttcaccttagctgacaaggcgactgcttccttgcctgcggcctgccagacactgtgccacgggcctgggtcactcacgccccgttgctacgtgtcacagggctccggggcacgcccgctcgcgcaggcgtgttagcaggcgccctgcgaaccaggaaagcgcaggcgtagcaattgctgcttactcgta

SEQ ID NO: 8716 - DNA, 341 bp, Homo sapiens
  source 1..341: mol_type = other DNA
acatatattattcattgaccaagatgccttcctgaaactctaatgccagagtcctcttgggatgacttgggaggggctgggggcacgtcctgcaggtatcaatttcttacaggtagagagagtgtttatgtatctacctatttacatatatattcatatttatttatttgctatatggtttaaatcaaaggattaaaaaaaacactgtgtagtttgaacactcctgtagatttttcaaataaaaagtcagttgtgtttatctcacaactgggagggaagtggctgcgcagcactgcgtccccgccccaagccccgcgcgcctggcaatcgcgtgcccaccg

SEQ ID NO: 8717 - DNA, 415 bp, Homo sapiens
  source 1..415: mol_type = other DNA
atgccttcctgaaactctaatgccagagtcctcttgggatgacttgggaggggctgggggcacgtcctgcaggtatcaatttcttacaggtagagagagtgtttatgtatctacctatttacatatatattcatatttatttatttgctatatggtttaaatcaaaggattaaaaaaaacactgtgtagtttgaacactcctgtagatttttcaaataaaaagtcagttgtgtttatctcacaactgggagggaagtggctgcgcagcactgcgtccccgccccaagccccgcgcgcctggcaatcgcgtgcccaccgccggagcgcggcgtccccgtgcagtcctggccgaggaggacgtgactcggagctgcctccgctttctccaagccatattcctttaagatgatgtaat

SEQ ID NO: 8718 - DNA, 429 bp, Homo sapiens
  source 1..429: mol_type = other DNA
agatttacacaaggctagggttttgccagaccccggctcatcagcagagctggtgtttcctccctgcggaatccgcagtgcccactacagcgctggggcataggaggcctcagaaccgtgtgttggttgcagtaattagcgagcaaaggatttggtgcactaaaagcctcagaggcagctgcctggtggcatgagtaatgctggtcacggtgcggtttcctggggcggggcgtgatggctcccaggcagagaagcttttctcggcaggcgcggccgcgggagggcaccagggccgctctggcgccgccagcgtggagaccgcggggccccgggtgctctgggagcgctccagcgcctcccgcgctctgtaaccccaggccccggactctggcagtaggggcgtgggcgtggccgtttcgaaagtttgaa

SEQ ID NO: 8719 - DNA, 348 bp, Homo sapiens
  source 1..348: mol_type = other DNA
gatcatctgcaagatgaaagtaaagaatagtttagtttattattcacttaatcggatacctttgtaattttacatgaaatgtattatcgataaatcaaaaaatagaaatataggcataatctgttttttgaaaaatcacgtatgtgtatatacgtgacactagttttttaatttaaacagattgagcaaaaagactcttatctctaaattcagagattgactatgattttaccttcccaggaaatccttatgaagatttaaaataaacacaatcactttggtatgtttataataatcttttcccagaagcaattcagtaaactgcagtgaaagcgttaacagggctgg

SEQ ID NO: 8720 - DNA, 327 bp, Homo sapiens
  source 1..327: mol_type = other DNA
ggtcggtgcttaccgaagccctggcacttgttcatacatccaaaaggaaacttgtttctggaacaagtactgttttcagagttatctgcttcatttgaaattgagaacaatgtcaaagtaactcattgtctctgagcctaaggaaaacaatttttggaaatgggtttctagtggaaatttttcttgtacattgctagaatcataattctacatctgcatgagattcagataaacttacccacctaaactaatctgcatgtggtgctttccccgggcagggggtaaaggacctcttcccgccctggctggtagagaggggttgggagc

SEQ ID NO: 8721 - DNA, 334 bp, Homo sapiens
  source 1..334: mol_type = other DNA
tgccaggacggctggcttccttggtcccaatcccagactttgggaggttgggccaccctaggccaggggcgttgaactggtggaagacccagtgctctttcagaaaacaggccaagaaagcgctttttgctctataacccgcctatctcttttaaaacaaaatagcaaaactagttatctttttcagctcacaggctgtgccccaatgctccatctagtggcgtgatgggaaaatgtggtcagatgacttccccagagcacctcgggaaacttctcaggctacaatcacagggaaagagccccattgtattctgtgcgggtcagacctagtcat

SEQ ID NO: 8722 - DNA, 565 bp, Homo sapiens
  source 1..565: mol_type = other DNA
ttataggcttttcctaacaacctttaaatgctttgaagttcagaaccctaagggtctgatgaaaagaatatatgatataattggcagtatcctgctttctaatgtaatgtcaaattatgattgaaattttgcctaattttttgtcttaggatatttcctaataacatgtgccagaggcatgattcagagtgaccaggcaagccttgccactttcctggcattatcaatgaagttaatggaagagcagagaatttctagaagttctgaaaaggctttgaggcttgtgacaatctaccaggattcaaatacaatacctgcgctgaaagactttttttcttggcagaaattttcagccttctgaatcttccaaggaacggtcaagtggcacttagctagataaatgtttactagaggcatctcttaaagagttttccaccaaagataagtctttttcttccaatatctccctacagattagtaagatgaatgtgtccacagttaggtgtatacctgtttttaaagaaaaaagatgtctgttcctcaggttccagaatattaagggaac

SEQ ID NO: 8723 - DNA, 345 bp, Homo sapiens
  source 1..345: mol_type = other DNA
gcgcggtggcgcgcgcctgtagtcccagctactaaggaggctggggcggaggttgcagtgagccgaaaccgcgcgaaatcgggatcatcctggctaacaaggtgaaacccggtgtggtggcgcgcgcccatagtcccagctcctcgggagcctgaggcaggagaattgcttgaatccggcgccactgcactccagcctgtgtcaatacgcggttatacaatggccactgacagtaggcaaccagctctaccgggtgaaaaggttgatggcactcgcggcattctgcgatcccgcactgcatcatggactttgtagttcaacatgccaactacaattcccggcggg

SEQ ID NO: 8724 - DNA, 602 bp, Homo sapiens
  source 1..602: mol_type = other DNA
ctggcaattgcagggactcagtatatgttattgggtaaacattttaacatcagtgctaaatcagtgatttcaaaacaagaatttctcacctactagaaagtaagttgactatttcagtagtttctaatttgtcttaaaaatttttttgtaatgaattttagatatacaatgaaaagataattaaaaacaaactattggagtcatttttcttcctaaataaagcaacatttattaatagtactagcaaaattgaaatggtcagccttttacatccgtgcgccacgttttaaaaatgacgattactggattccaaggcatggttgtcagaaacataaaaaaagtaaaattttgcattctgtgcaatgtgtcgaacgtgaacgtattgcacgttgtgttgcagatttactacagctgagtcatttcgggacctgaggggctcgccgggttcccccaggcactcccagcagcagacaccggtattccgcggcgggcggcggcgtggtcaaaaaaaggcgccgctgcccctttaagaggcaaagcacctttactgggtaccgcctgccggcggggcgagcgagcctacctcagccttcgggctaggt

SEQ ID NO: 8725 - DNA, 451 bp, Homo sapiens
  source 1..451: mol_type = other DNA
ttaaagttgtacctttatcaatatccattttgttagaaaacagggctctattcaagtgtatcattgtacatgtctagacttaactcattttgtataatggatacaaatatcctttaatcaataaaagtaattgattttgcttgaagtttataaaattaaatggataaaataagtagattattgggatcccaaccactcatcttctgagatacaagtttggaagtcagttcttagataaccttcttattaaatatcgactctttttcagttaagtgtaactacaagttcttgcccaagacttttaggatatattaataaagagaggagtatgaaatatggatagctagataagtttaattcaacattctcatgttttctatgtgagaaaataaatatagtttaagaacatgaaatatctgatctctttgttttctgtttttaataactcttc

SEQ ID NO: 8726 - DNA, 249 bp, Homo sapiens
  source 1..249: mol_type = other DNA
gcctcttctagaacaagtaatgttcttttaattgattatacaactcccagtgcttaagcttgcatatattaaattctttaattctattcagaaccaaattaggtattttaaatgtgagtatccaagttagtactagtatctgcattggccaagctgatctcgaacttttgacctcaggtgaccgtgcccggcagtagctgggatacctcaggtccacagttctggattacaggtgtgagccactgccct

SEQ ID NO: 8727 - DNA, 322 bp, Homo sapiens
  source 1..322: mol_type = other DNA
cacggccaggctggtcttgaactccacgtgagccaccgtgcctatccatgtgctcacagagataacaaattttcactatctttaatttttttcttggatatgacagttttcatacctgcatatctcattggatagaaaaattctgtgtaattaatagctcactttagataaaattagcacgtagttttctccacttaagatcataaaagatggagattatatatactacttaattcttattcttttcttagttagaaagaatcccaggaacatctcctctataggacagcccatgtactctcgtgaacatggtgctgctgca

SEQ ID NO: 8728 - DNA, 616 bp, Homo sapiens
  source 1..616: mol_type = other DNA
tgtacattctcaccatatgctccaagtgttttatggaaacatttggcaaatgcttcaggaggtttagcaatgattttgctagatagactagaatgaaagcccaaataaaaaagaatctcttctattatgttttttagaacccccagttctataaatgaggacctttgataggaaagctatagggatggctaaacttctacttttctgaaattcccctattggaatttgctggggagaaaaaaatgtttaaaaattagtaccaagtaacatttgaaatggcatttgtttaatgtttaagaataagcagatgattcaccttttttctaaggtttgagtctatatatgtagatatcaaagccaaaggtcaatacctgtattaagaatatttcttgtcctcatcatgacttttgtaagtagagcaactctacttagaaaaaaaattatttcttcaaccaagacagtaaaccatgggttatcctaggcaaaccagaacatatagttgctctaattaaaagggactttattttttttagatgttatactttttaaataacacagaatttgcagaaatcattagtaaatttgagtgcaaacttgtatgttcttctaatatata

SEQ ID NO: 8729 - DNA, 472 bp, Homo sapiens
  source 1..472: mol_type = other DNA
aatgacttttacacagttgtgaagatccacagcaatgacatggatattcagaaattttattttggattataatctactgataaaatttaattaaatgtcaaaatcacctgtaatcttttaagaaatatttgtaattaaaatacccttttgctttcaagagtggtcttggaagaaaaatatgtttattttaattttaattttttttttttttactagttcagtgaaaatcacaacaaactgtgtgttaaatgctacagcaatggtagctagctctatagtatggtctttttaaaaatttttataactcagaatgtaaaaggctttctattaataggcctgacttagtcatcaaccagcacctggataaataagtgatgttttgatgttttttccctcttttgaagcttcagttcagtatagttacacagaagggtttaaaaatgtctgaaattcttttcctaaatttaaacca

SEQ ID NO: 8730 - DNA, 609 bp, Homo sapiens
  source 1..609: mol_type = other DNA
ctatataggtaattattgtagtgtttgcagatacatctactttgtctaagattttagatttttatataagatttggaatatcagtgtcgaagctagtatattctcacaaacaattggatggatataaaaacaaagatttaggtgtttggtcatttattttcctaattttttatagaataaaattaattttaatttatcagaaatgtatctcatagtcttttttaaattttctgtactaaatgtccacattattttcctgatgatattagagtagaaatctcctattaaaagtagcaaaattagcaggggagaagaattcatattcatttacaaaaatattttgggctttttttttctaaaaagtattttactaacctctctttcttcaggaaacagaaacctcagatttgtttttgcctgatgtgagtataatttttaggaatattgtttagaagaacaacttttaaaaattatttaaaagaagtcaatgagccaaaaaaaatttttttatttttcttttcaacacagtaggttcaagaacagcaagtttgctatttaaacacaatgacttttacacagttgtgaagatccacagcaatgacatggata

SEQ ID NO: 8731 - DNA, 451 bp, Homo sapiens
  source 1..451: mol_type = other DNA
ttaacttctcatttttgaatcttaaaagagttaacgtacctacatactccaagtaaaatttatctattagtattattttaatatttttacgactttaataaaagggctctttgcctttgaaaccccaaatccaaaacttttttttttgttaattagaaaaactaaataaatattcagaattgtctggtattctgggtgtgctaatttcagacaagcacaaagaggcttgccttcgccaatttacctttttgggaggtattcttgtaattaataatatattatttaataacatggatatggaaatagcggctttccacagcctgtgcaatcggtttgcccaggtcgattttgattggcttgcccagtggaaatgctctccggccaatatggctccacaattggctctcctggaagccgacagcttaccgcggcgggcgaaagtttgaccaac

SEQ ID NO: 8732 - DNA, 540 bp, Homo sapiens
  source 1..540: mol_type = other DNA
gtgtgtgtgtgtgtgtgtgtgtcagagacaaagagagagatgaattctatgcaaaacaacatcatctatagggtttgtttgtttgcttttgccccagacacaaactgttagcatttttctatgatattctaaaccacatgcctaataatgaaagtttagattatttccaatatttgctatactaattctgaaatatataaataatgtatttggttatgttatagactctaaatcatgtctttggttatgttttagaacaagtttctaaaagtagcttacttaaatggtatgaacaattatgtttctagatgataggactaaattaccttctaaaatggctatcccaaggaatacctttgtaattacggtgcttaagtttatcctaggaaacttatgtggggtgaagatcaaaaaattcttaaagatacagccattgaattttaatttgatcccattggagaggagctcaattctcagcctacctatattaaataaaattactttcatggttccagggcatcatttgatgacaaccagtat

SEQ ID NO: 8733 - DNA, 379 bp, Homo sapiens
  source 1..379: mol_type = other DNA
ggttgtttcataacaatagtaatctcattttctttcaaaagtagagtttgaaatttttctacattttcttcctagttgaagtaggaagacaggtctcttttctctctgtgggcacgacactcctctgtgtagacgggggaaccagttgcaaagttctggcccctgatccccctcctattcctactagagggcttaagataggcgagcgcgtctatgcgttccacctgaacctgcaagctagtcgcttgctgcccaggtgccgattcgcggctgcatgcgccccactgcagcaaagagcagccgcagcctctgcctcggccaccactgctgctgggaaagagtcgtgggcggttgggaggagcctcgcctttaatgcacc

SEQ ID NO: 8734 - DNA, 366 bp, Homo sapiens
  source 1..366: mol_type = other DNA
gaatgcagcatgaaggacattttcttcattatatacaatagtgtctttgaaaattacttatatcttgtggttggttctctctcatttgaaatctcagtgagagttttggatggagagtgaataactcagaactaagttattgcttcactgttaaacagaatctatctgtgaaacctattgtttgggctttagtattttaaaaaatagaactaaatctagattaagcaacatttcattgcactgtactttaatatcatctgatctttcagctaaataagagattttctcttgcgaaaagagcaggcaggactgacttactcagcaaatcctgttcagaggagcttcagccaatgaagaggctatatc

SEQ ID NO: 8735 - DNA, 585 bp, Homo sapiens
  source 1..585: mol_type = other DNA
cttccgtgaccaatatagtagtgggtgtacacccacgctaaagagtgtacaccatttaatatcgcaggctgtgtacacacacactgtgaaattgtcgagggtgaggcacaccccgccatatggggagtaataggaccccccctccctccctggctaacgagccacatcgctggggtgtgaggcaccctcctgccatatggggaccccccctccacatcgcaggggagtgaggcttcccgccccccggcttttaggatccacatcgcaggggggtgaggcacccccggcgatatggagacccccccccccccggctattacgatccacatcgcagggggggtgaggccccgctgtgcgtcctggtggctccggacccggcccaagcgcggcgggacctccaggcggcaaacggaccccaggcgtctggcgctcacccaggagactgcccagcggtttctggagagagcgctaagcggagacgcccgctggcaagcagatcccgcctccttccctggccaaggagccgcccctccggggtagctgtgcgctgggcggcgctcggaccccttggcagccgcaggtgcc

SEQ ID NO: 8736 - DNA, 239 bp, Homo sapiens
  source 1..239: mol_type = other DNA
atattatatagaagctaagaaagggcttatgtgagccaaagggcttttgtgactctcaatgaagtaagagggcttctgtgtgcgtgtgcgcgcgcgccccgacgctgcgtcagcccgggaagcgagtgagccaagcgcggcgctactctgggcccctgctccgcgcgctagctggctgtgtggctcgctggctcgctagggtcggagcagcactgccgcctctggcgcgaaggctcagg

SEQ ID NO: 8737 - DNA, 515 bp, Homo sapiens
  source 1..515: mol_type = other DNA
ttagcaggtagctaaaggacaatgtattccatcgccgaagggccatggttttgcttgtaataacatataaaccttcgtctgctgatggggagcaatagcagttctactccaaatccatggctgcgcaccaggaacgtgtcttgagacagtttctttaacaagatactacttggatattttttaaatacatctggggaccccagcaggcccgccaggttgcagagtcggaccagtctccggcgtctgaaggggctgcgccgctgtttaccaccccgcgagcagcagaggcggcgcccagccctcctctcgaacaaaggcgcggccgccgcattcgacccgcgccatggcaggagagcgggtgccgggagggaagccgggaaccgtctccaggagctggctgggggcggcggcgcccgcaactcggccccgcggccgggagggcgtagctgatgctcccacccccgggactcccctcgcgccccctggtggctgtggagcagcctgactccgcagca

SEQ ID NO: 8738 - DNA, 160 bp, Homo sapiens
  source 1..160: mol_type = other DNA
gcacagatgtacataagtaaagtctgcatacatctgatattatatagaagctaagaaagggcttatgtgagccaaagggcttttgtgactctcaatgaagtaagagggcttctgtgtgcgtgtgcgcgcgcgccccgacgctgcgtcagcccgggaagcg

SEQ ID NO: 8739 - DNA, 386 bp, Homo sapiens
  source 1..386: mol_type = other DNA
ctgcatgttgaaaggaatttcggtctctatccaaacttacttttatcagccgtttgctttctaaaaaccttgttgcctggtaaataattgctattatgcgacataattttctccacatttgttgttatttttctgataataaatttcatactttttattggaaaaccacagaaaatgcaaaaaatagctaagccgttggtatgtttctatctagatttcaattaaattttaattatttggtcattgccatggcaaccagcagctgccgggccagcagcctctaccgcagcaggggtggggcactggcccatcctccgagagggaggaggcccaactggtgatgctgctgctgctgctgctgccgccgccgccgcctctattgctga

SEQ ID NO: 8740 - DNA, 361 bp, Homo sapiens
  source 1..361: mol_type = other DNA
tactggtgtcatctataatttatagttagaaacagaactcggaactggacattgcctgcatgttgaaaggaatttcggtctctatccaaacttacttttatcagccgtttgctttctaaaaaccttgttgcctggtaaataattgctattatgcgacataattttctccacatttgttgttatttttctgataataaatttcatactttttattggaaaaccacagaaaatgcaaaaaatagctaagccgttggtatgtttctatctagatttcaattaaattttaattatttggtcattgccatggcaaccagcagctgccgggccagcagcctctaccgcagcaggggtggggcactgg

SEQ ID NO: 8741 - DNA, 293 bp, Homo sapiens
  source 1..293: mol_type = other DNA
aaggccaagcttttaaaaacccgaaatcttttgtaaagggcaattaacatggtctttgccctagaaggagatattaactttattacattttctaaggtcgtttgttatataaacacccttaaaaagatagtctgaaacaaaggttatcagtaccttccagcaatgaaagagtaaccctttgaattaggtgttattattattttaatttccagatgaatagttttgtggttttaccctacttggaataaaattctttctagtagatacctgctcatctatccagaactacagag

SEQ ID NO: 8742 - DNA, 539 bp, Homo sapiens
  source 1..539: mol_type = other DNA
acctggaccagatgataaagtttagcatgtgatgtcatattaatagcatgtatccataatatctgatgagaaaggtatctgatctctttaatttactcatgagaaaaacatttttaaaaaattgagggatatttgaaaaaatacctgactactcctcgtaatgaaaaacgaggaataactgattttccttaatattttctaatctgtgacagaagagactaaggacaatcagtttcttagtctgttctgtcacagatcagagagactaaggaaacacaatcactaaatgtgatgttatatcctaaaatcacagtgaagtatagtgtttaattaatggtaatttttgaaaaatgtacccaaaactgggttagggatatccatacattttctgtacaaactttacaattttttgacaaatctaaaactatcctaaaatactttcatatttttaaaatagcaggatgcttcaacaagttgataatcatctaagtctcatgggtgtggttaccctcatgagtaagttctcacaaggtctgata

SEQ ID NO: 8743 - DNA, 347 bp, Homo sapiens
  source 1..347: mol_type = other DNA
cacaaagcctgtttggtggtctcttcacagggacgtgcatgaaaaaaagctttttcttattcttatgcaaatggtttctccaagagggagagaaacggctaggaacactggccagcctgccacatgtggcctttgggccatgagccccagtctcttccgggaggggagtggggcagagagctgctgctcacctgttcatcccaagagtgatggcgggatggggctttaccctatgtctttctaggacttagcttagaaattatgatttagcagtcatgtacctggaagttacaagattctgactctccttgcccctggggataacatcactattgtaaaacctgaga

SEQ ID NO: 8744 - DNA, 371 bp, Homo sapiens
  source 1..371: mol_type = other DNA
agaactccaggacttctgctcacaaatgaagttgtcctgaggccttacaattacgtatttttgaatgattttatcggatttgattgccaaagaatcttgcaaaaacaattttttccccaagctacgttcccattttagatgagaggaccaatatcctagattaaaaatgtcaaatattgaatcccaggtttttcaaaagacactctgattttagatcttaagtttctagctcactgaacatcatgaagctgactctgtattataccagagtggcctccagagttcatcagctaatgtgattctccaaactttaaatgattagaaaactggaggagaaggtttggcaggtcctcaatgggcatataaatatg

SEQ ID NO: 8745 - DNA, 345 bp, Homo sapiens
  source 1..345: mol_type = other DNA
aaaataaaagtaaaataaataagacagtttatgttgtcgttttctgtttgttttgagacagagtctcactctgtcacccaggctggagtgcagtggtgtgatctccgctcactgcaatagttgggattacaggtatctgccactacgaccaggcatgcccatgttatcaatgctggccttgaaactagcctcaagagattcacagaaccctttatagatacaaattttaaaaatcaagagggtttttctttccctatatgtaaaatgtttggtttgaatgatagggtatgtctcattagtacagatccaaaagcaacatcttgtgcaacaagccctataaatgga

SEQ ID NO: 8746 - DNA, 274 bp, Homo sapiens
  source 1..274: mol_type = other DNA
gaagttctcctggataatatcctgcagagtgttttccttctaaatttttttcaaagttttcaacgagtaatgtgaggaactgtgttccttgtaacagacaggaccctcagctgcaggtctgttggaatagctggggggtgcctcccagttaggcgaggaggcagtctgccccttctcagatctgtcagatagggacatttaagtctgcagaggttacctgccccaagaggtggagcctacagaggcaggcaggcctccttgagctgtggtgggc

SEQ ID NO: 8747 - DNA, 421 bp, Homo sapiens
  source 1..421: mol_type = other DNA
agaagaaactttctctagaaaaatgttacatttacacatttataattgttaacaacttttttcttttagagaaaactgattgagccaaatttttcaaacatcataggctatggaaagttaaactgagtctccaatgtttataaggcttcagaatataaaatatcctgcagattgagaagttttaaaagtagttacatacaagttttatttttccaacaacattagaattttgccaggttatcttttagggtcgttcaactctaacatatatatgagtctgtgacactctggtaggacaaccaatctgtcggagccagtcagaaacatgtttgtctacgaacgtattcggttattatataggattatagaatattcaactgaaagaacattcctactttagaaatagatattctctgttcaa

SEQ ID NO: 8748 - DNA, 516 bp, Homo sapiens
  source 1..516: mol_type = other DNA
gtgaattccaatgccttgacttacatgaaagattatacaatgaaaggctgtcagctattatattcttactttggaatcaactttgttcctgtagttttaagtaaaaagagttggcagaaattctactgctaagatctctaaaagtgagctcttaaacatatttgcttatgttctaatgtcacattctggagctcagaagcagcagctggatgagctccagctgtaagggtacttgttttgctatacagaatatttgaggctaggtaaattataaaggaaagagttttttttttttttttttttttagctcattgttctacaagctaagttcaagagcataaagctgaactcaattttataacacctgctttctggtaagtccttcaatagtgagaacacattaatctattcatgagaaatacatatattttggagatcaaattgcaacatgacctttggcatgtttaaatgccatgtggtttggcatgtgcttttccttgacaaatgaagcaaata

SEQ ID NO: 8749 - DNA, 445 bp, Homo sapiens
  source 1..445: mol_type = other DNA
ttttaaggtttttcagtagtgtctttgaatacttttattctgtaaaggactttaagatgatttccctcatgatattttcaatatgaaagatctcttgcaattaaattggccatgaaagataatgtgattcatctaacttttatatgaaaagtaaaaggaaatatattgctcatttcaaaaattcaattcaggagaccagcctggccaaggcacctgtagtcccagctactcgggaggctgaggcaggagaatcggctaagattgcaccactgcactccagccaaaagaaaattaaattcagtaactttaaaaaacaaatttttgttacaaattaaagaaaataattgacttccctatttattttgacttataatgatttaaaaattaataagctgattcctgctcagaaaatgcttcttctaggactctaaaaatccaagtatcc

SEQ ID NO: 8750 - DNA, 459 bp, Homo sapiens
  source 1..459: mol_type = other DNA
tgattcatctaacttttatatgaaaagtaaaaggaaatatattgctcatttcaaaaattcaattcaggagaccagcctggccaaggcacctgtagtcccagctactcgggaggctgaggcaggagaatcggctaagattgcaccactgcactccagccaaaagaaaattaaattcagtaactttaaaaaacaaatttttgttacaaattaaagaaaataattgacttccctatttattttgacttataatgatttaaaaattaataagctgattcctgctcagaaaatgcttcttctaggactctaaaaatccaagtatccctataatggctaccagtagaaaatgacattctctattaataagcgacacacataattgtcccaatttttaagattgatggttttaatgtgttggcaggccccattaaatgcataaactgcataggactcatgtggtct

SEQ ID NO: 8751 - DNA, 247 bp, Homo sapiens
  source 1..247: mol_type = other DNA
taaatcagaagctttcactggagtctaaagagcttggagcaggaaaatgaatttatcccaacttggaagaatagaacttttccattaggcttgctcatgctgaagcttaatataagctaataagtagagaaaaactttattgggttacccaggctaatagaaaatctgagaacctccaggtctgtctcttcctgctggaacaggacacatcagaggggttggttccggagagggatcaatcctggaa

SEQ ID NO: 8752 - DNA, 532 bp, Homo sapiens
  source 1..532: mol_type = other DNA
gtatgggggaaactgcctccatgattcaattatctccctcccacaacatatgggaattatgggaaaatgagaactccttgagaacgaactcaacttcaatagtgatgactctgcccacttggcatccacagtgaaggcaatgtaagcttgagtaagaaacaaagttttgttttaattcacagaaatcttgtggttacatgttatcacgacataaccaagccttttggattgataaaggcttccaagattatacaggtagaaaatatcagaagtattatgttagtgcttttctctaatcggggtttaatagattctgtttgagattttcacttatttcataactaagtcaagaagctcatacttagtctcttctagttcatgaagtttagaattcttaacagtcccacctttggggaagatagaaaatacttcttacctcaaataatcaaatcattggtcagataagactgtaacacagcccagggtgtggcaccgtgctttgagatcctctggattgcatatatataaacat

SEQ ID NO: 8753 - DNA, 273 bp, Homo sapiens
  source 1..273: mol_type = other DNA
ttaaataggaaatcctgtagcatgatgccactttaaagtagttttttccaattctgtgaagaaagtcattggtagcttgggcagtatggccattttcacgataatgagcatggaaaagttggattcctaggtatttctgaagttgcgtatcagcttaaggaggagtggtgagagaaggcatccctgtcttgccagttttcaaagggaatactttatgattatcatagatagctcttattattttgagatacatcccatcagtacctaatttat

SEQ ID NO: 8754 - DNA, 488 bp, Homo sapiens
  source 1..488: mol_type = other DNA
tgcagtgagctgagatcacgccactggtcagtttttcatggactgtggcatattcaagataaaatacagtctctaagacagagtaaatgctcattaatatttatgagatgatcaaatgaagatcagagatagtatgatgatcttgtccccagatcataccagaataagtttcagctatctctttactttagaagggaaataaatgtgaaattcagccttagatactaatacttccattagtagtataaagtgtgcaagagcttcttccagagttttctcatagtcactctacttttgtagcctttattaaagaattcaaatgactcatggtttaattaaggaacaattaaaacttattaaaccattctattgcaagttattgtatgaaatgaaaaatgccactgtacgtaattgtagttcaaaatggcatgtgcaattacctgtcatactacttagaaattgctatttcacaattgaggcaggaattc

SEQ ID NO: 8755 - DNA, 369 bp, Homo sapiens
  source 1..369: mol_type = other DNA
aagaagaaatgggattcccaagccttcttcagctttttcttctccagcagaatagcctagtcaatgcctaactttcctaagaagtatttgtatctatttaaatctagggattttagcccatattaattacatgtatattagggcaagatctgaatttcagtcgcgagacattgtgaaaatcaattacactctctgaagacaattcttatccattaaacaacagaaaaggtgattgtttttaatgacactcatgtgaaattcctttggactgtaaaatactattacttacctctcaaaaaaaaaaagttctctatttttagttgaatgattcacacggtggagactggttccgacgtattccagcccccg

SEQ ID NO: 8756 - DNA, 592 bp, Homo sapiens
  source 1..592: mol_type = other DNA
aataaatgtgccaaggcatatttaaatgaatctgaatgcacctctttaaagtaccaacattattaaaatattcctagacaatttgacaatcaaggtgttaactcccatgctgatcaatagaacagaaaaccattttcatccttctctaaagcttattttaaaaacaaaatatgcatgtgatgcaaaagtgaaataccatgtcaatattgagagggagaagggatgtttcattctttcgactaatctaatctctgactttataggtgagagaatgaaaattttaaagattgatgcaagtttatagaaataatttggggcagaatcaagattagaacccaagaatctgaaagaaccacaagctcctggagctggaagaggttttgattcctcatttaatgatcacacgttacatatgaattaaagcacaatactcatgattcctggatttttgctctttctaagtaatgcatatttatattatcttcagaagttgattatccactcatcttgagaaaaagatgttctgtgctttttgcacagaacaaattaatatttttattaatttgaatgtgatgtgaaataaacattgttt

SEQ ID NO: 8757 - DNA, 575 bp, Homo sapiens
  source 1..575: mol_type = other DNA
agcagcgctccggccagggagggcgcgtgctggccagcccggaacgggtgagatcgctccagcccgcctctgtgcccactcccctgtgcgccctgccggcagagcggcacccccgctgtccctggcgcccagtgggggcggcagcgggcagggcagcggggaccaccggggctgggggctgttgagcccgtgcgagcccaggtgatccggggctggggtcctgcgcccgcagcccctggcccgcgcctcacgctcgccggctccccagcgcgggggctggagcccgcacccgagggggcggcagggagggcgcaggcagcggctgggagcgcagcggcagcggcggcagcagaagctcggctcagcggctgggggtggccgctcgaatctgccagggcacctcgctccctcgcctctggcagcgggtatgtgcggcaagtgcgccgggggtcgggaccccaggagcccacgggtgccggtggggacgcggcgggggcggggactcaggacacccggctttgcggcagggttacaacgtgttgtgcatccatgtgtgttagagagagagagacaag

SEQ ID NO: 8758 - DNA, 484 bp, Homo sapiens
  source 1..484: mol_type = other DNA
ccgtgaaggaaggcgttgaggaaaaatatttttcactctcaggtactgcaactcactaagtggcatggaatcattgtctctggaaaacttgagtcttatatccaaggtgtctccctgctctggcagaggcagaggctttgaatcaaggtcacccaggagcctgcagtcagcccagggctccttagcagcgctccggccagggagggcgcgtgctggccagcccggaacgggtgagatcgctccagcccgcctctgtgcccactcccctgtgcgccctgccggcagagcggcacccccgctgtccctggcgcccagtgggggcggcagcgggcagggcagcggggaccaccggggctgggggctgttgagcccgtgcgagcccaggtgatccggggctggggtcctgcgcccgcagcccctggcccgcgcctcacgctcgccggctccccagcgcgggggctggagcccgcacccgagggggcgg

SEQ ID NO: 8759 - DNA, 311 bp, Homo sapiens
  source 1..311: mol_type = other DNA
agttggtcaatttaaatttccagttcacttgagatgtgcttacaatcgttaagttaataatttttaagattgtctttgcagatttatttactttcagaagttaatcactggcccttgagggggtgaattattcatccgtgaaggaaggcgttgaggaaaaatatttttcactctcaggtactgcaactcactaagtggcatggaatcattgtctctggaaaacttgagtcttatatccaaggtgtctccctgctctggcagaggcagaggctttgaatcaaggtcacccaggagcctgcagtcagcccagg

SEQ ID NO: 8760 - DNA, 337 bp, Homo sapiens
  source 1..337: mol_type = other DNA
ctgaggaaatcagcagctgttgaagtcacctcctgtgctcttgccaaaaagggaatacatacccagatggagacatccgtgtctgtgtcgcccctctgccttgagacctcaagccgcgcaggcgctctggggccagccagggtagccgggaagcagtggtggcccgccctccagggagcagttgggccccgcccgggccagccccaggagaaggagggggggaggggagggaaaggggaggagtgcctcgccccttcgcggctgccggctgccattggccgaaagttcccgtacgtcacggcgagggcagttcccctaaagtcctgtgcacataacg

SEQ ID NO: 8761 - DNA, 422 bp, Homo sapiens
  source 1..422: mol_type = other DNA
ttttcttttagttttatttttaattgacacataataattctacacatttatgggctagaatgtgatgtttcaatatatctatgtattgtgtaatgaacaaatcaaggtaattatcatatccatcatctcaaacatcattgtttttttgtggtgagaacattcaaaatcctctcttctatgttgaaatatacaatacgttatgctgggcttcatcaggtgatctcctggattttcctgcacaccagcagctggggccagtgaggagctggctcattgaagcagtcttgatctgggaggagccctgttccccaggcctgacagtgcaggagctgtgggcctgcaggctgggctgggctgcccctcccaccctccctgggcctcctaggctcggtccctcgtgtgccagggaggagggatgtccc

SEQ ID NO: 8762 - DNA, 286 bp, Homo sapiens
  source 1..286: mol_type = other DNA
tttaaaatgcaaattacatgtcactggaagtgacatattccttttccaatatatttctctgttaatgatacccacatttatattttaaatccctatcattcttatgaattccaagttagaactgtctatttggtatcttcagtatcaagtactgaacaggccaaaacatttggaatttagaaatcctgctgatctacctggatgtagccagaatcagaatacttctcatgaccactgctaccagcaatttcacttagagtaaaagctgggctctgaacgcagccaa

SEQ ID NO: 8763 - DNA, 340 bp, Homo sapiens
  source 1..340: mol_type = other DNA
ttcagcactcaaaagtcatgcttctatgatcatgaatttggaatataaacttctacaatacacacgtataagtgtaatattaaacccagaaaatggttgctctgtcaacaaatatttattggtagccactatatgaagagcccctagactgcgccaagcttgccagagcctgtcttcctgcaaagccagcaggatcgagggagggaaaacaagcgctcaagcactccctcgttggtaggacacaaggcctcgtccacaaggcctcctagggcccaggcagaagcccggcggggcggggcctcggacacgcgccggtgcgtccagcaggtggcagcagcga

SEQ ID NO: 8764 - DNA, 426 bp, Homo sapiens
  source 1..426: mol_type = other DNA
gaatataaacttctacaatacacacgtataagtgtaatattaaacccagaaaatggttgctctgtcaacaaatatttattggtagccactatatgaagagcccctagactgcgccaagcttgccagagcctgtcttcctgcaaagccagcaggatcgagggagggaaaacaagcgctcaagcactccctcgttggtaggacacaaggcctcgtccacaaggcctcctagggcccaggcagaagcccggcggggcggggcctcggacacgcgccggtgcgtccagcaggtggcagcagcgagcggccgcgccccctgcgctgccaacccgcgagcccgcatcatggatgtcgagctcccttcgcattgctagccctggaattcgagaccccagacgaggaccaggattcatgaaatcagtcgcaggg

SEQ ID NO: 8765 - DNA, 561 bp, Homo sapiens
  source 1..561: mol_type = other DNA
taatattaaacccagaaaatggttgctctgtcaacaaatatttattggtagccactatatgaagagcccctagactgcgccaagcttgccagagcctgtcttcctgcaaagccagcaggatcgagggagggaaaacaagcgctcaagcactccctcgttggtaggacacaaggcctcgtccacaaggcctcctagggcccaggcagaagcccggcggggcggggcctcggacacgcgccggtgcgtccagcaggtggcagcagcgagcggccgcgccccctgcgctgccaacccgcgagcccgcatcatggatgtcgagctcccttcgcattgctagccctggaattcgagaccccagacgaggaccaggattcatgaaatcagtcgcaggggccggggcaggggcctctggctcccgacactggccgagaggtgggttccggggcgggtcgctgctccttgaagccgggcggggacgcgctgcccccgccctgcctccctgtggtccacaccccctttgggctccggagccgctgggcaggaatagtccggggtgcgcgc

SEQ ID NO: 8766 - DNA, 272 bp, Homo sapiens
  source 1..272: mol_type = other DNA
cacagtctcctgagagtggatggagacattcattcattgatttagtgtttcttaaagaatgatctatggacccttaattataaatattgagagtgtgaactaagaatctgcaaaaagtactgaaggagcacatcccttccattgaagctgcagaggagcagctgccaccccctgcaccaggttctgaactctgtaccagcttgtgaaggacatgccatgtcccctgagtactcatagcttaagcttctcggactttgtgtagcccagggctg

SEQ ID NO: 8767 - DNA, 565 bp, Homo sapiens
  source 1..565: mol_type = other DNA
tgaagggtcttaaagtcagacatttgatattgtgtataaatgagtgagacctattttcacagggatatacaagaagttgacattctcatagcaatattttctacaatcttgcgaaaagtacacttatattgcactgtattttgtatgctaaaagtattcattttcacgttttagtacacaaggaacctcaaaagttgaaagtgtcccaagcccttgcctgacattgcaccggcatcgccgcgggcccactggttttgattccctaggataaaaagcattccggcatggagccggctgaggggtgcggtggtaagaccccatcgctagcggacaaagccgcacacctcctgggtccgggctggggcaggccgcgcgggcgcgggaacgaacgcgtgcggacggcgccgcggagggcgagcgagcggcagggcgcggcggggcgtgtgcggcaccacgggacagcgggctgcggcccagggggcgaggcgtgctcgggtctattccgggagcggctctgaggggcgggcgcgggcgcgggcggggcgggggctgccggcgagcatcc

SEQ ID NO: 8768 - DNA, 627 bp, Homo sapiens
  source 1..627: mol_type = other DNA
tagcaatattttctacaatcttgcgaaaagtacacttatattgcactgtattttgtatgctaaaagtattcattttcacgttttagtacacaaggaacctcaaaagttgaaagtgtcccaagcccttgcctgacattgcaccggcatcgccgcgggcccactggttttgattccctaggataaaaagcattccggcatggagccggctgaggggtgcggtggtaagaccccatcgctagcggacaaagccgcacacctcctgggtccgggctggggcaggccgcgcgggcgcgggaacgaacgcgtgcggacggcgccgcggagggcgagcgagcggcagggcgcggcggggcgtgtgcggcaccacgggacagcgggctgcggcccagggggcgaggcgtgctcgggtctattccgggagcggctctgaggggcgggcgcgggcgcgggcggggcgggggctgccggcgagcatcctgtctgggggaggggaccgcagagagcgccggccgctgggctggcctgagagcgcagcgcgccggccgctaccagccgcgccggagcccctgcgccctgcggcccgctccccggggaccgggccggcgccatggaccgaggccagggtaa

SEQ ID NO: 8769 - DNA, 247 bp, Homo sapiens
  source 1..247: mol_type = other DNA
gttgcagtgagatcgtgccactgcactccagcctgggtgacagagtgagactccatctcaataattttagacaatatctctgccttaaaagagcttatattttagtgagaggaaatgtttctgggaaaactttccacaaggctagatttcctgttcccagcacggagactgtagttactactggacgaccggatggcggcgcggcccatcgggcaaccggtcctgtccggagcatctcttcactcgc

SEQ ID NO: 8770 - DNA, 417 bp, Homo sapiens
  source 1..417: mol_type = other DNA
accaagagacggggtctcagagtctcatagcgtgataaactagcagagctgctgctcttgtcttcttagaggatgaaaatgggagtttatccctccttttctcctttctgaaaagagagtagatgaaattttggtttttaggaagcagaaacagagatattaactatatagcatgcttggtcagcaatttccagcacttgcagacactgcaaaaaagatggttacaaccacctagaaaggtggagcaggattcttcgtctgtgttataatagaggaaacagacacccctctgccgcagctgggccctggtcctgatgctgaggacccgaagcgggcacacctgcgccgggcagcccgcatgcggggccgggactgccagtggggcgccggggcggggcggagagccgagcgccaacc

SEQ ID NO: 8771 - DNA, 268 bp, Homo sapiens
  source 1..268: mol_type = other DNA
ggcacacagtctctgagagagccgtaagtcctcatggatctgaacaccttaactcactgttaatagtgacctgaggccggcgaggctgtttccctgggagatggggcctgtgtccctgtgggtgctggctgggcggccggccgcaggccacaggcggaggtgccaccggccagagccccaccaacagggcattgtccctcggtcaacagcccctgggcaccgcctgccactgcgctaggctcagccagctgggggcccaaggctccca

SEQ ID NO: 8772 - DNA, 402 bp, Homo sapiens
  source 1..402: mol_type = other DNA
cgtgcagtcctggagtgagcaggactcgagtgagactgggctcagccctgcccctctgctcccaatggtggggctggggaagatcactgtctcctctgtagcacagagtcaattgactcagagtgctctacacggaggtttcgccactaatgtcacccccttcttttccaaaccaagaagatgaattccgttcatgtgcatgccctgggttagggaaggcttgtgacaccactccccaaccctgcacagtggccagctgtggggagacccccaccctgcacctggccgagtgctttagtcggctacgcccatgagtcaatgggcttggtcagccatttgtgactcagtgtccataaatctgtctcaaatatttggaagctgtatgaacactttacattatga

SEQ ID NO: 8773 - DNA, 212 bp, Homo sapiens
  source 1..212: mol_type = other DNA
ggtcttactcctgacctcgtgatccacccgcctgggcctcccaaagtgttgggattacaggagaggctgacttttaaaattattttagagacagaaattgccataggccattggtgggaagacttaaggtttttagtttacctaactgattgaatacacttttaaaatgaattcatgtgtgtttactagcgcagcccctgtcgcaaggcgcg

SEQ ID NO: 8774 - DNA, 617 bp, Homo sapiens
  source 1..617: mol_type = other DNA
ttctctgatcgattttttgtaaaaaagaaaaaaattaccgtgtagttttaaatgttgtcaattaaattttgtaatagttacctctactctgttcaggttaatactgttcaacaagaccaacatacgattctttttttttttttttaacagttttttcacttaaattaattttcttcattatgagcaacataccaggttttcttctgaagatcatatgtggtagtgacataggatggcagggggattccggcttctttctttcttcccgtagtagataggacaattctaattatgaagggtaatagcctctttccaaacagaaactgggttggaatataaggaggccttaagctttcatcaaggccggggggccactcagccttccagagacccggcgggtccgaggcgagtaacaggtaacacctgctgagccgccgccgcaggccgcggcacgcctgcgcagtcttgcagcgctcatgcgcagctgggcggtgacagggtgacgctcggagcgtgggccgcgactctcacggatccggttccgccctctcgctgccgatccttcggagcgagcgcccgagatccctttcccagagtgctctgcgccgtgaagaagc

SEQ ID NO: 8775 - DNA, 468 bp, Homo sapiens
  source 1..468: mol_type = other DNA
gtgctgggattacaggccccttgtgtgtatttctgacagacaacttaaagttattaactacaggttaaaaataaaatgttaactaaaggttgcctgtatgttcaacagtgactataatatgtattacttttggaataaaggaaaacctgaaaggtgttgttttataagggcccttaggttgccaaaattagagtcattgaaatctaaagctgataaaaactttagtgcaccagatccataatgtacatgaggaccgaggggccctgcacattccaggctggcaggcagtcatttctcagcttcagccattcccgccatgggggaatgtaaatgtcagtcttctgtgtcagatatttaagaaaactaacagaggtcatacagcaagtagactgtccctgtgctgcctactagaccaaggtgaaagaaaacctgatcctcataatccttgttcttgagaaatattaatga

SEQ ID NO: 8776 - DNA, 435 bp, Homo sapiens
  source 1..435: mol_type = other DNA
cgtagctaggatgacggcagtgccactagtgctgggattacaggccccttgtgtgtatttctgacagacaacttaaagttattaactacaggttaaaaataaaatgttaactaaaggttgcctgtatgttcaacagtgactataatatgtattacttttggaataaaggaaaacctgaaaggtgttgttttataagggcccttaggttgccaaaattagagtcattgaaatctaaagctgataaaaactttagtgcaccagatccataatgtacatgaggaccgaggggccctgcacattccaggctggcaggcagtcatttctcagcttcagccattcccgccatgggggaatgtaaatgtcagtcttctgtgtcagatatttaagaaaactaacagaggtcatacagcaagtagactgtccctgtgctgccta

SEQ ID NO: 8777 - DNA, 248 bp, Homo sapiens
  source 1..248: mol_type = other DNA
ctcattaaactaaggattttaacaaaaactacaattacattttaatttacattttatgttttatagaggcaagagcctctaacattctaggagctcttttcccggcagagcgaggctagccgccgaggccggtcatccgctctctccgcggaggagtcaacgccacggaagcagcggcggaagagggcggcaccctccccggtctgggccgtggtggtagcgtcgctcgcccggcagtaccacgtgac

SEQ ID NO: 8778 - DNA, 549 bp, Homo sapiens
  source 1..549: mol_type = other DNA
ctcctcctccaaggagacttcctccttgtagcctgggtagagatccaggggagcgaggtcctaggtatatacatacatacatacatacatacatacatacatacatatatatatacatacatatatatacacatacatatatatacatacatatatatacacatacatacatacatatatacacatacatacatacatacatatatatacacatacatacatatatatatatatatatatatattttttttttttttttttttggccaggctggtctcaaatgacctcaggtgatccacccgcccgcccagcgctaacgcacgtgattcgctctggcaggagccgggggctgcccgcattgctgcgcaggcatcgggctgctggctggggcaccgccacctggctgcctgcggtcgcggcgccagacacggcgcaggaaagtgggtgagcgacccccggctcccgcgggcgccgcgcggccccgcccccgcagctagcggccctgcggcagccgggggctcgagctccgccctccgcctcccgccggcc

SEQ ID NO: 8779 - DNA, 349 bp, Homo sapiens
  source 1..349: mol_type = other DNA
cattaaactaaggattttaacaaaaactacaattacattttaatttacattttatgttttatagaggcaagagcctctaacattctaggagctcttttcccggcagagcgaggctagccgccgaggccggtcatccgctctctccgcggaggagtcaacgccacggaagcagcggcggaagagggcggcaccctccccggtctgggccgtggtggtagcgtcgctcgcccggcagtaccacgtgacggcctcggccgcgggcgttttgcgtcctcgccgcgcccgtaggtcccggcagccgggccccgcctccttcggagtccgagcgatgggcggggaaagctctgtc

SEQ ID NO: 8780 - DNA, 753 bp, Homo sapiens
  source 1..753: mol_type = other DNA
tcttatttcatctgtaaaacagagttaaggtcaatacctgaaatatcagatcctccttggaatctcacgagattgcgagggctcagccatgggccacagtttgactctgggctagctcctttccctcattctgggtcatgaatgaagcaagagccaaaccagacaaagtcttggtcagctaagacgtctgggacatccgaatgtcccatacggattgcggaagtcagtggccctagaggctcactcgaggtcgcccagcggctcggcgcggccctcgaaggcgggacttacccggaggagcgtgcaagctgcgccgctcacattcccggaggcgcttggcccggcggctggacgagggggatggctggcgcactcgcgctccccgctgtcggcgagaggcggctccagtcgtgtggaggcgagggctcgcgcgcgcatcccgggggctgaaggagccccggccccgcggccccgcccggcgacacacggcgcggagtcgcgacagcccctctcgcttcccctcctcggagtcgcgatatggggtcctgcgctccgcaggctcctcaccgatgcctgccgagggccccgggggtcaagccccggggagctcgaggaagacggcagggacacggtcgtcaccgaggcaccggtttggcggctgcaccggcagtagcggcacaccacggatcgccagggagacccgtcccggcggccctcgcggcgcaccggaagcggtcggcagcgcgtgactgc

SEQ ID NO: 8781 - DNA, 316 bp, Homo sapiens
  source 1..316: mol_type = other DNA
tatatagctggttctgggagtcttggtcaagctaagacgtctgaatgcaaaatgatcaatgctcagcttgagtcactccggctgcagcgcccgacgtggctctgaaaggtgaggcggggcctatgaacgccccacagcagtgcccgggggctgagcggccggggcgtcccaccgccggcagccacagcttcctcctccgcccgggacctctggccggaaaagcctttgagcagttcgtgtgggtccgctcccacttgcgccaggggtcgcatgcagtcacgcgctgccgaccgcttccggtgcgccgcgagggccg

SEQ ID NO: 8782 - DNA, 390 bp, Homo sapiens
  source 1..390: mol_type = other DNA
ttcctcttcctattaaaaacaagaagacaacaccctacggttttgtttgttttattaccctgttctaagcctgagtacaagtttgttatcatcttatttcatctgtaaaacagagttaaggtcaatacctgaaatatcagatcctccttggaatctcacgagattgcgagggctcagccatgggccacagtttgactctgggctagctcctttccctcattctgggtcatgaatgaagcaagagccaaaccagacaaagtcttggtcagctaagacgtctgggacatccgaatgtcccatacggattgcggaagtcagtggccctagaggctcactcgaggtcgcccagcggctcggcgcggccctcgaaggcgggacttacccggagga

SEQ ID NO: 8783 - DNA, 468 bp, Homo sapiens
  source 1..468: mol_type = other DNA
cagttgggatccaaatcctatctccaccatttggtagctgtttagttttcccatctgtgaaatgagaatgacaagtacttacctacataaagttttgcagtactaaaggctagtaaatgtcctgtaaaaggaagcttattgcgtagaggatggggcatattttcagattctgcagcagacacgaatctggtcaatttgaacactatatttacctagagataacgtcagatctcacagcttgaaggcttgagcacagagctccagcctctgcgtctctaaaataataataataaatttttaaaagatatgcattactttggagattccaaggattttatatatatgtcacaatattaacttctctttgggatctgccagagccacctgatcgaccccttgaagatgggctagccccaagctcaggctggccctgccccagactgcgaccagacccaagatttccaaact

SEQ ID NO: 8784 - DNA, 519 bp, Homo sapiens
  source 1..519: mol_type = other DNA
tgggcgctttggaggtttgcccctcacccaccagctgccccatccctgaggcagcgctccatgggggtatggtttgtgatcattgtccccagcccagtgggcattggagccaagacgcccccgcacggggagggttgggaagggcaccaaccctgcattgcaggttggcaccttacttccctgggatccccagagttggtccaaaccaaagatataatcacctaggtttacaaatatttttaggactcatttatacagcagaaatgctattttgtataagggaaagattttaatattaaacctggcacatgaggctcatcccacccctcgctggaagctggggggcctagaccttgggcttggtttcccaaggtgggaagcgagcaggcttttctggctccacagagcctggcgctgcagggctgctccaaggctctggtgctgaggcgtctctccactccgcccacaggcccggattgaggccggcgtgctctgtgacaggcggtgagtcatgatcag

SEQ ID NO: 8785 - DNA, 486 bp, Homo sapiens
  source 1..486: mol_type = other DNA
acgagttggttcctgttatatcatcagtcccagctgaggtgctaaagccctgaccctgggaaggggccccaccccttcccttccctcctaacgctctgggtcagaagacactgcccactgggttctgaatcaaatgcccagagcaccctcctttagcctagaaggcagctggtctcagagtcagactgtaacatacatggtgtccaggtagagcagtggttctctcagccagtggccagaggtccagctgtgaagtgcaggaactgtggtaagcaccttgccaatgctgtcaaggtgctgccccggggtcacacagtcagccagaaactgactcggggtcaatgcatagtcatcttcactgcctcccagctgcggaaggagcccagagatttaaatcaagccagggcaagcactgggtctcctgactctggatcacatgtgtgggcaattataagtcccagctcttcttcccgcagaggagggggg

SEQ ID NO: 8786 - DNA, 447 bp, Homo sapiens
  source 1..447: mol_type = other DNA
ccccagctctgccattgctgcgtaagcttgggaagcggcctcagtgtccccatctataaaatggggcaaataatcctctcaatgtatctgtcaatatccagagatatccaatctgtgctcatgagggcttctgaggtcaggaccacgtcttgctactgtcccctgcacccagtacagtgttagaatgtagtattcaatgaatgaaggttgactgaatcaaagagtctcctttacagaactgaggcactgagtctccctgggtgccatggcaaggggaggccgccacccgacatgggcatcgggaaagtggggccgaggccactctttgacaaaagtgactcagcagctggcggctggcgtgggctgtggaatttctaagcatcccctcacatcctgaccctgcagcctttcccccaaagtggcgggggaagtgggggggcatggtgg

SEQ ID NO: 8787 - DNA, 498 bp, Homo sapiens
  source 1..498: mol_type = other DNA
ataagatgtgataatggcatattatgtaagaaaatgttctggaatttgttttaaaatacttcagaaaaggtacacagcagttcattatacaattctacttttgtgtatgcttgaaacctctcaattaaaaaaagagggtagagagtcatcaagataatttactaaaagtttcctgtttctctagtgtatgtatgtgcatatgtgcatttccccagggaaaaacatcacgagaggggtcgtgacccctccccaccggagccctgtttgaagtctaagcgctagaatcccccggcccctgggagcttgtgggctgcagggccgtccacgcggccaccggaaggacagccgctaggccgctccctggcaagcggcgcggccccaggccctggccagtccacctcccgcttggggcggcgcggcccggaggcttccccccgctttgaaatgcaaacccgcctcggctggggccgcgggcggcccggagctataaaaggcctg

SEQ ID NO: 8788 - DNA, 583 bp, Homo sapiens
  source 1..583: mol_type = other DNA
ggtacacagcagttcattatacaattctacttttgtgtatgcttgaaacctctcaattaaaaaaagagggtagagagtcatcaagataatttactaaaagtttcctgtttctctagtgtatgtatgtgcatatgtgcatttccccagggaaaaacatcacgagaggggtcgtgacccctccccaccggagccctgtttgaagtctaagcgctagaatcccccggcccctgggagcttgtgggctgcagggccgtccacgcggccaccggaaggacagccgctaggccgctccctggcaagcggcgcggccccaggccctggccagtccacctcccgcttggggcggcgcggcccggaggcttccccccgctttgaaatgcaaacccgcctcggctggggccgcgggcggcccggagctataaaaggcctgggtggggcgggcgcggcggcaggacagccggttgctcgtcgtcggggcggccggcagcggcggctccagggcccagcatgcgcgggggaccccgcggccaccatgtatgtgggctagtgctggacaaggattcgcccgtgtaccccggcccag

SEQ ID NO: 8789 - DNA, 352 bp, Homo sapiens
  source 1..352: mol_type = other DNA
aggacacaatttgtaatgtatatactgagtcacagatcacagtgacactgtggcacttgcccattttgctttcatcttaaggaaaggaggagagttgaagactctactagcctaaactttgagtaagtaacttaacttaggatccaggttgagaaaataggacacctagttcaggacctggcacattttaggtgctcaataaatactgatatgcgtgggcaacccacagtcagtgaataaatgttaactgagcacctactatgactcctgtaagagaggagagacaactgtggaaagggaggaaagccgagggtttccgtcgcgaaccccgggctctccaatccgcagctct

SEQ ID NO: 8790 - DNA, 298 bp, Homo sapiens
  source 1..298: mol_type = other DNA
gccagtggcctagcccgggtaagccatgtttttttttaccttgactggaagcacaagcagaaaagcaccaggagaccagatttccatggtcccgtcacagctgtgagaggtggtccccacttctgcgccaagctggacagctgttgccagggcaacggggcaatacctgtctctctagagatgaagttggaatgcggcacccactggctgttaccatctacaagggccccacagttggtgggtccatcaccccaggggtgctgggtccatcccacccccagggctcgcgaggctgtga

SEQ ID NO: 8791 - DNA, 506 bp, Homo sapiens
  source 1..506: mol_type = other DNA
cttgggtaggctggcctaggtgaccattggggcatgcaacatatactgattgagcttatactgtgtgctgcaccggagagatggataaaacagcccctgccctctggattccagcgctggcattctaagattctagttgggaactgcaaggctacaaccaagcttcctgacttgcagccgcgggggcttgccaaagtgcttgccattctcgagccgccactcgccttagagacatagccactgacttgttctgtgacttagacgcgttgaggctcatctccgggcctcagtttctccactcagagaggctaagactccatgatcgaggaatgtctgacccctcctttccccatcccggtcaggggcgggcgctggagccagcaggccgagagggccggggcttcccgcccgggaggtggagccgctgctctgcgtcccgcccctccacctggggctcggcccggcccggcagatgtcctgcccacctccctgcagggagctgggct

SEQ ID NO: 8792 - DNA, 532 bp, Homo sapiens
  source 1..532: mol_type = other DNA
caattagtcactaacatttcacaattggaatagttctcctaatagataaagagggtattcctctcttgggtaggctggcctaggtgaccattggggcatgcaacatatactgattgagcttatactgtgtgctgcaccggagagatggataaaacagcccctgccctctggattccagcgctggcattctaagattctagttgggaactgcaaggctacaaccaagcttcctgacttgcagccgcgggggcttgccaaagtgcttgccattctcgagccgccactcgccttagagacatagccactgacttgttctgtgacttagacgcgttgaggctcatctccgggcctcagtttctccactcagagaggctaagactccatgatcgaggaatgtctgacccctcctttccccatcccggtcaggggcgggcgctggagccagcaggccgagagggccggggcttcccgcccgggaggtggagccgctgctctgcgtcccgcccctccacctggggctcggcccggcccg

SEQ ID NO: 8793 - DNA, 341 bp, Homo sapiens
  source 1..341: mol_type = other DNA
gagactatctaatgccctcagagcaaagtccaaactctgttggacctggacagcccagcagcgcagactagggtccttggggcgcccataggctgccctagcctagccgggtgctagcccattacagatttgttcagttagcgaatgaatcaatgaataaactggcaattcgtgtctggttcatgctcttcgagtcgtccaagtcccggccggccccgggggcgggtccctgtctagccccgcatgagtctccgcccccttcgccttgaggggcggggccggccactcccggagaggggactacgtttcccggcgcgccgcgcggccggagcgaaagagga

SEQ ID NO: 8794 - DNA, 421 bp, Homo sapiens
  source 1..421: mol_type = other DNA
ccagagccttaaaaccatggactcttaggtttgaaggaaatcaaaatattcctctctaaaaacctgcggattttagttaaaggtaaaaggttaaaacccaggggcaccctctgccccttctctctgtcttgatcagctcagaagcagagctcagaggatcctggatcagattaaaatactatttaagcaaggccagccttgagagagaatacttctcaactgagagaagaggacttgtctgagctcaccaagggtgcacagcccctttctgcacccactcatctgtggatgagaaggggagacaagtttcttgaaacattcaaagagccttatgggccctgggcagccaatggggagccccccaaagtggggtatttccagcctttgtcttccacatctaccaagtgggcggagtctctcc

SEQ ID NO: 8795 - DNA, 387 bp, Homo sapiens
  source 1..387: mol_type = other DNA
acctggacagcccagcagcgcagactagggtccttggggcgcccataggctgccctagcctagccgggtgctagcccattacagatttgttcagttagcgaatgaatcaatgaataaactggcaattcgtgtctggttcatgctcttcgagtcgtccaagtcccggccggccccgggggcgggtccctgtctagccccgcatgagtctccgcccccttcgccttgaggggcggggccggccactcccggagaggggactacgtttcccggcgcgccgcgcggccggagcgaaagaggaaaggcggggcgtgcaggtagccggccggccgggggtcgcgggtatggccgaggccaggaagcggcgggagctacttcccctgatctacc

SEQ ID NO: 8796 - DNA, 351 bp, Homo sapiens
  source 1..351: mol_type = other DNA
ccagagccttaaaaccatggactcttaggtttgaaggaaatcaaaatattcctctctaaaaacctgcggattttagttaaaggtaaaaggttaaaacccaggggcaccctctgccccttctctctgtcttgatcagctcagaagcagagctcagaggatcctggatcagattaaaatactatttaagcaaggccagccttgagagagaatacttctcaactgagagaagaggacttgtctgagctcaccaagggtgcacagcccctttctgcacccactcatctgtggatgagaaggggagacaagtttcttgaaacattcaaagagccttatgggccctgggcagccaat

SEQ ID NO: 8797 - DNA, 392 bp, Homo sapiens
  source 1..392: mol_type = other DNA
aatttgtcgggcgtcagctacttgactgcactccagccttggcttcggtcgaaatatatacatgtatattgttattagtagcacgagggctttgaagctagaattccaaacccttctgcaaaggtgtgttaacatcctttatctgtatcaaaattatttgataaactgtttagcccagaccggtctgaaaatacatattgaataatttattcttattttgcccattatataatatgccaaagtaagtgattgcctcgtgccgctccaaggctgccagggtcaccccgcgggtgtagccgcttcgccttatgacgagtcttagccggcgtcttccggaacccgacctcgccccgtgacctcagaggtatacttccgggacacggaagtgaccc

SEQ ID NO: 8798 - DNA, 387 bp, Homo sapiens
  source 1..387: mol_type = other DNA
ccctggaaggggctcctaggatttccctgtggctggcaggacccttggccacccacgtggtgtgacatgaggagcctggcatcctctaagaaggcaaagtgcttttaagcatttgctgtcaagaagcaagccctggccagcctggcccctctgcagggtggggcgccttttcagtccttcctcttcttctcaggacaggtggggaagaaccaggaccctacctctcttgagagggtcagaagacccactagcatgagggtcagggacatgctttttcctttcccgtggaaggctcctccaggcagggcttagtggttccctgggcacacatcctcttcagggtgctctagggccacccttccctttctcctggggaggggactgggc

SEQ ID NO: 8799 - DNA, 350 bp, Homo sapiens
  source 1..350: mol_type = other DNA
ggcactgaggtcgccactggggtagctcaggttcccatcctcatcatgtgagcgaggagggagcgtagagccaggcctcacggttgaggctccctgtgcccaggccagggggccactgcaaatacatggctgtcttcctgataacccaacaagcagatactatgattatcatcttggtcctcagctctcccagcaggctgacctgccttggctaagggagccatttgagctcttggcatcctgcagctggagcctagcccaggaacccaagtctggggagctcttggaggctctgccagggttggccccagaggaacttgggaggcccgagccaagaggttcctagtggc

SEQ ID NO: 8800 - DNA, 567 bp, Homo sapiens
  source 1..567: mol_type = other DNA
aggggaccaatgctggggccaagtactgagtgagccccaggagggtgacccgcactggctctggagtcagggaatcctggttggaggcccagcccccttaccaccagtgtggcgggagacatctaaacctctctgagcctcagttgccctaaagtgaggatgactggaagacatctgcgaagacagaggctctttctgtactgtgaacagtaactactgcagtgccagtgctgggcacaggcttgattgtagcagggactcaatcaatatcatcataataaagtgtttgcatttatcatgggcacttagtaagtgtcaagcactgtgttaactgcttaactaccccaaccgagggaccctgcctggagggagctgggaacagcttgccggcaaaaccttgccagcagccaaacctcagctctctgggcctctgcttttgttcctagagaacagatggaggctcctgcacctgaggcttccaggtgatctgccggcctgaaggggatttcctggggccagccccattcccagccctgctgacgtcacccctggatgggtgcccagagt

SEQ ID NO: 8801 - DNA, 488 bp, Homo sapiens
  source 1..488: mol_type = other DNA
tctgggcctctgcttttgttcctagagaacagatggaggctcctgcacctgaggcttccaggtgatctgccggcctgaaggggatttcctggggccagccccattcccagccctgctgacgtcacccctggatgggtgcccagagtggggaaaggcaggcgggcactctcccagcccacacaacagccctccctctggggctctggggtctccccagcccatcccccaggcagggaagtggggatccctcctgttgaaagaagaaggcacagccccgccttggctccccatctctgcaatgaggatagcagagatcccaagctcttctggaactcttaacactcagggatcaaacatattgctacagaagtcagtactcttgtatttattcatcctttagcccaagcccttaaaaatatagacggctaatgtcttcagtatgtatgaaatatcccatatgctcgcaaaaggggctctgttattaaagt

SEQ ID NO: 8802 - DNA, 277 bp, Homo sapiens
  source 1..277: mol_type = other DNA
gccaaaattgcaagtgccaatggaggcccctgccctcgaggccgttgcagtctctgggggaaaatagggcccagaccatggcccacgtgactggccctgccgggaggccaacctgggcttgaatttcagctcctgtgtgtgaccttgagcaagttgctgcacctgaaagattacttttactagaataaataatacacaaggtggtggttatcctccggatgaggactctcctcttgatcctccatgtcctggggaggcagcagaggtttaaaaggct

SEQ ID NO: 8803 - DNA, 119 bp, Homo sapiens
  source 1..119: mol_type = other DNA
gtgacagcatgaaacaggggagtgggactccctttaaacacagtttccttttgaaagcctgctgtgcccctctgggcccccaggctgagctggtagagcccttgaagacagagccctgc

SEQ ID NO: 8804 - DNA, 258 bp, Homo sapiens
  source 1..258: mol_type = other DNA
taaacacagtttccttttgaaagcctgctgtgcccctctgggcccccaggctgagctggtagagcccttgaagacagagccctgcgaggagcaattcattcatccatctatctatccatccaaagctaccagcagctgaccctcaacattgtgtgtacacgtgggtgcaagccctctgtctgcacaggcctgttgccagggcacctgtcttccctagggtctggtgcctctggctccagctcctattgcagcccgaaa

SEQ ID NO: 8805 - DNA, 507 bp, Homo sapiens
  source 1..507: mol_type = other DNA
attcaaaactaaaaaggataaaactttatgtaaattatactttaaatcaacttttttttttaatgaggtgatttaaataaatgtgttaggtagcttgatgacacggaagtactcataaaatattggcagagtggttatgagttattccaaaaatcaaataatgcatatgttgattcgtaagacccttgtcatttcagaagctggaaatgaaacagtactaatgaatttgtggcttcaccactttttagcttatcaggagagattaggttaatctctctaaacctgttttcttttctataaaagagggatcatctgtgaatttcaggtcaaccacgaatcctactttaggacgagtaggtaccatatatatttataattaaaaagcgattcgccgttaatctgaaattcaactttagacatgtgtgtgtgtgagtgacagagagagagaggcccagagtttggcataatgcgcccaattgttaaatgaatcaatgcattataccatag

SEQ ID NO: 8806 - DNA, 237 bp, Homo sapiens
  source 1..237: mol_type = other DNA
agagcagatgcactctaagtctgcctttcttcatggtacatgcaagtcttggagttctcggtactgcacagcactctgcagccctttacctaaaactgttgataaattattttcccacccatgtagccttagtagaagacagtgctggtgtgactcctgtctggatcccagctgcgcacgcgcgctctggttttcgacgggcgcagagccggcgctggctctcgggtcacgtgatgc

SEQ ID NO: 8807 - DNA, 416 bp, Homo sapiens
  source 1..416: mol_type = other DNA
aacaagcttttgttaaaagaaataagtaatactctcttagagagcccctgattaatgacattggctgccatcaaaagacggccttggccaggggcagtggtcacctgaggtcgcctgtaatcccagctaccacttgaatcaggctgcagtgagccgaattgccccactgcactccagcctgggcaatagagtgggacttaagaatcatatctacacgagacattttcttttcatttttcacttgtacaaatatatttatttacttttggggaataatatgacatattgtattagaaatcagaaaaccagtatttattcctcacatctggtacaattatgatgagtaaatattttattcatatacagcagacccctgaataacatccttctgtttgaggaaaaaaaattgtttccct

SEQ ID NO: 8808 - DNA, 399 bp, Homo sapiens
  source 1..399: mol_type = other DNA
ccactgcccctggccaaggccgtcttttgatggcagccaatgtcattaatcaggggctctctaagagagtattacttatttcttttaacaaaagcttgttgctgaaagactcagctggctccaggcctgagcttctgccttgtcccagagggaagccaatgttcacagcagggcacatggagttaccagttgaaatgtcatattaagattgtcctcctgttgcagtggatcatgccactgcactccagcaaaaaaaaaaaaaaaaaaaagattgtcctccttcaatctttttttactattaaatgagagctttgtattaaactattcactatctcttttgaataaaacatgttgttgggtgacagcccttagggtttttctcaaacatccctgaatcat

SEQ ID NO: 8809 - DNA, 425 bp, Homo sapiens
  source 1..425: mol_type = other DNA
catccctgaatcatctaagttcggggcccacaccatattgtgctcctttttttcagaagagtaagattaaaaaaacacatgggacgggagtcccccctcactccatggatgacatagagggggcagctgggccacccacagtggcgtgggaagcctctcagaaccttggattgggctatttcattgttatcacaaaataaacaggatgccaggactgggagacaggtgttacctttcccacttagcaggatctgagtcccggctcggtttacaatcccacggctacgcggcgagtgtgtggcaacgtggaaggggagcccgagacgccctggtctctccctttctccccgaacgcagcccgcaggggacgctggaggaggagctgagctggagttgccggggccccgggaccgggcgttccgggg

SEQ ID NO: 8810 - DNA, 386 bp, Homo sapiens
  source 1..386: mol_type = other DNA
atgttcaaggaatctctgatacttgtgaccggagactcctcagcccccaggtgcagcaggattccagctggtccagaagaaacagctgcagcctggccctcaatcagaataacagcccctgaggggccctgctcttgaaggaagccttctctccgcagaaaatgttttttcactgatggaaaaggcgccttctacacggggcctcgagaagcgcagcgcccaagcaggtgctcaggcccgggcgctgaaccctgacgctgggcctggacggaggaggcttcccgagaaggcacccggagagaagccagtctccgagtggggctggggttcgcccacccaagctccgcctcccccaggcccaaaattctgtgcactaggaggctcga

SEQ ID NO: 8811 - DNA, 386 bp, Homo sapiens
  source 1..386: mol_type = other DNA
ggtgggcgtgggctcagcgggcccgcgctcagagcagccatccggccccgatggcccctggcagtgaggggcttagcacctgggccagcagctgctgtgctggatttctccccggccttagctgcctccccgcagggcagggcttgggacctgcagcccgccatgcctgagcctcgcgccgctccactgcccaagggctgaagagtgcaggcgcatggccggggactgccaggcagcttcacctgcggcctggtgcaggatccactgggtgaagccagctggtgtctagctcagggtttgatcgaccctcagggtttgtggatgcctatactctgtatctagctaagtaaaacagaccaatcggctctctgtaaaatggaccaatc

SEQ ID NO: 8812 - DNA, 333 bp, Homo sapiens
  source 1..333: mol_type = other DNA
ttatgattcaaaattgtattcatttatacaaatgaaacattggtctgtgaacatgcattttgcttttttaaagcttgatgtaaggtctaagggttaagataacaattttagtatttttaaaaaatcatcttattactgcaatatcaaattcccttataaggattccttaccgttgttattggcataattacagtacacaatctccctggagaggaccgcccatttcgtcagaagcatgcttccaatagaggaaggttcatcgggctcagcactgggcgaatctcaagatggcggccccatgcggaaacagctccagggagcagccatgttgct

SEQ ID NO: 8813 - DNA, 373 bp, Homo sapiens
  source 1..373: mol_type = other DNA
cttatctaagtgcatttgttttgacatgagaaataaattgctaaatgtaaaattgctgcctatttcataacatatcaaaaagcatgactcgtgtgaaaattatgattcaaaattgtattcatttatacaaatgaaacattggtctgtgaacatgcattttgcttttttaaagcttgatgtaaggtctaagggttaagataacaattttagtatttttaaaaaatcatcttattactgcaatatcaaattcccttataaggattccttaccgttgttattggcataattacagtacacaatctccctggagaggaccgcccatttcgtcagaagcatgcttccaatagaggaaggttcatcgggctcagcactg

SEQ ID NO: 8814 - DNA, 394 bp, Homo sapiens
  source 1..394: mol_type = other DNA
ttctgcttctaagcctaaaaattgagtctttgggtcttcatttctgaagactctcatgtcacagaaaactttaattaaataaatcgttatgcttatccttatgatggggaggaaaggcaccccaccatggggttttcaaaatcctttgtttcttaagcactaaacctatatatagtaaatgtttctggaagtttaacttcagctcttgctgaaattttaaacggtgtttttaaaacctcgataggaataagaaatgctcctcctttcgcactttggagccaaaagaggaagggactcactgtcgccccgggacggggaggtggggagctgagggcaagtcgcgcccgcccctgaaatcccagccgcctagcgattggctgcaagggtctcggct

SEQ ID NO: 8815 - DNA, 463 bp, Homo sapiens
  source 1..463: mol_type = other DNA
ctcaataagtaattgttggattctaaaatctccaactggtttcagtgacataaagcagatgaagaaaaattcttctgttccttagaactgcaagggacagaccatatatgatatgtgtttttttcttttctttttttaaagaagatgatacacatataaatatcccttagggtacaagcatttcactttaaagattactaaattaacttaagactttcatttccctccctcagagaggggaagggactgcccatagtaaattaatgcctagaccattaattgagtaagtgtttattgggcaattcctgttttcacagacaggacatgaactcagattttttttcatatttgtcctgctttactataatatggtcagaccagcttaaagattgacagactagagcttctctgcaaaggagtccttacagccaggcgggcaccacggcaggggctgagctaccct

SEQ ID NO: 8816 - DNA, 459 bp, Homo sapiens
  source 1..459: mol_type = other DNA
aactattatttttatttctaaatttattatcatttttgagacacactctgttgcccaggctggagtgcagtggcgccataatggttcactgagtagctgggacttaggcttaagcctgcctcaggcctcacatagcaagattaataggcgtgagccacggtgccggcccatcattttattttaattaccattaaatggcaggagaaggagtgggccccttcttcactatggatggagaagcagtttcctcagggccctgagcactggaatcccccaccttaggcgagggaggccaggccaggttgccccagcccattctcgggtgccttttcccagcccagctgaggaagcatcacgggacagccagtctgggccctctgctctgccagcgggcaggatggggcctcagctgggccttgcggggctgcctggtggcggctcctccatctcggggaaccc

SEQ ID NO: 8817 - DNA, 588 bp, Homo sapiens
  source 1..588: mol_type = other DNA
tcttttgcaataggtttttcataaagctatatttagtttaaagagctgttctttattccaaggactttttggaattaaaatttagctttctttctttttaaaaataaaaggataagcttttaaaaagctttcctacccttaaagcaagtttatgttccttaccggtctaggaaatcccagtatctagcccacatacccgggtttgaatcttgattcatctaacctttttgtgactcaaatattatttaagaaaagacaatgtgcaaaaaatgttcgcggtagagttaagaagagtcctggagtgccctggacggaactctgggggcctgagctccagctctggcttagggctggtggccccaggccttcgacaggggcttccggcgctgggagtgcggcaaggcgccgcgcaggcccgggacggtggccccagggtcgctcgagagacaccgcgggcccccggaaccgcaggcagccggtgtttacctcgctcggtcccaccccaggcggccgcgggcccgcccggagcgcgcggcgcgattgggcgagtggcctgccagtctccggggactttcccaggggtggggc

SEQ ID NO: 8818 - DNA, 484 bp, Homo sapiens
  source 1..484: mol_type = other DNA
gtggatacacaacattgtgtctgtacaaaatgccactgaattgttgactttaaaatggttaattttatgttgtgtggatttcatctacccaaaaataataaaagacagcgtgccttcaagggccccggaggtcccacctggcccccctgctgatcctcggaggcgccaggtggcctcctgctaggagcatttgcttggtccaggaactggaccgacctaatgaggctgttgaggcatggaatctgatcaggcagataaagtgcccctggcaaacctcaattttctgtttctcaacaaagctttggcgacttataagaatttgcgggaaagtgtccagaacccggagtcaggagccctgacttctagcctctcagtctcagatccgggggctggaaactgaggaggaagcccctcgggctagggaggcgggcgcgccggattggcctctgcgcgccacgtgtccggctcggagcccacggctgtc

SEQ ID NO: 8819 - DNA, 291 bp, Homo sapiens
  source 1..291: mol_type = other DNA
cagctggccgagatcacgccattgcactcgtgtggatgaacttcaaaaacatgccacatgaggccagacctgaggttgtggtgagcagagatcacgccactgcactccagagggttgcatctcatgtgattccatgtatatgaaatatcgtggtggatacacaacattgtgtctgtacaaaatgccactgaattgttgactttaaaatggttaattttatgttgtgtggatttcatctacccaaaaataataaaagacagcgtgccttcaagggccccggaggtcccacct

SEQ ID NO: 8820 - DNA, 211 bp, Homo sapiens
  source 1..211: mol_type = other DNA
ttaggtctacccagaacagtatttcttaggaatgtggtctatggacctcctgtactagagccacctggaaagcttgcttaacacgaatgtccaggctgcattctagacctacatgcagtgcaattctcctgcctcagcctccaatccccaggttggggtcctgaccacttcctcctcagaggtcatggagcagacggcacccccactctgg

SEQ ID NO: 8821 - DNA, 276 bp, Homo sapiens
  source 1..276: mol_type = other DNA
tcaaaaataaataaatacaataaacttagtattatgatttatttgtaggagtcccagctactcaggaggctgagctgggaggctcgctattttcctcacctgtaaaatggaggaagtaatacctttgttgcactaacagccctcaatgaatgatagttgttagtttatcaaataattgctttaattattttttgaaaagtggtggcggcgccgctggccctgcgggctacactgaggccccgctggtatttacggcgggcggccgccccagctcag

SEQ ID NO: 8822 - DNA, 287 bp, Homo sapiens
  source 1..287: mol_type = other DNA
tcagtttcctcagtgctaaaattggggaagaaaaaaaaaaactttcaagcagttactaaatgttagtttttataacggttataattattaaaaagatacgcccagctagtcgagaggctgaggctgcagtgagccgagatcgcgccactgcactccagctcgggcgacagagcgatgaaaacactgaatccggcccccgcccctcccgcgcgcgcagctccgccccgccggtccaattctcggccgggaagtctctggccgggacggggcagggcgaacctgccagt

SEQ ID NO: 8823 - DNA, 238 bp, Homo sapiens
  source 1..238: mol_type = other DNA
cttttaataatgaagggaggcaccattagtaattatggacctacaagagattgtagtaagttttctaccctaatatattcccagcatggagaacagtttctagcatatattagatgctcaataaatattttctgaacaaatgattttttttaaacatgaccaacatggtagctgggcatcccaggattctgctgcagctcattggctgggcagcctcggtagctctggttttttcctt

SEQ ID NO: 8824 - DNA, 444 bp, Homo sapiens
  source 1..444: mol_type = other DNA
cccggcctttgtagtatttttgcaacttttctgtaaaccaaaataaaaagtttactttaaaaaagatgatcaggtgagttttaaattctacacatgcattcatgtactcaacagattgtctattatgcatcaggcactgggtataaatgagtgcctgcatcatgatgcgcggtattggtaacaacatccctgttttttctaaaagcaaatctccaactagtatattaacctgacaaaatcttcctagccagatcagtttcctcagtgctaaaattggggaagaaaaaaaaaaactttcaagcagttactaaatgttagtttttataacggttataattattaaaaagatacgcccagctagtcgagaggctgaggctgcagtgagccgagatcgcgccactgcactccagctcgggcgacagagcgatgaaaacactgaatccg

SEQ ID NO: 8825 - DNA, 431 bp, Homo sapiens
  source 1..431: mol_type = other DNA
gctaccagttagcagtgacattagctaagcaaagcttgtggcatgtaataagcccttaagaaactgttcatctgcactgaagcagagggcgccagtatcttgcccagcaaactgtggctgggagtcaaattaattagaactgagtgactaagggatgtcttacagcagagttgaaaaccttgacaaattgggctaggttccaactctgtcactttcctttacttcaagaaacctcagttttctccttacttaattgatagggttaaatgagaaattaatagatatttgttattaaaattatcagtataatagttatcattatgattattattaagtaataccaatacgaatgggtgatgccttttccaatctccaggcaggaagaggtgccctccagggaggtgggcggggcctcgttccagcttggccag

SEQ ID NO: 8826 - DNA, 469 bp, Homo sapiens
  source 1..469: mol_type = other DNA
tatatgaattgcctattcatatatgaacatccctctaaggtagttacttgaaatttttaaagtgtagtttatatacaataaaatgcacagatcttaagtgtacagttgaatgagttttgacaaatgaatacactggtgcaacttacccagaaagtttctttttgcttgtttgcagtcaaactaaaactttatattaatgagataatacagcatgtattctactctttctagcctctagttggagtggatgttgagggccaccccaccatatccacccacacaaccatatggcaaattgtgaccaaggaatcttagggtctatgtgagtggtcacaggagaacccacagattctcaagcatgccggctcaccacagtatcatatataatgatacattatatatgtcctagcagagttgcaagatctgagagctgaacttctcctattccctgctagtaagtgatgggtgg

SEQ ID NO: 8827 - DNA, 588 bp, Homo sapiens
  source 1..588: mol_type = other DNA
ttattatggtctgaaagaatattaatatgatttcaatcttcttaaatttaaggcttgttttttggactagcatatggtctattctagagaatgtttcagttagagaaaaaatgtgtattctgtttctgtttttaaagtgcaattcaagttcatgttgaaagtgggatattgaccctccttatttaggtgctccaattttgcatgcatatatatttacagttgtgtcttcttgatgaattgacccctttattattaaacaatgagacttgaagcctatttgttacataattgttaaaggaaaagtctgaatactgaaatgttgccatccatttaaaaatgttactttaaaaatttgaatgtattaaaagataatgtaccacagatgatagtttgtgtatgcttctgaaaaattggaagttttaaaaatatgcatatttcttattataaaagcaatacaaacgtaaaaattagcaatatttcacagtgctcttcgactggactctcaggaacatgctgtggagcagagctccggagctcagtgagggccgctcaagggagcacgtgacctcggcctctggcgtgggcggt

SEQ ID NO: 8828 - DNA, 321 bp, Homo sapiens
  source 1..321: mol_type = other DNA
tccaaaaggaaggaatgatcatgaaaggctctttcagcgttcattactagtattgattgagcctggttctataccaggcactgttctaggcactagggaattcatctgtgaataagatacacagagctcctctcttcatgggcccaggaggtgcagagccttctaggccagggcaaggattttttagcctaacatgcttctgcggggccaggaaacagctgtgtccccaggtgtgcaggtcctacagcctgggcaggtcatgggcaggcgcctgcattgcaaggcaccggtgctggggcctgcccaacacgggtgctgacc

SEQ ID NO: 8829 - DNA, 374 bp, Homo sapiens
  source 1..374: mol_type = other DNA
cagtgagccatcactcaccgtgctttgtgatgcatgaatctgtacaaccttatgaagcaggtattcttgttacctccatttaatagatgggggagcccaaatttaattctcataacaaccttatgaggtaggagctattattatccccatcttttcaaaaaaggaaactgaggctcagactaagtaactcacccaagcttactgaactagtaggtggcagtgccagggtttcgaaccaaatctgtccgtctccaaagccctggggagagagaacactactgttctgacagccaaagaagggagtggagatgggcctgatttcattggcttcctccctccctctccgtgagacagagagctggcaggaggggatg

SEQ ID NO: 8830 - DNA, 293 bp, Homo sapiens
  source 1..293: mol_type = other DNA
tatttattaattctcatacctcccagagaggcaagttacttagcatctatgtttccttattattaaaatggtcataattacaatgcctaagataaggtgaagattattaaatcctcagtaaactttggctattgttactcctatgattatcatcaatatcatcagaccagttccaaatcatcaaggatgataccactagtagcagctggccttgcctttgtggcaaattctcagcattgcctaatattagggaggactcctcccctggaggcctcagcccagagctctgagtg

SEQ ID NO: 8831 - DNA, 349 bp, Homo sapiens
  source 1..349: mol_type = other DNA
tgtattaagaagtttgcacacattacatgtattccaacaatactgcaaagtaggtttcttggagggaaccatgtgtcgttgtttgcctgaaacagttattaatagcatctcctttctctagcaaaaggttcagataaaaaattgtatagtgaccttaactgtccccatctttcagtgaataaatctctctccgtccaggccgggtgaccacgggcccggcccgcagaaaggaggcggcgcggccggcagggatcaggactggagggggcggagcctccctcgcggccgggcccggagtgggaggggcctccgggaccaggcctctagtgcgcactctcggaagcgcagc

SEQ ID NO: 8832 - DNA, 349 bp, Homo sapiens; identical to SEQ ID NO: 8831
  source 1..349: mol_type = other DNA

SEQ ID NO: 8833 - DNA, 459 bp, Homo sapiens
  source 1..459: mol_type = other DNA
tgcagctcgggacgtggtgcgagggcccacactccactggagcacgcgcggaccaccgtgcctcagctgccacaaagggagcctcgccacacgcccgcggccgcctcgcagcgcccgccaagaagcgcctggcggaagggcgcactctcaggccttccaccggcgaccttccggcgggagcctgcgggcggcgcaggaacgaccctccttcctctgccccgcagcagtgctgagtaatggtgagagcagacaacccgggaaactttactagttggttcgccagcaggcctcgagaaccgcccagagggcacggcggccctggggctcggtctcttccgagccggacgccctagttgctaggggggcggatctccgcccattattggctactttgagtacaaagcgaagagccctgaggacgcggtcgggattggtcatcccgtcgcccgacctggccgc

SEQ ID NO: 8834 - DNA, 381 bp, Homo sapiens
  source 1..381: mol_type = other DNA
tgtgttttcacatacaactgcattctttaaaaatcaaggcaaccttttgaggagattaattccatatcctctctcaccccaccgcttacacggaaagaagcttgggggtaggattaaattcaacccggagtctaacaggctattggccgaataccgggagaagatctggttttattaatgcagtaaccgagatgcatctgagacattgggcttcagagccccgcggggtagccagggaccccggtagcccctgaaacttgccctgggctctctgacgcctgcggccccgagcaacgagactggattgcgatgcgccagcctggcacactcgcgctctgatctccaagatttttttccttgcagggagagcgccgcagggag

SEQ ID NO: 8835 - DNA, 455 bp, Homo sapiens
  source 1..455: mol_type = other DNA
ttcagagctcttttaaaaaaaatcagggatctggttcaactcttcccttttaaaaggataaattgagcccagagtaacaaggacatgtgttttactcacatacaactgcattctttaaaaatcaaggcaaccttttgaggagattaattccatatcctctctcaccccaccgcttacacggaaagaagcttgggggtaggattaaattcaacccggagtctaacaggctattggccgaataccgggagaagatctggttttattaatgcagtaaccgagatgcatctgagacattgggcttcagagccccgcggggtagccagggaccccggtagcccctgaaacttgccctgggctctctgacgcctgcggccccgagcaacgagactggattgcgatgcgccagcctggcacactcgcgctctgatctccaagatttttttccttgcagggag

SEQ ID NO: 8836 - DNA, 427 bp, Homo sapiens
  source 1..427: mol_type = other DNA
tgactgacttcatcattcagacctcagctaaagtgacatctcctgagataagttttctttcaccatccttgataaataattatttatcaattactatctgaaattatattattaatttattcatttgcttgtgtgttttcagaattccctactgcaagaaaagctccactagggcagagaccttgtcttgcttgtacactagtgtttctacaaagcttagaacatttaagagtttgggtaactgtgccaactttcctaaatttctatgagtgttcctaattctgaagtccatttgccttttgcttacagcaaagctctgctgagactgaagagtcatgtaccagtggaacaagataacttgagaaatctattgatctcctattttgggagaggtctctgcattggccctcagcctgtcaaggggagg

SEQ ID NO: 8837 - DNA, 372 bp, Homo sapiens
  source 1..372: mol_type = other DNA
aagcttgaatcctctatgacttacgattctgatgctataggaagggggcccattttaaatgcctaggattgaaaagagaccaccgtttcacttgtaaaggtagacagggactgtcaaatacctggtcaaaatacctgccataggagagagaaagctttttcctttaaatttcctaggagggatttctagggtctttccctcaggaattaggagtgcaggagatatatccagcgcagcccatagcagctggtcattcccagcagcttcagcctgggggctgggggagcgggcagaccgttctgcacacagctgtggaactccaagctagctcggtgggtattagcgagccagcgctccagctagcatgaggac

SEQ ID NO: 8838 - DNA, 342 bp, Homo sapiens
  source 1..342: mol_type = other DNA
ttagtgataattccggaaaacatgagttcttaaaggctaagtcccttcacctcttatctgtacaataagattgattttaatattttactagctctgtcagtaaatcagatcatgtcattcatctgcttagaaaccttcaatggttttccactggattccaaacaaaaatcaaactgctcataagccttacaagatttggggccggtgtccctggagcccagggcagtgcctggcaggtatctggctctcagtaagtgttcgatgaccgaaaaaagaatggcaaacattctacgactcacgcctcggcgctcctagtagtcccctcgcagcggcggtctgcgc

SEQ ID NO: 8839 - DNA, 385 bp, Homo sapiens
  source 1..385: mol_type = other DNA
ctcattcataatctaggagaaagcaagtacgtggaactgcactatttagtgtttttgtacgtgtagaaataattgtagtttctcctccagttattttctcagttggaggagaaatgtatacggctgagccatatttttaagaaataaaaacatatatattacgtatatatatgtagctagtcaggtgaggggcttggaacagtgaccggcacgtaaccgcccacaggttaacagctgctatcacttctcacttcttcccacattcaagaatgggcgtaaacgtccgctcccaactaagttctcaggcggctgcccgggccctgcccccagccacggcagccgactcggcgttcctactgccccggaagtgctccttcagcgcaga

SEQ ID NO: 8840 - DNA, 385 bp, Homo sapiens; identical to SEQ ID NO: 8839
  source 1..385: mol_type = other DNA

SEQ ID NO: 8841 - DNA, 366 bp, Homo sapiens
  source 1..366: mol_type = other DNA
caagtacgtggaactgcactatttagtgtttttgtacgtgtagaaataattgtagtttctcctccagttattttctcagttggaggagaaatgtatacggctgagccatatttttaagaaataaaaacatatatattacgtatatatatgtagctagtcaggtgaggggcttggaacagtgaccggcacgtaaccgcccacaggttaacagctgctatcacttctcacttcttcccacattcaagaatgggcgtaaacgtccgctcccaactaagttctcaggcggctgcccgggccctgcccccagccacggcagccgactcggcgttcctactgccccggaagtgctccttcagcgcagaccgc

SEQ ID NO: 8842 - DNA, 379 bp, Homo sapiens
  source 1..379: mol_type = other DNA
cctggaggggaggtggtgccctgggcgccgaaaccaagcgcagggtcttggcagggcgcagtcgcttcgccggtagacccggggactcgctacagcttggagctccagccgagattggcccctgggccccactcctggaggggtcgcccaaacccctcggggtcacccccaatattgcgagtctggccctcggtccagccaggcccctgctcaccatccctcccccgggccggagagtctgcagcccggttcccggccaggaagtagcctggcgccggagactggcggcggcgacgcccaatgggacgcgccagcggcggcggcagccccgcccagagagatggtcgcgtgaaggcgggacttccgctgtcccgcgaag

SEQ ID NO: 8843 - DNA, 771 bp, Homo sapiens
  source 1..771: mol_type = other DNA
agacgtcagggctcaggtctgtttttcatcccagagcctggcacagtgtttggcacatagtggcgcgccaacggtttgctgagagctttccgggaagggctcagtgcgcttagaagcacgcgtgagaatgcagggcattctaactccaagggctgcagagaggctaccgtcacttacccacccgccggtttgcaggatctacagacgggcggcggccgggcacagctccctacagtttgcaggggccgcggaacagtgagcgtgcagcacggctgtggccccgtttcatggccgggaacaccgagtcgccggggtcaaagtaggtccgcaggtcctgggggccgagcctaggtgggctggaagtgacagccccgggggctccaggctcagaacgcccggcggggccccaggggcacggctgcagtcccgggcggaggttgccgggcggggcggcagggtacccgggcgagcggacatgcaccccacccagcgcaactcgccaactccgggactttcgcaaagctccagagggcggggggacggaccatcgcggctcgagaggggggaagcgctccggcccggcatcctgcagcgcccgggcgggccgagacgctccgtgagagggccgagcctgcagcgcagagactcggcggtcgacgcgggggcaggcggcgcggggcgggcggctcggcggggcccgggggcggtggcggcggcgacgaccccctcgtggcggcggcgtggtggcggcgcccagctccccggccggcg

SEQ ID NO: 8844 - DNA, 474 bp, Homo sapiens
  source 1..474: mol_type = other DNA
tagagcggcccgacgtagccgcgctcccaggtctcggtgcgagtcctgcggacagaccagctggccagatgccccgggcccaaggcggacgccagactgtctctgcgccagccgggctggccttcggaatggatcaggcacccgggaggccggagtggatctcagaccctcaagccgggagatgcccgtgggcctggagtccgccttctagctctgacgccgagcagagcagttggagctgggaactgctggaattcctatttagacttctagacagtctagaaacaagatcaaaaggcgggctctaggtgtaggcctagggggcccgcccccctaagcccgcagagcagggagctgagtgggaggggcagaggcggggccggttcccagtccctgcacctgggatagccactccccccctgccattggctcccgggagaggttgacatcaaagccgcggtcttatataagcca

SEQ ID NO: 8845 - DNA, 485 bp, Homo sapiens
  source 1..485: mol_type = other DNA
agatacacacctgtccatatacacagaaatgtattcttggcacacgacctcatatacagctattaatgtgcttacatacataaggcatacatatatacacattattcaatgacacatacaaaaagacatttaaaaaaattccatttgtcctcttcagtacattttattcattcatcatttatattacaaaacattgctaaggaaacttcctagactagcaaaaatgcatcgagtcaggctggaatgcagtggcacgatcttgcctcactgtagcctccaagtagctgggacttcaggcgctggtcttgaactcctgacctcaggtgatccggccgcctcggcctcccaaagtgctgggattgcaggcgtgagccaccgcgcccggcccctccccggcccctcccatcccacagaggcaggggtgggtccgtgggtgtgggtgggggaggggaaggggcgcagcacgccaccctcctttctccgcc

SEQ ID NO: 8846 - DNA, 394 bp, Homo sapiens
  source 1..394: mol_type = other DNA
cattcatcatttatattacaaaacattgctaaggaaacttcctagactagcaaaaatgcatcgagtcaggctggaatgcagtggcacgatcttgcctcactgtagcctccaagtagctgggacttcaggcgctggtcttgaactcctgacctcaggtgatccggccgcctcggcctcccaaagtgctgggattgcaggcgtgagccaccgcgcccggcccctccccggcccctcccatcccacagaggcaggggtgggtccgtgggtgtgggtgggggaggggaaggggcgcagcacgccaccctcctttctccgcccccccagcccagcccaacctcagccggccgcgggaggaggcgggagctggggcttcgaactgccccctcccacctcc

SEQ ID NO: 8847 - DNA, 333 bp, Homo sapiens
  source 1..333: mol_type = other DNA
atgtaaactcaataaaagtaaggttcttgactttcttgttcattgatatgtccctaggaactaatgccttttgaataatgatagctttaaacccaagattatatactcattatagtgagtagaggatcactagcatgactataccatgctacagatgtggaaactggcaggagactcgggtttggatcctgcaagggctgtgtgaactggacaagccacttcacccctccaaggataataactctgccccagggtcactgccgcactaagcactttgcagagtgtttcagcctagctgtgctccccgctaaggtaaagaggtggggcctggca

SEQ ID NO: 8848 - DNA, 337 bp, Homo sapiens
  source 1..337: mol_type = other DNA
gcccaggctggatagttgggactaacatgtttctatttacagaggtaagctctggaagagaaattaaaaaaagacttttcattgtacattcttttgacttgtattttatatcatttgcacatttgcttatttaaaaagttttcagaaatttaaaagcagctctttttccaaagtgctcctcaggcatgcctttcctgcatctagactcactagaaatactcttcccttgcctgccctccacaggaaaatgaaaaaaaagaaaatgagatcctctggtctctgtcacctaaaattttttaaaattggccaaatgcacgtttttcaaaaagaagggtgt

SEQ ID NO: 8849 - DNA, 488 bp, Homo sapiens
  source 1..488: mol_type = other DNA
agaggggcctcagaagctcctgggcgaggcctgagcccgtgggtctcgacactaaaatctggcgagctccctgcgcgtccgcaaagattttggagctctgaagagcccggcgacgcctgcgctggccaggcgccgtgcccacgggaggcgccgtcgggccagtttggcggacgtcacccacattcggctttggggagccgccccacccccaactagtgcgacattttaacggtccttcaaacgaagggccacgccctttcctcggcctttggatttttccaggccgcgcccacggcgggggggtgggggggggcgctagttctagaccacgccccttccttgttcgcgaagagggccgcaggcgggccgtcttccgcaagcgtgcttccaggctgcttcccgcgacctcacaggcagagcggggaggagcgggcgtgaccaggcgcgcgcgcgcgtctggagtgactctagagcgctctgggcacggg

SEQ ID NO: 8850 - DNA, 546 bp, Homo sapiens
  source 1..546: mol_type = other DNA
tttgtctgctctcccaccgcggagaacacgaggcggaggcgcgccccagctggccacacgctgcccagggccggcgtcggtcaagagccctctcttcagaggggcctcagaagctcctgggcgaggcctgagcccgtgggtctcgacactaaaatctggcgagctccctgcgcgtccgcaaagattttggagctctgaagagcccggcgacgcctgcgctggccaggcgccgtgcccacgggaggcgccgtcgggccagtttggcggacgtcacccacattcggctttggggagccgccccacccccaactagtgcgacattttaacggtccttcaaacgaagggccacgccctttcctcggcctttggatttttccaggccgcgcccacggcgggggggtgggggggggcgctagttctagaccacgccccttccttgttcgcgaagagggccgcaggcgggccgtcttccgcaagcgtgcttccaggctgcttcccgcgacctcacaggcagagcggggaggagcgggcgtgaccaggcgcgcg

SEQ ID NO: 8851 - DNA, 317 bp, Homo sapiens
  source 1..317: mol_type = other DNA
aactcactcaggtacaacaatatttttgttaagtggcgcccaggctggagtgcagtggcgcagtgatctcctgcctcagcctcccgagcagctgggattacaggcgcctgaccaggccggtctttggctgtgctcaggcagcacctgaccctagccagggttggggcggacctcctaccgcgggctaggtactgagggccagtgcagcacgcgtggtcccgcccttcccagcccggcggtagcgggaacgcaacgcgcggtgctggctgggcctcgacgcgcaccgtagcgactgcccgagaaggcggggctcggag

SEQ ID NO: 8852 - DNA, 376 bp, Homo sapiens
  source 1..376: mol_type = other DNA
ctttaacatatcctaaatatgtttcctcatttgaagaaggaaaatgataatccatgccttctgcctgacataaggcagtaaatgatacatcatatttgaactatttgctctttaaaagagattttagtctaatcctagcatctataaaaaggcttgagcccggggtcgaggctgcagtgagagagaccctgtttcaataaaatgaaataaaatagctttcacactatttcaactgatcttcaagcttgtcctaaggttagtcatttctgataagaaaacaccggtgaattttcggaagcccacgtgctttcggcctttattaattaattcctcgagcgccggcccagtgcttgcgatcttcggcgtgccagaaggc

SEQ ID NO: 8853 - DNA, 325 bp, Homo sapiens
  source 1..325: mol_type = other DNA
aggtttcctcttgttgcatggaaagggaacagaattaggacgcattctgattcaaagtacattccaacagcctataaaatgttacatttttggaccagcactgttgcagaacagagagcaacaaaagtgcctgaaaaataattgcattatttttagttgctgcagcaaaaaatgtacatatcaaatttgatcaaattagaatttacatctctcagctgtaataagcttgttcagaattggttgtagaagcagttttcgcagagctgtgagtcggtctgacaaaggcagcttctgagcgcaggctgggcctgcacacactcagcgg

SEQ ID NO: 8854 - DNA, 306 bp, Homo sapiens
  source 1..306: mol_type = other DNA
aatttttaatagtattctccaaaaacctcagctagtgctattactgcatatgatgtaggtgctattttaccaggaactctcagggttacccagcattgtgagtgacagagcctggatctgaacgtaagtctgctccagacttctgtttcctgaagcatgttaggcacagtgattcacattcactctcaatttctcttgctaatggcaaacttggcaatatgactgtctctgaaaagcaagtgcatctctgccactggaaggctggcattcaggctggagtgcagtggcgcgatctcggctcaccgc

SEQ ID NO: 8855 - DNA, 240 bp, Homo sapiens
  source 1..240: mol_type = other DNA
gggaaagaagtctttacttgaaaaggacacgtatgttctcactgatatgtgggagcttgggtgatgggtgcaccaaaattgagaagggcttctcttcccaaataaaaagtcaaagactaacaatgtgaaagcctttctttttatgagagaaaaaacaagctccttaccagttgactggattcctaagtgacttaaatgattgttttggcaacagactcataaaaaatttctatttgtact

SEQ ID NO: 8856 - DNA, 406 bp, Homo sapiens
  source 1..406: mol_type = other DNA
atggctgtttacaatcaattaaggatttttaaaaatctagaacatttgtgaattcttatattttcttcctggtactaagtaggagctagccgaagttctggttcagtgtcttcctaaaacttaaaaaaaaatttaatttttttattaaacttttttttaaataaaaaattgagatggggtttcgccatgttgatcaggtggaggcaactttcagtctaactattgggaatctacatgtaaacacttgccagtatggagagtcattgtgacaggctgtacagcagttgggacaactgtggcacatgcacaggttatacaggcatatttgcaccagcacatgcatggatgcttgtgcacatataggggctcagcacatttcatcatgcatcgcccattgggggaagcc

SEQ ID NO: 8857 - DNA, 331 bp, Homo sapiens
  source 1..331: mol_type = other DNA
caaggctgcagtgaaccatgaatgtgctactgcactccagccgaaagaaagaaaaatctaagtgttccattcttagcatggggtgctcaataaatatttattgaagtaatgtttgtaataggaaaagttaacctggcttttatttctgccgtttattcactataaattgagaaacttggccccaggtagtttaaagtctcacaaagtctgtatagtttttcaagcctggaaacatccagatcttggctgaatctttaaaaacctactgattgggccacttgttccctgtaatctgtttaaatttgtaagtggatcaaatccagtaaactaa

SEQ ID NO: 8858 - DNA, 453 bp, Homo sapiens
  source 1..453: mol_type = other DNA
tacaggcgtgacccaccgtgtgcccggccacttttagtttgaatgtttttactgtagttgagtcatatgaaaaaaaaatcaaaagaaaatatataatgaatgttttatcatatataaaatatatatagtttttttttaatggaattaactttgtcatttgaggaaaatgaggagacaagtctcaatcattttaggagattaaggcacctgagagacaggtctatgactttctcagaagatgattttctgcattttacaccgcaccggtaaagatgagctatcaatctgcattgcacagctgaccccatcttattcaggaatcaaaaagaggaggtgagtttggggtcccaaaatttaatttcttttcacaactttaaaccttaaaacaactccatgagtagtttcaaatacacaagatccttatttaaccaagggtttgtatttactaaaaag

SEQ ID NO: 8859 - DNA, 511 bp, Homo sapiens
  source 1..511: mol_type = other DNA
cacttcccttttataaaaaaaagcttttgcttttaaggtgcccagagctgaggctacgtgagtctaagtcaacactttctgatcatccaccccttttctagaggaaaggaactgttgccaaaaggaacatgttttttctaaattgaagagttggaagtttgaaggtcaaagtcagaatatgagccatgcatgtattatctaatacaattttctcattttataaattatataaatgaggaaactgagactcaaaggaacatgccattcactgttgtgttccactttgagtgaatgaatccatggatgatgcatcgatggactcggacatgctccatttcaggtgtatctcatctgagacattcctctttgttgatatcacaggacagacatcagaacacttacaggatgtgtgtagtgtggcatgacagataatgtgactgtagacctggcagtgttactataagaatcactggcaatcagacacccgggtgtgctgagcagcactcagtgg

SEQ ID NO: 8860 - DNA, 376 bp, Homo sapiens
  source 1..376: mol_type = other DNA
tacttagaaaagatggcagactttccctatcaaatgttagttttagaaaccaaggagatcatcttgtcttcggccccaaactgtggaagaaaaggaagaaaatattccatctgtagttaaaatattcaatgtgatgatcttatcatccgccctttggaaagtcagggcatcgaacggcttcatcctatgcagtttgatcacaagaaagaactgagaaaacttaatatgtctatccttattaatttcttggaccttttagatattttaaagaaactagaagatcttaagctgctttttgtacacgtgcatcatcttatacagctgagagatttcataattgaaatgattcagtcagagatgctgatgatagcaacaa

SEQ ID NO: 8861 - DNA, 384 bp, Homo sapiens
  source 1..384: mol_type = other DNA
aagtgtttgctattggaaataaatctataacataaaacaaaagtgattgtgatattacttagaaaagatggcagactttccctatcaaatgttagttttagaaaccaaggagatcatcttgtcttcggccccaaactgtggaagaaaaggaagaaaatattccatctgtagttaaaatattcaatgtgatgatcttatcatccgccctttggaaagtcagggcatcgaacggcttcatcctatgcagtttgatcacaagaaagaactgagaaaacttaatatgtctatccttattaatttcttggaccttttagatattttaaagaaactagaagatcttaagctgctttttgtacacgtgcatcatcttatacagctgagaga

SEQ ID NO: 8862 - DNA, 368 bp, Homo sapiens
  source 1..368: mol_type = other DNA
tatacctaggcttaaggtagaataagtagagggccaggcgtggtcctgaaggcagtgagctgagatctgagattgcaccactgcactctagcctggacatcagagcaaaagttaatgtgtccatataaaattgcatagtatactgtgacaaaatatggaactgaatcatcatttcattcaggaactttggataataagtgtttgctattggaaataaatctataacataaaacaaaagtgattgtgatattacttagaaaagatggcagactttccctatcaaatgttagttttagaaaccaaggagatcatcttgtcttcggccccaaactgtggaagaaaaggaagaaaatattccatctgtagtt

SEQ ID NO: 8863 - DNA, 346 bp, Homo sapiens
  source 1..346: mol_type = other DNA
acttcatatcaagagctcgagatgagctcgcttgaatcccggagactgaagttgcagcgagccgaaatcgcgccactgcagtccacaacaaaaaaaccctgcatgtctatattttcgaatttgtatgtaagacgtcttaattgtatgcgttaaattaaaaaatttcttttgggttattttcgtgtcataaatttctaaattcacgttaagtcttacaagagcatgttaaacattaaaacataagattgtttctaaaaaataaagcaataaggtgtcttgttcaattttatgccttaattcaaaaagaaacgaagaagctacgacttttaaaagtcttcttcccgga

SEQ ID NO: 8864 - DNA, 169 bp, Homo sapiens
  source 1..169: mol_type = other DNA
acctccttggaaggtacttccacctcgatggcgggggccctccaccttgtcctctcgaagatcagctcttttttaaggagccccactcctggttcaaaaagatgatcgtcttttctttactgcagttcaaataataaaggaatccaaaagaaatacaatctcctgcttg

SEQ ID NO: 8865 - DNA, 264 bp, Homo sapiens
  source 1..264: mol_type = other DNA
agacaatcctgagccttggttttctcactttaaaatgatgttttaaaaaataaacagactagcgcagtgagcagagattgcaccactgcactccagcctggtatcctgaaaatcagcacacagatggaaccctggttctgtagttctgatggggcccaagcaaaaaaatttttgcaagaagatgatccttgatatttataaaagcagaatggttcataaattatgtgtcccagcatttggcagggtcagcctctcccctgtgga

SEQ ID NO: 8866 - DNA, 579 bp, Homo sapiens
  source 1..579: mol_type = other DNA
aatgaaatctgttgtctggtaatttacatttaaaaataaacattggagaatttcactcctatacagcaataattattatttcatttattatttatcccttacactaaaatctcttgattattaacatagtagaggtaactgtcacacattatacttcaactatgtactaactctaaggtgacatgtatgactagcacctaccattcataagatgtatggggctgggaatccaacacaagtttgtctgttttcaaagcccacatatactttgtttattatgccattctgaaggagcattgagaaatttctatgggctttaatttaaatcttaaaaactaataaacttcagcaacatatttcttcactttaattgtccaacccaatttggtgatgatccattcaacaaatttttcttgaacatctgttaagctacatgatttaactgctggatggattaaaccaggaactataaagattaaactgtaatccttaccacaattttgagtttacagtttttcaaatatcatttcaagccattagcaaaggctgtatgtattttttacatatgcctcctccagc

SEQ ID NO: 8867 - DNA, 388 bp, Homo sapiens
  source 1..388: mol_type = other DNA
cgtttaaagattggactacactctcaacgcagcttctttggaccactgttggccccaggggtccaccaaaagcgtcacaaaatggccttttgtagcctccatgtggccactatttctttactggcaagtattaattattcacttgtaattgacaaagccagacatcagtgagtctttatgaaaggcttttgctgtcattctgaggagcaaagccatgcctagggtccaggggatggcccctgaaggggggcaggctgctgccttcttggcaagcacatagtaagtactagcatatttatgtatttattgttataatgtattaattacataatcattaagaatttggcttatgtatgtctctgtgaccagtaaacccagccccaagggc

SEQ ID NO: 8868 - DNA, 375 bp, Homo sapiens
  source 1..375: mol_type = other DNA
ccaaagttttgaagccttgaagagaaaggtacctgggggcagcttcagggactcttctccagggaaaagctcaattggtggaaggccccttctctcctggcaggtgataaaactccaaacacccaagtcctggcacggtacttgatccgaacgcggccatggaggccgtggaagaagccttccctccctttcccgcccccagggcaggaagcctgggggctgagcgtgcgccggcggtacagcggagagcgtggagagaccctcgccgcagccatttcctgccctttgtgtgacagccgctgcggcgaaggggcgggcgctgggtgggggcggagccgcggcgggcggagcagcggggccggggcggggccgagc

SEQ ID NO: 8869 - DNA, 324 bp, Homo sapiens
  source 1..324: mol_type = other DNA
tttattctctcacagttctggagaccagaagcctgaaatcaaggctctcgcagaaccatgccctctccaaggctctaggggatggaaagacattagtcattggatttagggctcacccttaaatccaggaagatttcatcttgagatccttaactagttatatctatgaaaagggtcttgaccagtaccatataactatgtaatggcacattttaacctttttcagccaaaggaatgagagctcctctcactgggcaaaagcctttccaggctggtccctgaaagcatcgtgcgtacagatgcctgctggttgctgctgatctg

SEQ ID NO: 8870 - DNA, 363 bp, Homo sapiens
  source 1..363: mol_type = other DNA
tcagtgtaaaatgcctctcagctgagatccccagcaagttacttgagcattactgttacccatagtaacaaatatgctttccattgtgtataaataattttaaagtggtaatttcaaaaacattggtctctaagagatgatcacattttgtttcccccattaaaatataagggtattatctattcattagacataaatatatattgagcattaactcactatgtacctgttcacagatcagacctgggttgaatcaaaggttcccaattggcagcagtactctttccctggggatggagctgggtgccggtgcaggcatcggaggagcggtgccggggaacccgcctcctcacctcttgcccc

SEQ ID NO: 8871 - DNA, 519 bp, Homo sapiens
  source 1..519: mol_type = other DNA
ttactgttacccatagtaacaaatatgctttccattgtgtataaataattttaaagtggtaatttcaaaaacattggtctctaagagatgatcacattttgtttcccccattaaaatataagggtattatctattcattagacataaatatatattgagcattaactcactatgtacctgttcacagatcagacctgggttgaatcaaaggttcccaattggcagcagtactctttccctggggatggagctgggtgccggtgcaggcatcggaggagcggtgccggggaacccgcctcctcacctcttgcccctagcacggggcggtgactccagagctgggagcctggcagcgtcctcaccccaggaaggcatgcgcccctctgcgggcggccccagccctgggccccctgcccccggaattgcccaagatgccgggtgactcctccccggggactctcccactctgggacgcgtcactctccccacccctgggtccggaccccggcggcttctcgc

SEQ ID NO: 8872 - DNA, 288 bp, Homo sapiens
  source 1..288: mol_type = other DNA
gaactcctgagctcaggcgatccaccctttatttatccataagtgtatgctacttttataattaggacaaaggtcaggagttccagaccagactattgctatgtttttagatttacaaactaatatgaacaatgacctatgcacagcctagcaaacacaaaagtcccccaaatcctggtttttttttgttgttgttgtttaaaaaaaatccctaaaacatttaaggacagtgggtgaaatattccctttcaagtaataaaggtcattttgaaccaaattgctttccac

SEQ ID NO: 8873 - DNA, 474 bp, Homo sapiens
  source 1..474: mol_type = other DNA
gatagtactcataaaagttattttctccgattaattaaataagtgaatatgtgtaaagtgctgaagaatattctagtacatagaaagtcctcaataagtaacagtagttattattatttttggtcaactccctcctcccaggcagaaggaatggctcctggatttgtgtcctgcttaaaaaaaaaaaaaaaaaaaaaaaaaaagaagtccatatagcacttagttctttgtgcagcctgtctccgagagtggcggcccccgggggacggcgctgggtgaatcacctctgagtgtcacccaaggcgtctggcacagtgcgggacagtaaacgggccgctgtgcggagaggggtccagtttaacttggggggctcggaagccaagccccctccgggctggagcctcccctcctccatcccctggcggaggcccgcggggctggaggcggagcgtctcgggccgggtggggaggcgc

SEQ ID NO: 8874 - DNA, 420 bp, Homo sapiens
  source 1..420: mol_type = other DNA
tcaactctcctttctgtgaaatgggaataaaagaaaaaagtaatcatacctagctcctagtaagtgctcaataaatgttagttataataatcattaacaatgcagtctgagacagggtcttgctctgtcacccaagctggagtgcagtgtccaatcaccgctcactgcagccttgacctcccaggctaaattaaattttttttttttgtagtggcggagtttcacaaacaacaaccacagaaacttacacagacttctgaacagtcagcattcaaagatatctaacagaatagctaggcaattggcttaagagtgacttttaacaacaggtccttgctaacaagtctctcgtcaacacgcagggcggggcaatgctccatgctgcgcactcattggctaccgcgttaccctggtaaccgt

SEQ ID NO: 8875 - DNA, 471 bp, Homo sapiens
  source 1..471: mol_type = other DNA
tatctttcttgaggatggaaaaaatgaatttgaaagagctttgtaaatcacaaagtatgacacaaatattaggattttatttttactattatcacaagatatcaaacactggttctgtgattatttaatggtgaaaaagttgaataaatcaatttagtatacccatatgttggaatattgagtccatttttcttttaaaaatcacactttggaataattgcattccctgtgtaaacctacaaacaaagtgttaattttcttaactatagttttggtgtattccagattttctacaagttaataaatgccactccttcaaacaccagaaaaagaatttttttttttttttttttttttaggtcaagaccagcagataaaaaataatttttaaaaacctcgtgagacatcctctttgcctgggaggtttgactgccctacggctagagtagccgcgaagagaacacttccggg

SEQ ID NO: 8876 - DNA, 458 bp, Homo sapiens
  source 1..458: mol_type = other DNA
ctcttggacttcctaagtcttaaggaaactttaaaatcaaccaaaaaatattttgccgaactgagactataattcttccaattggttagcaatgcttagaaagacagtgatataatgaattttctttgatactaagcacaaatttgtttatgcacagggtattagcagacacccagtattggctgacatgcctgaggtcagttctatataggtgctatttatatcatatttcagaagtagtacagcatggaagcaaactgagacattcattgcctcagctcaagctaggatgcgatcccgagctcattcccggggaggcggtgcgaggcgcgggctggtcggagccgcgtaccacgccccccggcccgggtggaacgaggacaggtgctgccctcccgcggccgcttcggcgcagtgcaaccccgcgccgcggctgcgcagtgccgccctctggcggc

SEQ ID NO: 8877 - DNA, 657 bp, Homo sapiens
  source 1..657: mol_type = other DNA
attacactatatgcaattatcttaaatgtttccttgattattacaattacgtttgaattccaagagagctgggtctttaactatattccccacttctggaacatacagatgctcaataaatattttgtaaaatttcagcagatggatcaaatgaaacttaaggttgcttgtagctttaacaaccattgcaacaaatggaagcaatgtgcatatttatccttaaaaaacacaaacctgtcatatgtatgtgtatgtgtgcgtgtatatatatagtaaagcatttaacaaggatttcaggtagttgtctaaatataaaacattgtatcatagaattagagaaggatttagaatacaagttcttcaattaaggcctgtatgccaatcatacttctgtataatcattactaataacatagtaatactgccttacatttgaaaagtgtttgagtgtgcagtggttctgaaacttgagcgtgatcagaatcacctccacctccaaaatttctggctcggtaggtctggggccggggactgggaaagcttaagagaaaccatcccaaccaaccggccgagctcggcactcaggacaagtcccggcgtgccccgcgcgcagcggcggaaagtcggacacttccgctccacgcagcgcctgtgctg

SEQ ID NO: 8878 - DNA, 215 bp, Homo sapiens
  source 1..215: mol_type = other DNA
caggacgcggcatcagccctgggagggcgcagcctgcgagcctccagcgcgctcagggcgcggcgaggatgctagcgccgccactgagcgtggcctggcgccgccagcgagccggctcccgggccgcgattggctgcgtgaaggggcggggcctcgatgcgcgggccccgcctcctccctctattttagcaaggagttgaagtagcaaagccggc

SEQ ID NO: 8879 - DNA, 291 bp, Homo sapiens
  source 1..291: mol_type = other DNA
tttttttttaattaagactttctgaagaaaagggcatacttttcactgaaaaagtttgagttttttaaatgagcagatactcatgcattactagtagaactgttaagatacacttggctctttgctgcctttcccgcactgccaagagggaaacatgcttcgctgtatggaccagatgggtactgggttttccttgcattcagaggaaagacagcctcagattctaagtctctgaaattattagtgttggcagcccctgggccagagcggccacccagggatcggcgctat

SEQ ID NO: 8880 - DNA, 408 bp, Homo sapiens
  source 1..408: mol_type = other DNA
acacaccttcaggccaacagttcctgccctaaaaggcgacgaactcctctacgttttaatttcatactgcaataaaattctttgtaccaaaccatgggatcaaaattgttacatcagtgaacagttccaatgcattcattcatccagtcacttactgcacggctgagccatcccagacgccaaggagtttacagtctagtccagtcagtgacgcctctccatagccacccgagccgggctgtatgggcttggctaggcatgtctcccgcccacgcaccggaggcggtgcggaaagcactccgcgggcgcgattgtgagtgagcgcgggcgcgcgcgggaggggcgcgccgcgctggctgggccgcgcgcaggcgcagagtgcggaagtcgggccgcggccgccgcaga

SEQ ID NO: 8881 - DNA, 356 bp, Homo sapiens
  source 1..356: mol_type = other DNA
atcaataattcaattcaactctgacaccaattacctggagtcagtgcagaccccacaagttatttggggatttattagatgagatttgggtggggacacagccaaaccatgcagttttattataaagaaggtggacagaaagcccatgccctctctgggcatccacatccctaaacgttgttgttcaagagattttactgaaatttcatgattgatccagaccctcttcccctctccacagttaggggttaggggatgggtctgaagctctctagaggttaagaattccatgttatgaattacaaaagagtcctattaggaaattctaaaggtttagaaaccctcaacttgatgtc

SEQ ID NO: 8882 - DNA, 191 bp, Homo sapiens
  source 1..191: mol_type = other DNA
cctggtatacgtgcaggtacatgttcctgttcacgtgggggtccacaccggtgtacacctttgcatcctatgagcacaggatgtgcacatatttggtgcacgcgtgtgttcccactcgggtcgttattgatacacacacagagagaaaggaacttcttgaaattcccccagaaggttttgagagttgtttt

SEQ ID NO: 8883 - DNA, 294 bp, Homo sapiens
  source 1..294: mol_type = other DNA
tgactgaatgtccaacatggctggcctcagatccgacccgggagccccctattaagcggggaaaataaccccagcgggccgcctaggggtgggtgacccgcgatctccacgcccaggtcccgccctcgcggcccctgcccccgccccgccccccgcagagggcgcgccctgggagcggcgggggacgcggctggcttcccggcttgcggggtggcggcgtcggggctgcgggcgccttggctggacccgcattgccccctagtgccgcgcggagtcagggcgccgggctccccc

SEQ ID NO: 8884 - DNA, 349 bp, Homo sapiens
  source 1..349: mol_type = other DNA
atggaaattcaaaaaacaagtttcatactcttcctgaaaaagtctcttccagctatctatctctgcaataggttctgtgaattacagaaaacgaattctcaataaacattcagtgaacatttctcgaatgaatgcataggtggtgtttacaactaactgatcacaaccagttacagtggcgcgcacctgtggtcccagctactcgtactccagcctgggcgacagactgagactctgtctcaaaaataaataaataaataaataaataaataaataaataaataaataaataaatagtgaacagggacagacttccttttgtccttttttccagagtaacgcggatcac

SEQ ID NO: 8885 - DNA, 148 bp, Homo sapiens
  source 1..148: mol_type = other DNA
ttcggaaagttctaaatgactagccaaaaagtattgttttttggtggctcacaccctagaccagtctggcaggtggcaccggcctgtagtccgaggctgggtagagcctgcagagagctatgattacactactgcatccaggctgggt

SEQ ID NO: 8886 - DNA, 371 bp, Homo sapiens
  source 1..371: mol_type = other DNA
cactttgcaagttccagcaatgtctcaagactccttcctggaacagtcatcagtttaatccagtgagagcattttcctatttctgaaatattaataaataggtgactcctagaagtcaaggaaaatactccgcacctagtgcagtgactagcatagtaggcactcaaaaagtgtctgtaggattgtatttcaaactttagttgtcttttgtcgtgcccacacgcggccgcaagaaataacatttattctaaggatctctgcgcagagattcttgggaagcggttcaaagaagtggcacggccaatagcaagaggcgatgaggccaatgagaagttcctactctgcgtgggaaggatggactgtccatccct

SEQ ID NO: 8887 - DNA, 261 bp, Homo sapiens
  source 1..261: mol_type = other DNA
ttctaagctcccagtgcctggtgcacaggcatcttcaaggcacctggcaccttctcctccaggtgaccaaaggcagtgctggccctgcatgcagcaagtgctcagagaggtgatgactcctcaaacccgttgccatcctgaccctgctggcaatggggtgacagcacttccccagggtgaataacctcggggctctgtcagcaagtgcttcctcttcaggacaggagggagaagaagtgtaggggctgagcctcagcaact

SEQ ID NO: 8888 - DNA, 490 bp, Homo sapiens
  source 1..490: mol_type = other DNA
agtcagaaactaaaggctcttcagtcacagttgtttactgagtgttcacttaatacctggtgtagtgattataaaaatcacccagttggtaagtggatttgattccaaatttgtgaatctccaaaactatcactatgccatcagatgggctgactcaaaaggatgactttccaaaagcaagcaattgaattaaaaagacaatgttttccatcgcaaaaaaagactggtttttgaggcatagttcatattctgcaggagcacaataataccagtgacaatctacctccccatggcagggcgggtgcgtcctgtccgcacgtttcacgcgtggtgcgcgcaggtggcgccgcggtccctttgctccctgcgcaagccggaggggtgcccagaaggctaccactaggctccaattcccagccccccgccccgcggggcgcgggggcgccggcagcgcatgcgcgaggcccggcccccaattcccccagcgagg

SEQ ID NO: 8889 - DNA, 308 bp, Homo sapiens
  source 1..308: mol_type = other DNA
tggatacaacattagaattcaaatgcatatctgtattaaaattctgactgtaaattttgaaagccaggccttggaggatttcctttccaagtctctcaatgacttgaggctgggccagagtgagtgagaccagtgaatcctcaccttctgaactcacccacactagtgtgtatgtgcacactcacatccgccatcttggacatgtgcatgcatgtgtacatacaccgaacagcatttggattgcaattttttccaaacagctgctactgcgggccagcccacgtgaccgggaggaaggctctcccgcc

SEQ ID NO: 8890 - DNA, 477 bp, Homo sapiens
  source 1..477: mol_type = other DNA
tggagtcaggacatgaagctagctgtaccccttctctagtattgaaggccctaatttcttgaccaacaaggctggtctttttatggaatgcttctaacaagattgtacaaaaatgagtaaactcattaagtttataagaattctggaacaggaaagggctatattccgtatgggtttatttctttgaaatcatgttgttgaaagaatttaaaataaaaatatttcagatatatgatgatgacatggaaattcatccctatgctcccacttacggaaagtgggatcagcttgcataggcaacagtacacaagctatggaagctcatccgcaatctgaaattacacatggaacatggcaattatcaggcgtagttctggcagacacaataaacaaacgatttcttgttccacgtacagggctagcgcgcatgctcaatactcaatgcgtgtgggagacgcctctcccagtttgcgggcg

SEQ ID NO: 8891 - DNA, 484 bp, Homo sapiens
  source 1..484: mol_type = other DNA
aaatttcaggaatatttttaagtggaaaaaaacaaagcctgagtgattcatagactctattactgccctgtaaaagcaaaattaatatttatgttcctaaactccaggtattgcaaattcttaatacgaaaaaaatagattctattatgttgggctattttattgtagctacttttacttttacattcaaaaaggaaagaaattctaccacgaaaattagtttattttccagtgttttatttcacatgtatacttttaaagaagggatgctaatgataacatgccttatgttctcacagcacaacttttcacagctgctaaaagcctggctactttttttaacttcctaaaattctccgattctaaaagaaagctcgatacgcagcagctagagttctcgcgtttcccacggcgcaggagcactggagggcccccctccgcccccggcccctccggaagttaccgcagtggccgccggaattag

SEQ ID NO: 8892 - DNA, 401 bp, Homo sapiens
  source 1..401: mol_type = other DNA
tttgctattcctattactccctccagagggactggttttggctaattaggccttaacactcctaagcaaatttcaggaatatttttaagtggaaaaaaacaaagcctgagtgattcatagactctattactgccctgtaaaagcaaaattaatatttatgttcctaaactccaggtattgcaaattcttaatacgaaaaaaatagattctattatgttgggctattttattgtagctacttttacttttacattcaaaaaggaaagaaattctaccacgaaaattagtttattttccagtgttttatttcacatgtatacttttaaagaagggatgctaatgataacatgccttatgttctcacagcacaacttttcacagctgctaaaagcctggctact

SEQ ID NO: 8893 - DNA, 597 bp, Homo sapiens
  source 1..597: mol_type = other DNA
ctctctctcagctgatctgcagcttaaaatgcatatatggttttaatttatatcttcatcttgtagttgttcaatgtattccattttactatagaaacaggaaaaggtcgtcaactttttcaagcaaaatttcttttcatatctgggaaattggaattcctttttaatatattattgagatgttagaggtttaaaataaatcactatcaaaggatagaattttaagggaagactaaattatgtattcattagaatcataattttgttcctaagacagattcgtgattagaaacagtgtcttagcctatagtcctaagattagggaacgatcagttcgttcttaatcataagcataagagaatgactcaaacgctgctgttatcctttttacagggtcatctaaataaaaatatcttaaagcaataaaccattgttattgagtcagtacctatggagagcaaaaaaaaaaagcctctcgatttattttttaatattacacgatccgttttttcttcccagaaaacgtgccacaaagtttgcaagaaagagcccacggccccgcctcctgggcggaagagccaattgggccgcgagttc

SEQ ID NO: 8894 - DNA, 621 bp, Homo sapiens
  source 1..621: mol_type = other DNA
aaaattctagactgtctaaagcataggcaaatttcatgttcttaaaaattcctagcttgtgtcttacacacacagtattctgataagatctgtaggtacatacaaaccaaaatcttatgtaaagattttcatgaagttagtatgttcacttctttcttcctaagtttggtaatatttttatttatggacccatcaataattatccatcaatacagcaacaatcaattagttgagttgtaggtaacttaataaaaggattatacatgaaaatctcattttagggtatgaatcgaagctatcaataagcccattactaattctgattttctgcacataatctgccactataatatattggtcccactttccttattttgtataatcaaacagtaatcaataaaaactatgttcatcatcagcatgcatataaaagtcactgtagagagtcttttctttcttaaggcaaggttataattgtctcacacttaattacatttacggacaaagtcattttgtaccatgcgtagagaataaaaatcaccatgaattttgatattgctggctcatttaacaatgtaaatgttcagccaagtcgaagaacactgccttcactgttctggg

SEQ ID NO: 8895 - DNA, 472 bp, Homo sapiens
  source 1..472: mol_type = other DNA
aattgagaattgtgtgcagaaatctgtatttttcatattccagataagacttatgaatcctaaaatctggcaatttctggaagaaagtaatactaacttgccagggtagggaaataaaatcccaaatccttagatttggtacctgaataagtgttctttttcaaggatatttaagtcaccattaagatcacctgtgggaggaaaaactggaatttctttacatcttgtgagaaaatttcaaactgttgctcaggttctctctcttgaggtactggtgcaacatggccaatctcctgatacctggtcttcatatttctacagatttttaatcaaggaaacaaaatcaattgtgtggccacagcagggctggtggagacatgggttagccacccaccagctaagagcagcacacaggtggcctctcgggtgcctgagctagttaggccagtcggggaccacctgctccagccac

SEQ ID NO: 8896 - DNA, 524 bp, Homo sapiens
  source 1..524: mol_type = other DNA
tgggcaacatatatctatggcctaaaatctgtccttcttaaaagttgcatcaatgttgctaaatatatggaacttcattgtggaatttttttaaaatggagaaattacaaaaacccatcagttaaattgcatccatatggtgactaaattatcatagagagaatgtttaataaggtaaaaaatagatccaattttgctttttaaaatatttgcatgaaaaacatttagagatgtattcaccaaaatttaaaccaatgatggttctttgagttgtaaaattaaaggtaatttgtatttttttctttttattcatctgtcattttgaaattttttataatgaacaggtatcattaatcttaatatagtaaattgtattatttttttcaattagggaaatccaggagtagccaaggcagccttttggtgcagcatgactcagcagctttggagtgcgggcacacaacccctccacacattatgtaaccattccatgtgaggtgcattagggtaaaaagtataattac

SEQ ID NO: 8897 - DNA, 293 bp, Homo sapiens
  source 1..293: mol_type = other DNA
ggttttcttcaagcttgctctttgactactagaagagaccaaggaaataaagttcaaactccttgcctgagaccagaagtgggcttactaatctggttttgcatatttaaaaggacacacaactaccgaaacttaagacgctgtagttattttgtcttaacgaaaggataacaacaaaaattttattctggatgcttttctatattattcaaatatgtatgtattatacatatacatgtttttccttaatttttttttttttttttaaacaaggaaatctgctcgggcagccg

SEQ ID NO: 8898 - DNA, 348 bp, Homo sapiens
  source 1..348: mol_type = other DNA
gagcgccgcgcggtagatacctagaaactcccttggtcggtgaaggaaccgaccctgaggagcccccagggctgccggggtcgcaagcctgtggagctacttccgccgcctgccgccaactctgcgggccggcgacccctcctctccgcagacaccggccgggtctagctcgtgcggtccgcgctcaactccacccgcagccgccgcgggctcctcgggcgccaggagcttgacccgccacagcaaagcgctggcagctgactcagttcagtgagacaatttctgaatctataaaatgggcgggttgggggaggggtagcgggaacgtctactcttcccgcctcttcc

SEQ ID NO: 8899 - DNA, 535 bp, Homo sapiens
  source 1..535: mol_type = other DNA
tgtgtgtgtgtataatatatattataaaatataatattttatattatatatatttttataatatatatattatattatattatataaatatattctatataatatatattctatataatagatatacacacacatatctattcacaatgccttttaaaatttttttatttaataaattttttatttaataaatttttatttaaagaaaagattaaaagtttaaggcttaaatgaactttttttgactacaacttcctcctagcaaccacgtctatagatgctttatttttgcaacatttctgcatgaggagccttaacctgctatttctcaggcattgttctctaatgatagcagtagatcccacttctgtcttagcttaagatgacacacctttgacggtcagcaaagtatctttaaaaaaatatttaatccacagcaagatggccttacaagtgctggtaaataaatcatgagcaataatctttaaatcacaatagtgttagactttttaaacagtaagagctgtgtaggaat

SEQ ID NO: 8900 - DNA, 285 bp, Homo sapiens
  source 1..285: mol_type = other DNA
ctcccattttcctaatccgagaatgatggatctcaaacctttattagttaaatattcttcgtccaggaagttttctccatgataagctcccaacctaagacacggggacttagacatatgtgtgggagtgagagaggcgagacgagtgctctccccacacgtgtaaccatatgcaggcagtggtttaatatttgatcaaaggtagaatagttgcactaaatagttgtatttttaatgggctcaccttaaaatcgggtgttcataaatttccagaggctggtacca

SEQ ID NO: 8901 - DNA, 324 bp, Homo sapiens
  source 1..324: mol_type = other DNA
tggaagacttttttcttgcaaaaaaggcacttattttgaaacaactccttgtcaagagtatcttgactttaaagaaccatgaaacaactttatttttcatgattaatgaaagggatttacatattagtatctatagtaacattctaggcaagaaatccctttgcacatttgtcaaacttcaagcagcatagaatttctccatcaaattgaattcaccaaatctgtctgcctacaggatgacttactgagagatttctaagactgtacgagtttaaaataaggattcttggcagatctgacgaccacaaacgcatgtgttaattc

SEQ ID NO: 8902 - DNA, 259 bp, Homo sapiens
  source 1..259: mol_type = other DNA
gtaacattctagtccctttgcacatttgtcaaacttcaagcagcatagaatttctccatcaaattgaattcaccaaatctgtctgcctacaggatgacttactgagagatttctaagactgtacgagtttaaaataaggattcttggcagatctgacgaccacaaacgcatgtgttaattcgtgctgcagcagcgtgcatcacttccacttcctatttattttaaatacacacacgtatacacgagtgtgcgtgtcttt

SEQ ID NO: 8903 - DNA, 357 bp, Homo sapiens
  source 1..357: mol_type = other DNA
gtaattcataagagtttagaaatgactccttattttcccactaataaattcatacaaagagtaatacttcacactcacgttaacagtcaagcaactgaaaaattgtaccaacttttctctttaaatttgctttaaaagcaaattcagaaaattggattacaccaactccattatttgataaattgtataaaaagtctttatctgtaattaaaaatcaaaggttgacttttttttttttaactactcactgtatttttagaaagattctggaatgatacgccggccaatccggctggcagccgattgacgtgagccgattggccggacttctcactccacggcccagccgtttacgga

SEQ ID NO: 8904 - DNA, 353 bp, Homo sapiens
  source 1..353: mol_type = other DNA
gtaagccccacggggcggatgcttggcatgtaacagatgcttagagcatatttgcctcctgcttgcctcccaagaagggagctgaaagaggcaaagggcgttagggcgtctcccgtcccccagggtcattgaatcgtttcaagggcgccttacagctccagaaactgaaggtgactggcactcctaattggaagttactcaagtgtactagcatttgcgcaagcgcacttccctccggagacgttagaaagtgcattttggcgtcacttaggggacgcacaccaaagcgctagcttgcgttcctgcgcatgcgcagtgacccgagcggagaggccgaggcgtagcctaagcgt

SEQ ID NO: 8905 - DNA, 401 bp, Homo sapiens
  source 1..401: mol_type = other DNA
aggcgggggctctgaccagagccccgagctgccgctaccttgaggatctcgcggccgcccaccgacagcgccacatgccggctctggaggccgcactggatatcctgggcgcgcgtgcctggcggcacctgaacttcagtctggtaccactggccccacggggtcccgcacggtatccagtccctcccggccgcggccgcaccaggcggagccgagcgcacgcgcggaatcccacgcttaggctacgcctcggcctctccgctcgggtcactgcgcatgcgcaggaacgcaagctagcgctttggtgtgcgtcccctaagtgacgccaaaatgcactttctaacgtctccggagggaagtgcgcttgcgcaaatgctagtacacttgagtaacttccaatt

SEQ ID NO: 8906 - DNA, 500 bp, Homo sapiens
  source 1..500: mol_type = other DNA
tccagttagccacttgggatccaacaattcctcataatttatattaatagatttctctgaatgcctcttagagtttaccatgctgctctaaatgaatgtaacattaaaagtcagatgatttttttagttcaatttgaatggcaatttttgatgttcttaaattggtacagagccataattcagaatagggaagctcactgagcacgttcatgacccttgaaagtcttcgaaatctagaagtccttaatgctttgtgaaacatggaacttttactctcctttgaaataattaaaagcactgggaaggaattttactaaacataatctgttgcaataaggtgtaactaaatatgctttccaaaagtgtggctcactcttcttttgcaaaagaaaactacaaggaatcttgacaggaagttgttaagtagttagttctaccaaatagttttgcaaatagattgactggcaattaaacatgaaacttctcattgggtattggcg

SEQ ID NO: 8907 - DNA, 399 bp, Homo sapiens
  source 1..399: mol_type = other DNA
ttagggctgcttaacttttaaaaaggtaaacccattaagaagtcggaccccgggctcgtttcttgttgaggtacctaagtagtttacaactttttatttttaattagttaaaaatagttttacatttttgatatctcacaaatctttcaaaacccccacctagagctctagagatgtgtcacactgcgcagtctgcaaacttgaaactcaaggcgatccacttcaatcttttcccgagtcaagaaaaaagaattcactgcctaaggtcagggccttcgcgtgggctgggggcagaccgcgcgtacccgccctctttctggggcgtcggcggagcgtggccaatcaacgggcgcggctatggcagcggaagccggaagcggcgagcggcctaggggaggc

SEQ ID NO: 8908 - DNA, 433 bp, Homo sapiens
  source 1..433: mol_type = other DNA
acagtatatgagttgggattaatatccaaaagccctacttttgggatatgcagactgcaactatactttccttccagacatgatggatgtgctttccagtacaggaaaggaaaaataatccctttcaaacttgatcagatctatctaccgaccaggaaggagaactgatttcacatacaggtgctttaaaataatttcacaacaggtagttaaaatgtaactatgctgtgctgagggaagatgatatttgaacattctatagcatccgggttttcagccttctgaaattgtgcattcctgcacacacatgtacacacatgcacatgaacaaacctttttaagagatatttcaaaaaaaaaaaaagtctgtgtcaaacactggcagcgggggaggcgtcctccccaactaattcctcaggaacctcatgctgag

SEQ ID NO: 8909 - DNA, 395 bp, Homo sapiens
  source 1..395: mol_type = other DNA
agctaatttattattattattttggctggtctgaaatcctgacctcaggttaatttctcaagaaacattgtgtctctgtgttaactgtgaagctgctagctttagctaacaataacaatggcattactattacttttacaaagtgttttcctgacaccctctggaagtcctcctagggaccctgacatttccaaatggtggaaaacttatgtttcccaattcgcaagaccagccccctaggtctgggacgcaggtgaggggcggtctctccttcccctggcaggggcagcgtaagggtggccggcggctgggactgtcccacgagggggcgcgtctcgggccctaggacccgccctcgaggcgctgcgcgcggggaggggacccgggaacccagg

SEQ ID NO: 8910 - DNA, 498 bp, Homo sapiens
  source 1..498: mol_type = other DNA
gagagaaaaggtctcactctgtcatccaggcagagtacagtggcatgatcattgttcacagcacacacgcgcgcgcgcgcgcgcgcacacacacacacacacactggtaatcatttcagaatgtatacatatatcaaaacattacgttgtacatcgttatgatatacaatctttgtcaattatacctcaataaaactggaaaaataaataagattttaactcaaatgtcacttgcttagagatagaatagcattttaaagtacacaataaatgtttgttgaataaatgaatggatttgttagttttgtgcccatttcacaaaggggcaaagtcagtgactgtcctagtctatccaagcacagagcagctctggtcgctcctgaccgaaatccccgcgggttctcctcgcagtgtctactggatcccgccaggaggcaggccagcacccagtccgacgggacagcggaccggagggggtttccgcttccgggagaggct

SEQ ID NO: 8911 - DNA, 460 bp, Homo sapiens
  source 1..460: mol_type = other DNA
taagcaaaaggattcctttgtgaataattttaactcaagctatcttaagcacagctctagagccctgattgtagcagaatggccgaacagccatgacagtcctgctgaggtctgagcccgacttcccctgaggggcctcggaggaggggccgcgatgcatctcgggctttgtagtccgggcggaagcggagcgagggggggctcgcgtccagtgcggcggcggcggcggtggcggcggctccggggaccggggcctttggagcggctgcgggggggccccggagcggcgaggccggcggccttccccagcttgctcggtcccggccacccctcgcgggggtggggggccgccccctgggccgggcatctcctcaggcgccgccgccccgccctaggccggccccgcccggcctgaggggaggaaccggccgggcctcgccgcgcggcccagccacctccg

SEQ ID NO: 8912 - DNA, 266 bp, Homo sapiens
  source 1..266: mol_type = other DNA
ttcctggccattcccattccagctggaggactaagactcttttcttctcttttcccttaagcaaaaggattcctttgtgaataattttaactcaagctatcttaagcacagctctagagccctgattgtagcagaatggccgaacagccatgacagtcctgctgaggtctgagcccgacttcccctgaggggcctcggaggaggggccgcgatgcatctcgggctttgtagtccgggcggaagcggagcgagggggggctcgcgtc

SEQ ID NO: 8913 - DNA, 475 bp, Homo sapiens
  source 1..475: mol_type = other DNA
caattggtgtcaaccacggcttcgtgggcgacactgccatccctagcagctgtgcgacctccagcaagtcgcttcacttctctgagctgttttcagacggaggacttaagtaaagaatatgagtagagtgctcagctcaggagccttagtccttggatcttaagcccggaggggtgggccccgcgtctccggtgtctgccgtgctcactgaatggagagagcgagcgccggccagctcacccggccgccccgtgccccagccgcagccgccgcgccccgggcgccacgccccattgcgctcgccccaggtccccaacccggcccgcgggccagcggggccagggggcgctccgcacctgggcactcccagcgatgcgcagcggggcagcgccggccccgccgatggagctgctgttgctgccgccgccgccgcccggagcgccccgctccgcccgcgccccgtgcgcctgagcac

SEQ ID NO: 8914 - DNA, 231 bp, Homo sapiens
  source 1..231: mol_type = other DNA
ctcgtctgcgaatgacttttgcaaaaacgcattgtcaatccagggcaattggtgtcaaccacggcttcgtgggcgacactgccatccctagcagctgtgcgacctccagcaagtcgcttcacttctctgagctgttttcagacggaggacttaagtaaagaatatgagtagagtgctcagctcaggagccttagtccttggatcttaagcccggaggggtgggccccgcgt

SEQ ID NO: 8915 - DNA, 452 bp, Homo sapiens
  source 1..452: mol_type = other DNA
actaaatattgactaccgaattttgcaaggtaggaatcactggtaaacctagtattggttgggagataatggatgtaaagattttttttccccagaaattttgttataaagagaagaaaacaaaattttttaaaaaatgaaatcatgaaatgattttatggcaatcactgcagcatgtttatgaactgtgattcatgtaacagttactaggactcatcagtgctcattaaatgttatctattattatttctgatcgcttcaatttttgaataggcatcagggttacaaaatattattattaaaaacacatgcaaacattggatctaagactgcattctcgggctttttctctgtagaaaacgaggagtaatactcataaggctgcgggcttaactgagataatctgtaaactttaacacatgcgtctgcgcctgcgcctgcgccaagcccac

SEQ ID NO: 8916 - DNA, 451 bp, Homo sapiens
  source 1..451: mol_type = other DNA
gagataatggatgtaaagattttttttccccagaaattttgttataaagagaagaaaacaaaattttttaaaaaatgaaatcatgaaatgattttatggcaatcactgcagcatgtttatgaactgtgattcatgtaacagttactaggactcatcagtgctcattaaatgttatctattattatttctgatcgcttcaatttttgaataggcatcagggttacaaaatattattattaaaaacacatgcaaacattggatctaagactgcattctcgggctttttctctgtagaaaacgaggagtaatactcataaggctgcgggcttaactgagataatctgtaaactttaacacatgcgtctgcgcctgcgcctgcgccaagcccacggcgcgccacttgcacatgcgcagtgggcggacgtctcgtgagacgtgggacttctcgcgg

SEQ ID NO: 8917 - DNA, 327 bp, Homo sapiens
  source 1..327: mol_type = other DNA
gctgtgacagctaaatagtgtatttacgtattttcacgggtttgtagcaccaaaacgataaaaagctgcatccatgcctgtaatcccagctagcggaggtcgcggtgagccgcgatcgcgtcgttgcactccagcctgaatcatatgaagtaggtattagtatcccatttcacagatgagaaaactgccccgtctggattcgaaccgagatctggcgagccccaggtggggactggcctctgctccctcgcctggggaggagacaaagtggtagcctacggggcaccagccttctagtgtgcccctgcccaacgggagggaggagga

SEQ ID NO: 8918 - DNA, 293 bp, Homo sapiens
  source 1..293: mol_type = other DNA
gcgtgtgcgcgtgtgtgcgtgtgcgcgtacgcgtgtgtgcgtgccagcccaggcccctctgcgccctcttctgagttcccacccagtcccggctggggcagtgctgtgatgtggccagatcagttcatgcgttctcgctgcgctgcgtgtcagctctggtaaggcgccagcgggaaagtcccctccccgtgggctggaggctgagggagggcgggccctgggctgggatccacaggcaggtggccgcccctgggtggggccgcccggccaagccctaggggtataagtgggag

SEQ ID NO: 8919 - DNA, 423 bp, Homo sapiens
  source 1..423: mol_type = other DNA
tgcaccactgcacgccagcctgagagcactctgtctcaaataaataaataaataaatataaaaataaaccatctccttcttctcactttagagaatatagacatgatccaaagacttcctaggttaaaatagtcagggagcctcaccttagattcactaaagctgagtctttgaggtggtgtgcactgcagagtctgagacgcaataatcacgaagaaataaatctcattatcattaatgttaataatccttgtaaacattttcaaatttgtcttatgcacatatgcattcttttttttcataacaaaacgtgagtacacccttatattctataggaattgacttcatgaacacaatacgtcttttgataaagacgctcatcaaacatattttatttaattaacacaaataaggcatcttcta

SEQ ID NO: 8920 - DNA, 328 bp, Homo sapiens
  source 1..328: mol_type = other DNA
gaataaggaagatattcttttctaagatcatacagctggttgtgaaggaaattggatataaaatacccaacaattgtgtatagcacctttctcagggcaccaagaaaaatctttgggcctgcctcaaaggttgcagtggcagagattactctttactattatcattcctataaaatgttataggaaaaataatagctaacagttatggagcacttggagttaatcgcttatctgcatctatacaactaagcaggtgatagaatgaccctcccaggatgccgcaggcggagaagctggccaatcagggggcgcggcttcgccttcaccg

SEQ ID NO: 8921 - DNA, 390 bp, Homo sapiens
  source 1..390: mol_type = other DNA
gcacaaatatgttcagttatgagaaatgaacaatgtctgaaacttcacctcctatctccagggaatgtgctctttggctagaatatatggcagaatcaatagtgaataaaatatattgtggaaacaatagtgaatggaatatatgacactaccaatagcaattgttaagttttttttgcatctaagttttatgtgcatatgaagaatcactgttttcctattatacagatttggaaactgagattcccagcttttaacacagtgtagcaccttgttcagccctgggtgcctgactcactcactccttgagtgctccagcagttcactgatgtgagtcagtggttctgagaagagaccattgctttctgggatctggctacgccagaaaag

SEQ ID NO: 8922 - DNA, 401 bp, Homo sapiens
  source 1..401: mol_type = other DNA
gcaccatagcaaatggcctgggctaccttcactgatgccctcagcaccttctaaggtgaggctaacaccagctcacattgatagctgcccaccagcttgtgaggcaggtgcatttgcatggccttgcacaaatatgttcagttatgagaaatgaacaatgtctgaaacttcacctcctatctccagggaatgtgctctttggctagaatatatggcagaatcaatagtgaataaaatatattgtggaaacaatagtgaatggaatatatgacactaccaatagcaattgttaagttttttttgcatctaagttttatgtgcatatgaagaatcactgttttcctattatacagatttggaaactgagattcccagcttttaacacagtgtagcaccttgtt

SEQ ID NO: 8923 - DNA, 279 bp, Homo sapiens
  source 1..279: mol_type = other DNA
ccaaggcatagccttattcagccctgccaccagggtcctttcactgttaagagtactgcattgtattctaattatatgaatctcggtcactatcccggtgagagagcacagactcgtgcctgctccgcagggggggcattgtcctttccaagtcaggaaggcagacagcacctgctgtttctgtctgtctgtcacaggccagctccccggaggctcagcactcagcccagcttctccgagaagctgcttcctgctctgcggggagtttcctgatcatct

SEQ ID NO: 8924 - DNA, 305 bp, Homo sapiens
  source 1..305: mol_type = other DNA
tggagataagctgccttaaagccccaatatctgggattgttttgttgttttgttgaaaatatatatatatatatatatatttgttttttttttttgagcaagtagctgcaaactcctgggcttgagcaatccatctaccttggcatcccaaagtgctgggaacttccactttacagatgaagaagcagagatctaaaagcatgttttttgcctgcaaatcttattaagacctggaagcagttgtggagctctcactactcccagctgctgtagctgctccagcgtggatatgccaggaaaaggag

SEQ ID NO: 8925 - DNA, 369 bp, Homo sapiens
  source 1..369: mol_type = other DNA
tggatcacctgaggtcatcccagctactccggaggctgaggcaggagaatcgcgcagatcgcaccactgcactccagctaagggcccagaggggctgagggctcctttctcctcccgattctgcagaaccctcaaggacccgcggagcactttctgggtggggcagactttccccctccccatgagttcagtgggttaaataagatttcccttgaagtcgaatgaaatacctcacccatcagccaggtgcctggccccgggtctgtctcttaggctcccggggctcccgcacataccccggcagatgagggtgcgcaggggtgagggcgcagggctgggcgtcccccgcccccaccgtgcagccctcgc

SEQ ID NO: 8926 - DNA, 385 bp, Homo sapiens
  source 1..385: mol_type = other DNA
tgtcaggagggaaggagatgcctctgggcctcgtaccacagcctcagagcctccccttacctgcatggctggagccagagctcagtgagcagaggaagaaggcctccctcttggagaaatccagcccagtgtctcaggctgctgggatatgaaagtctcttttaacatagaataggccttctcagcttctcattggaggtgaagtggccactatagccattcccaccagggtggagggctgtccaccaaattcagagcccggcatagtgggtgggggtcacccactttatgcagaggtctgggagcatgactgagacatgatctcagaagctgacgatctccagaaactcaggaccagacgatctccagacactcaggacaatcc

SEQ ID NO: 8927 - DNA, 249 bp, Homo sapiens
  source 1..249: mol_type = other DNA
gcatttactgagcacctccctgtaatttgcagataagcatgaaacaacctcctcaaggtcatggcttctaagtggtggagccaggcctgcaaaccaggctgtctgtgggttggggtcagagtccactgaatgaaagcatgcgtgcattcaaaatagaaatgtcatctttatgagtgtctggccaggctttctcactgggaagtggccactccatgccttctgtctcaaggcctttgctcaggctgcctg

SEQ ID NO: 8928 - DNA, 290 bp, Homo sapiens
  source 1..290: mol_type = other DNA
actgatggctcatttttaaaatgctgaaagattaaaaaactttaaaaaatgaaggtgaattaagatgattttatgttaacaaaagctgagagactttgttgttagcaatagcctcttaaatactagcacagtgtctgctccaataaattctcattgcagtggaatcatttgttgtaaaatataagttcatattaaacaaaatgaaagcttgaattttacaacttaacgtttaattttaaccaaaatcaagttaaaaacattgttcacggctgacaggtcatgacccacca

SEQ ID NO: 8929 - DNA, 380 bp, Homo sapiens
  source 1..380: mol_type = other DNA
ctttaaaaaatgaaggtgaattaagatgattttatgttaacaaaagctgagagactttgttgttagcaatagcctcttaaatactagcacagtgtctgctccaataaattctcattgcagtggaatcatttgttgtaaaatataagttcatattaaacaaaatgaaagcttgaattttacaacttaacgtttaattttaaccaaaatcaagttaaaaacattgttcacggctgacaggtcatgacccaccagcttcgaatgcggacgcgaagcctggctgaggctgcgaaggacgagcggcgcagggaccccgcgggcgtctggggcttccgcggcgcccgcctctgctccctcccctcgggcgctgggtgccgaccggc

SEQ ID NO: 8930 - DNA, 496 bp, Homo sapiens
  source 1..496: mol_type = other DNA
gtctaggagctgcccgcgcctttgccgaagtcctgagccgcgagcgggttccccgggcgaccccgcgtccctagcccagccgcagctggcacgcgtgggcacctgcgagtcacgcctcggtccgcctggccggagccagggagtgtctccaaagtggccgcgaggccgcggccgaaacccgggcgggggcgaattctccccacgcgggtcggcgtcatccggggcgcggagaacgctacggtgctcccctcgccccgcgcgcaggcagcgcgaagcctgccccgggtagtgcgcccctttcgttcctccggcggcggtagcgtccaaggggcttctgcggattccgccgggtgcatttggtttggcttttgctcagatgaaaaaaaaaaaaaaggagcgctctacccacccagcgcggtgtctgggaagcggcccggcccggaggagcgggttgttaaaatgcactatttccatgaattaggcctttattgaaagc

SEQ ID NO: 8931 - DNA, 286 bp, Homo sapiens
  source 1..286: mol_type = other DNA
ttgtttgatatgttgaggcttaaaaaaaaaagatcttcagaacgccccaatgcccgcggggtgctggggtgcctcttctttcatcagagtcggcccaccctccgagctcttcagacagagctgaaaaactcattcgagccggctaaccgctaagggctgccgacgccattttgcagggtgggctgcgcagactcttggcacgcgtgcgcacaggcggtacgagtgcgcgtgctcggtgggagcccgcggagtacgcttcggagcacgcgcgcggaggcaagcgctc

SEQ ID NO: 8932 - DNA, 320 bp, Homo sapiens
  source 1..320: mol_type = other DNA
agctgattctcacatcctctcagagcctcttccatcagacactgccggacgggccgcgcagctacctaggcgtctagggagcactgcggcatggaccgcgcatgtgcggaaatgggtcgcatacgcaggacctctccgtcccggtctgggcagccttgggctgccaggaagtcaagagacggctttagtcgtggcgcaggtccagtgctactctcagctcggagttcagcttcgggctgccaagagccagcaacctggtgtcagaggctcggtcccacaacgctctgcgggccgcggcgcctgctgggagactgcgttcg

SEQ ID NO: 8933 - DNA, 288 bp, Homo sapiens
  source 1..288: mol_type = other DNA
actgagatgctcaatcatggaacgaccctctcttcctgacgttcttaccgagaggccctatcgttcctcaatgtgtgttctcagtcactgactagtaataaacagctgattctcacatcctctcagagcctcttccatcagacactgccggacgggccgcgcagctacctaggcgtctagggagcactgcggcatggaccgcgcatgtgcggaaatgggtcgcatacgcaggacctctccgtcccggtctgggcagccttgggctgccaggaagtcaagagacggctt

SEQ ID NO: 8934 - DNA, 632 bp, Homo sapiens
  source 1..632: mol_type = other DNA
aggaggccggaagagggcctcagcgtggtcgctgaccagagtcctgctggctgctccccggcgtgcagccgtccgtgctcgggagagtccagctgggatcccgtgaaccgaccccagagccccggagggggcgaggggtgggaagtgcccgggagcccccttcgcagcggcaagtgggtagccagcgacccccattcagtggagccgccccggggctgggtttgacccgcccctctcggctctccactagagcgctggtgagtgtgggcaggtgaggacgttccgtacctaactgcgcctgcccaatttgggcaacgtttgcgcggaggagcggtcactgcgctcgggcgcagagctccgacggcttccagcgctcaccgcgggtcctgcccttggagctgccggtctccgagagcgcctcccctccaaccccgagccgccaggagaaggcggcaggcaggcgagcaggcagggccgcctttgatgtgggctgggcgcacccaggcgagctgagcgcccgtccggccgcgccccgaggggggagcccccaggccccgcatcctcattgtgccggctcgggcccgggcccgcccccggccccccgccccctcgccgcccgcgcgtagaaaacg

SEQ ID NO: 8935 - DNA, 666 bp, Homo sapiens
  source 1..666: mol_type = other DNA
ttttttgaaactaggaaattaaaaattagaataaagtttttatttaatatgcaaatacactctttctcccagccctctaaaggaccgcgccgggaagccgggccctgcagggactggccgcggctgcaccggcgttgcccgtcgcacgaacccgcagcagacgggcagccagcgtgtgtgcctggggcgagtgccctcgcctgccggcgtccccatcttcaccttctgggctgacaacgatccgtgggctctcgcgaaatgccaagtcgccgtcccgcttgctcccataaaagttttgggagccacgcggcgcggcgggcgggctcctgagtccatgagcggtcccaccgagcttccccaaagcccagcccgcggctcgcggagcgtggtgtggggggacccagagtgccctgcggcgacgggcggagccggggagcgcccgcagccaattagggggtcccggggctctgccggggagcggcgggtggagccgggccggtgggcgggcgcggggacggtcccctggaacgggtccgaggctctcgcaggcagggctgggccgggcaggagctgcgaggccggcacaagggaggcggccctggggacctgacagggcgggggcgggggcgggcacgccgccgcctgcgcggttccgggtgctcccgg

SEQ ID NO: 8936 - DNA, 545 bp, Homo sapiens
  source 1..545: mol_type = other DNA
aaagcatgttataaccgtcttttttgaaactaggaaattaaaaattagaataaagtttttatttaatatgcaaatacactctttctcccagccctctaaaggaccgcgccgggaagccgggccctgcagggactggccgcggctgcaccggcgttgcccgtcgcacgaacccgcagcagacgggcagccagcgtgtgtgcctggggcgagtgccctcgcctgccggcgtccccatcttcaccttctgggctgacaacgatccgtgggctctcgcgaaatgccaagtcgccgtcccgcttgctcccataaaagttttgggagccacgcggcgcggcgggcgggctcctgagtccatgagcggtcccaccgagcttccccaaagcccagcccgcggctcgcggagcgtggtgtggggggacccagagtgccctgcggcgacgggcggagccggggagcgcccgcagccaattagggggtcccggggctctgccggggagcggcgggtggagccgggccggtgggcgggcgcggggacggtcccctgg

SEQ ID NO: 8937 - DNA, 390 bp, Homo sapiens
  source 1..390: mol_type = other DNA
gaactaaggtcagcccctaataatggggccccatgattttagggccagctccgctcgcagccccgcccgcagccaatcagagcgcggcctccggtggccccgcccttctccggcgattccgggcgggccgggccgagcccaggccgtgggtgcggagggcggcgccgcgggccgggggccgatgggtcctggcggacgcgaggcgccggcgcggggctcgcctggactcgggtgtgcggggctgtgagggggcgaggcgggcgctgcggcccgcccgggatgggccagccctggcctggcggggctgagccgaaggcgagggcggcgcgcgggccaggcctgccgggcgggcggcccgggggttgggcggaggctgggccgcggcgggcg

SEQ ID NO: 8938 - DNA, 247 bp, Homo sapiens
  source 1..247: mol_type = other DNA
aaaacagcttcttaggcagaaataagctttagactaaagggaccattaacaatttggcgccaagaatgttgggcgtggtcaatgtccacttcactttggcctaaggacgatttaagataattgtttgaatcattaatcctgaactaaggtcagcgtcccctaataatggggccccatgattttagggccagctccgctcgcagccccgcccgcagccaatcagagcgcggcctccggtggccccgcc

SEQ ID NO: 8939 - DNA, 470 bp, Homo sapiens
  source 1..470: mol_type = other DNA
caggtcacctagagtctgcctgaggatggcaattacattgcacgtatgcgccactccccatgtcccagactgaggctgggggaacctcctcctgaatcaccagggcttggggtggctttaggaacgccagcactccctgcggaatggcttccttaatcccgggcgcagcaccggcaggcaggcggtactactgacaaacatggtgcttgtactactaggctcatattatcggcaaagccgggattcgaacccgggtgtccggctctccaaactggaacgggcgacggggtcagtccagtcccctcccccggcgcggcggctcagcaccgggacaaaggccgggcgggggccggacgtggccggcggggttcgcgcgcggtgggcgggggtcggggccgggccctttaaggggggcgggccggcggcgcgggggggcggggggcgggccgggggcgggcggcggcggctgg

SEQ ID NO: 8940 - DNA, 339 bp, Homo sapiens
  source 1..339: mol_type = other DNA
aaagggaccattaacaatttggcgccaagaatgttgggcgtggtcaatgtccacttcactttggcctaaggacgatttaagataattgtttgaatcattaatcctgaactaaggtcagcgtcccctaataatggggccccatgattttagggccagctccgctcgcagccccgcccgcagccaatcagagcgcggcctccggtggccccgcccttctccggcgattccgggcgggccgggccgagcccaggccgtgggtgcggagggcggcgccgcgggccgggggccgatgggtcctggcggacgcgaggcgccggcgcggggctcgcctggactcgg

SEQ ID NO: 8941 - DNA, 651 bp, Homo sapiens
  source 1..651: mol_type = other DNA
cctgggcctcagcgttccagcctgtgaaatggagctcgagaagggcacagctgcacttcccactgagccaggtgcctgaatgaggaatgcctgttactgcctctgccaggaacatagtccatcagatggagcttatgattattatataatgtgatcgtaagcccagcacagtgcctggtgcatagactgtgctcaataaatattttagtgaatgagcgaataaattaatgaatgtctggcctaggggatagaaaaacccgggaaccctgggtgcatggtcccaggggcccgtctgcctctgtgtaagttcccccggggccgaagcactctccagaggtctgccggggctaggactcggccggctggggccccgcgcctggaagagggcctggcacacagtgggccttctcgactgccgatcctggcacccgagggcacccagctgccctgcgcgccttcccggcccgggcgcgggagcggcgagggcgggaggcttggctgtgcttctcccgccgcctggtgcaaactttcaaaagatgcggcggccgcggccccgcccctgcactgttggaggcggtgggaggcgggggcggagccggcgggcccgggccggtggctccgcctcctcctcccgcaggcgccgccgccgcc

SEQ ID NO: 8942 - DNA, 437 bp, Homo sapiens
  source 1..437: mol_type = other DNA
aaggaaaggagactccctttcgtggtcggctactaggttatattagtaatgcaacaaagagtaatattaaaagctaatgattaataatgtttataataatgattgataattgtccatgatcatctctatatctaatttgtattatgactattcttattctaaccattttctttattatactgaaacagtgagcccatttcacatatagggacattaggccccacggtgaggattcgactcaggtctgaatccaaagcccatgcatgctgttggttatcatgcagaattgcttccctagccaacccctctatagcaggactatttcctgcctccaaggaccccatgagggagggagggactgtcattatccccatcctaaagatgaggactaggagttttaaatttattttcaaagaattaatatgtcagtgtgttca

SEQ ID NO: 8943 - DNA, 632 bp, Homo sapiens
  source 1..632: mol_type = other DNA
gtgtcgggcggcccctggggggcgccgtcgagtcgcgctgcgggtcgcccctcacccctcctggaatccactgcggggccttgcgacccctcaccgggatttcagccccctgacctgtcccttggctccaagtcttccgggggccacaagacactttcatggcaaatgtagatattttaaagccaccccgccccaactcgctcgagtcggtcttggtagggacccccagtagtgtggttctgggctcgcttcgcctggggaacctcagtttccccgcctgttagtgatgcggcgaggccaaggcaggtggcacgtcgcccgttctcccggccgctcgcatcccggaggtcagcctcagctggcagcgagccctcctcctccccgctgggcctggagcgcggcgcgggtccggtccctggggacgcgccaagagcaggccggacagcagggcgggggccgggccgcgagccagcgcgcggcgagcggacccagctccgaggctgatgacgtctccccctctggctcggcggcgcctggcctggcagggcgggtgacgtcaccgccccgtcacgtgactccccctgcgcgcgggtctggcccgccccgtcccccagaggccgcatataaacgcg

SEQ ID NO: 8944 - DNA, 429 bp, Homo sapiens
  source 1..429: mol_type = other DNA
cggggaagttcagagtgagtttcccctactcagcagtcacggaggcagctgctctgtattcctgaggaggatggctcgatggacctggttcagagcagatgctctgtgaatgcccactggaagcagggacagccactgccagcctcaatagtttcaggtgcctggcactgtgctaagccagtctcctgtttctcaggaaaaccctcgtcctgtgtctgagaagcccagtggctttcccagagaggccctcactcagagctagacgctgtgcacggccaaagtctgtgaaactgttcctgcccgcgggcccctttaaccgggtggcggaaggggcggccgggcgggcggcgcccaatgggctgcgcggagcgtcacttcccggcagcgggaggcgagtggcgagtggcggggcggccggcgggggcgggg

SEQ ID NO: 8945 - DNA, 398 bp, Homo sapiens
  source 1..398: mol_type = other DNA
ccctgggcagccaacctgccccagaggcaccagacctgggctttcagctttgggaccaggctgtgttcttccaagaagcagatgcccagttgctcagcagcagcggtgctgtgtggcaacagcattctggttcccactcccaccactctgctgggatctgcagtcagacggacgccatcggtcccaaggccttaggtgagcaggccaggcctgtcctgtccgtggacctctaccttctggactccctacgggtgcagagcacttttcccagcccctgaggcagctccagggtgccccacctgctcctgaggtgggtccctactcctttcccttttgtcctgaaagggaggagcaatggtccaggcattaattccacccagggaattttagctatgccc

SEQ ID NO: 8946 - DNA, 349 bp, Homo sapiens
  source 1..349: mol_type = other DNA
cagtgtgccactgcactccagcctgggtgacagagtgaaatttcaaaaaaaaaagatacggtatggtcctattttaggaaaatacaaatatatgtataaacatgtctggcagtttatatgtaggctggagtgcagtggcagctcactgcaacctcctagtagccgggactacagccttgtacaaattttaacaagaaatattacaggggtgattttgataactttttcattcctttttaaatcctggaaagaggtccaggaatgattcgactgcttctgacatctgagatcgggttttcagaggaacctactcaaaacaattcaagaagcacttcctttgcttactgag

SEQ ID NO: 8947 - DNA, 172 bp, Homo sapiens
  source 1..172: mol_type = other DNA
gaaccagtgagtgagtgagtgaatgaatgagtgaatgaatgaatgaactccttggtttgactaacacctaaggactattctgtcagctgaagaggcctcattagtaggcactgcactgcattagtaaacgcaggtgtttaacaatgttcaacatatacccgtcggttcttaa

SEQ ID NO: 8948 - DNA, 441 bp, Homo sapiens
  source 1..441: mol_type = other DNA
ttcaacatatacccgtcggttcttaacttccctgccgccacggtgcccacggagggggcgtggttgatctccctcacagctccgtcgggaccagagacccggggaccttttacacccagggtccgcgcaaagtgtcggcctagccagtggttgggtggcgcccgggcctccaggcagtcttccaggggtcggccggagctcgggagcgacccggcggggccaggcacgggggggcggggcggcggccacaaacccgcaggcacgccgccggccgccgtttacggctctcccagctactcgggaggccttgcagtgagccgagctcgcgccactgcactccagtctggacagagcggtactcactggcatcgccctcccggggccgccaggaatgaggcactgaccccaagccgctgggggcgccattcgacttcttctgcg

SEQ ID NO: 8949 - DNA, 468 bp, Homo sapiens
  source 1..468: mol_type = other DNA
agaatgtgaactccctcaggggtgcctgattgtctgtaactccagagcctggcagcacaaataaatagtggtgcgctagttaagagctctggccttgaaaatcagataatcaggggttgaatccgggataataattacaattggagtgcagtgagtagctgggacacaccatgttggccaggctggtctcggcacccggcctggggctcatgaacttaaagatcatggcccagtgccaggcgaatagtaagggacaactattgttaagttctctatgtctagataactacactctttggggccaagttctcatcagaacactttgctgagccccgggtgaccctctggcctccaaggagctgcagccaggagacagccaggcgaaggcggggctctgcctctgggctccccgaggggcggaggccggcgcgcgggtcacgtgggggcgcgggaggcggggcttgcaca

SEQ ID NO: 8950 - DNA, 531 bp, Homo sapiens
  source 1..531: mol_type = other DNA
gcctttaagatgtataaaaagcatccctagctagctcacttactagctgcctgacctcgggcaagtaacttaactcctctcagtcttaattttcctgtctgaaaaatggatatattactactgcatgtgcttgcagggaaaactaacgttcaataaagggacgctgttgttattcagtctgattgatccctgtgcctcggaatccgtgctaaatatattgagtcgtgtctctcacttacttcaagtttcagtgaacttaaacttcacagcgcagttctgagatctgataaaacctttgggcgtgctgccgggtatcgcagacggcccacgcccacactgcagaggccggcaccgagcccccgctccgacccgcccctccggcgacacgtgacaggggtgcccggccggactcagcccctgattggccgggctgtggaacgcctcgcgattggcccgaggccggcgggcccccgcctccctcctcctcctcgccgcggcccacgtgaggggggcgagtcacgcgatttccgg

SEQ ID NO: 8951 - DNA, 281 bp, Homo sapiens
  source 1..281: mol_type = other DNA
tgggataaaaaacttacaaggtcattataagtactgctttggctaggaaaatgatcttttttcacccaatctgagggaaaagatacactttcttcagaatttggaaaataaataatgggcatgttttgctaataatcatgacaaactataataatctgttttgaattttatctaaattttggatttcatattacataataaagggagaacttgagccccacctttcccactgttttgttctactcttgcagagtagagtagttttcatcctagtttgctaa

SEQ ID NO: 8952 - DNA, 407 bp, Homo sapiens
  source 1..407: mol_type = other DNA
aagtcctaagcctttagttggattatttactaacaaaaataaaagagccaccatttgttgagggtttgctctgaaaactaccttagcaaggtagatttaataaatccagcatactttaaaaaatatatgacgtttatcatttcctcttttactccacaatttatactcactgtagaaaatattaaaaatataagaaagtttgaagaaacaaaaaattattactggtactttccagagacatctcaattgattccagtctttttttttctatgtaaaaaatatatagttattagaattctccatgttattagggccataccaagaggagaggcgatttccctacacgtgtcagggaaagtcccaactctgcgcagtgaccctctctagggggcgctgccccgagactg

SEQ ID NO: 8953 - DNA, 368 bp, Homo sapiens
  source 1..368: mol_type = other DNA
gcctagctgggctcagaggagccccgcctccctgagagcccggtggcagaagcctgagggccttgctgccaggcaggggcactccacaagacaggtgtctcctgggaagctgagcttaccagctgggatatttccctgggagggtactggcagtgacctggagttgtgctgtgcataacactactgtaggaggcctgcggcatgactgaccctgtaggccgtttgggtgctgaggaatatttcttcaaacccacacgcccagaggcctgactctgcatgcctctggtaggcttttcaggctcaaaatgcgtcgtggcccctttaaaaaagctgggcagggcttttttcctggcccaatggcaggctga

SEQ ID NO: 8954 - DNA, 422 bp, Homo sapiens
  source 1..422: mol_type = other DNA
ctggccatgcctgaaactctggcagatttgtctgaccccccacgcgcctgaccgagccgcaggggtgccccactggaagtccggcccagaggcctcagagaaatcctggcctagctgggctcagaggagccccgcctccctgagagcccggtggcagaagcctgagggccttgctgccaggcaggggcactccacaagacaggtgtctcctgggaagctgagcttaccagctgggatatttccctgggagggtactggcagtgacctggagttgtgctgtgcataacactactgtaggaggcctgcggcatgactgaccctgtaggccgtttgggtgctgaggaatatttcttcaaacccacacgcccagaggcctgactctgcatgcctctggtaggcttttcaggctcaaaatgcgtcgt

SEQ ID NO: 8955 - DNA, 298 bp, Homo sapiens
  source 1..298: mol_type = other DNA
cttccatcggatgacggcacgcgatgctccgcggcgggctgactcagggctgccttgggcctccctgcccagaccaaatactgtatctagatgtgcctaggaaactggtgtgacgcgagccaggggccccagggacactgtcccagagcacgcgtggccgccgccaggtcggcaactttgggcgctcccagcggcgctcggccaggccccgcctcccggccgtgttgtcaaaagggccggggtctcggattggtccagccgccgggacaacacctgctcgcagggatatttgaggcac

SEQ ID NO: 8956 - DNA, 496 bp, Homo sapiens
  source 1..496: mol_type = other DNA
agcctttgcaagatttagatcctcaaaacctgggttcaaatcctacttttctactttctacgtctgtaaatagcaataatagtagtatgtatctgcttttttaaattatagcatcacgcctgacacttttcaattattcaatattggcttatgattgacaatatttaatatttgggaggaaatccacacacatataagacagacttaaggaaaacttttattttcttcttcacacttttccgttattttccaattttctaaaatgagtatgcattgctattaaaactcacaaatttctgaacaatagaagtttgactgttccactgtttccggaatttcccggaacatgttgttcaagaaggacgtgggagtgcatgctgaagcacagattgaaatactggataaaaatctttaagaaataattctggtaatctatacttttaatcatccacagatgactgttatgccgaggtcaacgttgacgccatctggggtg

SEQ ID NO: 8957 - DNA, 504 bp, Homo sapiens
  source 1..504: mol_type = other DNA
aaagaggccacagtagttttccataaactaggaagctaagttaactatcgcacgtcctcgccgcaggttcggaccttcaaagtgacactggcgctccagcgcaggggaagcccactctgatcgacacgccggatagctgcggccagccgtggccatcctggccccccgcctccgccttccccactcccgcgtgcagccgggacacgggaaagggccggccaaaagatgacctgcccacatggcggccccaaccaggcgggcagtgcgccccgccgcggagacccagggccgcgtcgcctgggcagtgggtgatttcccaggcgcattaccgcacgcgggcgggtaccggggctcacctgttctccaggagaggggcgagtgcgcgccaacgccgggtgcgtgccctggggcgcttgggcgcggcgctcgtgtccccgccctcccccagccctgcgagccccccgagctgcgccgtggggtgacgggaccgagagcagttcctgt

SEQ ID NO: 8958 - DNA, 389 bp, Homo sapiens
  source 1..389: mol_type = other DNA
actgcctcagtagtgagggaactggttacatcaataagtgataaaagaggtgtatatattaacctgtctctttaaaactttttttttgagacaatcccacagtgctgggatttttttaaaggcatacacatgtgcttagaagtattctaaaaatattctcaagaagtatctgagacagtcttaatcagtttagaaagtttactttgccaaggttaaggacgcacccatgacatagcctcaggaggtcctgaggccaaaaattgtttggccccaaggtagttcttgcttttatatgttttaggaagacatgaaacatcaatcaatatgtgtaagatgtacatcttttgagtctttaatcagcctttcactgaatacacatggctcagtga

SEQ ID NO: 8959 - DNA, 324 bp, Homo sapiens
  source 1..324: mol_type = other DNA
gattcctagaaataaataggttaggtagaaaggcttgaataccagactaacaagtttggcctttatcttctcaagataaaattttagttttggaatttacagacgcctcagctgcatctctgcacctgggcagatgcagatccctctggggcggagctcgggccagagcacgtgatgcttggagcaccacagcgaggaatctctgggtgggggtccaggcgccgggcctcactaggcgaggcgcagacggaagaggcggcgtggcctcgcctgagttctggcaggtaggtggggaatgagtgctacccccacccctccctcttc

SEQ ID NO: 8960 - DNA, 241 bp, Homo sapiens
  source 1..241: mol_type = other DNA
tccagcctttagtattgcgtgtccggctttgataccctaaaaatgtcaatgtgatcaagcaaatgtcaccattttaaagagattattttcaaggaattatggctgcaaagaatgttttagctaggatccaagaaagacctggcgcttccttatttcaggcttcccttttaacaaaaagggaagcctgcatagtggctgggggccaggcatgttcaacatggaggctccctcttaaaatccc

SEQ ID NO: 8961 - DNA, 565 bp, Homo sapiens
  source 1..565: mol_type = other DNA
tgtaacccataatgttagctgctgatagtaatcctattagtactgttactaccaccagtactcctgtggttagtagataacccagagatgcatttatgatgggtctctaatttgtatgccactctgtcatctcaatggggaaaaggaagataagatttctctttctcttcttatggttttagtacctctgatatatatcatttgtataggtaaaatataaaaggtaatatttgtataagtaaaatataagtaatatttgagtgttgtaattagtatggttctttgccatgatcattaccctacccaaggaaggatcacttacttggtttatagtaagtaaactagtactcagtttttattattaaaataggagtaattggtagagtgagaccctgtctcagataataataataataataataataataataataataataataataaaaaaatgtaacttagaagatttgaggattaattaagacagtgtttatcaagtacctagaataatatcaggtgcgagttgtcagtatcttttgttttataagagattctttaataatct

SEQ ID NO: 8962 - DNA, 297 bp, Homo sapiens
  source 1..297: mol_type = other DNA
attgcactccagcctgagtgacagagcgagactccgtctgctggccagtgcctaaccagcttgggccaccttccggcagcccccgtgtgggttcctcactctgaaatcctcccgcacccaagcatgggggcgtctccctagtagtgccaccctgcatggtggtccccgccacccccacgtggtgatccgcccatccctgcgaggtggtccggccgtaacccccctaggggggtggtccggccctaaacccgtccccctcatcgcggtgccatggtccggcccggtggtctggtccta

SEQ ID NO: 8963 - DNA, 405 bp, Homo sapiens
  source 1..405: mol_type = other DNA
acaatcgctctgcaagagagatattattattcttacccagaatttggtagagcagacactaggactttccgattccaggcaccaacttggaagccatgcaatgtcctgggctggatacaaattttggtggccaccgatcatactaaccccatcatgtgtgtactattagaaacaccattttgcaaatgagaaagatacacaataaatatatttcccttctgtcctgaccacagggtcagagcacagtagaggtcttgaaccattctgtgttaggaggcaatgccctctcctagattacttgttatatggtgcatattaattatttttttgcaaaagcgcgttcccgggcgcgagcgagcaagcaggcaggcagctgccaggagctcttccctgctcgctcacgcc

SEQ ID NO: 8964 - DNA, 255 bp, Homo sapiens
  source 1..255: mol_type = other DNA
gagatttcaactttctaaggacaactgatttaaattcttcactccgaaccatttgggagagaggcactctcagcaccgactttctggaacttaccttaattaactcctaatttatttcaaacaggaaaaaaaaaaaaccccaggggcgagcgtctctggcgtcagcgccaggcccggcgcggattggcggcgcgcgtctcccacttcccctcggaggaaaggctcagctcccgtctccgcagcaaagtttgagtc

SEQ ID NO: 8965 - DNA, 425 bp, Homo sapiens
  source 1..425: mol_type = other DNA
tgacccttaccattgttttataacaagttacactttgggagagaatttacatctttaaaaatggaatcttcctatgcaatttatgatgtaattcaccatttattagatttcatcatctggcaaacagtctgttctccataaagaagacagagtgcgccgttgttgttgttgttgtttaagacataaatcaggtcgtgacttgtagcgccagtcttgccaagctccacactttaattcccttaagagccccacaccaccgtgaggatgggcttggaccggggcgaagccagaagcggagtcgcgggcgcggggcggggcctggacccgggcctggacccggagggcgggtccctgggcctcgtagctcccgggcccggacgcgcgctcacaggcgcgcgcgaggacgcgctccggggacgcgcgag

SEQ ID NO: 8966 - DNA, 441 bp, Homo sapiens
  source 1..441: mol_type = other DNA
ctctgagctgctttgtgcttgtcattccaagatgacaatgacttcctaggggaccatggcccctcatcctctgcatcgcagcccctggcacagggctggtgtgtctgaaacgcatgcaaccggggcagcccagctgaccgcctgcctcccctgcactgggctgctgtccaggcctggcgaaaaggctccctccacggagatctgtgtggttagcacagtggaaaacaaagccactgtagggtttttgaagttgattaataacccctggactaattaatttctgcatttgtgtttctagatttcagattccagaattattcaagcttgtgagggatgtcacctgacctcctgggtctagcgcccacccggggcaggtcctccagctgtggccactcagccaatatctgcacaggtggcggttgcccggtcaagggcgggctc

SEQ ID NO: 8967 - DNA, 349 bp, Homo sapiens
  source 1..349: mol_type = other DNA
aaccggggcagcccagctgaccgcctgcctcccctgcactgggctgctgtccaggcctggcgaaaaggctccctccacggagatctgtgtggttagcacagtggaaaacaaagccactgtagggtttttgaagttgattaataacccctggactaattaatttctgcatttgtgtttctagatttcagattccagaattattcaagcttgtgagggatgtcacctgacctcctgggtctagcgcccacccggggcaggtcctccagctgtggccactcagccaatatctgcacaggtggcggttgcccggtcaagggcgggctcgggtgcgaggcgcggggcgcaggcc

SEQ ID NO: 8968 - DNA, 236 bp, Homo sapiens
  source 1..236: mol_type = other DNA
ggcacgcgcctgtagtccgcagaggttgcagtgagctgagatcacgccttgcactccagcctgggcgacagaaaaggaagttattttgccctctgcttctcataaaatatggaactagtttttattagccaaatttgcatggaaaatgatgctttcacttgcagataaaaggtgctaaggccctgggctgcgatgtttgtcttgctcgtcaaaaagttagtttagagagctttctc

SEQ ID NO: 8969 - DNA, 350 bp, Homo sapiens
  source 1..350: mol_type = other DNA
agaaaaggaagttattttgccctctgcttctcataaaatatggaactagtttttattagccaaatttgcatggaaaatgatgctttcacttgcagataaaaggtgctaaggccctgggctgcgatgtttgtcttgctcgtcaaaaagttagtttagagagctttctcgaacttcagggcagaactgcctgggtggttctcgggaagcttgggtctccctgggagcgggtctgcccttagggggaggcctctgggctctgtgccctgcagctcggcaggcattcgaggcggacagaaacggggcttggcgccccccgcgtgcacgtgtgctagcccaggcaggagggagcg

SEQ ID NO: 8970 - DNA, 198 bp, Homo sapiens
  source 1..198: mol_type = other DNA
ttttactttcttgggcataggaggaaaagaaatggccttctagaataaattttgccagaggagtccttgacccactgcgagggtcttgcccacacgctccatgacctggccaaggtccagtcctggagctgctcacgaggagtttgctttaaagatcctcaggagcagcaagcttgtgggcccgtgattggagggcgc

SEQ ID NO: 8971 - DNA, 371 bp, Homo sapiens
  source 1..371: mol_type = other DNA
agcagccccgagggccgctggttgcgcatctaaacaagttcctgacattgccatggcatttacaaactgtcctggcttagaatgccttaacagtctgggaatgcagcccagtaggtttaagcctcattaccttttaaaaacaaaaaatccatttttatttaaaaaaaaaaaacaaaacatgggacaagctcaccagctggtccttctccagcaaaaagaccagagctttctgctcttgttagtgttggttcttttattcgattaaacaggaatacacatatatctatatttcgcgctgcataccgggatttgtagtcccttccggggcggggtacagcgcgcctgcgcagaggggccgtcgctcttccggg

SEQ ID NO: 8972 - DNA, 375 bp, Homo sapiens
  source 1..375: mol_type = other DNA
cacaattatactgcaatgtaattgtgctgttgataagctaattatagaattcatcaaagactttaattcttagtgcactctgccagtacgaatctaaatgtgacaaccaccaatcatagctctcctgagatgagttttgatggaacccttcagggataagagaagtcttccttctcactctcctttatgtaaaagagaaatgatattaggggatccgtgaagtggggatgacaagtgctcgcacttggcagccctttttgacccaggcacagcacacgcgctgacggattccacactcggagctgcggctccacaactcgctgggcggcgaagggtgggccaagtctcgcgcgagatcccgcggtctccggaggc

SEQ ID NO: 8973 - DNA, 393 bp, Homo sapiens
  source 1..393: mol_type = other DNA
tttaacttaacacttcttcctggggaagccaaaagatttttggtaatttggcatcatttaagggcccaggtcacctaccctcggtcactcgggggccaggacctctctccctgcccctcaaggccctctcagtccgggaggcgcttcacacctgggcagggtgggactgggcgcgcctccagcaggtggggaagtccccgcggcctcggcgtctcgcacgcctggccccaacacctgccgaagccaggacccgcgccgccacgaagcacagcgaccccggccctgaccccagccgcccgccgccggtgggcggggcttggcggcccggcggggcggggctcggggcggggccggcgtggcggtggcccgggttgtagccgccgccgctgccgc

SEQ ID NO: 8974 - DNA, 367 bp, Homo sapiens
  source 1..367: mol_type = other DNA
ttcaaggccagaccctgggcttagggtcgagacttcatagcagtgacagccagacccagcaagatggctgcgaccgtgaacgggcgatccgggtgcgcatcatgagggcggccgccgtggccaggcaatgggaaacagcaggtcgggccccgcaggtcattccccgcttcccaaatgaaactctctggattcctgtaaacagtggggctcagcccctcaatgactggaggcttcgatggttcaaaggggacctccggaatcacagggccgggagtcgccatgtccgggccacagcactccgacctcagcctcccggtgaaggtcatgatgtacgcaggcgcaaatgctccgcaaagccttgtgcacg

SEQ ID NO: 8975 - DNA, 266 bp, Homo sapiens
  source 1..266: mol_type = other DNA
cccagctattttgctcaacgtaccacgttctgacaaccgagaccctgccatgtcagtacctttctcttacggaggggcaccgccctgttgtcggatgtgggagctaccggcaaagagagacatcgcggatccgtcatctcgcggaccgtcccggccgaggcccacggccacccggacccttggccttgggcatcgcgctgaccgtgtaacaaactccttccggaaggcgtgcacaaggctttgcggagcatttgcgcctgcgtaca

SEQ ID NO: 8976 - DNA, 278 bp, Homo sapiens
  source 1..278: mol_type = other DNA
ctcaggtgatctactgaattaaatacaagtggattttgcatctaggatttttgaaaaaactttcggttacagttacacaaagcacttcctccatgggcctctcttcaaggccagaccctgggcttagggtcgagacttcatagcagtgacagccagacccagcaagatggctgcgaccgtgaacgggcgatccgggtgcgcatcatgagggcggccgccgtggccaggcaatgggaaacagcaggtcgggccccgcaggtcattccccgcttcccaaa

SEQ ID NO: 8977 - DNA, 560 bp, Homo sapiens
  source 1..560: mol_type = other DNA
agcgcctcacacacagtgctccacatggccatggctggattttataatgctgtcctggtgcttggcaaagcgcaggcaggaggctgcctgggtaaaccaggtctgccaaaggtgcggggctgcagatcaggagccaggtctgcgctcccgaggccagaggtggcctcctgtcgcagctctgtgcacggtacggccactctgtgccctgcgtttcgcctccaggccgggcgggagcagtgcctagcccaggtgtcctcgacgcgagcagctgggcgccgctgcggagggagggaagcgccgcgccggtcccgggcccagcgctgcgcccagtcctgaggcgccctcctgcggccgctgctcggcgacctcccggccctgcggccccgcccccgcggtgacgtcaccgcattccggctccgctcctcccgccgcggcgcccgcaccgcagtgacagccagccgggcccggtggcggagaggaagtgcggtccgcgccaagcccgtccccgccgacgccggctcccccgcggctcgggtgacagcgtcgcggccgccggacgc

SEQ ID NO: 8978 - DNA, 444 bp, Homo sapiens
  source 1..444: mol_type = other DNA
gttgcctttcaagtcccaagcgcctcacacacagtgctccacatggccatggctggattttataatgctgtcctggtgcttggcaaagcgcaggcaggaggctgcctgggtaaaccaggtctgccaaaggtgcggggctgcagatcaggagccaggtctgcgctcccgaggccagaggtggcctcctgtcgcagctctgtgcacggtacggccactctgtgccctgcgtttcgcctccaggccgggcgggagcagtgcctagcccaggtgtcctcgacgcgagcagctgggcgccgctgcggagggagggaagcgccgcgccggtcccgggcccagcgctgcgcccagtcctgaggcgccctcctgcggccgctgctcggcgacctcccggccctgcggccccgcccccgcggtgacgtcaccgcattccggctccgctcctcc

SEQ ID NO: 8979 - DNA, 445 bp, Homo sapiens
  source 1..445: mol_type = other DNA
tggcaaggtggcaactagaacccgcgtctcctaatcccggtccacgcagatgccgggccggggttccagcgccgcagtcacggcggtggacggcaagctgaatggtcgaggatccggggagccgagtctggaacggtggccgaagtctgcccacagcttccgcttcgaaggcggcgtcggaaatgccgcgccagtatccagagcccttcggaacctcccgagagatggtcaggagcttttgggtctcccgagaaacctcagccgaatgccattcgggatgctccggagcttctcgagaccgacagtccctcggcaatttccggaagtgttcgggataggcccgagcgtggcgccctctggcggcggccagaggtggcggggggcggggggaggttagtgggccagcgcgcgcagacgcagttgcgcgccggcggccgttcagacc

SEQ ID NO: 8980 - DNA, 567 bp, Homo sapiens
  source 1..567: mol_type = other DNA
gtcgcggcgagtgattggctctcagggcggagctcccggcgcggggcggggcccctgcgggcttgcagcgggctactgtttgccggagcctcccggcgcgcccccgcgagccccctcccgtctggcgcgcgaccccgctccgctgccgccgcggacagttcttaaagggccagccgccggctgccgcgcagacccagctgcgtcctgcgccgcctcccgctccctgagggcctgggccgagagagactgatcgcgcgtgggcctcgcgaggcagacgccgtcgggcggacccggaaggagccgggctgcccccggacccgggggtggggaggggagcacgcgggagctcttaaaggatccagatggccgtcctagatcggggccgggcggccaaaggtgagtcggtgccagggcccccaccctcccctgggaatctgcgggcagcgagaccccagggatcaggaaccccccccaaggccccccgtggccgggccgtatctcccctctcctgcagctgagcgctgcggttggagaggaaggagccgcccccctccccctgcggccgcc

SEQ ID NO: 8981 - DNA, 392 bp, Homo sapiens
  source 1..392: mol_type = other DNA
ctggagtaagggaaggccctcactttccccatctgtccgtctcatagctgctgagagctggctagggaggtctccgcggggacaccaacttcctccaccgccacgctgggggcgtggcggttaaatgtgacgtcagcgcgagcagggccaatctccttgcccggcagccagctttttaaagacgcgcggccgggccatgatgtcagcgcggtgctgcagctcttgggggtgacgtcatctccgggaaggtggccggcccagggttgaccacttgggccgctctgtcagaggtcagacgtactgccggttctcctggcgggacccatttcttcggcagggaaactgagcctcagagtcgcggcgagtgattggctctcagggcggagctcccg

SEQ ID NO: 8982 - DNA, 377 bp, Homo sapiens
  source 1..377: mol_type = other DNA
aagtttgattcccccaggcctcctctgcagtggggaagggcttggggccatgtttcctgctggggccctgcccgactctctccctcggagtcagaaagtaccccatccctccaaagaggcagggcccagtcaccttcccaggatggagctggcgcacagaggctggggtaccagccagggacacagcacagcctggcagaagggagtagacaaagccctgctaagtcctttccactcagggctggcctcaacagccctgagccccgagttcgtctggagaggtgctccccgtctggggctctggccctcagcactcgggctccagttttgagacagagcccctgaggccagcctgccctgcctctggttagcctgtg

SEQ ID NO: 8983 - DNA, 302 bp, Homo sapiens
  source 1..302: mol_type = other DNA
cccggccaccacatccctgtttccacgcctgtaatcccagttactgagccaagattgtgccacttcactccagcctgggtgacagagcaagactctaacctcacaggggctggtctggccacacagtgtttcctgtcactgagactcgtagcagggaggggacgggggctctggcatcaccttctgactgtcaccagggtcggccaggccccttctcctgtggtgtgggcctccagccccaggagcgccaggagctctggcgccttggtccctttaggagtcgacccctcctgggaggtgtg

SEQ ID NO: 8984 - DNA, 499 bp, Homo sapiens
  source 1..499: mol_type = other DNA
gcatcattgccaatggttgttaccattgattaatccttcgtgaggtgcatagtcgggggagggcgggcgggcccccggggaggccgcagccagggactggaacctccggcgtccccgccactcgctggagcgtgggcagcggcgaggcgggaaatttcctcgctggcggagccgggagatcgcgccgacctgggtccccatccaggcgcctcgagtcctcaggccggcgactgcccctgagccccagtccctccttggtcaagccaggcgagggctttcgaggggctggtctaagatctgctagacggcgcgccccgccctcagccgcagcaaaggggcagcctctccggctcgaggacggcgcggaacccgggagcccagcggccgcagttagggttggccagcgaggggcgcccctccctcgctccctccggccgcggtttccccgcggtcaccgccccctcgcggttccgaggcggccgggcggctactgcgcatg

SEQ ID NO: 8985 - DNA, 270 bp, Homo sapiens
  source 1..270: mol_type = other DNA
catatgtgcctggcattctgtgatcattttgacagtcaagcacacaaaaaaacttacaagctgtaatgaccttcagccttaaacctgcaccactggactaagcgctcagtaaacattcgttgaattaaccattcctgttttacagaggaggcgagtcttacggccggggcccccaggggcgcgtcccgggcccgccccgggaggctcatcggctacgcgctgtcaccctccccgccccctgtcagtcaggccgaaggggcggcgcggccg

SEQ ID NO: 8986 - DNA, 619 bp, Homo sapiens
  source 1..619: mol_type = other DNA
aaacttgataataaaagcttaagcatctttctgttcctgttttaaataaatacttctgaacaaagttggaattatttttaagagggcttcaaactggagtaagattcaggttcccccaaactttgatctcttacaggggctcatgtgagatcactgggtaccaaggagcctgaccgggaccctggccagtatggaccaccaagggggcttgagccaggttccggggggcatatgcccctggcagggcgcagccggcgtggcaccaaggcccaggccctcgtttggcctgagtttgaagagcagcagttaaccttcccctgggatgggctccaacagcaggctggctggtacccagcaggggaagcaaggcttctacaccccggcggcctccggcgccatcagccggcgtcccgggcgggtctgcaggacgctgggaaacgcggcggcggcctgcgcgggggcggggcctggccgaaggcggggctgcgaggaggtcctcaggcgtgggggcggagctcgggaagcggagccaggtccagaggcggggctcggggcggggcccggtccagaggcggggacagcagggctccgggcaagtgctgagggcggtccctgaggg

SEQ ID NO: 8987 - DNA, 783 bp, Homo sapiens
  source 1..783: mol_type = other DNA
ggagactccagcagcggtcactgctggaggctccaggagacgacgtgacggtgaagtcgccacccacgtcgcgggcgccgtgcgctctcggggctcaaacaccgcgcgcccagtcggtccttcggcgaacggcgccgaggggttaggggaggcgcgcccctggaatccaccagcctgcgaggctgggactgcgggtgtccccgagtctggcctgccagctctggtggccagggcacctctgcgcgcgggccagggccccggggctctcccgcagtcccctaaccaagccgcgggctggcagcgtaccgcggcgcccggacgaccccggagcgcggccgcgaggaaagggcgggggagaggactgcagcggaacctgcccggggcacccctgccctgggcggctctccgcaggctggcgccgcgccggggtcgccgcagccccgggcccctcccgggccacctgtgcgcagactggcgggcccgcgagagcccggatccggagcaccgatccactccgggttagactcctgcccctgtccctggagaccccgcggggcggtgggaggcctccacgcccaccaccccaagcccctccctgggggagcctcaggcatcgcccagagggattcccggtgctgggggtggcccgcgcgcgctgcgcggggcggcccggcccctccttccttccccctcgctccagtccgggttttgcggcgcccaccggcccgctctccggctgcgggctccgcggcgcggctggctcggtgcgcggcgcggctggcg

SEQ ID NO: 8988 - DNA, 281 bp, Homo sapiens
  source 1..281: mol_type = other DNA
tacccagtaaacttcacagcaggactgatgtttggcatgtgatagaggagccactatctctggtctccatcctgatgtcatgtggaggccttcaacaaagattgttgcaggctgtctagtattctacattggcaaggttctgtgcctttgaggagaaattcccacagaaaaacgcaggctacagactaaaggctagactccgcagtctgcggactcggcagatatatttgcaaaatcacagccttgcctagcctgggctactcttagggcaggcttggaag

SEQ ID NO: 8989 - DNA, 352 bp, Homo sapiens
  source 1..352: mol_type = other DNA
gccttggactcccaaagtgctaggattagacagagtctttctctgtcacccagtctggagtggtatggtctcggctcctgagttcaagcaattcaattctaactggaattacaggtgagagctgctatgaacatacatatacaagtttttgggtggtaatgttttcatttctactgagtaattaatagtagtggaaaaagagaaaaacaagttttcctgtacttggctgactcactccaaggccagcaataggcagggccctggcagagcctgaggataagaaaagaaaacaaattcctttctcataactatttctacaaatacctgtgtttcacaagttttgtagcaattt

SEQ ID NO: 8990 - DNA, 597 bp, Homo sapiens
  source 1..597: mol_type = other DNA
agtgcagtggcagtgagattctcctgcctcaggctcctgagtaggctgggattacaggcgtgaacccggctagacgtgaaattgctgggtcataaaatggacattttaaatttcatcacaaagcaactgagaccgcgcaaggtgcgagccggctcacgggcggtcagcgcctcccgcgcagttggtacgtcccggatggctcccccgcggcgggggttggttaagtctccgcgcgctgcgcctgcgcccgccccgagagcgtgtctctggcatcggacgcgcgcgcccctccccctccccccgcgctcccaacgtgtggcggctcgcgacccccggcaacccggagggcctgcgccagcgagtgagtacccgccgcctgcgcacaggtccgcggcccgctactctccgggaggggcgcttcccgacgccaaggtaggcctctcccgacgccggggcggcccttcctgatgccgggggcgacgcgggggtgggctccggacgccggggctggccttgccgaagtcgggggtgggtccctccggacgccgaagtgggctcgggatgcggggctgggaccctcccgattccggggcggat

SEQ ID NO: 8991 - DNA, 414 bp, Homo sapiens
  source 1..414: mol_type = other DNA
ctatttcaataacttaagtagttgtgacaagtgcagtggcagtgagattctcctgcctcaggctcctgagtaggctgggattacaggcgtgaacccggctagacgtgaaattgctgggtcataaaatggacattttaaatttcatcacaaagcaactgagaccgcgcaaggtgcgagccggctcacgggcggtcagcgcctcccgcgcagttggtacgtcccggatggctcccccgcggcgggggttggttaagtctccgcgcgctgcgcctgcgcccgccccgagagcgtgtctctggcatcggacgcgcgcgcccctccccctccccccgcgctcccaacgtgtggcggctcgcgacccccggcaacccggagggcctgcgccagcgagtgagtacccgccgcctgcgcaca

SEQ ID NO: 8992 - DNA, 399 bp, Homo sapiens
  source 1..399: mol_type = other DNA
cttttacacacatagattttctgtaaacagtatatactgttctaatttacctatttttaaatttatataaatcatttcacagtgtacatatttgttgtcgctatttcaataacttaagtagttgtgacaagtgcagtggcagtgagattctcctgcctcaggctcctgagtaggctgggattacaggcgtgaacccggctagacgtgaaattgctgggtcataaaatggacattttaaatttcatcacaaagcaactgagaccgcgcaaggtgcgagccggctcacgggcggtcagcgcctcccgcgcagttggtacgtcccggatggctcccccgcggcgggggttggttaagtctccgcgcgctgcgcctgcgcccgccccgagagcgtgtctctgg

SEQ ID NO: 8993 - DNA, 497 bp, Homo sapiens
  source 1..497: mol_type = other DNA
caactttgggtcaagtgcaggctccttgtccccaccttagaataaggggccttccagagccctcgcttggcttaccgggatggcaaagactgtaggtctgggcctgagcgtgagcggcccttcaccctcagcgcgctgggggcccgattcttggggtgcccgcgcccggatggggagcacaagtctgggggtcccggggcgcagcacgcaaggaggcgggccagggggtgtgaccgtcggcgcttccgcagttccccgcgagccgcgcagcgggcgaggggctttctgcctccaaagccccccggctgggcaccggacacggcttcccacaggcggcgcgccctctcgcggtcaaagcgcaccccggcaactccgagctgctgtaaggcccggccgctccgccgtccgcggcctgcaccgtggccggcgcgggatacagagcctctcaggccttggcccagccaacaaatctcgcgaggtttgggcgctgcacccgc

SEQ ID NO: 8994 - DNA, 320 bp, Homo sapiens
  source 1..320: mol_type = other DNA
tggcgccaaccacacccggacctcaggtcgccccccctttgatctgacttgtcataagaggattcctggaactgctgtgctgggaatgccagtgaggttggcctattagcattcgagaaatagtatgtattattagcagtaatatggaaccttagctgtactactacttactagtagcgagctcctgtgaatgaaaacgagcctctccgggaggggggggtcactgctgcggaatcagcgacaggtttccgaacgcggggtcccgcacggcagcgcgggtgcagcgcccaaacctcgcgagatttgttggctgggccaag

SEQ ID NO: 8995 - DNA, 291 bp, Homo sapiens
  source 1..291: mol_type = other DNA
aagcaagcgctgcatgccaggcttacacatactgctaacatgtactttttgcaacagagactatcaacgtcatctaagaggagcttgcatctatgtataaagagttctcctatccgctgcacggcactgcgcagaagacagggcctggcctgggggctctccaggtgggcggggatcttggccacccctggccacacctctctccggctcgagctggtctaggcggggcgggcccgagggcccgggcgggcccgaggggcggggtgggacaggaggtgggccgctcgcggc

SEQ ID NO: 8996 - DNA, 335 bp, Homo sapiens
  source 1..335: mol_type = other DNA
agcacactgcctggaatgcaggaaatggttgctgaatgaagcgatgaattacatttcagcactcatcaagtgctcagcctataactaagtctgagtgtaggctgctaacacttatcagtcaaaatgattggctcaatcttttctctggttggtcccaacacatagacaactcttcaacagaaggagcctccctgaggtcactggcagggtctgcatccggcacttgcagacatgtgctctcgagctccacgcctgctgggccagtcgctgcacacagggcaacgccaaaaatggcctttctcccaggtataactatgcacatttactaagccatg

SEQ ID NO: 8997 - DNA, 560 bp, Homo sapiens
  source 1..560: mol_type = other DNA
gttctcctatccgctgcacggcactgcgcagaagacagggcctggcctgggggctctccaggtgggcggggatcttggccacccctggccacacctctctccggctcgagctggtctaggcggggcgggcccgagggcccgggcgggcccgaggggcggggtgggacaggaggtgggccgctcgcggccacgccgccgtcgcgggtacattcctcgctcccggccgaggagcgctcgggctgtctgcggaccctgccgcgtgcaggggtcgcggccggctggagctggggagcaggaccctgtgctgggcgcggagtcacgcaggctcgaggtgagccggaacccttgtgggcccgggctgcgctcccagccgccagggggcgagaggcggcggggctacggggactgcccctcccggcgcaggggacctgggcgtccgccgggcggcagggggtgggtgcacacagggccttttgtcccgctccgtccaaagagcaccccggccgcggagctggttactcattgcccaccgaggcgggggcaggctggccctgtgcagc

SEQ ID NO: 8998 - DNA, 778 bp, Homo sapiens
  source 1..778: mol_type = other DNA
tctctgaacagcgagaaggcgcttagcgccctagggaccaggtaactcctgactggagtcgcaagttcaggcccagcttgggctccctgtccctgcgggcccggtgcaggatgcaggccgtgaggccccaggccgagggctgcgccagcgggcttgtcccggccagccgggcggtcccgtgtcccggcgcagctccgctggggtccagatgcccggccctcaggggcgaggcgcgcactccccggggaaccgggctgcggagcaggcggcccgctctgggcggcggtggcgaactgcagcgtccgcggtgcgaggcgcggcccgtcccgtcccggcccccagcccggcgcgcacgcacatacccacgccggccggcgcccgctgcccgagcccccgtgccaggcccagaccttgactaggcgcgggaggcggtgcagggactagaggaccccctcccccggcgttcccctcgccccgcccgaggctgcgaggacccctgggctcgggggtggtgagggagcttcgtcccggctgggcccgggctggggactcggcctccctgggcgggggccgcacggctgcaggccgaggtgcggacgcgctgtcaggctgcagcccggctcggtgccgggggtgggctcagcgctggggtcgcctggcttcgttcccccgcggaggccacggccgggcgagcagtgccggggcgggtaacccgacccggctccccagagccgctcaccccgcacggcccggcaaggggagggagagggagtgaggg

SEQ ID NO: 8999 - DNA, 768 bp, Homo sapiens
  source 1..768: mol_type = other DNA
gtgaggggctgtgggcaccgcagggccgagtccccggcccgtctgcgctgctgtagggcggctgcccgcggcacccgggacgatccagcctctgcctcgcgggcgtcgagcctgagacaggagggagccctggggctgcacaggcttggctcagggaggcagacccgagctgctgcctccgcctgcggccgcgtctgctcggggcctgaggcctcgaagaccccagcccaagcccccaggtgagccctgcggcaggaggggggttgccttggcctcgggccgaacccagcgggctgagggcaggtgcccagtggagcgaggccgggactgacgcgggcccgagcagggctggcgggacgatcggacaggcctcagccgcgccaggtgccgcctgggttggggtgcgtagggtgcgggagccgtgtgcggcccgaggccagcgccgtgccccgaggtaggtgaggggatcggaatgccacccacgacgcccgcaggccccgacactccaaggaggcgcgcgaggcccctggggagcccgcctcaggccccgcccgggcagccgggccggcccgtaggccccggccgcgagcgggcgcgcagggggaggggagggggcggcagcggcagctccgctgattgggcggcgctctcaggaacgcgcgcgctcggtgggggaaggggtgcgcgcgcactcggggcccagccgcacgcgggccggcgcgaggcgctcggtcgcacgcgcggccgcgggggcgcgcgcggtggggg

SEQ ID NO: 9000 - DNA, 735 bp, Homo sapiens
  source 1..735: mol_type = other DNA
tgccttggcctcgggccgaacccagcgggctgagggcaggtgcccagtggagcgaggccgggactgacgcgggcccgagcagggctggcgggacgatcggacaggcctcagccgcgccaggtgccgcctgggttggggtgcgtagggtgcgggagccgtgtgcggcccgaggccagcgccgtgccccgaggtaggtgaggggatcggaatgccacccacgacgcccgcaggccccgacactccaaggaggcgcgcgaggcccctggggagcccgcctcaggccccgcccgggcagccgggccggcccgtaggccccggccgcgagcgggcgcgcagggggaggggagggggcggcagcggcagctccgctgattgggcggcgctctcaggaacgcgcgcgctcggtgggggaaggggtgcgcgcgcactcggggcccagccgcacgcgggccggcgcgaggcgctcggtcgcacgcgcggccgcgggggcgcgcgcggtgggggggcggcggaataggccggggcaggtcgcgctcgctgccttctcccctgaagagagacgcggggggaggggggtgcggcgagcggccccgctctctccccaccgctccgctcgatgagggtcaccccctccccccagctggcccgggagggggcgcggggcacggccaggcgcgatgcggggttggtggccggcggcgctgcagccgccggcctcctccccctccccctgcc

SEQ ID NO: 9001 - DNA, 507 bp, Homo sapiens
  source 1..507: mol_type = other DNA
ggccgcgcgccacttccggcgcccgcgccacgtgaccttgcggccccgccccctcgccctctagccccctcccgcgggagtcgcggcgctgcgggtaggagccgaccccaggttcggttgggattcccagccagaacggagcttaagccgagtagcgagctgcacggcggcgtgctgcgctgttgaggacgctgtcccgcgcgctcccaggccgccccgaggcttggggtcttcgaaggaatcggcgcccggggccgaacagcgggggcacacggggcgctgccgaagtgcaaggccacggccagagctcgagcccgacgcgctgtctggcgctgcctgggccgagcggagatcggggtttgcctcccgtccccgctcaggaccctgacgtggctgaagcggccccgggagcatgagcggggccggtaatctgcacctatggccccgatctcttcccgttgcagaccatcggggccgccttcgtggccaaggtgtgactcaggcctt

SEQ ID NO: 9002 - DNA, 589 bp, Homo sapiens
  source 1..589: mol_type = other DNA
aagagactgcccgaggggattcccatttggaggctccgggcctagagaggccacgccttcctaaccttgcagggtggtatgtgctatggttcaaacattcctgccttctagcaggaatggaggatttccaggaccttgcaggcctggcctggccgcttccccgataaggtctacctaggattcgatatcgagtcgatctccagatagcgagatggggattcgggtaccgctgccagaaggcggcctccggagcacgctctggcccaggaaatacttcacggccgaagcgggctcagcacccgcgcagcatcaggggtgcggagcctgggaggcacgcgagggccgggccgggccggggctcggcgcacacccgccgccaggctcgtacgcgcccaagcagctgccgccgccgccgccgccgccatgagttgtccggccgcgcgccacttccggcgccggcgcccgcgccacgtgaccttgcggccccgccccctcgccctctagccccctcccgcgggagtcgcggcgctgcgggtaggagccgaccccaggttcggttgggattcccagccagaacggagcttaagcc

SEQ ID NO: 9003 - DNA, 539 bp, Homo sapiens
  source 1..539: mol_type = other DNA
agtcgccgggacagcagtttctggtcaggggggtgaaggtgaccctcagaagcttgcccctaagagactgcccgaggggattcccatttggaggctccgggcctagagaggccacgccttcctaaccttgcagggtggtatgtgctatggttcaaacattcctgccttctagcaggaatggaggatttccaggaccttgcaggcctggcctggccgcttccccgataaggtctacctaggattcgatatcgagtcgatctccagatagcgagatggggattcgggtaccgctgccagaaggcggcctccggagcacgctctggcccaggaaatacttcacggccgaagcgggctcagcacccgcgcagcatcaggggtgcggagcctgggaggcacgcgagggccgggccgggccggggctcggcgcacacccgccgccaggctcgtacgcgcccaagcagctgccgccgccgccgccgccgccatgagttgtccggccgcgcgccacttccggcgccggcgcccgcgccacgtgacct

SEQ ID NO: 9004 - DNA, 498 bp, Homo sapiens
  source 1..498: mol_type = other DNA
agagtaaggcctgagtcacaccttggccacgaaggcggccccgatggtctgcaacgggaagagatcggggccataggtgcagattaccggccccgctcatgctcccggggccgcttcagccacgtcagggtcctgagcggggacgggaggcaaaccccgatctccgctcggcccaggcagcgccagacagcgcgtcgggctcgagctctggccgtggccttgcacttcggcagcgccccgtgtgcccccgctgttcggccccgggcgccgattccttcgaagaccccaagcctcggggcggcctgggagcgcgcgggacagcgtcctcaacagcgcagcacgccgccgtgcagctcgctactcggcttaagctccgttctggctgggaatcccaaccgaacctggggtcggctcctacccgcagcgccgcgactcccgcgggagggggctagagggcgagggggcggggccgcaaggtcacgtggcgcgggcgccggc

SEQ ID NO: 9005 - DNA, 314 bp, Homo sapiens
  source 1..314: mol_type = other DNA
ggctccgcctgggagagcccttggccttccagtccttggaacttcagggctggcaggagggagggtgctaacgccttcacgctctcgctcttgtagggatcgtgaccaggactctagttttctaaaaatttaaattagctgtcaatccctcaaaagacatttgacatgaaaaatctgactttccagctatgaggcctgagagtcccagctaccactcccctggtaacaccgggcctgtccagagtgtacacgcagcagtgcaccctgctccttgagattgtggtgcccccccacccccaatcctgacaggacgt

SEQ ID NO: 9006 - DNA, 416 bp, Homo sapiens
  source 1..416: mol_type = other DNA
caccgccctaggacagtaatcccggggcgcctcgccctcaactcgagaggagtcccgggtgtgcctggggctgccgctgggaccaggtccagccccagcctgacgcgggcggggactctctctggcagaggccgagcaggcgacccccccaggctcctggcgcgcaggacagcgggcggtgaggagggagtgggggtgggggtgggcgccgcccctggtcgggccctcctctgcccttcttgagcacctctagatgtgccgggaactgccaacagcagttggggtcccgaaacatcccagttagctgggccagctggcaggcgcctagcgccctgccaggggactctggtgtctgaggccagcatgagctctccacagggattggggcatgggcagtagctgattccccttcacct

SEQ ID NO: 9007 - DNA, 537 bp, Homo sapiens
  source 1..537: mol_type = other DNA
tcgcagggctcctgaggcttagagaggccccggaaaaggccatttcgcgtgcctccagggtatggccttgaggaagctgttaccccactgacgttttcgtagcaacaacagcggaagctggggcccacgggggccttcgggggcagatggcttggggacagaccccggagggcaggagccgggtccgccgcccctccgccggcgcctgcgcattgaggtcaaatttggggtgcgaatgggcgagcggcggccggaggccccgcccccgcggcacccacgtgcagcggctgggcccggcgctttcaggggaccaccaggcccccagagcgccgtgctatgttgggggctagtcactagcacggggctggagggttcgctccagggccaggcctggagccagcgcccttacctgcccctggaaagtctgagaccactcggggcggggcggctgccggagggtgggctgcggctccgtgcggagccaagggctgggcgttcccgcgggcggggcgtcccgggggcggggcgggcccctgt

SEQ ID NO: 9008 - DNA, 427 bp, Homo sapiens
  source 1..427: mol_type = other DNA
tcacagactcagcccgtggctggcagcaatgctccacctgctacagctgtcctgtccccagatgtggccccacctgctggtgctgagggcaggggctgcctgggaggcaaacgctcatgccatgggcaccgcagaggcattggctctgatccttcaacgctgtcgcagggctcctgaggcttagagaggccccggaaaaggccatttcgcgtgcctccagggtatggccttgaggaagctgttaccccactgacgttttcgtagcaacaacagcggaagctggggcccacgggggccttcgggggcagatggcttggggacagaccccggagggcaggagccgggtccgccgcccctccgccggcgcctgcgcattgaggtcaaatttggggtgcgaatgggcgagcggcggccggaggccccgccc

SEQ ID NO: 9009 - DNA, 347 bp, Homo sapiens
  source 1..347: mol_type = other DNA
tctcctcttcctgcgcctccggaaggagcctggctctggaagggggagaggagcagctgggtcctgcagctcaaccctaggttttaccattttaaacagttattgttgtaaaaaagccaaaacactgtgactgcatgtccacagaccccagtgggttgggccagagcatgcttattggaagcaaacctgctctatcctgctgagcaggaaaggaaggactgggagggggccctgggacttccatggtcccagcacaagaggagcctccagggattggggtggtgggtgcccctgctcgccccacaggctgggctgcttgtggagcatctcggtgaacagcaaggatg

SEQ ID NO: 9010 - DNA, 457 bp, Homo sapiens
  source 1..457: mol_type = other DNA
cgtgctagccaggatggtctcgatctcccgatctcgtgatccggactttaaaatactggtagttaagccatttattagaatttcagctgtgagttccagtcatcactggggtcccaggccagttcaacccgactaggcctgaggagttgagggtagtggaggccctcaaataattgggaattctgagtctccaaaggcgcgaagctggggcgcctgacggcaggcacggcttaaaggcttgcccagggccacccggggaggacaagggttggaatgcaggactccgccttcaattcagagctcctttctccagaagacgtcctagtcttcgcgaatccgagtcgcggacggccctcgcgctcccgccggctggagatgagaggctgcccggccaatgcagctgccgccccgtctgctgcggaggctgagcttccggccggaggccaatagatgggac

SEQ ID NO: 9011 - DNA, 450 bp, Homo sapiens
  source 1..450: mol_type = other DNA
gtgtgtgtgtgtgtgtgacagagtctcgctctgtcgcccaggctggagtgcatggctcagcctcccgagtagctgggactcgtgctagccaggatggtctcgatctcccgatctcgtgatccggactttaaaatactggtagttaagccatttattagaatttcagctgtgagttccagtcatcactggggtcccaggccagttcaacccgactaggcctgaggagttgagggtagtggaggccctcaaataattgggaattctgagtctccaaaggcgcgaagctggggcgcctgacggcaggcacggcttaaaggcttgcccagggccacccggggaggacaagggttggaatgcaggactccgccttcaattcagagctcctttctccagaagacgtcctagtcttcgcgaatccgagtcgcggacggccctcgcgctcccgccggc

SEQ ID NO: 9012 - DNA, 282 bp, Homo sapiens
  source 1..282: mol_type = other DNA
acgtatgaattttgggggatataaacttaatttgatgctgaagggtgggcatcctgccctcggccctgacctggccccagatgaactccagttttaaaaattttagctagggtcgtgggctcatcctgctctgttccaggctggagtgtagtggcaggatctaggctcactgcagccctgacgaacccttgcagtcagatgtggacatgtgaccacttcttgccaattgaaaatgtgtgggatgacatgtgtcatttttgagccaaggctttgaagaagtaa

SEQ ID NO: 9013 - DNA, 524 bp, Homo sapiens
  source 1..524: mol_type = other DNA
ctatagcagcctgagttgactaaggcaggatttctgaggtctttggccacagatataggtgatccagtcccctacctaggtaggtgagcgtcatatctgcttacacatatgtcactggagtgtcggaatacatatgtcctatgttcaggtgtgcctgtcacatgcacctcttcaggggactgtgcatgcacatgactatacacccacacgcatacctgaatgtctgtgtgtgcacagccatgcgggcaagttatccatctgtctgcacacctggccacatgcatggaaggagcctgtgtaccctgcatatgtgcagctgccggggaagcacatgtttgtctggcacacagtaacacgtgtggatacacaggtcccagtgcacgtgtgtgcatgtccacaggaacgcccccatgtgctgtgagcccaggcatgaacttagagctccctggtcctggccagaccaggctgggctccttgtgggcacacggaagcctctgccctatagagacacttcctgtggggcc

SEQ ID NO: 9014 - DNA, 564 bp, Homo sapiens
  source 1..564: mol_type = other DNA
ggatgccatcaaattaagtttatatcccccaaaattcatacgtagggagctggcttcctttatctccacttgctatcgtgagggcatggcaaaaagacagctgtctgcaaaccaggaagagggccctctatagcagcctgagttgactaaggcaggatttctgaggtctttggccacagatataggtgatccagtcccctacctaggtaggtgagcgtcatatctgcttacacatatgtcactggagtgtcggaatacatatgtcctatgttcaggtgtgcctgtcacatgcacctcttcaggggactgtgcatgcacatgactatacacccacacgcatacctgaatgtctgtgtgtgcacagccatgcgggcaagttatccatctgtctgcacacctggccacatgcatggaaggagcctgtgtaccctgcatatgtgcagctgccggggaagcacatgtttgtctggcacacagtaacacgtgtggatacacaggtcccagtgcacgtgtgtgcatgtccacaggaacgcccccatgtgctgtgagcccaggcatgaactt

SEQ ID NO: 9015 - DNA, 447 bp, Homo sapiens
  source 1..447: mol_type = other DNA
gctcctgggagtcgggcccagaactgtcccctgggaatcctcactgggaggtggagatgggtggggacacccctgccacctgctatctttccagggaacatggctgcagagggctcaccccaacttgtccatccccctgcagagctgagcagcacgacggggccccagggccagggcgagggccgcggcagctctctcagcatccaccgaggagcagcctgtggccagctgggccctgtccttcgagcggctgttgcaggacccgctgggcctggcttacttcactgtaagcctgggttcaggctggccagagtggggtcctctgttcccctcccaggagttcctgaagaaggagttcagcgcggtgactttctggaaggcctgcgagcgcttccagcagatcccggccagcgatacccagcaggtgggggctggggagaggggaac

SEQ ID NO: 9016 - DNA, 213 bp, Homo sapiens
  source 1..213: mol_type = other DNA
tctggggttccaccccgggggatggtcgggcattagagaccctgggagacttctgagacagtctcactctgtcacccaggctggagtgcagtggcacgatcttggctcactgcaacctccgagtcctgtcaggccaggaacgaggggaccctgggaacaagtcagggtctcgattcccgggactttgcccttgacccaagagtataaagagga

SEQ ID NO: 9017 - DNA, 326 bp, Homo sapiens
  source 1..326: mol_type = other DNA
ccagcagccaagatcgtgccactgcactccagcctgggtgacagagccagactctgtctgacctagtcaggtgagtcgacacatggcccggtgcagtggctcaggcctgtaatcccaggatcacgaggtcaggagatcgagaccagtcccagctactcgggaggctttgttgagtttatggtagtttgttacatgacaatagaaaatgaacaaggacccagagcataagaatgtcccttcttctgcttccagtccctatctagaaaagagaggaggagcccagctcttcattcctgtgccccaccaggctcaggaccaagaccttt

SEQ ID NO: 9018 - DNA, 350 bp, Homo sapiens
  source 1..350: mol_type = other DNA
cagttcaacagtctgactggggaaggtgtgaaggatggcaggctgggtaccttctgatccaagtccctgacctgtaatcccagcacttcaggaggccgaggtgggcgatcacaaggtcaggaatttgagaccatccggatgtggtcattgcactccagcagagcgagactctgtctccgtgagcaggactcaatggtttctcatccagaagccaggtcaaggggacactgcctttctgctctggtctacagcaattggtggaagacagccagagcaagaagatctggggacaagtgtgcagaaattatagagaaaaatgtatccacattggaaagtttctttgtacagag

SEQ ID NO: 9019 - DNA, 333 bp, Homo sapiens
  source 1..333: mol_type = other DNA
tggatccggctctgccttccgctggagccagccacttgacgtccggcgcctcagctccccacctggtgtgaactatccccgctgccttccggctgcgggggctgggcggggcgcctgcggcgaccgggcaagaggtcggggaacggctgcgaggccgcagcctcctccctgtctgccctcctgattggggccgacccaaggatgacggacgtcttccgaaagcctagaaattcgaacctaggggccttctttgagcgagtccccagctgggggggcgggggactgcccggtgattcagagggcggggcagggcgggccagcgccggggtggcc

SEQ ID NO: 9020 - DNA, 569 bp, Homo sapiens
  source 1..569: mol_type = other DNA
ggtctcaccccctcccttaggctggagtgcggtggcgtgatctcggctcactgcaacccctatttgtttgggagttgtcacttcaaccccaaatgttccagtcatcttaagtgcagtagaggccgatggacagccaacttcagagtggcctctgcaagcgaggccagggcttcctagtaggcatctgggcaccagggagccacgttggggtgcctgcctgctcgggggcccctgcccactgcgtgtgcgcagcgcctgtcaggctccgagctgagctgtgtgcgcgtctgcctggctgtgcatccagcgtgcacgaccggtgtggcctgggctccagcctggagtgtggaccgggtcggccggcgtgtgcctcccctgtgagggtgccctggcgggtgtgagcccggcgggctggagaaccgggtctcggcgccgcaggtgggtgaccgtcctccccctccttccctccgggggcagcctcctcgcggcgtgtggctgggggtgcggggccctctgccggctgccgcgcgcgcgcacgccgggctcagcacccgccgtgtacgcgcccg

SEQ ID NO: 9021 - DNA, 685 bp, Homo sapiens
  source 1..685: mol_type = other DNA
accccaaaggctttcgttcaaacctgtgtgtataaggcattcaggggcggtgagcagtcacctgccacccttcactctcagagtcagggctccctcctacctccctcttagggtgcaaggttccccctctcacccgcagctgtggagaggaggggtacgaaagactagcttccaaccctcatctagttttcctcccctccgcgagagggaaagggagtgtggcccacgcccggcgcggcgcgctaggctcagacaaaggagccacccgcctgagcccccctacgggagcggcgggagacccggagggcgcggtgcggagccagttgttccgggctttgggcagccaggggctgccaggcgtctttccccgccgcacagcaacggcgccgagacgcctcttcagggacctggtgcgcacaggctcctgaaaccctttggccccgggcgttcggactcagagctggagtccgtccttcgcgcgccccctgctggcccgcctcggctcccctcggcgcccgggctccgcggcggcggccggggctcagatcggggaaacccggggaaacctcgaggcgtgacgtcaccctcctcggtgacgtcaccgggcccccggggagcgcgaggttcccacggaggaggctttccccggactgcgcagggcgcgggcgggggccgggaagtcgtt

SEQ ID NO: 9022 - DNA, 259 bp, Homo sapiens
  source 1..259: mol_type = other DNA
ccctggcatggtgtccactcccttgcaggggcgtcctctcctagctggccccatctgagagggcgtgacacatgtgccctggagcggcgcgcaggggcggtgggtgaggggcgcccggggcaggccgggaagggggggcgggcctccccctgggccgggccggggcggcgctaggaccgagcgagcggagggagcgagccgggcggagccagcgccccccgccccccgccggccggctcccctcccccggccgctggct

SEQ ID NO: 9023 - DNA, 500 bp, Homo sapiens
  source 1..500: mol_type = other DNA
aactccctggaggaattttactctcgagaggagagccgggaccaccaagcgagtggagggtggacgccccttccctcaccccgccgccggccctagtgcctgggctgaacgcggggccgggactctgaggacgcctcccaggcggcgcagtccgctctggccaaggtggagcgggacgcggcgcttccgacggtgcgcgggtcggctcggggttgcagggacatccggcgtccgctctgcgcaaccgaggaccgacactcgcggcagccctgcgaggcgagtatctttcctctccctccgccagcgggcggtgcgagggactgggcgaggcagcgcttccctaaggaggcgacccgcagccccggccccctcccgactccgccccgttgcagggcccgggtcggcgaggcctctcagctctaagcccgacgggacttggcgtggtcgcgacgagggcgtggcctggtgccccgcccccgtccgcgcgctcaaagtggagg

SEQ ID NO: 9024 - DNA, 675 bp, Homo sapiens
  source 1..675: mol_type = other DNA
gggagtgtcaggcccagggtgcgcagctgcccggggcgggacggggatcagacgcgcgtgcccagctgaaccaggtgcgtgagaaggctgccttcaggtggccgggggctccctccaggtaggtgtgggcaccttgggcagccagaaccccaggctgagctgaagacaggctcccctccccccggcctgcagctgtctctagacggagggacgggaagtggcgaagtgtgaggagttcccgtccagccgaagcggcggccctgctcctggccgtgaccatgcaaggatggcatcctctaccagcagcatgtcaagtttggcaaggtggggacccctggctgccaggcagctgccaaggaccaacagtgggtggagaatgcagcctctgcccctgcctcggacagcccaggcagacctgggagaccagcctgagacggcaggggctgagcaggctctgccagaccctgcctccgggatcaaacctcccagcagggaagagcttcagccaccgagggccctaagggctgagctggaggaggcctcaagggtggagcccctccctgcagcggcactgtcctgggagcaaggaggcagggggtcacctctcctcggcagcagccccacacccccgcagctcagctgcagctgctgcccaggcagataaaccgtcagttt

SEQ ID NO: 9025 - DNA, 499 bp, Homo sapiens
  source 1..499: mol_type = other DNA
ctatcttgctaggcaagccaagtgacctctccggggccccctgggacctgccacccacactcacgtggttggggccattcagggctgtgggtcccaaagggaggcctccagtggccaaccgccccaggcagcacagtggtgagggggccctggaggggctggcctggatgcaggccagaacacacaggtccctgagtgttgggctgaggagcctgggctgcaccccaggaaggcccagtggggcagtggcccctgggggcagggccagggagtgtcaggcccagggtgcgcagctgcccggggcgggacggggatcagacgcgcgtgcccagctgaaccaggtgcgtgagaaggctgccttcaggtggccgggggctccctccaggtaggtgtgggcaccttgggcagccagaaccccaggctgagctgaagacaggctcccctccccccggcctgcagctgtctctagacggagggacgggaagtggcgaagtgtgag

SEQ ID NO: 9026 - DNA, 357 bp, Homo sapiens
  source 1..357: mol_type = other DNA
ctcctgaagccccttgggacccactgcctgcctgtgccagccacctggagggagccctccattccgttctgtgcccagctctgctgagctgtgaggaccttcagcatctggtgaaggcggccacacttcctctgagccaggcactttgcatgtatggccacatgctcattccagtgagggttgctcaagccatatttgtcacttgatatgtggcattgggcaagttacttcctcactgttgaaatggctgcttgggccacagtgggcacagagctgggtgccaggaggccttcaggacctgagatcttgctaggcaagccaagtgacctctccggggccccctgggacctgccaccc

SEQ ID NO: 9027 - DNA, 442 bp, Homo sapiens
  source 1..442: mol_type = other DNA
gcagtgccagcgcccagctgaccaagtcattccttagaagtctctaataaagttgaaaccacttactctgacagtcacagagcgccctggcccaggacgtgccacgcttccctggaagcgccccccaggcagctctgttagagcatttacagtaataaccgtttacatttatatctgatgcgtgccccaccagtgaacgtatgtgtcacacaggcgcagtcagggaggcagggtgtgatcccgcaaccccggcgtccccggcagggatgaaagcgcagggcccacgcgaactcggcccgcagctcccggccctagaggacgcactgtccgccggcaggggcgtgcccaagacctgggagaggttgggcacctggcaggccgccccgactccggatcagccgatgaacaatgtccctctgcgcgatccggaactccgaggtcg

SEQ ID NO: 9028 - DNA, 444 bp, Homo sapiens
  source 1..444: mol_type = other DNA
cttgccccatgggttaggaagccacaaaactttttttttttaatctgtgccatgtacatgtattatacagtatattcacaaaaaattccatttttaacaattaaatacataattattaagttttaaaaattctccttggtcgtctcatcgttatcacaccggttgtaactatgtacctacgcaacaaaatgatgtacagcaaccttttccaggcccaatattgtaacactatagaaattaattcactcatccatttaacaggcaattattaagtgctagggtggtgcagcgcgattaccaccgcattacaggttgcatccttcccgtcccgcgtagggggggaagggcgtctccccaccaagcgggtggggcgcaggcggcctcgggggctagtgcggcggcgcggactccgcgtgccctctgacctgttggcagcaggcggag

SEQ ID NO: 9029 - DNA, 424 bp, Homo sapiens
  source 1..424: mol_type = other DNA
aatcgaaataattgtagaatgagtttctctgtttctacaaaaaatgtcattgggattttgacaggaattgcattaaatctgtagattgctttggatagtattgacatcttaactatattaagtaaggatgattttttttaaattactgattcaatctcctcactagttataggtttattcagattatattatctattctgagaattgctagtaaccgttctctttaaattcatttttaaaggtagaagcaaaggatcctaggttcgaatcctgtctctgaagctggtaaccatcgtcagttgccacgcgccccaatcaggtactgccgcgccagggccgcgggacatctcgggatttgtggtccacccggcggaactcgcggtcccggcaggcaccgcggcggcggcagggcgacgtggcgcgg

SEQ ID NO: 9030 - DNA, 473 bp, Homo sapiens
  source 1..473: mol_type = other DNA
cagtcaaaacacagctgaattggcagagtcttcacccaggctggagtgcagtggtgcgatctcgatcccgagtagctgggacaccgtgttagccaggacgcctgcgcgggctgtcagctgaactcagcgccgagccgtgagcttggctttgcccctccaagcttgcgcggagaacgcgccgcctgggccgagacggggaccccgggacgctcccgcctcccctcggaaagaggacggagatgcagattctccccgagcgttggtgggagtctggactctccagtccatgggaggccctgggcctctgggcttccaggcgggtcccggggcggctaggaaggagccgcccagagagggaggcgcgcccgcgctgctcgcaagcagaaccttggaggcggcggctccgggagctggcggcgcggccggagcggcggacccggcggaccggggggcggggcggacaggcctgggcg

SEQ ID NO: 9031 - DNA, 521 bp, Homo sapiens
  source 1..521: mol_type = other DNA
gcgaggctccatgggcataggaccctccgagccaggtgcaggaaatctcctggtgtgccctgtcatccctttccttggctaggggagggaattccctgaccctttgcacttcctgggtgaggcaatgccttgccctgcttcggctcacacttggtgcactgcactcattaatgacccatttgatttaatagttcttaaaacttgtgatgaatcaacagtgatggaaagttgtactgaatcatatctttttttattactatgaattatattgttagagattggctttaaaattgaagttacactaatgcattttaaatgtaatttggagctagtttagaatttaccctgaaattttcactatcaaatatatttgagaggcaaatctttttcctcctttaatgtttgtttcatacacatagaataatactgtgtgtctgagattcagtttttgaaatgaaacatggagtgcgatgtgacaatggactggtctagatcacagcagttgggccccatattgtgac

SEQ ID NO: 9032 - DNA, 355 bp, Homo sapiens
  source 1..355: mol_type = other DNA
gtggcagcacccaaccccctgcaggagggcagtgcagccgcaaagagcagccagaggagcctcggtggccgaggctccagcctccagcgtggagcagagggccccccttcttctagaccgccaactgagcgaggcgagccacagtgttgcaggctccagcatccagctcccccttctcttgatctgctgagctgggaacagagtagctccgccggccgatttaggaaagcctaggatggcgtgaggcctcctcagcatgcacatggggttatgcacaaggattctgaactacatgttctgattggatgagagaaaagacttgctctcatccaatcagtggaacatgtaatccagg

SEQ ID NO: 9033 - DNA, 560 bp, Homo sapiens
  source 1..560: mol_type = other DNA
caggtctttttttttttaagatagagatgctgaactcctggaaaagtgctggtcagacatgagtcatcacatgtttatggctgaatgtgactagtactgccaagaacattacttgttggactataattgccggatcatatggtaactctatgcttaacttttgaattagaaacggtgttttaatttttcgaatatgctgattttgctgcccctagaatactttggaggcaaaaagaaactactgtggttcatccccatagggaggtgagggacctcacgcgcctcttccttagaggaggcgggcgagggggggcgctgtgcgctctctggggcgtgggccgcgctcggggctgcccacccctcgggaacgagccggggcgctcaaggaggcagcgacgcgaggcgcagccggtccaggtttcgcccgccaccgccgtgcggcgcctctgcgggtcagggccgggggcgcggtcggggccgggcggggcccaggttggctcgcgggtaggcggccccgccccccacatccgggggccggggccgggctgtgggcttgccgc

SEQ ID NO: 9034 - DNA, 479 bp, Homo sapiens
  source 1..479: mol_type = other DNA
cagcctcccgagtggctgggacccgccgcgcccggctatttcaagagctctcagttctcctgagatttatctttcttttctcattaaccaaaactggagagaggaaaaagccctgccgaggccggtgcgcacctagcccagccactgcccctcacggcccccgcgccgccctcactgagcagggcgggcagcgctgtaagtgcgaggccgacgcctctgccgggtggggaacccgcccgccggcgaggagcggtcgcggccaggggcttccgccgactgggaggcccggggccgggccggagggactcggaacctggaaggcgcggcttttctggccgccgcccggttcccgcgggcgactccactcggcatgcgcggcggggagcctcggcggtgaggcgcaaagccgcgggctcgtgggacggccacccctccgcaaaaccgccaatgggcgggcccgggccgccgatcgcccgccg

SEQ ID NO: 9035 - DNA, 629 bp, Homo sapiens
  source 1..629: mol_type = other DNA
atctttcttttctcattaaccaaaactggagagaggaaaaagccctgccgaggccggtgcgcacctagcccagccactgcccctcacggcccccgcgccgccctcactgagcagggcgggcagcgctgtaagtgcgaggccgacgcctctgccgggtggggaacccgcccgccggcgaggagcggtcgcggccaggggcttccgccgactgggaggcccggggccgggccggagggactcggaacctggaaggcgcggcttttctggccgccgcccggttcccgcgggcgactccactcggcatgcgcggcggggagcctcggcggtgaggcgcaaagccgcgggctcgtgggacggccacccctccgcaaaaccgccaatgggcgggcccgggccgccgatcgcccgccgcggcttccggttccgatgacagtggcgccggaagccggggccggggctgcggggcggagccggcaggtgcgggccgagggcgggcacagcggccggcggagctgaggcgcgcggcggggaaagctcggccggcctcccgggccccagcctttgcccttgggcggccctgggccgggagctggagtcccagactcataggtcccggcccagcccccgaa

SEQ ID NO: 9036 - DNA, 209 bp, Homo sapiens
  source 1..209: mol_type = other DNA
gcagggagctccatggatctttcacacctgcgcagccgggtccaggggcgggcggatcgcctgaggtcagggcctgcaatcccagctactcggagtgagtcgagattgcgccactgtaccccagcctgcccagtcccttggtccggggatggccccgccttaaggaccgtagttacgaagctgggcgtgcttctcgcgcagctgatgac

SEQ ID NO: 9037 - DNA, 441 bp, Homo sapiens
  source 1..441: mol_type = other DNA
ccaggcggcggatcacgaggtcaggatcgagaccatcccagctactcgggacgccattccctgcagcgcgagcgcggggcttggagggcaccaaggtccagggggatggcgggttcagtcccaatccctccgacccgtgctgagggccttggaggaccccactcgcccaacctcggaagcccgggttctgcttgggctgcgaaactttctccagcccagtttcctcttttgggacatggggaggcggagctgggatggagtcctcgagagcagcccgccgccctggacccggcgccgtcccgcccggcttcgggagccctccgtagcggccggactcgcgcgcgttctaaaatgaggacaaagcccgcccaggtctagagcgcgcgcgccgtggcggccaatgggacgctgaagctatggcacccggctccggcattatgg

SEQ ID NO: 9038 - DNA, 491 bp, Homo sapiens
  source 1..491: mol_type = other DNA
ataaagaaaaaagaaactccaaatgttctttaataaacgggtgcggtggctcacccggcctgtaatcccagcactctgggaggccgaggtgccttatgcatcttacaagagcctcccctgcacctgctgcagtcccaggcccaggagggggcagccgctttttcttctcactccctgggctgggagtcaagaagacctcagtaggagtccagcccatggtgatctccttggtcagccccagaagggaccctgggctctccttggggctgggaaaacctaggacctgcttctcccaccctgagactgtgtaccaggcccgggtaaggtaccagtcacataaggcgactcaaagactgagtctggcccagagaaggcctgcaggagctccgagccccgcctgggcgccgggagcaggggcggggtcgtccgggaccctttcccggaagggaggccgcaggggcctgcggggcggggcctgcggggcgaggccc

SEQ ID NO: 9039 - DNA, 379 bp, Homo sapiens
  source 1..379: mol_type = other DNA
ttatttatagctcagagacatttttcagcctaacttccagcgaccttaactgctcaggaggtagggatcctaacaggaaaaccttgtcaggagtctccattgaaaccttgagcttgttttctgagcccagggaccagccaaggcccgccctaggcggttttggggccgttgtcgggggacacgggcgttccttcccggttccacccgagcaacaccctcccggcctagaggccccgggaccgggtgggcgggggggggggcttgggccgcgcagccgcagtgtggaggctcgagccccgctcttacgtcacgtgggccccgcccttaggtggagcggcgggagcgcgcaaggttctgtcacgcaggcgcgttcgcgcgc

SEQ ID NO: 9040 - DNA, 435 bp, Homo sapiens
  source 1..435: mol_type = other DNA
ctgtatatccaggcttgtccaacacagacctatagattgtccaagacaatcacagtctttagtctgatatctgatctacaatgataacacagtcaaccactgagaaaacacatctgggaaaattttttcaatgtgatttgaatcagatcagtaaattgaagttgacagaaacaaatctcagttcaattcctgattttctatatcaatggagagggatgatatgtgctacagtttctagttgtatccaaaaggcacattcggctgtgactcagctctgagaccccacctcacatgtacactgcgaagtgtgctgtgaaccagagaatgcttctagcaccgtttggtgccactgaatcttgctttaccctttgtgactcagtgttaaatagcaaataaggcactgagacttttagtgactgccttcaatgatatatt

SEQ ID NO: 9041 - DNA, 441 bp, Homo sapiens
  source 1..441: mol_type = other DNA
cggccaggctggtctcaattaaacgttttttttaaaaaaataaatgcaatggaatgcaatgaagctatcaaaaatgagaatatttattgacaaattgttctttttgtaactgagaagatttagtttaaaaaaaatatatatatatatacacacacacacacacacatatacatacatacccgaaaatgttatataattatgtgtacaaaaaaatgttctccagggcagtgacgtttctttcattgattgatacatgtgaaaccttggcacacagcaggtgctcagtgcccctctggtgaataactgaggccaggaacctggggccctccagctcacaggggccctcttgtggcatgtgggcgcgtaacagctcagccgggaccccgcgcctcagcggctgccccgcccctcctggtccccggcgcgccgcggggtgagcgg

SEQ ID NO: 9042 - DNA, 441 bp, Homo sapiens; identical to SEQ ID NO: 9041
  source 1..441: mol_type = other DNA

SEQ ID NO: 9043 - DNA, 320 bp, Homo sapiens
  source 1..320: mol_type = other DNA
caactgttccttgggcagtgcagcagctggccgccggtgggcagtgcagggcctccccaggcaggcagtggccaggcaggcctcagtggcaaacgctccagcctccagcatgcacaagtggtagccggtcaggagcagctcttcctgcactgcagggaggcgagccgcggtgctgcaaggctccagcctccggcgtgcagcacgtggctgagctccccaggcatgcacatgggcttatgagaatggtttctagactacatattcttgctctcatccaatcagaacatcatgctcatatgcataacctctgtgtataaata

SEQ ID NO: 9044 - DNA, 317 bp, Homo sapiens
  source 1..317: mol_type = other DNA
ctatagccagaaatgggatcctaatgtagctctagttataattttttgaggaacctctaaagagatgtttactatcttcattggagaattgcctattcaagattttaaaagttccatataaatccaggatacattgcaaatcagatatatgatatgtaagcatttcaaaatattcaagaaatcattttccctttttactttagtaatttataaaataatttggtctcacatttaggtttttaatcaattttgagttaattgcaatgggcgcctaacagctcagctgcgaccgcggccgccttgctcctctaggtccc

SEQ ID NO: 9045 - DNA, 541 bp, Homo sapiens
  source 1..541: mol_type = other DNA
tgtcaaagaatatggtctttttacagactagtatgagatcatttcttaagtaaatatatgcttttccgtagtctacatgtctattcattaacataaaactaattttgcttttcaaatatttcatatctatagtgacctttttgtcagcttttctattagttactgagaaggtaggttagaaaacaaaattaaaaatgggttctgcccatgtttgctttatgtattttgtatcttatgttattaaatacataaaagtttaaaatattttatttgctggtaaattaatgccttttttaggctggagtgaggtggctcactgcccgagtagctgggactacaggtgggctggtcttgaattcctgacctcaggtgatactttagccggggtaaggggccgcctgggaaccccgcgtcccgcctggacctgcagaggccacaccgtgggccacctcagctggccactggcacagccttgccctctggggccccgttctcgcacacgccgacggcctggccgcactgcagccccgcagccttgtgg

SEQ ID NO: 9046 - DNA, 310 bp, Homo sapiens
  source 1..310: mol_type = other DNA
acatgtgtgtcagattcatgcatatgtatctcgcggagttcttaaataacttccaaaggcaggtctcccttcttgggaccacagatcccgcagtggcactgctgttgcagcagccaccagagaaaggggaaaaaataggcaattccccctgctctctcagtccttttcctgctccatgaaccggccctagagcttttcctggagaacatgaataggcctactccaccttatcaggaagagggtctaacttcttaaggtggaaacataggtcacagattatgggccattcttatttactgtaaaaacattt

SEQ ID NO: 9047 - DNA, 433 bp, Homo sapiens
  source 1..433: mol_type = other DNA
tgtaaacgctaatgtttgatattttaaaaatcaacactttctgagcacatagtatttggcttttacgttttaaagaagtcacttcaaaagaaggaaatactaggcttatgcttttgttttactctgagtgccagtaaatatgtaaagattacaaaaatttatttatttatttatttatttatttgagacagagtcttgctctgtcacccaggctggagtgcaatggcgcgatctgagctcaccgcaaccttcgaatagctgggatgttggccaagatggtctcggtcattataaaatttagacataattcatttttaattaaaatcgcagaatggactgtttactatttttgtcattctaattacgaatacaatagcccaagctgagggactcggcttcagccttccgctgcggttcagccagggaaacccgt

SEQ ID NO: 9048 - DNA, 471 bp, Homo sapiens
  source 1..471: mol_type = other DNA
cacaatggaatactattctgccataaaaatgaatgaaataatgtcatgttctcacttatattcgggagttaaaacacttgatctcatgggaagaaataatttctaatatttaatagcagactagggtgactatacttggcaataatattgtgtatatttctgtgacttgatgatcattacagtctatgcacgtaacactatacattatgtaaattattttgtatcaacagaaaagtaataagtgcgcgggctgtaggcagcacggccagcagctggagacctcctgcctcgtgtgcggcgttccagcccctccgcgcactgtcgcctttgagagctctcgttggcggaggcggttcctctcccggagttcgcagcgcgcaccgcggcgtcccctgggaagtgggcgtgtgccggctcccgcggtctcctggcttgggccatccaggcttggctaggattgccggcctgggg

SEQ ID NO: 9049 - DNA, 438 bp, Homo sapiens
  source 1..438: mol_type = other DNA
actcacgtttgtcactgcactatttgcagtcacaatggaatactattctgccataaaaatgaatgaaataatgtcatgttctcacttatattcgggagttaaaacacttgatctcatgggaagaaataatttctaatatttaatagcagactagggtgactatacttggcaataatattgtgtatatttctgtgacttgatgatcattacagtctatgcacgtaacactatacattatgtaaattattttgtatcaacagaaaagtaataagtgcgcgggctgtaggcagcacggccagcagctggagacctcctgcctcgtgtgcggcgttccagcccctccgcgcactgtcgcctttgagagctctcgttggcggaggcggttcctctcccggagttcgcagcgcgcaccgcggcgtcccctgggaagtgggcgtg

SEQ ID NO: 9050 - DNA, 490 bp, Homo sapiens
  source 1..490: mol_type = other DNA
gttggcaacgggctctaacagcaaactggccccagaatgggcccaggtgtccttgtgtgctcatgggcagaagccaaggagccttgcctctctcagtaatggctcagaccttggacccagccctgtcctgccccagagcacagagacagggggatgcaccccttgaattccagggctgatgggtgggacccggcaccccaagggctctctaggtggggacgttcggccggcgccgctcctcggaggttgtgcccctggggtggctggcggcggggctcccccggcccggcccgcggcgcttctctgccgccgcctcggggtgtctctgcttcgctgcgagcccggcaccgcggcgacggcggcgcgaagagggaagcgggcggcggcggcggccgcgccaagatgcgccgggtcaccgcaggctgaggcgcccgccgtccccgccctccccctgcctcctccgccccgcgccctgcggtgctgcagctgc

SEQ ID NO: 9051 - DNA, 265 bp, Homo sapiens
  source 1..265: mol_type = other DNA
taggactaaaggcccgcctgggccttccgaattcctttcttttccaagtgaagaaacagactgagtgtagtagtcacaatcgctaacatctgccaactgcaaatcttatttaataatgaggtgttatcccacttaactaatcaataggagaagcccgccgggcagggtgcacaactgtcctcggagaaagttcaagaggaacttccccgcgaacaggtcctgccggcggccgggaagggagaaaaatctcccccacctgcccgcc

SEQ ID NO: 9052 - DNA, 500 bp, Homo sapiens
  source 1..500: mol_type = other DNA
aattcctttcttttccaagtgaagaaacagactgagtgtagtagtcacaatcgctaacatctgccaactgcaaatcttatttaataatgaggtgttatcccacttaactaatcaataggagaagcccgccgggcagggtgcacaactgtcctcggagaaagttcaagaggaacttccccgcgaacaggtcctgccggcggccgggaagggagaaaaatctcccccacctgcccgcccgcccgctgggtcacatgacacggccaagatggccgaccgggaaggcggctgcgctgctgggcgggggcgggagctggagccggagctggagccggggccggggcccgggtcagcgcttgagccgggccagctgcccggcccaggcgacctgcggagcgcaacgaggccgcgggcggccgagggctggtcggcgcccatcctgaccctggcacgcagggccaccgggaacctgtcggcgagctgcgggagcgcgctgcgcgcgg

SEQ ID NO: 9053 - DNA, 469 bp, Homo sapiens
  source 1..469: mol_type = other DNA
tcgttcagatttaactgtaattaactatataaaaatatagtacgtataaatatgctctttaattgtccatattaatgagaataaacagaagttatttaacctcagtagtttggcatgtaaacgcgcgcgcgcgcccgggtgagggccgcgcttcgtctaaacttttagtttctaggataccagagttgaaatggaactctctgaattcatttgactccaacggttttccttctagttgaggggaagatgcttccctgcaggcacccggctggcactatccggcaccttctgggcggggtgcgcatcctcctccgtccgggacagagggtgcaaaatggcgccgcccaataggaatgtttgggggcgggacgctttcccagcacgccctctaagagcttggggcagggcttcctgtaggtagcgcccttccacgcggcgagtcttgctaaagccgtcgccgtgcaacgcg

SEQ ID NO: 9054 - DNA, 557 bp, Homo sapiens
  source 1..557: mol_type = other DNA
gtgcacatggggtgacccgggggcctcctctgggagatgcagcggtaacctaccgagcgcagaggccggcgcgcacccgtggagcccgcgctcgcgatccctcctcgtgccagggccccagggcagtcaaggcctgccgaccgttaggcaacctcgcgccgaccggggccctaggcccgacgacggcaggggacgtgccccaggcaccatacgggtggcttcgggcgcgggacgtccgcagccccgcagctcccaggacgttcgacaatctgcagctgaccagctccggcgcggggagtgggaacgcctgaaggccgcgcccctcctttcaggtcggccaggagcgcgccggtaagagggcggccgccattcccctcccccacgctggcgggtaaggctagagaaaacaaaaagcccggcgggtttatgggtgggggtgctgagcccaaaacccaagcgtcgccggcgcatgcgccagagctcttcgcaacggggcggtgcgggcagctggctgcgcgtgcgcagaactcgcacaagggaccttatttaggttgcgc

SEQ ID NO: 9055 - DNA, 260 bp, Homo sapiens
  source 1..260: mol_type = other DNA
gcggtggcgtgatctcagctcactgcacttgatctcctgacctcgtgagcacttagccaaagccctaaaaaaacttttttgaggctgtgtgcctgaatccctggaaataacaggaatttcagggaacggaaaacggaccaggtcggtggtgggcggggctgggctttagcctcctcctcccactgcccaccccacccttaggagccctttgtgagggggaggccccagctctgtgatgtggacctgggccccaataactt

SEQ ID NO: 9056 - DNA, 147 bp, Homo sapiens
  source 1..147: mol_type = other DNA
gtggatcacgaggtcaagagatcgaggctatcctccacaggttgcagtgagcgccactgcactcctgcctgggcgacagatcagtcaagaccagcctggccacaaaaattggccagttgtggttgcagtgagatctctgctctcttg

SEQ ID NO: 9057 - DNA, 527 bp, Homo sapiens
  source 1..527: mol_type = other DNA
ctagtagtcaagcctttgggtgtccaaacaaatagagaacaagagatcaggatctctaaaggtctagattttgtgaggttctcagcatactgaaaactgaaaatctcacttcaggaaacataaattgaaagttcaaataacctcggattatattattcgacgaggctgcgcaggctcctgggccgagccatgactctgcaggaactgcggcgccggctcacacagcgcggagcagtgcacgccaatccggccaggcgctcgcgctgggttctgctcacgcccgtaggggcccgcgttcgctgcaacgggcccttaccagccccgccccgagacgcgcgcgcccggcggtctcgatccagcgtggcccgcgccgtagggggcgtatgggacggtgcgtagagcgatgcccacgccggccaaccggatgtcggggcttgcgcgggagggcgggacttggcgccggctgtggctactcaggggccaggggcgggcacagggccgggcttcgtgcggtggggctcgctcgc

SEQ ID NO: 9058 - DNA, 447 bp, Homo sapiens
  source 1..447: mol_type = other DNA
tgtaatcacagctactcaagaggctgaactgcactcccaaaataaataaataaaatatataaattttaaaaagtagcttgttcttagtttaatattctttttgagttctaaaacgctaatttgaaaacatgtctattgatgatatttgagcaaccgtatccatattaagccttaatatgagaggaattatcttcctgagactacaggcccaggctggggagcattgtaatgttttaacgggtaccccctgtaaattaaaagggcttttgtctgttgtaaagcactttacaaatgcaaaagtttgttggaaattgtattagttttattttgaaattttccagaaatggaatcttttaactgattttagggaaaccctttaattatctatgaaatgaaatagtaagttctttttagctctgcgatttaaaagctttaattttaaatgag

SEQ ID NO: 9059 - DNA, 354 bp, Homo sapiens
  source 1..354: mol_type = other DNA
agtaactcagttttacctaaagtggagcagtagtgagtaatactgcacttttgaaacttcttttacaaataggtggaaactacacattaaaatagcgtggctacttagagtttatcaaagtcgaaatttaaaaaataatttaaaaaaactgccaggcgggcgacagggactggccagctgcgccgcactcgcctgccagacggaagggcctggaaaccaatagccgcctcttggacgggctcctgtaggattaaggcccgcccaggggctccgctctggcgcccgagcgcgcctcttgcgtgctcgtccccacgccctcgggcggccagggcccctgctcatcagtcgtgatgc

SEQ ID NO: 9060 - DNA, 395 bp, Homo sapiens
  source 1..395: mol_type = other DNA
ggagtagggtggcccctggaaggggcaggagtcagcactgtccagaccacagggcctgagtgttctgggagagggatggcccacaagggctgaccctcccgccacccagggggccttggacaggtttcctcctggcagggtggcccttgtgcatggaacccctacaaagccaaaggcactgggaagggcttccgcaggggagcctggggctggctccagcatgatgtgggggtctgcaaggccctgtggtgcagcagggggcacacccacagctggagctgacccagatggacagcttgggctgtgaggcggtctccagctagctgctcggtcacacccccgtgcaccccctccactgagatggggcggggagagcaccgaggctgctcttcctc

SEQ ID NO: 9061 - DNA, 853 bp, Homo sapiens
  source 1..853: mol_type = other DNA
gtcaggcaggctccccgcagagtccctgggtgatgcctctctggccctggagccccaaggccagcccaggcctctgctctggcagaacaagtgcggcaggcgggcgtgctggcagagctcggagctcggagggtccggaagggtccaggttccctcgccctcctccgcagcctctctgggatggcgctccgggacaggggaggggcagctggactcagcccgcttaggcctccagcaggcaggcaggcaggaggccactctcccggaacctccaggccgggggaagagcgcctccgagggctcaggccctactcggccccaccatcgccaagaccggccagcggggcggcgcggggggatcggcccgcaccctccgcctgcaagagcgctgggcgcacgcggagggcgggggccagcccgggaagctcggggtgggctggggccgcacgggagcgcagggcagcaggggccgggctgcctcaggacgcctccctccctcaggccggatgctgccgacgcgttctgggcgccgaagggagtcccaggaccgggtgtcacgccggggtcgcccaggccggcgcggggcagcaggcagcagggtgggggggtgccctcgcgcctgtgtccctcacgccgccccagctcctgcccaggtggctgtggctggcgttccgggaaccttgggtctctgcccctctccgagaaccccacgggtccccagctcagcgtcgggacagctgcgcccgcggagtccggtccggagcacccacgggcgcggcccgggcccgaggagaacgccgcggctccggagggtgggaggggcgtcctcgcgccgcccgggcggggaaggggc

SEQ ID NO: 9062 - DNA, 665 bp, Homo sapiens
  source 1..665: mol_type = other DNA
cggccgcctgtagtcccagctactcgggaggctggggcaggggccgattgcgccactgcactgcagcctgggcaacaggcccccatcaatatcgggctgggctgggcggggcgaggtggcccctacaccaccgggggcagggcccgttgctcccgttagcggcgctctcgggccgcccctgccccgggaagccggtacggttctgggctgggccgccgcctcccgggcccctgcgcgcctccgtccagaggcccagaggaagctcctgagcggggaagcgccctgggcggcagcgaaggcagcggtcgctcccggcttcaaccgcccagagccccgtgcgagaagggtaccggggtcccggagcgccgcccccgccgcccgccccccgccccggctgcggtcgacctgcactcccactccagccttacctgaggccgactcgcacgagcccacgcggggctgcgggagccgatcgggatcccggccgccggcccccaccccaccccctcgcggcgccggcgacggcggtgctgcggcccctttaaatccgggccgccccgccctgcgccgtcgactccgcggcggccccagatccaggccccagatccaggccgggccgcggctctcgccgcccagcccagcccagcccggcccggcccggccct

SEQ ID NO: 9063 - DNA, 524 bp, Homo sapiens
  source 1..524: mol_type = other DNA
acctgcatccgtaatcccagctactggaaggctgaggcaggaaacaaaaaaaaaacacctcgcttttttggtgatagtcataaaattacaaccctagacaccgagggtgggaggtaattttaatattttttgtattttattttccaacgaggttacaaccctaagccacacagggttgcggcgtgagcgtcgggctgcgggggcgcctccaccctccgtagggtgggcctgggacgctcccggggctgcagggggaccggcttcgcgctcggcggccgcgcgcctccgccgccctctccgggaagcgtgggtgtggtgagcccctccgtctccccaagcacggcagcgcaggcctggcagggcggcccctcagccccgctccgcgttgtaaggactggtcagcggaggccggccggaaccagtgccttaggaagatgcgggcacggccctggtcagacgacgagtcggctaccgccagtgcgcaggggcggggccgcggcggccggagcgaagggccgcggcga

SEQ ID NO: 9064 - DNA, 661 bp, Homo sapiens
  source 1..661: mol_type = other DNA
tccagctcctgcaagccctgggctgaaatggcatgagttggacccagcaggttctgacctcctactcacaggaccttgcctgggaggctccagagggtgacgctgttggctgacccccttggctgcccacaaggccaacgggcctgagcccccacagggccatgggcttggaccacagtgaacacttggcgaccactgaccaggggctcaggccagagtcggggtccgtcaccgagtatgctatgcgctgcccatcaccgaggatgccatgcgctgtaagagggctgccaccgcggcaggctgaccatggcagggtcggaacctgagagccagcttgttctggccagcagtgcccactgggcgacctagcagcctcctgatatgggggctgtgtccttgctgagtcatggccaggcccaagcctgggaggggcgaggggctggacccccgccagtaccctgatcccaggtgcagaggctggagcccaggcctgtatgagtgccagggccggtttcctggggtccttggtgcaccggggcaatggaaggggcctctgcagggcggctctcgcgccgcgacgacggtggcgggggcggggagggcgcgagagactccgcccctctcgaggcggggcggggcctccgcgttcgctacaaaagcc

SEQ ID NO: 9065 - DNA, 540 bp, Homo sapiens
  source 1..540: mol_type = other DNA
cggctgtgtgtggactggcgctgcccctgcaggccaacactgggagaccagggagcgcagaagccgccactgggcccagggccagtccagaccccatccccagggccggccagcctctgtgacccgtctgtcaggggaggggcagcgatgcagcccgtatcagggcctcctggcacctgccctgcgctggaagattcttgtcagaattctgagaactggccctgtaatcccaggacttgggaggccctgcactccagctgcaaaccctttccaggcgccctttgcagtgctaacacgccccgggttgcacgcgcaagaagccctgctctgcacagcggctcccctgtctgcggactgggccgttccgttctggacccaggccggaggccgtgggctgcaccgctccaggaggccaggctggcgcgcgcccgaggccggggctgagggggcggcgcggaactcgggccgcgtgcgggagcgccacacgcccgccagggggcgccgcccgcccggccccgccccgccccggcccgctccgca

SEQ ID NO: 9066 - DNA, 590 bp, Homo sapiens
  source 1..590: mol_type = other DNA
ctgaggtggagcagccatggttagggacggctaccctagaggtctttcgatgtcaaccgcatgacgtgaatgttaaatctcatgacatttaattttaaacatttcttttaaagttatggctagcaccagcggctgacccggctgcccgggccctcgtgcaggcgggcgggagcggacaggccctggcacgcatgcgctcggggcgggactgcgccttaggcctgcgcgttgccgctagaccagcgggggggcggggcggcggcggacacgcgcctcaggcggcagccgcgcgagagggactttggctgcttgcgaggcgcctcccattcggtgggaccgacccggggggatggagggggcacgcttctacaaccctcctgggaccccgaagagacgcccgcgtgcgacctgagacgccgccctcgccgagggcccatgggcgcgtccccacaggcgggcagtggacgtgagggcggcgagcggcggggccgcggcgtccaggagggccgcgctcgggctcggccccgcgcaggccgcgcgcgcgcgctcccgccgccgcccgggccgcgcccgccccgcctctaggcgcc

SEQ ID NO: 9067 - DNA, 448 bp, Homo sapiens
  source 1..448: mol_type = other DNA
tcttttaaacgctgtgtgcgcgcgcgcgcgtttcggaaggtggagggggggttcccactgcaaccctctggtccgggggcccctggagtagttcacctagtcactagagcaggggctccccaaccgcccggccgcggacctgtaccggcccagggccttcgagggaggtgagtgagcatcaccgcctgagctccgcagactctcactgaggtggagcagccatggttagggacggctaccctagaggtctttcgatgtcaaccgcatgacgtgaatgttaaatctcatgacatttaattttaaacatttcttttaaagttatggctagcaccagcggctgacccggctgcccgggccctcgtgcaggcgggcgggagcggacaggccctggcacgcatgcgctcggggcgggactgcgccttaggcctgcgcgttgccgctagaccag

SEQ ID NO: 9068 - DNA, 509 bp, Homo sapiens
  source 1..509: mol_type = other DNA
gcccaggctacagtgcagtggtgcaatctctgctcgtccacctttaagtcacaggaggacaggtgtcctgacctctatgctggtggtgtccaccctccctgggggccacgggagagcgccgagacacccggatgtcccattgggggacacagacaacctaggtggccagtccagagaaccgggccgggcccagtcggcgccagaggcccaccaggtgaggtgtaggctggggcagctggggcgcagagtccgccagggtccgcgcgcgggagggcagcgtctgacggcccgagcgggtggtcctggcgcggggggccagccgccgcggaggcctgaacgcagggcgggacgcttggctccgcggccggggcacggagggccctggtgtgcagcgccgcccgcgggctcccgcagctccacccccgcgccccgcccgctccgcgctgcctgagtgccacgagggggcgcagcgccgcgttgctccggggccgccgccaggcgctcgtgcg

SEQ ID NO: 9069 - DNA, 352 bp, Homo sapiens
  source 1..352: mol_type = other DNA
agcctaggagctgcaggtctggcaggcacagcaccttccccgttgagagccctgtggctgcggacaggcctgctcaaagatgccattatgcagagtcctctctgccttgcctctttccctcagccacgcgcgggcgcggtgtggttgcgtatctgtgtacggggagcagaggaggggctcacggcagcgaggccaggcgccgtggcacacagcctgggggtgtgagtgcatctgtattcccagctactcgggccactgcactccaaagattctgtctcaaaaataaaattttaaaagttctgcaattctgcataaagataaatgtcaccagggaggcttcctggaggagctt

SEQ ID NO: 9070 - DNA, 739 bp, Homo sapiens
  source 1..739: mol_type = other DNA
tagaatttcaggatttttttaagaaaaaaaaaaacttcaaagtgcgcttcctcgggagacgagggaaccagggcggagaaacgcgggccttggtgcctcactggggggtcggattccgaccccaggcgtaggaacccccgggtccctcgcgggcctgcagcgcgaggcagatctgggggggtcggggcttcctggggcgcctccagctcaagctcgggctccgcggcaaatcccagggtcgaattctgccaccgccgcggcgtccggtagcccgggcgttctctccacgcagggtgagggccaggcttagaggtctgcggagctctgaaacaagcctgtgggagcgcggcaggaacagcggctcacgcgggtttccggagcgcgcgagtgatgccggacccctcgccgtgggagggagcttccctgggtagccccgtttcacagacgggaaagcggaggcacagcgcgatcgggccctgcccggcttccacgctcggggtctgaactcgggccgttggttgccctaagccccgctccgggatctggcgcccggcgccccagccttacacgcccgacccgcgcctgggagccgcccctcggcccccctccctggctcctgggggccgggtcccgtcgttgtcacgacaaccgggggccaatgggagcaggcgggcgggggaagccccgccccttccccgcccccttccccgccctctcggagggctccgggttataaggg

SEQ ID NO: 9071 - DNA, 534 bp, Homo sapiens
  source 1..534: mol_type = other DNA
tcttggagcacagcagctgctgtccgttacccagaaaactgtccattaatgtaatggaatgaattaccattaataggcttatgttaacttactcttctttgtataattgaggaaggaataatattcgactgttcacgattgaagcagatcaagatactggctccggtcaaatactgtgtacccagccgggcgcggtggctcacgcctgccatcccagcactttgggaggcggaggtgggcgtcctggctaacacggtgaaacccccgggcgcggtggcgggcgcctggtcccagctacttgcagtgagccaagatcgccccactgcactctggcctgggggcaggcagggaggcagggcccgcagcgcgccgggccggtccaccgctctccagcgcgggggtaagggggcggggcctgggcagctgcgtgccgggagcgacccccgcaccgaagggcggatggttgtgcccggcgacggcgcccaatgagcggccaggatgttggagcgccggcggcggtccgggcgctcgctg

SEQ ID NO: 9072 - DNA, 285 bp, Homo sapiens
  source 1..285: mol_type = other DNA
agttccagctactcgggcaggagaatcacttgaaggcagaggttgcagtgagccgagatcacaccactgcattcctgacagagcaagactttgtctcaaaaaacctgtagttcagtgtatctgaaaaaaaaaataattttaaaaataaaaaatttttttgagcgacaggttctggatttcagaatggtctttgaagaatactcagcaaaacttcattattgttttgtttagaacatttaacttaaccttgaattatagatagaatttcagtgtgaaaatggtatc

SEQ ID NO: 9073 - DNA, 406 bp, Homo sapiens
  source 1..406: mol_type = other DNA
tgccaggcctgcagggagggggtcggtcatcccgggtgtcccgctcacgggtgcggcttccgtcgacactgtccgtcgacactgtgcaggtaaacgaagctgggatattttcaaagatgtaacatactatttttacaaggattgctttcttgtttagtctagatgaaagaaaggacggaaaagagcgcgtgccgcattttgctcccctctgcgttacccgcgtccccgcgcccggagccgcccaggagggggcccggaccctgtggtgcggagcgcgcactgctcgggtgcaccggacgccccgcggcgggctgggagggacggggggaggggggcgcggggagcggcctgaatcccgggcccgcctccggcccccgccccgccccgccccgccccaggccagccg

SEQ ID NO: 9074 - DNA, 679 bp, Homo sapiens
  source 1..679: mol_type = other DNA
agctcggggtggctgagggctaagacgtgctgtcagccatagcaggacactgcctgaagagtcaggtcctcccacccgggagcctgtttcccaccgcagcaaaacgtgagtcactcagtgctcaatgcctagcaaattagtttatgtatcatttgcaaaagttttcaaaatgtgcttctgtcatacttctgcaggtgacagaccactggcgtcgaggctagtttcgaagacagaaggctgcctgtggcccggccggggaggcggccgggagtgaggcctgatcgtccctggcgcctccacctccccaggcgcagaaggcgcccacgaggacccccagtgcccgacgttgccacggtctgggatcagaggcagggaccagggagccaggaactgcgccgcccccgcccctgccctggcgcgagggaagctcccctcacccgggcccagccctgcaggggggcgcgtggggtcagaccggggtgggcctcgcggagacaaaggccgggcctgcctgctctcagagggccccagcgcctgccaagaggaagtcctcgaggcccgggcagggaagggggcacgggcttcccagggcccgccggccgcagcaggaagttggccagggcacggccgtgagcggagcgggcagggctttctcaggagcgcgggcgaggccggcgct

SEQ ID NO: 9075 - DNA, 575 bp, Homo sapiens
  source 1..575: mol_type = other DNA
ctgcagagccacgagcggggctggctcctggcttgcaccggcctcgtggaatccaggcctcagacctgaactcctggctcagcgacaggtatttgctatggaagagctgtccctccctcccctcggtgggcctgggaatcccgcctagggctggtgggcctcccctaagccacagctggccccggcttgctttgggccccccgtcgggcaccctggtcccacgcgaccctggggctcccacccgggctcctcagcctcccctgggttggggtggggggactggctcccagcccttggcctagggtttggtgaacgcctttcctggactgcgggcccacttcaggcgcggctccaggctgggcagctgcgctggagggccgagggcaggggtggggtcgggcgtccaccctcagggttgcgccagggagccggaaagccgactcccgaagttgggaggagggggcctggcggacgccggccggggggcggggcgcggcggggctgtcggtcacgcccctcagtccgccccgccccgccccgcctgccggggaagggccacgttgcccgcccggccg

SEQ ID NO: 9076 - DNA, 710 bp, Homo sapiens
  source 1..710: mol_type = other DNA
atttagattccattggatacacttgaaagcaattttgttcttaatattaacagcatgccaaaaatataccctttgcaattatttaaacttaatatgaaaaatatttagatgttgctgtttttaaaaaaggctgactatagccaataacttagttgtatatttaaaaataagaatataatttgattgcttgtaacacaaaggataaatgcttgatatattattacgcattgcaagatataaaaaaaaaaaaggtcttcaaagtcattttaggccctgcggtggggtgggcagggggcgaggtcgctgccaagctggcgccccgggtgggagcgtggcccggtcccagggacggctccaggggcgcgctcccactccgcatccccagtgcctaaccgggggcgcttctggtgctgacgaccaggaagggctggtgctctcgggccagcccccaaccagctgagaaggcaatgggtccccagcccagcgctgtcctgcgggaggaaccaggtaggcaggtatttactttattacagaaagccccgcccacggcctcctggccgcgcctggagcgcgcgccctgcagctggtccgccgaggaggcgctcccctccctccctcccgccggcgccgtcggcccggaccatcgagtcagtcctccagcgtcccagagagggcgcggaagtgccccagggccggcgcgggttcttccg

SEQ ID NO: 9077 - DNA, 656 bp, Homo sapiens
  source 1..656: mol_type = other DNA
atatttttacagtaaagatgtaaaacttatgactgttaaaagtggataataccaaatcttcagggatttagattccattggatacacttgaaagcaattttgttcttaatattaacagcatgccaaaaatataccctttgcaattatttaaacttaatatgaaaaatatttagatgttgctgtttttaaaaaaggctgactatagccaataacttagttgtatatttaaaaataagaatataatttgattgcttgtaacacaaaggataaatgcttgatatattattacgcattgcaagatataaaaaaaaaaaaggtcttcaaagtcattttaggccctgcggtggggtgggcagggggcgaggtcgctgccaagctggcgccccgggtgggagcgtggcccggtcccagggacggctccaggggcgcgctcccactccgcatccccagtgcctaaccgggggcgcttctggtgctgacgaccaggaagggctggtgctctcgggccagcccccaaccagctgagaaggcaatgggtccccagcccagcgctgtcctgcgggaggaaccaggtaggcaggtatttactttattacagaaagccccgcccacggcctcctggccgcgcctggagcgcgcgccctgcagctggtccg

SEQ ID NO: 9078 - DNA, 643 bp, Homo sapiens
  source 1..643: mol_type = other DNA
gtcttattgctacaaaatatgtaaaattcattcaaataatataaataatttgagctgtaaaacaagttgtgcttccaaagcacttcactttttgtctaagaattaacagtaaacattttgaaatatttatataattttgctaataatccagaaaataacactaagaaaaaatgtaatctactttcgttacggacatatatgctaggataaaacaatgcatagaactattttacactaggataaaattcaatgagatagaatgaaaatatttttacagtagaagatgtaaaacttatgactgttaaaagtggataataccaaatcttcagggatttagattccattggatacacttgaaagcaattttgttcttaatattaacagcatgccaaaaatataccctttgcaattatttaaacttaatatgaaaaatatttagatgttgctgtttttaaaaaaggctgactatagccaataacttagttgtatatttaaaaataagaatataatttgattgcttgtaacacaaaggataaatgcttgatatattattacgcattgcaagatataaaaaaaaaaaaggtcttcaaagtcattttaggccctgcggtggggtgggcagggggcgaggtcgctgccaagc

SEQ ID NO: 9079 - DNA, 456 bp, Homo sapiens
  source 1..456: mol_type = other DNA
aattttgcaggaaattgctgaactgtcttctagaacatttggtgtagattttagactaaatgcagtgtttaaattgttacataagaatttcttagtgtatagagtttatgtttttgaattactttttaattttaattgcattatgattagagtatgtttattttgaaatttgtgagtttccgtgtgcttaaaaagactgcaacttagtttatataataaataagtttcctctaacacctcatgattacagtcctggccctgaacttcagagtgtgccaggaaatgtcaagtcacctgctgtaggctactactagatcccatggccatacagccctgcctgccagattggacgtgaaaagtatttccgcatcttctttgcttccttgataagatatagacatttatgcagtggttcaaagtctagagtccctacacttctggtacatgacagctgtg

SEQ ID NO: 9080 - DNA, 387 bp, Homo sapiens
  source 1..387: mol_type = other DNA
gtttgggccagacaagcctgtccaggccttggtgggggaggacgcagcattctcctgtttccgcctctgcggagttcccagtcttactaccagaaggccatctgggagctacagactttataagtgtttttttcaataaggaaattttaaaattttaggtcatttagttagaaggcagcattctatgttttgtcacatgtttaaattcaggtaaccaccataaggtatagatgtaatttcaagaatgttacatacacagcttcacacctttaaagatctatccaaattattgcttgtatcgatacaaaatagttttccttatgaacatttatttttaaattaacaaataaagattcctgctcacttgtcctacaaattttttgttta

SEQ ID NO: 9081 - DNA, 290 bp, Homo sapiens
  source 1..290: mol_type = other DNA
tagcccaggcattttaattctcagaatctcaggccttgggcaggacttagaggaaataaactataaacatgcctttcttcatgtctagaaaatttaaacaaaagagacagcaatcctggacatacagtccaggatatatggcccagaacatttggccattctataaaatcccaagacacttttctctactctcaggattcataaagctgtgaccatcactagtgagtcagccccacacgtgtgatgatccatctgcccctcaactggaattccatttcatgggggctgat

SEQ ID NO: 9082 - DNA, 192 bp, Homo sapiens
  source 1..192: mol_type = other DNA
attctataaaatcccaagacacttttctctactctcaggattcataaagctgtgaccatcactagtgagtcagccccacacgtgtgatgatccatctgcccctcaactggaattccatttcatgggggctgattcatcatgactggtgcttaggaatagccacgcatatgggaaggcttttgccaagggata

SEQ ID NO: 9083 - DNA, 313 bp, Homo sapiens
  source 1..313: mol_type = other DNA
gtgcatctaatgaatgactgaatgaatgcatccttggagatcaaggtcctggttgttctggcaagttctcatgatcagagtcctgtccctgaactcaagacagtctcatggggcatggcctgtgtgcctctgagatagagcctcactctgtcaccagactggagtgtagtagtgcaatctgggccgcccaagtaggtgggactacaggtgcgcatggccaggatgatctcctcagggacagacctctctcttgcagctctgcctgccagactaagcctctctggtctgagatagatgtttatgacctgccaat

SEQ ID NO: 9084 - DNA, 243 bp, Homo sapiens
  source 1..243: mol_type = other DNA
aagatgctatgctatagattatgtgacctatcatgattttatttattgtaagtccacttacaaaaacccctcgccgctccctcagtccgctaatgcccaagttgcaccatggcctacagtttactgaccttgtcctgaggagaaggttatggtgggtgactgcagtctactccttggagtccgagcttcactggcacaaaattcaagatttttctcagagacaggggtttccatagccaaggg

SEQ ID NO: 9085 - DNA, 265 bp, Homo sapiens
  source 1..265: mol_type = other DNA
ctccttggagtccgagcttcactggcacaaaattcaagatttttctcagagacaggggtttccatagccaagggctctggagctcagctgccacagaggaggtgagctcaccaggactcatctgccatttgctgctacctgccaggtaagtgggccgcatctcaggaggcaggatcctgatacatccgagactaagagggtgcaggcagtgagcactagctggaggcccgtgggagagggccaaggccccactgacacctgcgga

SEQ ID NO: 9086 - DNA, 414 bp, Homo sapiens
  source 1..414: mol_type = other DNA
gggacactgggtcaagttcccggtgacattggcactctgctgcggggctacaatgggaaattataaatgtgttatctgttcaaatactaagtcagcacagggccggggcgaacctgcgctggcggaacctgacaccgtggcccgagcgccaggcccttgccccggcgatgctgggtcggcctcggtcgcgcgctggcagcatttgtgcgcccacctgtcgcggcccgtttcccgcggctgactgggtcaggctggggcggcctggaggccgctggccagggcgggggctggtggagcgcagatccggggcgcagggcgctgtcccgcacttgaaggcccgtagtcaacgtgcgcctcccctcccggctcccagccgggcgcgccccgggctcgagtctctgcctgcccagtggc

SEQ ID NO: 9087 - DNA, 588 bp, Homo sapiens
  source 1..588: mol_type = other DNA
ttcctccgaagcgcagggacacacatgtccttcctgccacgtaaggccggcctcgggagaaacgtgtttccgcccggtttcgattcctgccggcatcgtcctgaagacacacacggctgagacggccgaggacaggcccggggacccctgccgcggccggctgagcggtgtccaggttctggagccggacttgtccaccgcagccgagtccgcaggtgaccacccccctaggaagcgcgacgtccatctggagttttcccgcgagccgccttgagagcagggtttctgcaggcccagccctggcgtcacgctgtgtcatcaaacaacatttatttatttatgtatcgacatcaaatctctataaaaataaaatttaaagagctatttaagcatcaagtattatttctcacaaagcatctatttttgcagagatgctgtgagaatgtagatgtaatgattcgtcaccacttcttcactggggcgtctgctgccctaacccaggccccgcccccggtccgacccggacgaccctctgagtcctccacaacgaagtcgtctgcctagaagggccggaagtacttcagggcg

SEQ ID NO: 9088 - DNA, 584 bp, Homo sapiens
  source 1..584: mol_type = other DNA
gacgtccatctggagttttcccgcgagccgccttgagagcagggtttctgcaggcccagccctggcgtcacgctgtgtcatcaaacaacatttatttatttatgtatcgacatcaaatctctataaaaataaaatttaaagagctatttaagcatcaagtattatttctcacaaagcatctatttttgcagagatgctgtgagaatgtagatgtaatgattcgtcaccacttcttcactggggcgtctgctgccctaacccaggccccgcccccggtccgacccggacgaccctctgagtcctccacaacgaagtcgtctgcctagaagggccggaagtacttcagggcgcgccgcggacccaccccctcgcttccggcatcggctgtggggagtaccggctgcagtcggctgtgccgtctgccgatgcggtgatagcaccgaaagcagacggccgccaggcgctccccctaccccccgaagtttctccccagcggcgggggatgggggtgagacgcgggcctccaccgtcctaagtgcggacccatttcctgtcgccctggggccccgcggggaaaaaggggg

SEQ ID NO: 9089 - DNA, 429 bp, Homo sapiens
  source 1..429: mol_type = other DNA
gggcgtctgctgccctaacccaggccccgcccccggtccgacccggacgaccctctgagtcctccacaacgaagtcgtctgcctagaagggccggaagtacttcagggcgcgccgcggacccaccccctcgcttccggcatcggctgtggggagtaccggctgcagtcggctgtgccgtctgccgatgcggtgatagcaccgaaagcagacggccgccaggcgctccccctaccccccgaagtttctccccagcggcgggggatgggggtgagacgcgggcctccaccgtcctaagtgcggacccatttcctgtcgccctggggccccgcggggaaaaagggggacctgagggacttggcggtggcgcccagcactgtcccctcccgccagggcgtcggtagggaagacccccgcccctcgccccccca

SEQ ID NO: 9090 - DNA, 244 bp, Homo sapiens
  source 1..244: mol_type = other DNA
tttattattttatttgctgcccaggctggagtgcagtggcgcgatctactgcaaagggattctccccgagtaactcagtccagcctggactaagtccttccggagttggcacagttttaaagtttatttttaacattttaatactctactttttaaattgcccatccacgatgtggaacaggcggagctcgagctatgccacataaagcctttttaaacacttgaatgtgcttgtttcagagtg

SEQ ID NO: 9091 - DNA, 717 bp, Homo sapiens
  source 1..717: mol_type = other DNA
gcggtgaggaagtgccagccccctcccggccgagctcacagagctcagggctggaactcggaaccctggcccgacgcaggcggcagcaccgaagggaacttgagccccggccccctcaggggacccacgaccggggcgcagctttgctggcagacgccgcaatactgcgcagccgcggccccgcaagcagaaacagggctgggtctgaggcctacgtggagctggggcccgacggctcacggaaggcagcggggggcactgggcgccccggatccgagcctcccgggcggcaggccctcccagctgtgcggcgcccggatccccacaaaggcaccccaagcgcggacggcgggacgggcgacagcaccagggtggtgtcccaggcttccccaccgccgcggaccaactcggccccggcccgggcggggcttccggagtggggctccggctcaggctggacaacggctcggagacccagtcccccccggcgtccgccgctgacctgatcagagccgctctgccggcccgagggagctgaggaatgtgcagcactagcccagctggagcgggcggcgcgggcgcgcctgtcccccagcccacccaactcccggcccgcgcggcccccggcactagagacgtggtcctccgccggcctagagcgtctctccagagcgtgtgcaggagcgagacgtccgcctcgggcagggtagccagcgg

SEQ ID NO: 9092 - DNA, 483 bp, Homo sapiens
  source 1..483: mol_type = other DNA
tgatacctcagctggggatccaggtgtctggatagagcagcctgattcagcaaatatttattaagcacctactatgttcaggacattgttgacagagtttaataacgttgatgtttagaaattgatccccgtgaggtctgaggtcagagatccagccatctgctcccccagggtagggaggtcgggcctccccggggtgagtcacgtagcccacctctccccaccaggcgaggtcttggtgcatggggcagggccgcagaggcctctgatgaggcagccaaggctgggtagcgactgctggtaactggcccccggagtcgccccaggggaatctggagacccccggccggggagcgggctccgagacgagcgcagccgcccggtcagggcagcgcctgcgcgtccgccaggccccgccgcgcagcctcgggtgtcccggcggggcggctcgggccgcgcacgcgctctggcctccggggccgg

SEQ ID NO: 9093 - DNA, 693 bp, Homo sapiens
  source 1..693: mol_type = other DNA
gtttagaaattgatccccgtgaggtctgaggtcagagatccagccatctgctcccccagggtagggaggtcgggcctccccggggtgagtcacgtagcccacctctccccaccaggcgaggtcttggtgcatggggcagggccgcagaggcctctgatgaggcagccaaggctgggtagcgactgctggtaactggcccccggagtcgccccaggggaatctggagacccccggccggggagcgggctccgagacgagcgcagccgcccggtcagggcagcgcctgcgcgtccgccaggccccgccgcgcagcctcgggtgtcccggcggggcggctcgggccgcgcacgcgctctggcctccggggccggccgcctgggagcccgagcctagtgcctcccacgcccggcggccgcgagccggggtccgcgagggcggagtggggcgcggcagccaggaacccgactacgaatcccagggtgcgggcgggcggagcgaggagggacgctgggcctgcccggtgcgcacgggggcggggaccggcaaggcgggaccatttcccggcataggctccggtgcccctgcccggctcccgccgggaagttctaggccgccgcacagaaagccctgccctccacgccgggtctctggagcgccctgggttgcccggccggtccctgccgcgcctgcgac

SEQ ID NO: 9094 - DNA, 354 bp, Homo sapiens
  source 1..354: mol_type = other DNA
cctcaggccaggttgaggttaaaacgacatcattttaaggtgaactgagtcacttcaattcaccagcctcccggtgatggccttgccgagggtgctcccgcaacctcggcgcaaaggcgagattcgcatttcgcacctcgcccttcgcgggaaacggccccagtgacagtccccgaagcggcgcgcgcccggctggaggtgcgctctccgggcgcggcgcgcggagggtcgccaagggcgcgggaaccccaccccggccgcggcagcccccagccttcacgccggccctgaggctcgcccgcccggccggccccggctctcggcaggcctcggcgccccgccccgccccaggcc

SEQ ID NO: 9095 - DNA, 232 bp, Homo sapiens
  source 1..232: mol_type = other DNA
gacctggtatggcgccctgacccagtgcagtgtggccccctggggatgcacactccagtgcatcctcctcctctggtctcggtgcaggaggggtcctctcgatgcagggcccatcgttgtgaactgtggcccggcacggggatggatggtgcacccggccttgggtccctcggaacccaaggcattcatcgaggactcggcgctcgactgccaggcggatctacacgctcgg

SEQ ID NO: 9096 - DNA, 334 bp, Homo sapiens
  source 1..334: mol_type = other DNA
cgtgcacctcggtcctttcagcctagacgcagcggggtgcccagctctaccttgggaggccccgccagcgaatccaatcattggaagtgacacatctctctcagagcctgactcttacttagggaggaattaagtcccatgagatccaggtttccagagtctttgaaacttggcctaggttcagcggcccgcaaccctgcggcggcccccagtcgccctaacaattgtcggggagcctgcaggccctgggccctggggagggcggccagggaggctccgagcagccgcacccgcagcagcaccactcggcccggcgggccaggaggaggaaggg

SEQ ID NO: 9097 - DNA, 382 bp, Homo sapiens
  source 1..382: mol_type = other DNA
aagtcccatgagatccaggtttccagagtctttgaaacttggcctaggttcagcggcccgcaaccctgcggcggcccccagtcgccctaacaattgtcggggagcctgcaggccctgggccctggggagggcggccagggaggctccgagcagccgcacccgcagcagcaccactcggcccggcgggccaggaggaggaagggggggtcgtccccctgcgctcctgaagggagacgtcgggctcgtccccggggtccaggccgcggtcccactcgcgggcgcagtcgcccggcgccggccgctcggccccgcggcctgggaggccgttgcgcaaggcagggcccgcggctcggggagggatgcgccgggcgttgcctcccgc

SEQ ID NO: 9098 - DNA, 498 bp, Homo sapiens
  source 1..498: mol_type = other DNA
tacttttgctgaagaacaaagctctccaatctgaaaaataacaagcgttttgtgttttaaaaaagattttgctgtaattcattaatactacataaaatggaaaaatatgtatttttatttcacatggaatgcatcgatctgaattaaaaataaggttttttttttaaaagaagcagaagttggccaggccctgaaaaattgcagggttttcaagactgcaaagtccagctgtatgcactaaaaactacggatttgcttaaggagaatttatgaaaaatttattcctgtttatggttggagactttgcaaacatctttaagaactgagaaaaataaaacaaacttgctaactgctttcagaagatcttctatattgcagtttgccacacctggcattttccctactgggggaaatttaatgagcacttaaataatcaatctagctttgtaaagcctggtgtctaaaattaatattcttccccatctgactattaattta

SEQ ID NO: 9099 - DNA, 529 bp, Homo sapiens
  source 1..529: mol_type = other DNA
ccacggccggagtgaggactgagagggctgccagaatgctgtcacctctcactgggtgggcgcctacgcccgtaattccagctactcgagaggctgagacagcagaatcactggaacccgggaggcggaggttgccgttgcgccattgcactccagcctggaaataatgaaagctcacgatcctcttttggtagtttcacgttacatgatgattaaagtttaacttatttttgagcctaacttttttagttagaaacaactcttaaccagccagccaggcgtggtggctcagcctgtaaccccaggggctaaggcggaagggtcccgggcgcccaggagttcaaggctgtgagctctggtcgcggccctgcactccagccgcccagatgaaataaaaattcaagttttggccaaatttcggaaaagtcttcattaccaaaaatgcctgttttgagatacatgttttaaaacggattcaaagatgcagactaccacacttgttttaatctgatatttgctaaggagacag

SEQ ID NO: 9100 - DNA, 431 bp, Homo sapiens
  source 1..431: mol_type = other DNA
gggaagtttccgtctgtgtcctcagaagagaaaactttgaattcagctatttggaacctcgttactggttccgagcctcaggtccaggaattatttatcaaagtccatgccctgggtttgaaaatacttcagcctaacggagaggtcggctcagcgttcctcccagcatcctcgggcgatattagggtcctgggagattcgggaggccactgcgtccaggccccccacggccagccaggcgagaggcgggacgcgaagccgcggcctccttcctcttccctgaggcggtggcggcggcaggccccgcccctcccgcgcggtggccgtcggcggaggggcggggcctgctacagcgtcgccggctgacgcgaatgacgctgcgccagtcaggccgcagccccgctgcttggcccgtcgggcccgccttggcc

SEQ ID NO: 9101 - DNA, 465 bp, Homo sapiens
  source 1..465: mol_type = other DNA
aaaaatgcctgttttgagatacatgttttaaaacggattcaaagatgcagactaccacacttgttttaatctgatatttgctaaggagacagaaggctggtgtttccgatttgcctacacagcggcccgcgagaagcatctcttggctcgaagcgcgctgtagaatagaacggccgagcccagcacggaaggccgggaaagcggcgctcgccgctcctggctcctccctgccctcgcgcgactcgcaggcctgggcggagggctgcgtccgccaccgcgcaacctcgcgcacgcgcaccgcggactacacttcccgaagtgccgcgcgaggtattctcggcggtgattgtgccgcgcgaggcgcctccgccgccggggcaaacggccccgacacgccgcgtgaggcgctgccagcggccggccgagggcgggcggacgcgggagctgcggacgtgaggcatgagc

SEQ ID NO: 9102 - DNA, 731 bp, Homo sapiens
  source 1..731: mol_type = other DNA
ggccgggaaagcggcgctcgccgctcctggctcctccctgccctcgcgcgactcgcaggcctgggcggagggctgcgtccgccaccgcgcaacctcgcgcacgcgcaccgcggactacacttcccgaagtgccgcgcgaggtattctcggcggtgattgtgccgcgcgaggcgcctccgccgccggggcaaacggccccgacacgccgcgtgaggcgctgccagcggccggccgagggcgggcggacgcgggagctgcggacgtgaggcatgagcggcgccctcctccggcccgcgagcgtcctgctggttccccgagcgagggtctcgcggcgcggggcctagcggagggcatcgaaggcctccgcgtgcgcacgggttgctgcggccgcgccgggcgccggggagggcggcggccgccatggaggtgagcgggccggaagacgaccccttcctttcgcagctgcaccaggtgcagtgccccgtgtgccagcagatgatgcccgccgcgcacatcaactcgcacctggaccgctgtctgctgctccacccggcggggcacgcggagcccgcggccgggtcgcaccgcgccggggagcgggccaaggggccctcgccgcccggcgccaagaggcggcggctgtcggagagctcggcgctgaagcagccagccaccccgacggcagccgacggcgccgagagccgcgagagctacgacgcgccgcccacacg

SEQ ID NO: 9103 - DNA, 469 bp, Homo sapiens
  source 1..469: mol_type = other DNA
cctcagggcaggcacgagcagctgcagagtccacagttccatggcagtatttcagccaacgtatgaacaaataccatctgaagaatatgttctaatattaaaatctatgatatacacttggtgcattcatggatagggacagcctataatgtcatattcagttaacattcctttactttcatgaaactgagtttcaactacacaaaaaggattacataattttaaggttacaagttaatttttacttgattttttttttttaacaaaatgctaaactgcaggttaaaaagaaattaagtctagaaagtatttatctatctatttgttctattcaatgagggacataaagcctttctcttaacacatattagaggctggaaaatgcatcttcaagtgtgcagggattgttagatggccccctgccaggagactctctgggaggtgtgtgccacaccaacttactctgagc

SEQ ID NO: 9104 - DNA, 381 bp, Homo sapiens
  source 1..381: mol_type = other DNA
acttgtgtactttgaatcttatgcctttctaatttagaagatatttaggtgagactttggacttacattttaaagttgatactggaactttgaccactgggatacaatgcatgcattttgcatttaggaggtgactggattatgagggcaccttcctcatgaatgggattggccccttaagagagcagcttccttctctcaaagaaagcagaggtgtcaccttttcaggtccttgccagagattcggggaaaggctttgaccgcgcccctgaggagggcgctgcccggaagccacgactcctacgcagtcaccgggaagggccgccgccccgcccgcggctgctggcccgggtgacgcttccgcctgctataagagcagcg

SEQ ID NO: 9105 - DNA, 353 bp, Homo sapiens
  source 1..353: mol_type = other DNA
aatccatgggagtggatcccctggacactaggggacccagtctccacccccctgtgctcggaatgggggacacaacttgtgtactttgaatcttatgcctttctaatttagaagatatttaggtgagactttggacttacattttaaagttgatactggaactttgaccactgggatacaatgcatgcattttgcatttaggaggtgactggattatgagggcaccttcctcatgaatgggattggccccttaagagagcagcttccttctctcaaagaaagcagaggtgtcaccttttcaggtccttgccagagattcggggaaaggctttgaccgcgcccctgaggagggc

SEQ ID NO: 9106 - DNA, 507 bp, Homo sapiens
  source 1..507: mol_type = other DNA
taattcttctgggcgacgctccgtgctccagaatatctgatgacatcacgaactgctgcatcaacctgcctctggactgatagaggacacaaggagtgtcctgagcccgtgtgactcagtgtctctggtactaggagtgaggacgcctggttctgggcccaggactagtactagttagtggtgggacctggaacaaatgctttggtgaccttcgcttccttaagtacaaaagcccagggtcgcgcggaggccctggacgccgcaggtgtcaggttctgaacccggtcctgaagaggccctggcgccgggggtgggtgaggccgagcgcgcgccttgggaacctggccggcctcaggctggcgggagcattggcggacatcgccccgggcggggcggactggggggaccctgacctgaccctgctcccagctctgacctcggccaccacgcgcggcgcccccgctggtcccgccaggctccgccagaaagcgtgggaggcgcccgacc

SEQ ID NO: 9107 - DNA, 251 bp, Homo sapiens
  source 1..251: mol_type = other DNA
tccgcagggccaggctcctccagaggatcctcacttcaaggccagtcacaggtcccagggatatctttggagagtggagagccgcttaattcagcatctcctcccactcactgctcaagtgagtcactgggactgtcttagaatgacatctgagaactgtgtcagagcaggcaggccccgcatccctgcattcctgcatgattctgcagattcttcttcttgagcagcagctcagaaagcgcatcctgtag

SEQ ID NO: 9108 - DNA, 512 bp, Homo sapiens
  source 1..512: mol_type = other DNA
tatctgaacaaagttacacaaggttgggacgacagagtaggtaattcttaccttgttaaggaagcatgggaaaggatattcagttatttaatgactaacatagtttctgctaagaaaattaaatctctaggacatccttgatttattgtttctttgttgctcagcaatttttatgtaaggcatagatagaattttacctttcacggctgtcagcagtgttttcaactaagaaatggaatatcattactgacctcactgtgtgaaaattgctgcatttggtattaacaattattgaatgttagagatggaacagattatctggtatatgcttttcctcataaggaaactggtatcaggagtccagtgatttgcccagggtaccagagccaggactagagaccttcagtgtttcagattaaatcccctgacacagtaaaaatttcaaattaaatgacacagtgggctggccagacaggcacctcccctttgttgaagttactgatataaagatc

SEQ ID NO: 9109 - DNA, 333 bp, Homo sapiens
  source 1..333: mol_type = other DNA
taatcattagtgataaatggagtgcggtggcgccatctcggctcactgcagcctatgttggccaggctggtctggaactcctgacctccatactggcgtgagccccgcgcccgcccctggtgtatcaggagccggcccttttctggaaacaggccagcaggggccctgtactgtggtcaaagtcaaggcctccgggcaggactcgcggcccctccggctggcgggtggggttgacccgcacgtcccgccccgcctctcccttcgcgctccggacgggcgacggtagctcgagacccgggactccgcccgcctccccgcgagtatttgaggtcc

SEQ ID NO: 9110 - DNA, 159 bp, Homo sapiens
  source 1..159: mol_type = other DNA
taatcattagtgataaatggagtgcggtggcgccatctcggctcactgcagcctatgttggccaggctggtctggaactcctgacctccatactggcgtgagccccgcgcccgcccctggtgtatcaggagccggcccttttctggaaacaggccagca

SEQ ID NO: 9111 - DNA, 242 bp, Homo sapiens
  source 1..242: mol_type = other DNA
catcccaacctaaaacattagattctcataaggagcgcacatcctagatcccttatgtgtgcagttcacatgctgcctgatctgataggaggagctaagcttcactagctcacccactggtggctcacctcttgctgtgtgtcctggttcctaacaggctacagaccagtcaggtctgtggcccgggctctgtgacatgcgcctgtaatcccagctactcgaatcactttgccattgcactc

SEQ ID NO: 9112 - DNA, 434 bp, Homo sapiens
  source 1..434: mol_type = other DNA
ttcctttaaacgaactttttctgtgaagatagtggcccaacagcgtgttgcgttccgcgggacgcagatttccttcacaggcaccccccgggttgcgtttttatagccttgcataataccagtacaccagcggcgccgtcggtgagtgacctttgggactggtttctctcaccagcgtaactcccccgcgggaggcgcagggcaggggcgtccctcctctcagcacagcctcccgtcctccccagtcccagatcgccgggcgaggccccagatggacctcagggacgccgctgtggaggcggggcctgggcgcggacgggcgcggagcgaggcaccgcaccgccggggcggggagtgggcggggctcggggggcgcgctgcgtaaagaggcctgcagtcccgcggcgcggggcaggttccgggctgctggcacc

SEQ ID NO: 9113 - DNA, 513 bp, Homo sapiens
  source 1..513: mol_type = other DNA
cttctgggcgacgctccgtgctccagaatatctgatgacatcacgaactgctgcatctgcctctggatcccctgatagaggacacaaggagtgtcctgagcccgtgtgactcagtgtctctggtactaggagtgaggacgcctggttctgggcccaggactagtactagttagtggtgggacctggaacaaatgctttggtccatggggccactggaacagggagcttggctgtcacccgaccttcgcttccttaagtagaaaagcccagggttcgcgcggaggccctggacgccgcaggtgtcaggttctgaacccggtcctgaagaggccctggcgccgggggtgggtgaggccgagcgcgcgccttgggaacctggccggcctcaggctgacatcgccctgggcggggcggactgggggtagacggatctgcctctgcgcctagccctgccctccgccgccgcgcgaacgcgcgcgcctccccggctagtcccggcaggcggagcccggc

SEQ ID NO: 9114 - DNA, 353 bp, Homo sapiens
  source 1..353: mol_type = other DNA
caaggttataaatttgcacaaactttttttttttttttttaatgtgcccagtccaagacaaatatgtttgtttgccatggtttcatcaaagggttgcacattgagcagtgcatgaagtattatgttaaaattttctaatgctccatattgccagtaaaaaggctgaataaatattatagtcttctctgattcttaaaaatatgaaaaatagctcattggaatgttaacaaaagtttttaaaaatgatcttttctgccaggctgacctgtggtcccagctacctgagccctcccagcaaggagaaaaaaaaaaacatatatatatatatatatatatatatagtcttgccctga

SEQ ID NO: 9115 - DNA, 586 bp, Homo sapiens
  source 1..586: mol_type = other DNA
tgctcggcagccaccgtgcctagggtctaccgaactggccagcctagctccgacaagctgacacatcaacgtgaaaaggcctttacctcccctgcaggggcgaaaggccgcccaccccgccatcctgcagctgcccgtcggctcgtccaggaccctgcccaggatgcgggaaacctttgccacccgctggagagcccactgcaaatgggtcttcaactcgacgcctcttcccgtccttaggaggcgaggaccctgttccgaggcagcccctccccctggttccggggcccccggtccccagcccccctcgggggtccagagtgggcggctcggggtggggatcgcggcgtgagcggaggacccagcgccaggggtcgcccgtgcccgtggatcgggcagggggctgcggctgggcccgaggcccgggcaccgcactcaccgccggaccgcgaggccggccgcccaccctagaccgcggggcgagctcgcaccgcgccccggctccccctcgcggtgccgcagtcccagccgcaccgcccccgcggccacagccccgcccgtcatgacgtcaccgggcagggcgggt

SEQ ID NO: 9116 - DNA, 312 bp, Homo sapiens
  source 1..312: mol_type = other DNA
atgttctcacttataagtgggatgaatctaaaattaaaatagaaattttaaaaaaaactccgtttggaaactgcactgctgtctctgcagtgtggccacagtgactgcccgcccaccaagcatctagagcccagaggcaggggtgggatgtgtccacctggatacgcacgttttcatttcatttaaatggcaaacaaaggtcttggtttcgaaaagcgggtgagggtcccgcagccacagcgatgttctagcctccgccgcggaactcacagaggttcccccgccatagcctcccttgcaaggggcacacgg

SEQ ID NO: 9117 - DNA, 570 bp, Homo sapiens
  source 1..570: mol_type = other DNA
ggacggtcagtgcccccggggcagagggctcctgggtaccaatgcactcccggagagggtcgggcagggctgaggggctccgaggtcgcttcacccctagatgctgcggcgcagtgcccacgctggggcgggggcggaggccgcgctggtgttcaggccgcaggtgtcccggttgccatcaagcacgactcctcccccaggcctctgtgagacggagcgccgcctgggcagtcgctggccttctcaccaggggcagttggctggagggactctggccagtggccgagtaggagccgcagtccgaggtggcggagcagcctgtgccacctcagccctcccgccggcactggagcacctgacggcttctccacgccagctctgcccccaccccggtcaggacgcgctggtggccctcgcccggtcggcacgcccgctctgattggccgcgggccggtggtccagccccccggacggtccctagggctcggagcattagcgccagcggactggggggctcgggctgggggcgcggcctgtgccggccgccccaccctccttgcataaaagccg

SEQ ID NO: 9118 - DNA, 314 bp, Homo sapiens
  source 1..314: mol_type = other DNA
tatgggaagggggaatccctccccagatggtgtgtaccctcgtttgggcacatatggggcacagtgagacacgaaagagaatttatatcctggaggctggcagaacaaaaggctgtttctctccgtctctctcctgctgaaacggatcatgtgatacagaagcagattcatctgcacgccttggggtttgagaacgtcaaagcccttttgtggggagggctttctgcccgggagcttgtttttccttcctggcactgaaaacaagcacggcaaacatttactgaagcatctgtgtgccaggcactgtcctgagt

SEQ ID NO: 9119 - DNA, 903 bp, Homo sapiens
  source 1..903: mol_type = other DNA
gcttccgggaggcgcccgaagtcggagagcgcggccaccccgggagcagcagcctttgcccgcaccgccgcccgcagggccctgaaccgccggcaagggcgcgggccgggcgcggcgccggctcctcctcctgccgcgtccggcgcggagcagcggagagcggcgggctcggcagccggcgcccgggccgcggaactgatgagccgcggcggctgagggcccggccggcctctgcccgcctctgcccggcgcccgagcggggccgcagcgcccggggcgcggggtccggcgggtgacatgggggcggcctgacgcacccggagccgccgagcgctctctctcgagccgcgggccctcctcggcggcagcggctgcaggcgcctggcccggcgcgctgtgcccggggcgcccgcggagcctccgccgcgctctatgcgcctctgcgggagccgcgggcccgggccatggccatagaccggcggcgcgaggcggcgggcggcgggcctgggcggcagccggccccggccgaggagaacggctccctgccgcccggggacgcggcggcctcggcgcccctcgggggacgcgcgggccccggcggcggcgcggagatccagccgctgcccccactgcatcctggaggcggcccgcacccgagctgctgctccgcggctgcggccccgagcctcccccctcgggggcctgggcgggggctatcagaagaccctcgtgctgctcacctggatcccggcgctgttcacctcctggaccagcccaacttctggtgccgcggggccggcaaaggcaccgagctggcaggggtcaccaccacaggccggggcggggacatgggcaactggaccagcctccccaccacccccttcgccactgccccctgggagg

SEQ ID NO: 9120 - DNA, 908 bp, Homo sapiens
  source 1..908: mol_type = other DNA
ccgccgggcacctcagacagaggtcacggagacctggcgcgcgcggagtgggtggggggcccgcgcggctgcgggagcccagcctcagagaagacccggcccacacgttctcagcgcacgccgactttgccgggacccgtcgccggccggcgacccctgctacgcgcgtctcctcctcccccgccccgcccggcgcgaaacgggcaacgggcaggggatcctccagccaggcgggcccggggtgtcccgtttcccccgcccccctcccgtggatcccgggcggcggcggccgcgcgtccgggctggagggggcgctcgcgagcaggagccgagcgcagcaggtgccgcggttacctccacctcggcggggggagagggggcgggcggggccggctccaggagctggagagcgcggccggctcggcaggctgggtccagagctcgcggcttccgggaggcgcccgaagtcggagaaacagcgcggccaccccgggagcagcagcctttgcccgcaccgccgcccgcagggccctgaaccgccggcaagggcgcgggccgggcgcggcgccggctcctcctcctgccgcgtccggcgcggagcagcggagagcggcgggctcggcagccggcgcccgggccgcggaactgatgagccgcggcggctgagggcccggccggcctctgcccgcctctgcccggcgcccgagcggggccgcagcgcccggggcgcggggtccggcgggtgacatgggggcggcctgacgcacccggagccgccgagcgctctctctcgagccgcgggccctcctcggcggcagcggctgcaggcgcctggcccggcgcgctgtgcccggggcgcccgcggagcctccgccgcgctctatgcgcctctgcgggagccgcgggcc

SEQ ID NO: 9121 - DNA, 553 bp, Homo sapiens
  source 1..553: mol_type = other DNA
gaatacattcagtatatggagcttagaatatatccttttggaaagctaaacattttttttttttttgccccaaataagactagaaatggattgctccatttaagacttccattaataaacttctcagaatatgaaatgcctccaaaaggaaatatgctagtagccagcgctgggtgcacacgagatatatcccagcatcgtgcttacatcgcatgcatggccattattcgctcctggaaaaagcgcagagggttgttcccgaaggctgaagaccctcgggcttggagcggggcgcgggcagcgggaccgccgggcacctctgaagagacagaggtcacggagacctggcgcgcgcggagtgggtggggggcccgcgcggctgcgggagcccagcctcagagaagacccggcccacacgttctcagcgcacgccgactttgccgggacccgtcgccggccggcgacccctgctacgcgcgtctcctcctcccccgccccgcccggcgcgaaacgggcaacgggcaggggatcctccagccaggcgggcccgggg

SEQ ID NO: 9122 - DNA, 557 bp, Homo sapiens
  source 1..557: mol_type = other DNA
taattagcaagtgtatataaaaacatcatactctccatcttgacctgttcaccgccccagaccaggtgaggaagggactgagtcgaggcagtcgggtctgagtccagacaggccacctgcctcctctaacatttccgcgcagcgctgggctttgaggctttccagagcgctgccggggcgggggcggggtgaggtgaggggctcaccctggctctcccacccctgctggaactaacttgtaattctcaaacaagtgctattccctcagtaacgcgccgctgagtgaggcccctcaagagcactgccccgcggtctgtccggccgtgtcccaggccttggcgcggctgaggcatgacccggagggaacccggggcgggccggactggcctgggccctcgtcggggcggtgctcgacccggcccgcgccccccgccccgacactcgcagccccgcctccggaccccgggtagttgccatcccctcgcgggccgggtggggcgcgcagctcctagccctgggaggtcccgccgagcgcctggcaagcagggcccgccccg

SEQ ID NO: 9123 - DNA, 705 bp, Homo sapiens
  source 1..705: mol_type = other DNA
agcgctgggtccagagcgctgccggggcgggggcggggtgaggtgaggggctcaccctggctctcccacccctgctggaactaacttgtaattctcaaacaagtgctattccctcagtaacgcgccgctgagtgaggcccctcaagagcactgccccgcggtctgtccggccgtgtcccaggccttggcgcggctgaggcatgacccggagggaacccggggcgggccggactggcctgggccctcgtcggggcggtgctcgacccggcccgcgccccccgccccgacactcgcagccccgcctccggaccccgggtagttgccatcccctcgcgggccgggtggggcgcgcagctcctagccctgggaggtcccgccgagcgcctggcaagcagggcccgccccgcctcccttcccggctggtccagtcaccgacctgcggctccggggccgcgagggaggaggcgcggggggcgcgaggcgggggcgagcgcttgggactcggcccggctcccggctccgggggttctcgtggccgcggcagcgcggtctctgcggaggcggcgggggcgcggccagccggacctcttcctttccagagcggcccgcggcgcccgttccgcgggaggcgggcgggaggcggacgcggcctaacctcgacgtcgactaccgcgccgcccgcgatgggaagcgccttataaagcc

SEQ ID NO: 9124 - DNA, 358 bp, Homo sapiens
  source 1..358: mol_type = other DNA
gaatttttggaagtttaaatatcccctagttcacttaccctctacgtaaatgcagaggatgaagtaaagttacaagtcacttacagcatacgccctatggagtggatacaataccatggtactgcctttgagaaaagaaagactttattgagacaggaggcaggttcaaatcttcctccctgatctgggccaagtcttcttcgttccaaggagacgaatagagatcaaaacaaacagagtaagccccgtttgggctggtactgtggttacaacggcacttattcccagagtcaagagctgctggcacactggctgtttaacatatgcgttcatttaattagcaagtgtatataaaaac

SEQ ID NO: 9125 - DNA, 558 bp, Homo sapiens
  source 1..558: mol_type = other DNA
catccacactcatgtcggtggttgacgctggctgccagtggcgattgtagctagggctgtcagctgcatcccctaaacatagcccaggcttcctcaaagcttgggggctgttggttacaaccaagtcacaatcccgaggtagacccacctctcaatggggggaggccatcatggtgttgggatggcttccaggaatatatctaatggcaattcaaagagcatttcaaggatatttgaaattccctgaaattttatagttacacatgaaagaaacttagtaaaggttttcctcgtatttgacaaaaattctaaaatttatgtcactaccagtcatgcattgttttagtcatgaatcttcaaggctgaaacttttctgaaacattaacaataaaaactgtttttcatcaaccatgctgtaggaaagactaacttgtataatcacatgaacatctttaataagattctggatacaagaatttaaagtagtaattaaaacttcatggaagttgaaagaaatggaatttcaatagtattggcagttacacctgatatcagttc

SEQ ID NO: 9126 - DNA, 400 bp, Homo sapiens
  source 1..400: mol_type = other DNA
cattccaggggtgccatatgtaattatcatatgattccaggaagcactggtttcggcatagtcgacactgctacactttaactcagtgtcccatggttattagagcttagaacccggggggccgtgttgcaaggctctctgggtggccacagcagcttgcgctgcgcccacggctcagcacgcacgcacagcaggtgggggcccgccctgcccacagcgtgaaaacaggagccccggccagccacggctgggcagggccagaagcgcctcctccaggatcctccccgcgctggcccgccagcaccgcccctaccaggagcccggagctcttcccagggcccgcctccccgccagggggcgaaccaggagcctggcactctcctcagggcccgcctccccg

SEQ ID NO: 9127 - DNA, 430 bp, Homo sapiens
  source 1..430: mol_type = other DNA
caggctggagtgcagtggcgtgatctcagtgcattctcctgcctcagcctccggagtagctgggattggccaggctggtctccgcctcggcctcccaaggtgctgggatatttttttaaagaggaattaaagaacctaattggttttgagagttctccaattactgtagaatcgtgtcacccttgaactatgtaaaagttgaaaagatgttcagtgttaaatgtagtaacagttccacattaaaagatatttacgttcgagtttacagtatttaaaaatgcctttctcactttcccgagatggttaaggaaaaatcatcaattcgtttgcccgagtttaagagaattttcacctcaatatttctagcattgactgaagagctcaagcttgacactcgacctcactgcgctagtcccgggacgtggggtcc

SEQ ID NO: 9128 - DNA, 403 bp, Homo sapiens
  source 1..403: mol_type = other DNA
ggccaggctggtctccgcctcggcctcccaaggtgctgggatatttttttaaagaggaattaaagaacctaattggttttgagagttctccaattactgtagaatcgtgtcacccttgaactatgtaaaagttgaaaagatgttcagtgttaaatgtagtaacagttccacattaaaagatatttacgttcgagtttacagtatttaaaaatgcctttctcactttcccgagatggttaaggaaaaatcatcaattcgtttgcccgagtttaagagaattttcacctcaatatttctagcattgactgaagagctcaagcttgacactcgacctcactgcgctagtcccgggacgtggggtccggattcttagcgcggactcagaaccgtccgggagccgccg

SEQ ID NO: 9129 - DNA, 488 bp, Homo sapiens
  source 1..488: mol_type = other DNA
caggctggtcttgatccttacaattgattgtctcctacgctgcctggggccaccgggtgtgtctcaagggagccgcaaggcccccgtgaagaggaatccccttttccggagggggctgcgggattccccggggccggggctctcaacccaccgcgcgaaggcccacgtgtcctccccggcgtgctctcccggtgcgccgccccgaggcccgagcgcctccgcgtgcgtggctgacggcttggagggcgccccctctgccgcggccttcctgcagcggggggacaaagagggcggcgggcggctggcggccttgagcgcagcccggtcggcagtgcagggcctgcgaagcccgcgggccggcgcaggggtgggagtcgggcccggggcccagagagaccttccggggccggggctgcggctccgcgggcttccccaccggccgggtctcccggcaactaccagagagcgggggcgcccggggaggcccg

SEQ ID NO: 9130 - DNA, 396 bp, Homo sapiens
  source 1..396: mol_type = other DNA
atggccagtgggcctctgggacccggggcccggcccacccgcctccactatatacgcattgatacatgtgaagttatatctatgcttgtacaatatattaacatagaagaagaccaactttcaataggaaaaacaaaagatgattttttttcttttttcatgtagaggatacatgtaaatcacacatatctcctattacagcttcatgaatgggaagaatctctctctatctagttagatatatctgcatagctatctgatatagagaaaaatttaaaacaaaattaattatatatttaggtacagcaaatgaatactaaaaaaacaagtaaccctttaaaactgtgctgggcacatagtagaagcacagtgcaggccccttgcagcctccttgga

SEQ ID NO: 9131 - DNA, 576 bp, Homo sapiens
  source 1..576: mol_type = other DNA
gaactggacaaggtgatcctttggcaaaccttcgatttggggatgcctcccggctcagggctggccctcgggatgcagcgacccctcctcgccaggctccgcgggactccgggcagggcgctcagtgctccggcagccacagggttcgcagagctgaggtccgcccggagagcagccgcgcctccagctcgcagttactcggagccaggccggggagcatctgtgccccgccccacgcgccgcgcaagtcctcccgggatcccgggtgatacccggcctcgctccggcccccccccgagcccccgcagccccagaggaggccacgggctagcgatggcgaatgcggcgtggctacgctctcagcctggccccgccccaaccctggccccgcccatgccccaggctcctgcctgggctctgctctcggccccgccccgcacccaagccccggccccacccccgagcccccgcagcccgggagcctaggccccgcccccgagtcccggctccacccccgagacccggcccgagcccccgcagaccgagctaggccccgcccccgagacccggccccac

SEQ ID NO: 9132 - DNA, 217 bp, Homo sapiens
  source 1..217: mol_type = other DNA
tcccagactcaaatttccaactacctgctggaaatctgcattcatggctgttttaaactcctcatgtgagaaaatatccacacgaagtacagcacatattgggaatgctacacatcagacagtcccctgttaaaactgttttcacgacaaaaaggcatatgattaaaattgctgttgtacttcacagagggggccttttatgaggcagggtccctga

SEQ ID NO: 9133 - DNA, 494 bp, Homo sapiens
  source 1..494: mol_type = other DNA
tcatagaaaaactgatgttccaggaagatgtatcaccaagaagcatgtagtaacatacttgataacacattattaaaagcggttctgaagggctatttaaaagggaactcaatagtagtttcaaaggagtcctattgtaaggcaaaaattgtgctttaccttcccgcacaaccttccctaatgttttgggaaggactgatacaaacttttagtgtggcccccaaagcagcttagggggttacttaactggctacattttgaccatatactaaaggaactgggcccctctgaggggcctgaccgaggtatgcgccggcgccaggctggggtccaaggggcgctccgaggcggggcccacaagagccaggttcccagccactgggacagtgaatttacgtgggctcctaagaagtctaagaactgctcagaaacactccaccgccgccaggggcgcacagcagcgggtatgcggccgcgggaggaaggggcggggc

SEQ ID NO: 9134 - DNA, 421 bp, Homo sapiens
  source 1..421: mol_type = other DNA
caaaaaagctgcagtcttctgaagaaagccatggaaagcctacccgcgcacgctgggcgctgccattttgacagaaagcgggcctgccccagaggcccctacgcaggtcgccctgagcagagcctctcaggcagcgccgagggcgaccgcagccggcgtgggaggggcatcggcggtcaggggcggggcgtcggtgcggcggccttcggtaacccgggcaacgcggcctcctggatgtaggaaggggcgctgcccctcgaatgcctgggcctccgatatccgtccgccaggagcttggctggatgcacgggcggccagtcctcttatttccccgccctcccgccgcgtggagcggctgctgggtcccgagcctccgggcgggggcgggatcggggcggggcggaggcatctccctcccagc

SEQ ID NO: 9135 - DNA, 805 bp, Homo sapiens
  source 1..805: mol_type = other DNA
gcagactcggtcccttcccagctgcgcttcggaggaggcggacgctccgagaggagcgtggggggagctgcgggcagagcggaggcagccgcgccctcgcgccgccctccgccgcgcccggctcccgccccccggatcccacccccggcctgccgcggagccagcgtgccagccggagctcgccgggccaccccgcggggcgcgcggcccgggctccgggtcttggcggcggccggtggggcgggcatggggtggggtgggtgctccacctggccacgccgccggcccttcgcgggctggcccggccccggacgggcgggcgcacggaggccgcctcttgggctcctcctggagggaggcgcgcggtagacggcgcggccgctgccgtcggggcggtgggctccagacgcgggccggctcgctcgcatggttccccctggtgtgcacaaccgcgctgcgcctcgaacctcgaggtccaggtcccgcctgccctgggccgggccgcaagcgcccacgtcgaggcgggctggggggcggtgccgcgggccaggccgaccccgcaagcgggactggggaagtcggagccccgcccaccaccccgccccccgcgctcgcggccccgcccccgagccggctcgctcccggccccgccggccgcccgcctcggccccgagcggagcccactgctcccctcggctgccccgccccgccgccgccccgcccctcccgcgcgggcggcccgaaaacccggagcgcgggagcgcggctccgcagggccgggcggccgcactgggcatgctcagta

SEQ ID NO: 9136 - DNA, 505 bp, Homo sapiens
  source 1..505: mol_type = other DNA
acccgcgcacgctgggcgctgccattttgacagaaagcgggcctgccccagaggcccctacgcaggtcgccctgagcagagcctctcaggcagcgccgagggcgaccgcagccggcgtgggaggggcatcggcggtcaggggcggggcgtcggtgcggcggccttcggtaacccgggcaacgcggcctcctggatgtaggaaggggcgctgcccctcgaatgcctgggcctccgatatccgtccgccaggagcttggctggatgcacgggcggccagtcctcttatttccccgccctcccgccgcgtggagcggctgctgggtcccgagcctccgggcgggggcgggatcggggcggggcggaggcatctccctcccagcaccgccccctgccccgagccctgcctgcgcccgcccccgaagcggcgcgggacgcctggcgccgtccgcgatccgcagggctgcccgcttaggcttaggcccggcccgctggcaaagccgagccg

SEQ ID NO: 9137 - DNA, 389 bp, Homo sapiens
  source 1..389: mol_type = other DNA
gaaactgaggttgtgctcaagggaagtttttttcttctgcagaaacttcgatggcggagcccggtccttgcctcgcagccgccggcaaaccacggtggctcccagtccccggggatattccgcgtcagcccgcacccccggtccccggcccctggccccccgcccccggcccccggtgcccgctgggtcacctctctctcagcatcgcccggtacagagataacggctcggctttgccagcgggccgggcctaagcctaagcgggcagccctgcggatcgcggacggcgccaggcgtcccgcgccgcttcgggggcgggcgcaggcagggctcggggcagggggcggtgctgggagggagatgcctccgccccgccccgatcccgcccc

SEQ ID NO: 9138 - DNA, 255 bp, Homo sapiens
  source 1..255: mol_type = other DNA
aatggattttaatgcaaatctcgctgtgcttgaaagcctttatccaccactttaataagatgattcaaaaaagctgcagtcttctgaagaaagccatggaaagcctacccgcgcacgctgggcgctgccattttgacagaaagcgggcctgccccagaggcccctacgcaggtcgccctgagcagagcctctcaggcagcgccgagggcgaccgcagccggcgtgggaggggcatcggcggtcaggggcggggcg

SEQ ID NO: 9139 - DNA, 595 bp, Homo sapiens
  source 1..595: mol_type = other DNA
cggcaaaccacggtggctcccagtccccggggatattccgcgtcagcccgcacccccggtccccggcccctggccccccgcccccggcccccggtgcccgctgggtcacctctctctcagcatcgcccggtacagagataacggctcggctttgccagcgggccgggcctaagcctaagcgggcagccctgcggatcgcggacggcgccaggcgtcccgcgccgcttcgggggcgggcgcaggcagggctcggggcagggggcggtgctgggagggagatgcctccgccccgccccgatcccgcccccgcccggaggctcgggacccagcagccgctccacgcggcgggagggcggggaaataagaggactggccgcccgtgcatccagccaagctcctggcggacggatatcggaggcccaggcattcgaggggcagcgccccttcctacatccaggaggccgcgttgcccgggttaccgaaggccgccgcaccgacgccccgcccctgaccgccgatgcccctcccacgccggctgcggtcgccctcggcgctgcctgagaggctctgctcagggcgacctgcgtaggggcct

SEQ ID NO: 9140 - DNA, 411 bp, Homo sapiens
  source 1..411: mol_type = other DNA
ttggcccgctggggcatcgccccacgtgtgcaaaccaaacccccggggcctgggcgtgtgcgcgcgctcgcgtgccttgtgtgcgggcgggcatgggggcgctcggcgcggctggcgggcgtgcgcgcgcgcgtttgctcgtgcggggggccgggctgcgtgctcacgcgctccaggctgcgcccagagctcagctgctgggatcgagctagcttctgcatcgtagagagcgggctggcgcgccaggactccccagctcctggcggggaagggagggggagcccctgttctgcgcagggaggcggcggggctggggggcccccggtgctcacccccgggagaaatttcgttcagatcgcacattaattggagatatctgattagtcaggcctgctcgtgggcgtgaggctg

SEQ ID NO: 9141 - DNA, 446 bp, Homo sapiens
  source 1..446: mol_type = other DNA
aatcccaacactttgggaagccaaggagggtggacgagaccagcctggcgtggcatgcacctgtagttccagctacttgttgcactccagccaaagaaaaaaattaaaattttagggggaaaattttctaatttttgaacatgcactaaaatgattttcagagaaaaccaagtgttattttctaatctcattattaaagatgtttactcatcttctgcagaccatgccttatttgctctcagcatgcatggcctgtctgtgggagggcagacccccctcctgccaagccacactgccaggcaaaagcattcctttgtaaaggaaaccctcccagaccctctgaccaaaggggacgggtggggacttcctggcactgcagggccccttgcctggtactcccagcaactggttgcggttgagctcccctactggctccagctgtggag

SEQ ID NO: 9142 - DNA, 285 bp, Homo sapiens
  source 1..285: mol_type = other DNA
atttacctaattcagaaaaatgctgttcctcccagggaaaatagtgttttctataccttgctgtcctgcagcagaatatgtgatgtcaatgatcccactctgcagaaggtctgttctgcagctggaagggccaaagcctcattccagattccaaatgtcattctaactgctgcctgctggctgcagccaggtccctgggtccatacacagcctgcatcaagagccacagcctcacctgggggtggaggctgttctgaggggcccccaagaggaggtcctggggga

SEQ ID NO: 9143 - DNA, 562 bp, Homo sapiens
  source 1..562: mol_type = other DNA
gcggttgagcgcccgggcctggccagagcctccgccaatccgactcccgggagccgccctgaaggggtgtgggcggatggggtaccatcccaggccgcagggctttgcgcggtccttaagacccggaacaaacaccgcccccgccggcggcctccttccaggctggggcctgcctctccaggcggcgtcccccgagggcggctgcggcgcggagccgggcggtagggcagcagccctgcggcggctcgggcgaactgggccgcgcttcccccgggcgctgcatccgccttccgagatgctggcagcccgggacggcctagcgcggccctccccttcctcgcgcggagcccagcggcagtcgagggcctggctggtgtggggctgcggggtgcgtgcgcggcgcggggcccgggcgtacaagcctcggggcgcgtgggtgcgccccccaactcctgtcaggctgtgccactgggccgcacctccagtctgcccgcaaggcgccgcgcagcccccggcccggcccggtggcgcgggggaggggcgcgccgggcaggcaaagttg

SEQ ID NO: 9144 - DNA, 592 bp, Homo sapiens
  source 1..592: mol_type = other DNA
gggcccctgcttttcagagttgaaacaggagccctcggatgacacagcatcagccattccgggacacagtggcggcaggaaccgtcctcagcccctggcggccacggcagttccccgcagtttgttagacggcgagcacactcagggcggcagcccgagtaagatccactcgccccacctggatgcagagcgaggaccgcgtggaaaggaaacggcgcgggcggggctccccctcgcagatgcctcggagacccagaggggcggcgtcaggccagggccccgagccctacgccccccctgaggggggcggggagtcgcccgcggcgaggggctgcagggacgattgggatcgcagccagtcgcggcctcccggacccttcccctcgggcagcccggccctcccatggcccggggcgccttgggagggcgtaggcggtggggggtggggaggggactccacctccatccatcccgggatggcaactgcggtcaccctgctaaagtcggggcgggggcggcggtcctccccctcaccccccccagtccgagcgccgccgccgccgccgccgccgccgccgcggccgctcagtaa

SEQ ID NO: 9145 - DNA, 591 bp, Homo sapiens
  source 1..591: mol_type = other DNA
agtttgttagacggcgagcacactcagggcggcagcccgagtaagatccactcgccccacctggatgcagagcgaggaccgcgtggaaaggaaacggcgcgggcggggctccccctcgcagatgcctcggagacccagaggggcggcgtcaggccagggccccgagccctacgccccccctgaggggggcggggagtcgcccgcggcgaggggctgcagggacgattgggatcgcagccagtcgcggcctcccggacccttcccctcgggcagcccggccctcccatggcccggggcgccttgggagggcgtaggcggtggggggtggggaggggactccacctccatccatcccgggatggcaactgcggtcaccctgctaaagtcggggcgggggcggcggtcctccccctcaccccccccagtccgagcgccgccgccgccgccgccgccgccgccgcggccgctcagtaacgtgatgtgtctggccgagacgggggccgggacgacggctggggcgccggggtcgccagctcctcgcccacctccctccctgtgggagaagaggaggaggggaagatgaactttgca

SEQ ID NO: 9146 - DNA, 366 bp, Homo sapiens
  source 1..366: mol_type = other DNA
ctcagcaaatcatctgctatgacataggaagccagggctctctgtcttacagatgtctgaggatgatcgtcataatcgagatcccaaaccttaccctatgtgtagggtatacaaacagtatagaatattttaagccactaattttaacaacatgctgagaatatacggactacaactccagctgcaggaaactgagtagactgcttctcactctgctaggctagagtgcagtgtcacggtcagtgctcactgtgcgatcctcccacctcagcttcctgagtagctgggactacaggtaaagtgaatcttgactagtaaagccatcaccataaaggaagccttgaaaggactattcttcctttctca

SEQ ID NO: 9147 - DNA, 643 bp, Homo sapiens
  source 1..643: mol_type = other DNA
ggtggggggtggggaggggactccacctccatccatcccgggatggcaactgcggtcaccctgctaaagtcggggcgggggcggcggtcctccccctcaccccccccagtccgagcgccgccgccgccgccgccgccgccgccgcggccgctcagtaacgtgatgtgtctggccgagacgggggccgggacgacggctggggcgccggggtcgccagctcctcgcccacctccctccctgtgggagaagaggaggaggggaagatgaactttgcacatccagaaacgccattttgattccttttccggaacaccaacgcatcatgccagggagccaagcgtcctgcccggccgtaagtacgtgccccggattccgactcgcggtacgccggcggcagcgagaagtggcctcggtgtgtcccggagccggggacccgcacgccccactccgcgcagcgtgcgctcgggccggcggggcggccagggatgagcggggcagccctctcccctcgggctgcgcgccgggcgccgccggctctgccaaccagctcccagcgcgagccgccgcagcgccccgccagcaggacctgatgcccgacccgcgccgccgagtttatttttaaccagcaccgccgggactcgga

SEQ ID NO: 9148 - DNA, 551 bp, Homo sapiens
  source 1..551: mol_type = other DNA
actctggtccagaccaagattacttaatattcagattaatttcatgaactgctatattactccagcagccattgctgcacctattgtatagttacaaatgctgactacataccaaaacactgtttaggtgacttataattctggaatgtcacatacgaatttaacgggtggatcacctgatcccagctgcttatctggcctaacttcgtctcaaaaataataatttaagaattgtcattacttacaaagattttccactgtcttccaacaaaattttttgcttttaagtgccacatagctcatgttccttacatcgccgttatcaagaggatcgtcattcaaataaagtaaccactgacaatgctaattaattgggggtcgcaactgcggcggaaggcggactctcgcgggagccacaaagaggcagcagccggccacgtgacttcccggtggcctgctctccccacctctccgcgctgagcagccacgtcggcggcggtccctggtccagggaggggcgtggcaaaggcccgtgcgcggtacgtgtcccg

SEQ ID NO: 9149 - DNA, 399 bp, Homo sapiens
  source 1..399: mol_type = other DNA
tcacacttctacactgctggtggaaaagtaaactagtataaccactgtggaaaacagtgtggaaagtctttaaagaactaaaagtagaactaccatttaatcccactactgggtattattcaaaaaagatacttgcacatgcatgtttatagcagcacaatttgaaattaccaaaatcaatcaatgaatggataaagaaattgtggtatatatatacaccacggaatgctacatatgttctcactcataagtgggagctaagctattcctttacaaatttccaagaagaggaagtttgtcactgatggcatcttctaagctgaaatgatcttactcagattgtcttagccaccagaacacagaatgttctctctctccagtgcccaggcagagtctctg

SEQ ID NO: 9150 - DNA, 191 bp, Homo sapiens
  source 1..191: mol_type = other DNA
ctagccacccagcaagtctacctggcaccaggctggtactggggttgtctcacagagtcctgtgatgtgcactttccaaggcccttggtgtgtctgagctcagactctccttgggcagtgctgcagctggaagtgggggaaagcctgcagtcacaggcctaggcagtgggtgagctggagtctgcaaacgg

SEQ ID NO: 9151 - DNA, 485 bp, Homo sapiens
  source 1..485: mol_type = other DNA
tagctttcacttaactctgccaactagtgatgaaccactagtctcgtacccagagccagggcactgtacggccgcctacctgtcagaggagtccgcgtcgtcgaattgcccggggaccacccggctcatgagaagccgccggtagtccatgactggagagcgccgccggaggccgccgctctgcgatgggtacccacggccgatccaaaggccttggcgtggatatccccggaagtctgacttgagcggaagtcccgcccctgcgccgagctgggagtccggagctctctggatggcgcgcttgagtagccggcacggcgaggcccgtgctggccgtttctgcggcaggaggcgccagctagcccacaggctgttcggcctagggggacaccgcacccacagtagggtcgctcgggcctcgcgggctgcacctgtctctgcggagttcccccggcgcgggcggacgtcacacaggggcgttccag

SEQ ID NO: 9152 - DNA, 527 bp, Homo sapiens
  source 1..527: mol_type = other DNA
aatggccagtgctgtctacacagcaaatattgattgaataaaacctgcattccaatgacttatttctatcaagctttttattgaatttctgaatgaatagtttattgaaaattagttgttttcaaacctatgtcatcacttggtaaaatataaaaagaaaaattcttgctttgttttcccaatgcaaaaaagcgcaaaggccttgtttcttatacctttttaatttaaagttagactattttatgttggatttttaacatatttatcaaatgtttgaatagatgttccagagacattctaaagctgttttaagataggagttaaaagactcgcaaaaactatagttttgtttaaaagctttttcagttgtaagacaaactttacctttttaaaaagcacttatctttttaagacacaaaagtgtgctcacttccaggatccaaggggttttgtgggagggagaacgctttccaacctcctcccaatcgggctcccggagtgctggaacgcccctgtgtgacgtccgc

SEQ ID NO: 9153 - DNA, 376 bp, Homo sapiens
  source 1..376: mol_type = other DNA
accacttggtatatcaaacgatttgcatagtctacatcatctttcacgtagaaggtaatcttgttaggacagaacgtggtacatattaagtgcttagtaagtatttgttgaacgtagctttcacttaactctgccaactagtgatgaaccactagtctcgtacccagagccagggcactgtacggccgcctacctgtcagaggagtccgcgtcgtcgaattgcccggggaccacccggctcatgagaagccgccggtagtccatgactggagagcgccgccggaggccgccgctctgcgatgggtacccacggccgatccaaaggccttggcgtggatatccccggaagtctgacttgagcggaagtcccgcccct

SEQ ID NO: 9154 - DNA, 596 bp, Homo sapiens
  source 1..596: mol_type = other DNA
aaaaattcttgctttgttttcccaatgcaaaaaagcgcaaaggccttgtttcttatacctttttaatttaaagttagactattttatgttggatttttaacatatttatcaaatgtttgaatagatgttccagagacattctaaagctgttttaagataggagttaaaagactcgcaaaaactatagttttgtttaaaagctttttcagttgtaagacaaactttacctttttaaaaagcacttatctttttaagacacaaaagtgtgctcacttccaggatccaaggggttttgtgggagggagaacgctttccaacctcctcccaatcgggctcccggagtgctggaacgcccctgtgtgacgtccgcccgcgccgggggaactccgcagagacaggtgcagcccgcgaggcccgagcgaccctactgtgggtgcggtgtccccctaggccgaacagcctgtgggctagctggcgcctcctgccgcagaaacggccagcacgggcctcgccgtgccggctactcaagcgcgccatccagagagctccggactcccagctcggcgcaggggcgggacttccgctcaagtcagact

SEQ ID NO: 9155 - DNA, 551 bp, Homo sapiens
  source 1..551: mol_type = other DNA
ggaggcctcctcccaaggttctggtacaaaatttggaaaatggaccctcgtttaaaaaagggaaaaaataaaagaaattgcagtttatatttttgttatcccatgaaaaatcagtgttttcctcttcatgccaaagagattaatatttacggtgaagacttttccaggaagtcgtggttttctgtaaaaaaaggttttacacatcagaaatcggacttctggggcaatttcctgaattcctggaataaagggaggccccagcgcagagcgcagcagcccccgcgagcgcaggtcctccccgcggtggcttcgcccagggcgcttgggtctcggggaccccgcccccgccccgcccggtgttactcaggcctcggtggcgcagggcggagtcgcgggcggcgggcgcaggtggggaggggcggccggagcgcgtcggtgacacccgcgggggggcggggaaggcgcggcggccgcaccccaccctgggaagaaaccggccaggtgtggcctaggcgcccagtgccagcggggaggagactcgctccgccgcc

SEQ ID NO: 9156 - DNA, 514 bp, Homo sapiens
  source 1..514: mol_type = other DNA
aaagatctttaaatggcttttactaaagcgtcatttaacaatttttcatattatagaaacagctttgtatccaaacccggttcggttcctggagccaacggcgtagttaacagcctcttgcagttaattaggagcaagtcgctggaatgggaggcctcctcccaaggttctggtacaaaatttggaaaatggaccctcgtttaaaaaagggaaaaaataaaagaaattgcagtttatatttttgttatcccatgaaaaatcagtgttttcctcttcatgccaaagagattaatatttacggtgaagacttttccaggaagtcgtggttttctgtaaaaaaaggttttacacatcagaaatcggacttctggggcaatttcctgaattcctggaataaagggaggccccagcgcagagcgcagcagcccccgcgagcgcaggtcctccccgcggtggcttcgcccagggcgcttgggtctcggggaccccgcccccgccccgcccggtgttactc

SEQ ID NO: 9157 - DNA, 376 bp, Homo sapiens
  source 1..376: mol_type = other DNA
cttaccaattcctaagaggaaaatgtactagtgatcaaatttagcattactaatataactgagttatgctggcaacatctcttaggtagtattgcaaaagttcatcacaacatgtaatgatttaataatttaaaaacaataactaattatagcttatgagttgaaaaaataaaactgctataaatatgaactgtataataaatgattttatggacttactaatttacacaggaaaatgttcttattcttagaacatgcatgctaacatatttgaaaatctgcaacttactttcaaagaattcagcaaaaatcatgaaagctcattgtactatttttaaaactcgtggcgactgtggccccgcccacagctcccaga

SEQ ID NO: 9158 - DNA, 369 bp, Homo sapiens
  source 1..369: mol_type = other DNA
atgactgtatagtaaacttggagtaactttttgtcttcacaaataaaacaatccatttggaaaagcagagtgttaggacaacagtagattgtttatctaaacatgataaaggcgtcacttttcttgtttgttaatagcaatgcctttcaaatcatttgcaacatttaaaaggaggatcccctttggctgaaggggagccatccatacgggccttgatggttttgaaattgtgagaccataagcaatcaaatctaaaatgtctttggcattcaaatctcaacttgttttgagtgggagaatttggtattttacaaatttctaggcaattgttgactgtcgctcctacttgggaggaactctctaaaaagg

SEQ ID NO: 9159 - DNA, 652 bp, Homo sapiens
  source 1..652: mol_type = other DNA
aacctacgcgcggcggaggcgacgcctctcgggagaggctatttaaatagcccgcgagcttcgcgtccccattggctgccagcctgtcggttaccgcggggcggggagtcccggggctggagtgaggtacctgagccgggcgcgcagcagaaagcccacgttggccgctgcggggagcgcggcgtggagaggcgggagaccgaattccggcgccgccgccgcggccgctgctcggtgcgggtttgctgggcagccgggcgaccgccgaacggaaactcgccgcctccgcttgaggaggcgtgcggcgcgcggtgcccgagagctcaggggcgcggagttcgtgagcgagaaacctcgcggagggcggggcgtgcgccacggtgatgccgggcatctcccgcagctcgtgagcggccccgctccccgctgccccgggtcccactcagtcgccagggagagcgcggggcagcgcacgtgtgcggccagcgaggcccagagtgaccgcgccgcgactcgcaggagccagggcgcaggctgcagtgcagcccggactcagacgcacctggcctggaccgcgcgcctctagagacctgcgcgaggctgtgaggcccttcgccacctctctagcctgggcaactgggggcgccccgga

SEQ ID NO: 9160 - DNA, 427 bp, Homo sapiens
  source 1..427: mol_type = other DNA
ggataaccaactctcccaggcaggagtgcagtggcatgttctcagctcactgcatgctcaggtaaataaaattttttttttgtagcgatcaagcagtctcagcctcccaaaatgctagggctcaagcagtcctcttgcctcagcccccaaaatgctagggttacaggcacgagcaggtgtctgccccttcagaatacttgtattctttgtgaagtatccaagtactttcaaagaagagctcagacctcttgggcttgacgagatcagttcctgacctggcctcactcagcacagcagcatcgtacaagggttccaggttgttgggtgagggaggcatctgcaggcggttccccacagacacagtcacctcctggatggtttccctgtgtctccgcaagggctgtatgagctctcagcaagcaacttt

SEQ ID NO: 9161 - DNA, 238 bp, Homo sapiens
  source 1..238: mol_type = other DNA
gttaagatactattttaaatgatgggtgattttaaaatatttatacataactgaattcatacaatgaatactaagaatagacatttgaagtataggtggccacaaactttttttttccccttctcattggagaaaattagatttactgtctgctttgctaagtttaatactcctggagtactggtccaggagggccggacactgccagcggctgcagcggactgcacggcccactccg

SEQ ID NO: 9162 - DNA, 543 bp, Homo sapiens
  source 1..543: mol_type = other DNA
gggcgcgtcccctgttgccaagccaggagttaactacctggggcttcctggattgaggataatcaaagagcaggcaggatcccggagagcaacccggtgattctaatttagcttcagatccccgggggctgagttcagccatagcacgtgctgtcattcattttagtaaccggcataaatgagggcacagtaggaccccagtcagtcctgctaggtgccttcttgtctagaagaggccgctgagattagccgaggctgacctgccttcaccgccgctctgagcagagcgggcccctggggaaaggggtgcgaggcgcaggagcctcgcgggattggggcgagccgtcccatggcgggaaggcaggaggccggactcggaaggctctcccagactcggtccctcgctccagcccttccctgccggtgcgcggagccggggctcgggcgggtagcggtcgcgcgccggcgcgggcgggcggggagaggaaggggcgcggcctctccggggcggggcgcggggcgggcgctgcgaggggaccggag

SEQ ID NO: 9163 - DNA, 526 bp, Homo sapiens
  source 1..526: mol_type = other DNA
gactggacttgaactcctgacctcaggtgatctgcccagagatttctcggtctcttctagtgactaataatttatgattctttctaatgcacttaaaaatattttatgtaagacattttgatttcttacagcaatgattcttttagcatatatttttttaaaattggttttaaaatatctgcagtgatagaaatatgaaaaaatacttggattgtgtttgattttatcatgtgaagatactagacgctttaaaaaaaatttttttttttttgagacggagtctcactctgtcacccaggctagagtgcagtggtgccatctcagctcactgcgtagctggaacttggacttttaaaatttaagaaatgagaatatccatgtttaattttaatgagagaagccttagatgtttctaatgtgtcattattataacacaacttaccagctgattgttacggtaaccaagtatcaagagataacgttatgaaataattgtctggaaaatagtgaccacttagtagctagt

SEQ ID NO: 9164 - DNA, 362 bp, Homo sapiens
  source 1..362: mol_type = other DNA
ctcatggttggccggcccttctggtgtggccagcctccagtcaaattctttattatacaacgtgagtttgagagactacattcacataacttttattaaattgttctaattgtttactgtgcctaatttataaactttatcatatgtatatacaggaaaaaacatagtatatacatggttcagtactatatgcagtttggaatgtattctcagcagataagccagggctctgagtttagctccaaagccctgatccagcatggcggcaacacggcaggcgcctttccggaaccgcccgctgggtagattaaatttaaaacccgggcgcgccttgtaagagggcggccgggtttgcgcaggcg

SEQ ID NO: 9165 - DNA, 480 bp, Homo sapiens
  source 1..480: mol_type = other DNA
gtaacacagtaacaatctctcagactaatacacactttgtttattcattcttcaaagtggaaaatattttgtattttcacaaatcttttggaaatattcaacatatactactaatttttcttcctttctttcttttttgaagatacaagaatgtagcaagtttatgcaccttgtttatttatataccaaaacttcataaattatgtaaccgcaaaaaaagatcattaatgccattaatggcttatttccttctttaaatgtataattctactgctagtgttgagctgtagatcaacagtagaaaaaccagctcctaatggactgtgaactttttgctattcaatttgattgttcaaatttacagattcctgaaccaaactaaggcaaatttcagttccaatagattgcctgcagccaccgaagcccggccttggggcctcaacagttcgagtggaaatttgctgaagtttgcaggagtgg

SEQ ID NO: 9166 - DNA, 541 bp, Homo sapiens
  source 1..541: mol_type = other DNA
ctttctgaagagtgcctgtaaaattttaaaagttgtccataactgatggaatactttctggtattcaaggcatgctttcaaataatattttccttaattatttgaaaaaacgcggggaaaaccttttacaaaagttttgatggctggtcctcaagctttgagatttaccttccaagctatcgaaacaatgctggcaacatttttatgaggttgcaaggaccacggttgctgcagctacaggatgagttataacgtcagaagcaacctaaaaacaggttctgtgactttgcaaggattttaaaatctggctccaacatgggcaccacgggctcgagggtagccggcagctgaaacccgaggggcttcagaggctctcagcagatcggcgctcaccgacctactccatttcagtggccctcgcaccgcccggcccacctaggcagtgccggcctagcgtctctgcatgcgcgggaggtaacggcccgcccgccaccggccacacaggcctgtcgggaggcggggccacgcgtctgcgcacgcg

SEQ ID NO: 9167 - DNA, 488 bp, Homo sapiens
  source 1..488: mol_type = other DNA
ccgcttgttctgacaacctggcgggtagactggcaaaggcagcacgccgggagagcaggcgggagtggcccagccagtcggacgggttgccgggagccgcgagccggtgccagcggcgcccgggctgggccgcctagcgtctgtgcgcgccccggcccgcatcccggctcccgatccggaatccccggccccagagagccgagggcagagcgacggtggccggggagcgcacggtgcccctgtcccagtgcagcgagcgggccggtcccgggcagggcgccgggtcatggaggagccgcgcagcagcgggcagccgagtcccgagtcccagactcggctgcgaagcggcggagcccgcggccagacagggccgggaagcgcctgccgcgccgagagccccacgagcgcccggacgcggtcccaagcagctcctacccgctccttttatcgccagacgccgcgccgcggccccccgcgcgctcgcccgc

SEQ ID NO: 9168 - DNA, 475 bp, Homo sapiens
  source 1..475: mol_type = other DNA
cttgcacccctagagggatgtttccacaactttggccgcttgttctgacaacctggcgggtagactggcaaaggcagcacgccgggagagcaggcgggagtggcccagccagtcggacgggttgccgggagccgcgagccggtgccagcggcgcccgggctgggccgcctagcgtctgtgcgcgccccggcccgcatcccggctcccgatccggaatccccggccccagagagccgagggcagagcgacggtggccggggagcgcacggtgcccctgtcccagtgcagcgagcgggccggtcccgggcagggcgccgggtcatggaggagccgcgcagcagcgggcagccgagtcccgagtcccagactcggctgcgaagcggcggagcccgcggccagacagggccgggaagcgcctgccgcgccgagagccccacgagcgcccggacgcggtcccaagcagctcctacccgct

SEQ ID NO: 9169 - DNA, 209 bp, Homo sapiens
  source 1..209: mol_type = other DNA
gtccacgaaaaattgtttaacccctggagctgtcaagtaacctcttcagggtacaactttacacgctgcagttagccgcttggcaaggcgctgcggcccgagggggtggctgcctcgagcggaggcgatcgctgggccccaggcgtggcgcttggaccttggcagtgccgggctttgagggagatctccgagcgcacacgggagctctt

SEQ ID NO: 9170 - DNA, 268 bp, Homo sapiens
  source 1..268: mol_type = other DNA
tgaaggaactctccctgctttaattaaaaaggggtatctagacttgcaggcacacacacgtctgtttttaggctcaacttcagaattcgtgtccacgtaaaaattgtttaacccctggagctgtcaagtaacctcttcagggtacaactttacacgctgcagttagccgcttggcaaggcgctgcggcccgagggggtggctgcctcgagcggaggcgatcgctgggccccaggcgtggcgcttggaccttggcagtgccgggctttg

SEQ ID NO: 9171 - DNA, 292 bp, Homo sapiens
  source 1..292: mol_type = other DNA
caacatggaattcagcctctaggaaattaggatacttagattcaaaatttagggcaagttacttgacttcacctgcctccattttctcaattgtaagtggaaccgaccgctgcgctgtgggaatctggggttggcccaggctgaagccagcagagccgcgggcgggagccggggctgcgcgcggcgctcgtggccggcgcgcggtctcggcagtcgccgaacttcactgtcaactgacgcctgccttaaaatggaccaatcagcactctgtaaaatggaccaataatgagca

SEQ ID NO: 9172 - DNA, 411 bp, Homo sapiens
  source 1..411: mol_type = other DNA
ctgcagctagcttgtttcctgggacaggaatcagttcattcctgaaagggtatgtaaagagcccgtttgcctggcctaggaaaagacttgctcaagtgccttctgaaaatgcccagggcattttctacaaatctgttagaggttacccttcccctcttgaaaaagagcctctaagggggcaaaatggagggtagtcttaggaaaacacccaaataattatcctgaggtctatcttggagtgtcctcatgaaaattcctggagtggaaagtgatcaactcaaagccctccaggactctagaggcaggggatgagctggtgtcaggtagcacctggtatccagcagcttaaaaaatccagactctaggcaggccttgggggtgggactgaaagcaaacagaccttcccgctag

SEQ ID NO: 9173 - DNA, 303 bp, Homo sapiens
  source 1..303: mol_type = other DNA
tttcaataaataaataaaataaaataaaaagttgcttgtcttcgctgacgttttagaacgtgtgtatgcatgcgtaattgatggtaaaattattctcattttttacagattaaaaaaaaagcctcctttaaagcatttgtaaatcaagagcctctctcctaaaattcaagaaaataaacttgaaattcactcgttttgttgttttaaaaaaagaagttagcctttacttgctaattaatgggcattttaaaggactttaaaagacagggttaagcaatttttttaaagcactacatatttatt

SEQ ID NO: 9174 - DNA, 301 bp, Homo sapiens
  source 1..301: mol_type = other DNA
tcgctgacgttttagaacgtgtgtatgcatgcgtaattgatggtaaaattattctcattttttacagattaaaaaaaaagcctcctttaaagcatttgtaaatcaagagcctctctcctaaaattcaagaaaataaacttgaaattcactcgttttgttgttttaaaaaaagaagttagcctttacttgctaattaatgggcattttaaaggactttaaaagacagggttaagcaatttttttaaagcactacatatttattgatagaatatctctatgctttaaactgaagctcgtagct

SEQ ID NO: 9175 - DNA, 352 bp, Homo sapiens
  source 1..352: mol_type = other DNA
ttcctgcccattgtgaaggcaaggaatccgcgttgtcctatcaattccattcatggaagaaaatgtgcattaaaggacattttttgcaagccattttaagaggataccaaataaaatgcattaatctacatttcattaaaaattagttggtgggaaagtggaaagttgaagatgagaactttccaagtaaaaagcttaactgggcaggcatatgacactagctcagaccccctgggacaggctcttgttttgaaaaacagcacttgtgtcacgtttcctgaaacagcacgaaaacagaagctattttgtggatccttgcccagccgcctgctaggggactagcaggaagcgg

SEQ ID NO: 9176 - DNA, 391 bp, Homo sapiens
  source 1..391: mol_type = other DNA
agcagaacaaaatggagtttcttatgtcttctgttttctacatagacacagtaacatatgatatcaacactgactctttcatgtaaaacacatcattagaatctaaattaatctaccttgttatattttgtcatgttacaaatgtattttttaaagtaagtgtttgaagagacagggtctcactgtcgcccaggctggagtgcagtgctgccatcatagctcactgcagccttggcacacattatctgtgtctgtatgtgcccagaggtacagataatccttaaatgctgtggctcctaaggacctctgattctaccatcattgcattccagaacgtaatttgcatttcatatgtaaatgatgggctgggcttagctgagcctttgcaaac

SEQ ID NO: 9177 - DNA, 304 bp, Homo sapiens
  source 1..304: mol_type = other DNA
agaatctctaaaccttattaaataaaactttttttttctttgaaagggggcggctcgtcccccagactggaatgcagtggagcgatctcggctcactctcagccttccgagttgctgaggccacaggcgggcgtcacatttttgtagagacggcatcaaaatatgttgctcccagctactcggaggttgcggtgagccgaaatcgcgccaccgccgcaaccttggccttctggcccgggcagacgggaacgcggacacatctagcactccgagtccgtcaaggcagcgcgagcgctgcgccgct

SEQ ID NO: 9178 - DNA, 232 bp, Homo sapiens
  source 1..232: mol_type = other DNA
tcccagctactcggaggttgcggtgagccgaaatcgcgccaccgccgcaaccttggccttctggcccgggcagacgggaacgcggacacatctagcactccgagtccgtcaaggcagcgcgagcgctgcgccgcttcccttcagacgggcgtagctggcactaaagtgccacgttacaggcgacttaaaggcagccctggagcctgacgtataattcgcacctccaggctga

SEQ ID NO: 9179 - DNA, 298 bp, Homo sapiens
  source 1..298: mol_type = other DNA
ccaggggtggtggtacaggcctataatcccagctactcaggcagctgaggcaggagaattccaaatcaggtttaactccaggcaggcccttcctggtgtagacaagatcgggcttgagtgaccgcagcggtggcctcacctctggcgtggccgagctcacgtggtcttttggccactcaggattggacccctgcaggcgctgcggacaggggaagcaagattccccgccgcgttccctggactcaggagctcgccgcgatgcccccacccgctgaatgcagggcgcatgctgctggcg

SEQ ID NO: 9180 - DNA, 383 bp, Homo sapiens
  source 1..383: mol_type = other DNA
ttatcagctctggctggttagaagcagctatgataaacacgggcttcaatttagctactgtggacattcggaatccacagagctgcgtggaaatcagatttaactgatgcttctcaagtagcgcagttttcttgcaggtggaaggcaggcccttcctggtgtaaacaaacaagatcgggccagagtggcagcggtggcctccacctctggcctggcccaggactggagctggtcggccctgcaggtgctgggcctggggaccggttccccgccaacggcgctagccgcgatgccccgcctcactccccgcccccgggatgcagggcgcgtgctggtaatccgcggctcaagccccgcgcctttctccccgccctgccgcggcc

SEQ ID NO: 9181 - DNA, 264 bp, Homo sapiens
  source 1..264: mol_type = other DNA
aaaagacattatttcattccctatggtgtatatataccacattttctttatccactcattagtcaaagcctacttcactgagggcacaggcatctaaattctagactagtagaaatattttaattaatcaagactttgtagaaacagtcccccggctccatgaagccccgccccggggaaggcggggcctgcgggaattggcggggatttcccgcgaggccacgccctctctgggccggccgtaggcccgcctgctgcccccgc

SEQ ID NO: 9182 - DNA, 370 bp, Homo sapiens
  source 1..370: mol_type = other DNA
aaacatattatgacttgaaatactcacaggtctagttataatacaagttgatttttacagaaaactctagtccaatttaattttgccaccgtaacaaaaacaaaactatttgctttgattaaaaaaaaaaattcccaaccaccaaacacactttgtgtgtgtgtgaaatcagattaataagagtctcactctgtcccccaggctggagtgcagtggcgagatctccgctcactgcaccagactggtcttgaactcctgacctccaggcgtgagccaccgcgcctggccgcccctctggctttagcgaacgcctatctgtttggaatttcgcaaataaggaacgtttaaatttgagtgctggctttcttaa

SEQ ID NO: 9183 - DNA, 406 bp, Homo sapiens
  source 1..406: mol_type = other DNA
aaaactctagtccaatttaattttgccaccgtaacaaaaacaaaactatttgctttgattaaaaaaaaaaattcccaaccaccaaacacactttgtgtgtgtgtgaaatcagattaataagagtctcactctgtcccccaggctggagtgcagtggcgagatctccgctcactgcaccagactggtcttgaactcctgacctccaggcgtgagccaccgcgcctggccgcccctctggctttagcgaacgcctatctgtttggaatttcgcaaataaggaacgtttaaatttgagtgctggctttcttaatcagggggcggattcgtcaattacagttgcggaagaagactcgactcgaagagcggtccgccaccagggctctttcggcagcgcccccagcgggcg

SEQ ID NO: 9184 - DNA, 465 bp, Homo sapiens
  source 1..465: mol_type = other DNA
ttttctaagagtgaccagtctcagttaaaatcatgggaaaaagcttttgctttattgaggaaatactgtatatagtttattttaaatcattccaatcccagcagtttaatatgaaattggatatgtattcctataggaaaaaattctctaattagctggaagctttttaacgaaagaaagatacctaggcctgaggcatatttactataatcaagaatacttctgagaactttccaaattctgtctcaggtgatcacagcacttgctaaagtgttgaccttctggggtcaagtgatcctcattcccaagtactgggactagaggtgtgcatgaatttctgacaatctctgagagcttacttatgacagctctgtagtagtatggcaccatcctgagtgggaggcctcagatctttaagattattttgttgtaatgagaaaattgtcttgtgcaattttattgaat

SEQ ID NO: 9185 - DNA, 347 bp, Homo sapiens
  source 1..347: mol_type = other DNA
ctggagtgcaatggcgcgatctcggcctgcctcagcctcccgagtagctgggattacagttggtttgaatgagtattttaatatatttaaaatataacacccataaatattatttatttaaaaattgttatatgccaactcttgtttagatttttattgtatttcttaaatactcaatttaaatgattttttatctctactaaaaacataaagattaggtaggcatgatttagaatcacttgacccagagtcgagattgggccactgcactccagccaccactgcaaaaaaaaaaaaaatagaatttaaatgattctaattactccaggatgcattttgctgtggta

SEQ ID NO: 9186 - DNA, 424 bp, Homo sapiens
  source 1..424: mol_type = other DNA
tggagtgcagtggcatgatctcggctcactgcccgagtagctgggattacaggaatttactcctgaagagtgttgactgcaacagtcaattcttgctaacaaaagggaacaaaaacttggatctgtctctttgttttttaggagaactctaataatagtctttgttcttagaacatatgctaggagacctaggtcatcagtaagacgtatttatcttgcttacactacttttggagacctaagtattcctcagctgaaaatctaatggctgcagggagcaaaggttccttctggaaacatgatcctggagccggcatgaagtattgttaacatataataacaaatccttgttagaagcaaacactggcctctgtatgctaaggtagtattaactaagacatcttgatttttttttaataaaagt

SEQ ID NO: 9187 - DNA, 506 bp, Homo sapiens
  source 1..506: mol_type = other DNA
ttcccatgcttgagggagaaatggaagaccaccgttctgttcacagtgaagagggtgcgctcaccgttggtcgtgtccgctggaagccccgcgtcaggccgggagcgggacagagactcttgctcagggccgttatactgcttctccccgcagcagcggctgccgatctgggcagcgggtctccgtggacgttgagccgccgcgcgaaaccggcgccggctggacctgcaaatcgccgcccggccggcaggggacgccgcggacgcgagggcgaggtcggtcgcccaggagggggcgcgcgaggccgcaggggcggggggcgccgcctcacttgccctgcgcccctcccccgcgcgccctcctggcgcggcggccggcgaggcccctgtgggagagggggcggggacgaaacggccccgaggctcggagcgccgcgcggcggcggcgcgagcccgagggggcggggaggcgcgggcgggtgtgcgcgcgccgggcgtgtaaccggc

SEQ ID NO: 9188 - DNA, 340 bp, Homo sapiens
  source 1..340: mol_type = other DNA
cttcagctacagaaattctatattaggaagaaaaactctctattaggaaactatatattatgattgtaggttagccggtacctacagttactcactgtgtgccgtgcacaatgtttaccacatgagcctcacatgtggtaaactggagtgcagtggcgtgatctcggctcactgcagcccccgagtggctgggatcacaggcgcattcccatgcttgagggagaaatggaagaccaccgttctgttcacagtgaagagggtgcgctcaccgttggtcgtgtccgctggaagccccgcgtcaggccgggagcgggacagagactcttgctcagggccgtta

SEQ ID NO: 9189 - DNA, 299 bp, Homo sapiens
  source 1..299: mol_type = other DNA
tacatttattaaatcaagggtccttctaaaagaggggtgcagctgtccttaagtcacccgcgggccatttctgaaatgctttacttacgaaaagatagaacataacattttcgtgggctaggtgcacgagcaaccagttgcgattacggctagaaacaaaacgactttgtatacgcaggacgggcagccagatccgcggctcggtcgtccgactgaggcgggagttgtagtccctgcgagacaacgccgtccccatctcccagccgaccccgcgccgcggaggaggcgagcttggcccc

SEQ ID NO: 9190 - DNA, 587 bp, Homo sapiens
  source 1..587: mol_type = other DNA
gtgcagctgtccttaagtcacccgcgggccatttctgaaatgctttacttacgaaaagatagaacataacattttcgtgggctaggtgcacgagcaaccagttgcgattacggctagaaacaaaacgactttgtatacgcaggacgggcagccagatccgcggctcggtcgtccgactgaggcgggagttgtagtccctgcgagacaacgccgtccccatctcccagccgaccccgcgccgcggaggaggcgagcttggccccagcggtagggggcctggggcggagaagccgctacagccgcggccgggcgacgctgacatctggcatccctggggtctcagagacacgggtggacagcgacgagggccttgtggccgccgtgtgcggcgtccgccatggaagcgcatccgaccgctggggtctctgggtgccgcggcctcggctctccggggcgatgagggactagaggcgccctgaggcccgcctgcctcccgcgctctggccaccccggcgggaaaaggatcgggcgggcgggcggtcccacagtgcccgcctttgcgccgccccaccccctgggggcgctgc

SEQ ID NO: 9191 - DNA, 327 bp, Homo sapiens
  source 1..327: mol_type = other DNA
aaaagaatgtattactgatatacaatagatttcaaaagcattatgctagcagaaagaagtcaaacacaaaaagcatgttgtgtgatttgatttacattagaaaggtaaatttatggtaatcccaggtgcacacctgttaattccagctattcaggagtctgaggcacaagaatcacttgttgcagtgagccaagattgcatcactgcactccagcctgggagacagacccagctcaggaatgtcaggcgaccatcaggtgatgatcaggcggttgttacactgtaataatgggagctggtgatcagcaacttcccaatgcacatgtg

SEQ ID NO: 9192 - DNA, 386 bp, Homo sapiens
  source 1..386: mol_type = other DNA
gtccatcaatgagtaaatggataaacaaattgtggtatatctatacaatggaatactctttcagcaatacaaaagaatgtattactgatatacaatagatttcaaaagcattatgctagcagaaagaagtcaaacacaaaaagcatgttgtgtgatttgatttacattagaaaggtaaatttatggtaatcccaggtgcacacctgttaattccagctattcaggagtctgaggcacaagaatcacttgttgcagtgagccaagattgcatcactgcactccagcctgggagacagacccagctcaggaatgtcaggcgaccatcaggtgatgatcaggcggttgttacactgtaataatgggagctggtgatcagcaacttccca

SEQ ID NO: 9193 - DNA, 294 bp, Homo sapiens
  source 1..294: mol_type = other DNA
gagagactggtctttttaaccaggctcatcaaatcggtgatgatgaatttggagaattgtcttccagcatcgcaaagtactttgaacgttgacggagacagaaaaccttttgtgatgaattcagtttctttaaaatttgggttaatcttaaaaagaatgtatctctttctgttttattttccaccgtctgataaagcaaaaagaagcgatcacattacaagttctttgtgcattaccttgtcccactagccaatggcggggcggcatgcaaatgaggtccgcgatcagcctgcc

SEQ ID NO: 9194 - DNA, 201 bp, Homo sapiens
  source 1..201: mol_type = other DNA
atttgtgccaggcattcttggagtgctttacatgtactaattcacttaattctcacaacaatcctgtgacctgtgaagacaaagggtttgggctttcgaattccctctagcatgacacttgtcataggaaagaatgtttcatgtcaattaacacttagaagaatacattttgacaaatttccttgcaatacgaatctcaca

SEQ ID NO: 9195 - DNA, 255 bp, Homo sapiens
  source 1..255: mol_type = other DNA
tgatgaggttgccaccccaatgaggtaaactatttgactaaagttatgaatttcttctaagatttaggataaggagaccctaaaagattaatttttggctgccatttggtcaaagtattagtaaagtgattaaccaaaacttgaaaggccactgggtacatttccaaatttccaatttcaaaattcaaagaacctgctggcctgacagagacagtccctcccgaaagagcttcaggaaatcttttctagagaaat

SEQ ID NO: 9196 - DNA, 452 bp, Homo sapiens
  source 1..452: mol_type = other DNA
caattacagacttacataactgtgtcaggagcatttctctgagggatttgctcacccctcggagtcagttgcccagggaatgatggcagagcggggactcctctcccagcaggcacagaaatgcctatgcatggagtgtctaggacagccctgggttactcttggttctctagggtatagttacaaaagtgaaactcggatcaaaggttgttgcagactttctagaatctcagagaccttttctcaagagataaggttgcaacttccttgttatatgcaaatgaaaagaaaagagactacagccatggaagtatttcgctagattttcccagtgccctagtgaaacagtacaatgttgttgtattttatgcaaatctacagattatctatcattatctaaataaccagcagtatgttggaactctcagtcccagagctgttggacttaggct

SEQ ID NO: 9197 - DNA, 429 bp, Homo sapiens
  source 1..429: mol_type = other DNA
ctatgtcatatagcaacaatacattgtgtgaagactctatgtggtatggggatttagtaacacatgccttatgtgtatttgcaatgtaagggttattatttctattgtatagatgaggaaacttcaggacccaaactcaggtctgtctgacttgaaagccagaactgggtccttagggcctccatgagtccatttggggcctttctggccatagagaggaggaccaacagagggtttgggtctctggggctgctttaaaacatgtttgaaatccactgcgaaatcatgttacttcatggaagaaaatcgcctcttgtaaaatagaggtttcattaaaggatggctttttctaagccttatagatagaaaatttgtacacacttgcacacacatgtgagctccaggggaagttgcctctgaagcaattgc

SEQ ID NO: 9198 - DNA, 146 bp, Homo sapiens
  source 1..146: mol_type = other DNA
aactttaattccgtccttctttattagtaatctgttaaaaaaaaaaaaattctttgttgtagtgttttgttagttgtgtctcagaagggaaataatatttaccttccaaactaccaccatcttacaagtttgtgctacgggcctcc

SEQ ID NO: 9199 - DNA, 174 bp, Homo sapiens
  source 1..174: mol_type = other DNA
aactttaattccgtccttctttattagtaatctgttaaaaaaaaaaaaattctttgttgtagtgttttgttagttgtgtctcagaagggaaataatatttaccttccaaactaccaccatcttacaagtttgtgctacgggcctccctgtctatcttctcggcggcgcagagcc

SEQ ID NO: 9200 - DNA, 220 bp, Homo sapiens
  source 1..220: mol_type = other DNA
agtaaaacatgtggcaccgaccaatcttaagatttaagttctgtgtgaaaaacacctttgcttttgtctgacccccagtagtggggcagtgaattcccttgtttgactgagactagaatcgtcatacttttcataccaatggtatctggcagcttgcaaaggggaagccgaattgtcagacggcgggcgtctgcctgtttacccccactctaataggggt

SEQ ID NO: 9201 - DNA, 794 bp, Homo sapiens
  source 1..794: mol_type = other DNA
gggagaccccatgacgtcagcggccggcccacatccgcgaccccgccaggccttcccggggccgcgtgactggccgggcccgcccctccgcccccgccgtgtgctggttccccaggcgtcgcgacccagggctcccgccccccgcgtcccgcgtccccctcccgtccctgcggcggctcggccgggcggggcggggaggggcgaagcggcgggtaggtggcggggccggcgcggtctggggcccgccccgccggggagacccggggcactggctccgggttcgtgccgggccgggcgcccatccagtccctacacccggtcagagctggcggccgcgccggcccagctgggccccggcgcctgggcgtcccgcgcccctcgccccggcctcaaccccagcccccgcggggacgccccctcccccgcccacgcgtcgccgcccgcggcctcccccccgcccccggggatcccctgccgccccgcccacccgcgggaaagcctccgacgccctgcctcccccgcgccgcccggcccgcgttcctcccgccggcccctgccctactctgccccgggggagaggtaaagcccgcgcccgtccttcccgccccgggccccgcggccccagggtctgtccgcccgccccgccgcggcgcgcgccccccagcccggctgcccggctccctggcggccgcgatcatgccgtggctccgggcgccggcgagcttcgccgcctcctccgcccggcggctgcggcccccgcccgcgcgccccgcgctcccccccccgccccccgg

SEQ ID NO: 9202 - DNA, 378 bp, Homo sapiens
  source 1..378: mol_type = other DNA
cacaaaacaaacagcagaggattttcaggtttgttgaaaacccacagtagggcttgcatttggtatcactatgccctgcatgaagatctcaaagtactgtgcctaaaagtcattactgaggtttggtaggaagaatattaaaccagaataacttgagatactagccaaagtttatttttcattcagacagagagaaatgcagacatcaaacgtgccctctgtatttcgctccagaaaacagctcacaattatgactacctgccttgttttgcagctcagcataaaagtggtgttgcaccactccacataattttaaatgcaaattaaattagtaaaacaaaacctttcaattttcttaaattagcagtctaatgtgtt

SEQ ID NO: 9203 - DNA, 423 bp, Homo sapiens
  source 1..423: mol_type = other DNA
tctagccattatacacacatttgtgaactttcaaaggacccatttgctgctcagccagcccgaggactgtaagtgttagtagctactttaaagagtaactctgttctgttagacctactaataacaaattaggagcttgcatttagcacatctttttttaaaaaaaaaacacgttcatttttctcctatgttatagtgttttacctgagaggctgaatatactaagacaaatctaagcctgcctgctctaacccacatacctggggtggggagtacggccctagggctcgggtcttccctaggcaagaacctcgagggccggacacgggagtgcaacccaggcacgcgcctaggcgagcctagcgtgagggtggagcttcctgcccgcgccctctgcgcatgcgcccgcccggcgcccgcccg

SEQ ID NO: 9204 - DNA, 423 bp, Homo sapiens
  source 1..423: mol_type = other DNA
ggaaggacgcgagccccgcgtggcggacactgccgcagtcagaggcgccccgagcttgctccgcctgcagctcggtgcgctctgggcacccgggcgccttgcccggtgcacggcggctggcgcaccgcggctagaaccaggcggctctgagcagccatgcttcccggggtgggcgtgttcggcaccagcctcacggcccgtgtcatcatcccgctgctgaaagacgagggcttcgcggtgaaggcgtgtccccttctacacagccgcattgatgaggtgctgctgcatcaggacgtgtacgctgccccggggatctgagatcccagatccgactcagagctagaggaaagttactcctcttgtgcgcgcgcgcgcctgggagaggcgagtgcgcgcccagaaacgcctgaataaaaggccgca

SEQ ID NO: 9205 - DNA, 430 bp, Homo sapiens
  source 1..430: mol_type = other DNA
ctcacctgtcagcattcagaagtgagagctcatggaaatgatgattgtgaggctctctcagagtagtctgccatctcttgacttgcaaagttactacgctggctaggctttttgacaaaaattgtctatcttcattttttctatttcaaaaggaaaagttccttgaaaaggcagtttgaagaggctgtcccatcagacttcagattatctgtataatggggataataaaagtacccaacctaaacagggctttgtttaaaatgaggactcaataaatatgagaatcttgcttaatcagaacttattatggtgaccttgaacaaagatttattgagtgccagctacataccagatgctctattagccacatgtggctgcttaaatttacataaaactaaataaaatgaaaaatgcagttttgatgtggttt

SEQ ID NO: 9206 - DNA, 367 bp, Homo sapiens
  source 1..367: mol_type = other DNA
cacccataaagtggggataacagtacctatttcatcaggttgggacgatttaaaatggttaataatgtgcagttcttaaaagtcaccatgggctgaatttccagccaaactgtttaggtaggcaaaaaatgttaatgtaacatttttggcccccaacgcaagcaattccattctgccaagtgggacatgcggagccacgtgagtcactgggtcccagagccacggaaggctctcagctcagcagtcagagtgttaggtggcctagcctgggaaccaactcaatcgttttagggaaaatgaccctaaccatttgctgacggcgcccgggtctccggcaggggccgctgcagccgagcagaacgctgag

SEQ ID NO: 9207 - DNA, 471 bp, Homo sapiens
  source 1..471: mol_type = other DNA
agccgaagcaagaggcgggcgtggcatgtggccagggcgacgtatccgtctcgaaactagacacgagacgcacgtgccgcagcggcctcggagaccccctgccccgctgcggccgtacacaccacagcgtctacgcgggggcgggcatgggccaaccgtgcgtgcgcggccggagcgggggcgcgcgattggagcaggctgtctgcggttccgtgcccagactctggggcctggattccaatcgcagacgctccgggagccgaggttattattatcggctgttagggcgcgtcctgcgaggcggcctgggcggggccggggaggagccgggctgggctcccggggcccgggcgcagcgcgcacccggagctggcggcggcgggggcgggggcggcgcgcggcggccaatggcgcgcggcgctgcagcgagggcggtgcaggaacaccggccggtccccgcgggatcccaga

SEQ ID NO: 9208 - DNA, 538 bp, Homo sapiens
  source 1..538: mol_type = other DNA
gggctgaatttccagccaaactgtttaggtaggcaaaaaatgttaatgtaacatttttggcccccaacgcaagcaattccattctgccaagtgggacatgcggagccacgtgagtcactgggtcccagagccacggaaggctctcagctcagcagtcagagtgttaggtggcctagcctgggaaccaactcaatcgttttagggaaaatgaccctaaccatttgctgacggcgcccgggtctccggcaggggccgctgcagccgagcagaacgctgagccgctccgccccacggcctcctctccagccggcgcgcccgcctcccgcaggtgcgtctctgcctgcgccgggccggggtctccgcggcctctcccgctcgggctccggcttcgaggtcccgaccaagcactgctctcgcgggactgcgcgcaccgcccagggcctgccgcgggctcgcgagcggaggtggcaccggtccgcggtgcgcatgcgcggcccggcctctgccctgcggtcccgggctggtgactggcccgggg

SEQ ID NO: 9209 - DNA, 455 bp, Homo sapiens
  source 1..455: mol_type = other DNA
aaacagtttgatttgttcaaagaatgatgaatcacttatgtttgccaagaaataaaatatacttggaaaaaaatgctcagcatttgccacgggccagctgctgttccaggtcgtgggttagggcccggcaccaggaagggcgcccctcccacagggccgacatcctaaccggcgtcgctgcggccgcggagctgggaaggccgagggcgccgggcacgtctgtgcggtctgtccttcgtcggtggcagcagggctgactggccacggcggccatctttcttccaaacggcggcgagcagcgcctcgggcccgcgattaccggttttctgagcaccggacagcgtgagccgtgccagccctgtctcgccatcccagccgaggagggcagcgcgatggctcttccaaggcggcctgcgctggccacggtcctgaggacctccgaacctgcagggggc

SEQ ID NO: 9210 - DNA, 650 bp, Homo sapiens
  source 1..650: mol_type = other DNA
aaatatttccttgttttaaaaatgggcataattttcaacacacactataatcttgtattcatacaggttaagttcactgtgagtcctcgtaaaattaattaatgaaacagtcactattctaagggtcaatgctacgcaatgcgttcctctttgggagctagcagcactgcgcggggagcctgagccgctccgcacgccccgggccgacgggtcctagagcgccccggggcctgggctcgcggcggccccagcggggctcgattactctcgcctggacgagaagcggcgcctcggctccgaggagccctacggtggggattcgccggcgaggggggcgacggcggccgccaagggagaggaggcggacacctccgaagggacctgcggcgccgggagcccagcgatcctgcccacgagcgactggcgggcccgggaggacgcctcgcggcgcacagccgggagccccgcggcccgccccctcgcaccgctcgcctcgcctagcgccgcccgcgcgcagcgtctcgcgccggcccggcccgcccgccgggaaacagccgcgagagcagcggccgcggcggccgccagcgcgccttcccctcccgcgctcccgcgtcgcccccgccctcggcgcctcgtccccgggccgcgcg

SEQ ID NO: 9211 - DNA, 697 bp, Homo sapiens
  source 1..697: mol_type = other DNA
gttaagttcactgtgagtcctcgtaaaattaattaatgaaacagtcactattctaagggtcaatgctacgcaatgcgttcctctttgggagctagcagcactgcgcggggagcctgagccgctccgcacgccccgggccgacgggtcctagagcgccccggggcctgggctcgcggcggccccagcggggctcgattactctcgcctggacgagaagcggcgcctcggctccgaggagccctacggtggggattcgccggcgaggggggcgacggcggccgccaagggagaggaggcggacacctccgaagggacctgcggcgccgggagcccagcgatcctgcccacgagcgactggcgggcccgggaggacgcctcgcggcgcacagccgggagccccgcggcccgccccctcgcaccgctcgcctcgcctagcgccgcccgcgcgcagcgtctcgcgccggcccggcccgcccgccgggaaacagccgcgagagcagcggccgcggcggccgccagcgcgccttcccctcccgcgctcccgcgtcgcccccgccctcggcgcctcgtccccgggccgcgcgcccgcgctccggccaacgttcggcctcccgggccgccgcggtctccctgggcgcgcggcccgccgcctgcttccggggcgggcggactgggcgcctggtgccggcggccgcag

SEQ ID NO: 9212 - DNA, 524 bp, Homo sapiens
  source 1..524: mol_type = other DNA
caattttataaatgtatactccttttacaaaagtgtcttaggttggtgcaaaagtaattgcggtttttgccattacttgcaatggcaaaagccgcaaccagttcttcaaattttgatagactccatcacgtatgtgtacacatatggctgtataggaaaattttatttttaataaaatctccacagaccagttatagtttcaaatatacccgacaggtctcattttgtttttggtgctctaatctggaaacaaaaactctgaaaatttagttttgaatgtattatgtgagccccagaccctgtcggtctgagacttttcacaggactctgaagggcaccggccttaaggacgcagtgcagtgtgcccgcaggctcctcccggtcgccgccgtcgcctagcgaatggggtgggggctcgcacggtccccgcatctcggagcgccacggcgggctcctgccgccccgccccaccccacccccggcgcgcgtcccgagccccgcccgcgcgcccggcaggaaagggc

SEQ ID NO: 9213 - DNA, 438 bp, Homo sapiens
  source 1..438: mol_type = other DNA
agttcgtcctttagaggaagcatgactttctctccctctctaagaatttcctcaggagaggaaaaagttagctttcttttctctgctcctgagtgccatggcctgcagtacgtgaccagtccttggcacagagtcacagccagtagctgcgcagtgtggcagcagctgagatccatactgcagcctgaaaacaagtgtatccagtgtttacatcagggaggaggcggcacggcgtcccttggcagctccgtgcatgctgcggcagttgcaacaggagaaccgagtaccagttgctcaccttgtcctctccgaatacccggactgctgaggggaagggccgggggggccccggcggttgccatggtgacgcagggtcggcggctcagcgccgtagagacaaagccgcccgcccgccagcccgctagctcctcgcgcgag

SEQ ID NO: 9214 - DNA, 445 bp, Homo sapiens
  source 1..445: mol_type = other DNA
cttggcacagagtcacagccagtagctgcgcagtgtggcagcagctgagatccatactgcagcctgaaaacaagtgtatccagtgtttacatcagggaggaggcggcacggcgtcccttggcagctccgtgcatgctgcggcagttgcaacaggagaaccgagtaccagttgctcaccttgtcctctccgaatacccggactgctgaggggaagggccgggggggccccggcggttgccatggtgacgcagggtcggcggctcagcgccgtagagacaaagccgcccgcccgccagcccgctagctcctcgcgcgagcttccctcccctcccaggcgccgccgcagccggagcggctcccgggccctgggccgccgccggccaggtaaggcgatcgcgcccgcggccggggaggggtcggcgggacgccgggcctccccaacgct

SEQ ID NO: 9215 - DNA, 347 bp, Homo sapiens
  source 1..347: mol_type = other DNA
gtctgtaatcccagctactcgggaggctgagacagctgagatcacaccttgaaggagccactcatgttcaacaaaggaacctccttggcagaggatggatacaggcttttagtttctaagagaaaaaaagaaagcaaagacaaagcacgagaaataagagttatttctatttatttggttcattcggtgaacaaacaaacctgatgggaaattttatttaaaaacacaatttacagacctggaggccagcagataagagctctccgctggggagccagctgctgcttttcactcaaaagcccttctctggaaaggagggcagaggggaacccccgccttcccctttt

SEQ ID NO: 9216 - DNA, 694 bp, Homo sapiens
  source 1..694: mol_type = other DNA
aaacaacctgtatgtctaacaaatcgattctaatttatggtgcaactgaacaatggaccaaaatgatgctgttggaagtttttaatgatgtggaaccgcttgcaaattattaagcgcactgacaaatgttataaatattttacgttatgttatgttataaacattttataatataaaaaaatgttaactgaagttacttcctggatgaattaaaaaatgttgtgtatgcgtgtaattattattttaataggagacactctcctttggtgatataatttaaacaggacggtactgactgataacctcccggggaactacagacttgtatgtttccatggaaatctaacgcgcctttgattcaaggacaggctgggcttctgaggaagttgcccaggcagcgtcacgcgcgcgagcgcggtctgcaaagcccccagcgctgggcgtcacgcggggattgctgtcgccgctgccagccgcagcagcgacgcgaactcggggcgcccggcccgggcgcgcgggggcggggacgcgcacgcggcgagggcggcgggtgcgacggggggcgaagggggcggggacgggggcgccccggcctaagcgggactaggagggcgcgccacccgcttccgctgcccgccggggaatcccccgggctggcgcgcagggaagttcccgaacgcgcgggcataaaagg

SEQ ID NO: 9217 - DNA, 577 bp, Homo sapiens
  source 1..577: mol_type = other DNA
ctcaacattttgtggtattttatcacaaaatacgtctcaggaggcagccgccggggcttcactcctgggccaccagcgacgtcctccaagcgggtcgagcggaggcgcgttcgcgacccaggggcagcgtgccgagcccgggcgtgggggggcgtggcctttccactcggcgacccccggccaccgcccaccccgcgcgtgggggcgtgcgcgactgcggggcgcggagaggggtgacctcggactaccctaggcgcctgtacacgtcctgaggtgacaccggctgcacggcacaagcagcaggcgccgccgctccgaggccttccccggggaagcctcgcgtccctcccccgcggctccgggccgcacgcgcgcgattcctcgattccacaggcggttcgcgccgcgggtgggggcggggcgcgcggggagggggctggcggccgccaggggaggggggccggggcccggggggcggaggagggccggcgtggggagttcctcgctcgcggaccacacgctccgcgggccaatcccgagccagcctctagcagtgtcgcacgcgggacacgatgta

SEQ ID NO: 9218 - DNA, 619 bp, Homo sapiens
  source 1..619: mol_type = other DNA
gctccgaggccttccccggggaagcctcgcgtccctcccccgcggctccgggccgcacgcgcgcgattcctcgattccacaggcggttcgcgccgcgggtgggggcggggcgcgcggggagggggctggcggccgccaggggaggggggccggggcccggggggcggaggagggccggcgtggggagttcctcgctcgcggaccacacgctccgcgggccaatcccgagccagcctctagcagtgtcgcacgcgggacacgatgtagtcgggggactacaacttccagaagatcaaggggaccattctaaggtgccccgggaataggcggctctccccggggccgggcgtcctggggcactcctacccagcagcccggctgcaggtagacgcgaatgcattgagctagggagcctctctcaattccacgcctgggctcggcgtgggagcgacgcccgagggcttgcctgccaggctgcgggggtgccctggactgggccaggggcggtcggcaccaggctaagcgggcgcctggcggctgagcggagttttcggctggcgcccggcggggaattatccgagtccatttaaagttgagccctcgctgtggtgctgccgcc

SEQ ID NO: 9219 - DNA, 363 bp, Homo sapiens
  source 1..363: mol_type = other DNA
catgcaatgaatgaaattttcaattttgtggatacatgttgtatacatgcttacatgagtaagcaaggtaatggatagactctatgctatccatctatggatggaagtcactggtgactcgcgaaaggcgatcacctttgtcgagacagtcgacaatatttgactgtctcattcaaggtgacttccctcaaaggaggcttcgagttaaatcatcctttcgagctactggccctctcggtcgggggaagacccgccccttttccgcagcccgagcccggcgcagtccactgcggctgcgcgagcctggcgcgcgcggggcgggaacgcggaaggggctggggttgcggcgcggcggcgaggacc

SEQ ID NO: 9220 - DNA, 276 bp, Homo sapiens
  source 1..276: mol_type = other DNA
cagattttgtttttctcaatgatgaggtcttaataaggaacaacaagcctcccaggtagctgggattacaggtgcccgtccaccgcgtccccgcctggagccccgggcgatcgctcactctgagcagcgtcgcccagcggacagaggcggctggtgtgcagcactcggcgcccgcaagctgccacctcccggggcggccagggaaactcagccggctctgggaggcgggggccgcggtcgaggggcgccgcggggcggggccgctatatcagcaga

SEQ ID NO: 9221 - DNA, 366 bp, Homo sapiens
  source 1..366: mol_type = other DNA
ggctcctcaaatctcaggatctgtttttcttaaacaaaaatctccaggctgcgccagtagtcccaccttgctgggtgagcacaccgggcttttaaacgccccgcctctaggaaataatttttaaaataagctggcggcgatagcgccactcactccagcctgagcgacagtgagactgtcagctctcagggagcgacttttcccttggataaggcagcccggtcactgccacgggctgtacacctgagggggcgaggaggaagggcttcgccgccaatctgttgcctctcaacccctgcctgaggcggaggcggtgcccggggcgggccaagcgtgaccgcgggtcggcggggcgtgtttaagacc

SEQ ID NO: 9222 - DNA, 506 bp, Homo sapiens
  source 1..506: mol_type = other DNA
gggtctcctttccaggtcgccagcgttcgccggcggggaccccttgaaactttccggagttgcacgcagaggcaatccccgcggcccccaggcctgggttccggaacgccgaagcgacgccggtagctgatgatcagagtgagccctctcagatgctgctccgagcgcctgcccctccccgctggggtgttgcatcggctcccagctgaagcctgacagcccttgggggagtcccccaggttgcctgtccaactaggtgcagggacccagggaggcgcgcgaggaccgacccgccactctttgggaaaggtgcccgcctccccgggcggcgcgcagcgaagggttaagggcgcgggccggccgccgcgcggtgcgctcgccgtgctctgtgcggctcgccgggccgcccgccagagggtgccccccacccccatgaagtcggatccttgagctgcggcggcggcagccaactgctggagcgagcgagcgagcgagcgcgagagagc

SEQ ID NO: 9223 - DNA, 479 bp, Homo sapiens
  source 1..479: mol_type = other DNA
taatatacatatttagtccttgagagaacatttaaattaattgactaactgtaatctgaattatgtgttttaatttaaggttgttaaaatcacgtaaattaactgcttgtgccaacgtaaaattacaatattagcttttttttaactgaaaattatctaaatgtaagatgtctaaaaaacatggcaaccaatattttctgttataaaaatatttgagatgaatttagtttttatgaaagctgtctgaaactgaaatgaatagcagaagctttctgtttattcacagtccagtaataataatattttctatataaagccaacaagcttctgacaaaaaactgagtttaacaataatcgatttttaaatggaaaaaaaaagagtgaacactagtagttatacttaaatagccacatatatgtgcatggtatttcaaaaatgtgagaaaaaaataaaaactttggtgactaaccgttaggtc

SEQ ID NO: 9224 - DNA, 629 bp, Homo sapiens
  source 1..629: mol_type = other DNA
ggttatgcaataagttgatttcaaaaattataccttttacatttacatccagataaatcttgtaattcaaagagaaagaaatagattaattctttgtttagggaaaaaaaaaaaaaaagaacgacgtaccaatcttcctgaataactaagttagggaggaaagactagcaattaaagctaatggctttttggggccaaagaaagttggggccctccttctcactcttcagaccccagggtgtccagcttgggtggccgagctccttgaccccccgcgcccgggaggggattggcctctcagcgaatcgccccaggcctctggggaccccagttcgccagtccaggtcgccggccctgtcggcacagtccccgcaccctgggtcccggctggtgctgcgccgggcaggcgacgccgagagccaggccgcctacaggcgtctgccggctacagagcgggagccccgagccccagcgccgcgccgcgcggggagagaagcagctgttcccaacagctggggggcggcggcgcccggcgccccaggtgctgccgcggccaatcgcaggcgtccggcccgcccccctccccagccgggcgtcgacccccggcccgcgggggaagggagcagaga

SEQ ID NO: 9225 - DNA, 505 bp, Homo sapiens
  source 1..505: mol_type = other DNA
attaaattaatgatccgaaattgggtctcctttccaggtcgccagcgttcgccggcggggaccccttgaaactttccggagttgcacgcagaggcaatccccgcggcccccaggcctgggttccggaacgccgaagcgacgccggtagctgatgatcagagtgagccctctcagatgctgctccgagcgcctgcccctccccgctggggtgttgcatcggctcccagctgaagcctgacagcccttgggggagtcccccaggttgcctgtccaactaggtgcagggacccagggaggcgcgcgaggaccgacccgccactctttgggaaaggtgcccgcctccccgggcggcgcgcagcgaagggttaagggcgcgggccggccgccgcgcggtgcgctcgccgtgctctgtgcggctcgccgggccgcccgccagagggtgccccccacccccatgaagtcggatccttgagctgcggcggcggcagccaactgctggagcgag

SEQ ID NO: 9226 - DNA, 630 bp, Homo sapiens
  source 1..630: mol_type = other DNA
ctttttggggccaaagaaagttggggccctccttctcactcttcagaccccagggtgtccagcttgggtggccgagctccttgaccccccgcgcccgggaggggattggcctctcagcgaatcgccccaggcctctggggaccccagttcgccagtccaggtcgccggccctgtcggcacagtccccgcaccctgggtcccggctggtgctgcgccgggcaggcgacgccgagagccaggccgcctacaggcgtctgccggctacagagcgggagccccgagccccagcgccgcgccgcgcggggagagaagcagctgttcccaacagctggggggcggcggcgcccggcgccccaggtgctgccgcggccaatcgcaggcgtccggcccgcccccctccccagccgggcgtcgacccccggcccgcgggggaagggagcagagaggtggagagctgtcctcggcactcgtcttccccagagccgaagctgcgcggagttcctcgcccctggccccgccgccgcgccccccgcccgcttcggcgctcggacgctcctaaggaagaaaaatctacctctaaagcaccgggtgagtggaaacctctatagaacccgattctaatccagcgga

SEQ ID NO: 9227 - DNA, 327 bp, Homo sapiens
  source 1..327: mol_type = other DNA
cgtcggggggctgccctacctgcgcaagtacttcgaggtcttcggcgagatcgaggaggcggtggtcatcaccgaccggcagacgggcaagtcccggggctcggcgtgacccgtgaggagccccgcgggtagagcggcgctgccccttcgctccgggggggtcggcgccagcctcgcggggttcggagaagacccagcgctgtgcgaggtcgggggccgggcaggagggaggggccgcaaccctgaacaattgccccgaggggacaccccacgaggtctggggctgttgcccttgtgtcatccccaggttatttctttaaagcaaac

SEQ ID NO: 9228 - DNA, 441 bp, Homo sapiens
  source 1..441: mol_type = other DNA
acctcattactgtcagcagagagttataatgtacagacaacttatgtgcaattttaacatcgacagagactttaagaaattcatctcatatttattgtttggagattttactttcagaagatatcagttcctggcattcattcaataaagagcttcaagtcacttttttagactgaaataaactttgatgaaaattgaaaatcaatgctttccttctaatgacgttaactccaattttgcaattataatcaatatataaaggggaagtggccacaaatatgctgcacatcttaagaagccaagtgggtttggttactttaatttttaaataatcaggacatttaaaaagttgctgtttataaaatactttttaaaaatgtcatcacacgcactatgagtgcactcagggtctgggattcctaaggattggcaggcaggctg

SEQ ID NO: 9229 - DNA, 444 bp, Homo sapiens
  source 1..444: mol_type = other DNA
atgtgcaattttaacatcgacagaactttaagaaattcatctcatatttattgtttggagattttactttcagaagatatcagttcctggcattcattcaataaagagcttcaagtcacttttttagactgaaataaactttgatgaaaattgaaaatcaatgctttccttctaatgacgttaactccaattttgcaattataatcaatatataaaggggaagtggccacaaatatgctgcacatcttaagaagccaagtgggtttggttactttaatttttaaataatcaggacatttaaaaagttgctgtttataaaatactttttaaaaatgtcatcacacgcactatgagtgcactcagggtctgggattcctaaggattggcaggcaggctggagctccggaagctgccggcgactctcccctggagcagcgtgactga

SEQ ID NO: 9230 - DNA, 306 bp, Homo sapiens
  source 1..306: mol_type = other DNA
ttcagcgaaacttcagaaggtgaagcggaagtatcattaatatcattaataaatattattttcaaatgtaaaagaagagagattatactgatttaaaagctagattctgtcctttccactgcggtagacagatatggaaaggccattatacatagcacctctagttatattttaatcctatattaatatatatcccagtttggcgacggtctggtcccagtcaccgaccagccaccgacccctcccttcccagctccgcctggcggcgggcgttgctcctgaggggcggggcttccgcttccggcg

SEQ ID NO: 9231 - DNA, 546 bp, Homo sapiens
  source 1..546: mol_type = other DNA
ctttatatgtttaaagaaacattaatgaagccgtatatattttctaattctaaggatcatggactttatctctgcggcgcccggccgcgttccgttgttgaactacgtttcccagcgtgccgcgcggccgagagcgtggactcgaccagcccttcctcgtcgcagcatgatgatgcaaatgcgtcgggcgccgatgagtgacgacattctggctcgcgaccgcggcagccgccttagcaggggtaataggcgcaacggcggcggaggctgcagggacgacgacgacgacggcggcggggcgggcgctgtgcgcacaggggaggggtaggcgggcgtcgccagcggcttcaactgcggcagctacggctagggccagtcggcgggccgcggggaactgttcgggggtccgcagaggcggccggaccggagcctcctcggcctctgcggccgccatgcccactgtgtggacagcgcgggcgggccggggccgggcggcgggggaggctctctaaggcctccgcctctgcctctcccgcccccttaccc

SEQ ID NO: 9232 - DNA, 501 bp, Homo sapiens
  source 1..501: mol_type = other DNA
tcagtatgtgatcaccaggacctttctaatcgtcaactcctagaatatacattttgtggattcagtctttgagtctagctcacttactcagtttcctaaatatttggagcaaatatagtatacttttattgttaaggatatatcacttacccctaatgttagctgactgcatgggttataattgtaatcattcatcgcatttttcgtctattagcaaatatacatgctctccacaacagctttataaggtggattttaaagctcccattttatggacctttatatgtttaaagaaacattaatgaagccgtatatattttctaattctaaggatcatggactttatctctgcggcgcccggccgcgttccgttgttgaactacgtttcccagcgtgccgcgcggccgagagcgtggactcgaccagcccttcctcgtcgcagcatgatgatgcaaatgcgtcgggcgccgatgagtgacgacattctggctcgcgaccgcg

SEQ ID NO: 9233 - DNA, 686 bp, Homo sapiens
  source 1..686: mol_type = other DNA
catgtttctgtgtgtcctcaacagccaataagtggatttctagatttaagcaaaatcgaaagattcctggatctaaactctggatttttgacttcatcggattcgcccagttccgaatccattgctattaaattcttatgtaagagttaatgccctcccgagacaagagaggcaccacagagatcttaaaataccgctgcaggcggcgtgccgggactcggaggggaaggcctgcgcacccagcgcggcgagccgtggtccttgctgccgtcccggggctccgggtggcagcggccccagaaggcggctcgagctcacggcggtgtccgggggggggccccgcgggcgccggtgcaggcttggcctgggaggtcccctggggaaacaatgcgtcccgccccggactccccctaagcgccgcgctgctcgccgctcctctcactgccgtcccgccgctccagggggcgccgcgcgtggccgtgtccggcctctcccgagccccggcgggtgacgggcgcggaacatggcggcgcggggccccgggcagccgcgaggggccgcggcgctgcggtctcggctggggcggcgcggctagagctgcgcctgggcccgccggcgaggcctcctccccgcccgccgccgccgccgccgccgccgcgccccgccccgcgcgcccgcccctcccc

SEQ ID NO: 9234 - DNA, 312 bp, Homo sapiens
  source 1..312: mol_type = other DNA
catggctgacttgagttcaggagttcaagaccagccaaaaaaatacaaaaattagctgtgtgtactggcatgcacctgtagtctcaggtactcgggaggctgaagtgggaggatcacttgagcctgatgcagcggtatgatctcagctcactgaaagcctgacctcaggtaggcatgaaaggattatcttttctatctcccataaattttgtaactcttttgtggagactacatattgcattgaactgtaaagcataatatttagtgttgtttatattgcttatattttttgtgccagaaaaatagagacga

SEQ ID NO: 9235 - DNA, 612 bp, Homo sapiens
  source 1..612: mol_type = other DNA
gtggggttctcccgcggctctgacagtccccaggagggagccccaaactcccggtgccagctgcagccgcctcgctttccgagaagctttcggaagcttttcgaagcccggggctcacctttgcgctgaagaggtgccgggagtctgggttagccgaccggcaacatcgcgataatccggggcaggaggtatccgtccctggggcacccgcccacctcccaccacggcgaggggcgctgcacagggggaaagggagcacgcccccggagtggggagcctcccacctctgagcgccagcgaggcggtgcgcgccgccctggactgcgggcgcctctccggagccgcgcgccgcgcgcacaggacggctgcagccgcgccgcgagccccagcctcttctcggccgccgccgccgccgccgcttccgcccctgtcacggcgtgacccggggtgggaggagccgacagggtagggtccccgccttcgcttagccgcagcgctcgctccgccctgcccatttccgccgctgcgcaaaccccggcgcttggggaagtgggtggggcgcgggcggaggcggggcgcgggcggaggcggggcgcgggcggaggcggggcg

SEQ ID NO: 9236 - DNA, 398 bp, Homo sapiens
  source 1..398: mol_type = other DNA
tttttacatatacatacacctatttggcagtacttattttttcccaaaaatcactaatacaccagttccaggttacagtgagcgccactgcacgctagcatacagagggagaccctgtctcagtgctttggaagcactttaaatccgaggatgtctacgcttgtaagaattcctgggagccctagcacgggcgcgagtgcatgcctccgccaccaatgacgtccccaggggcgggtacgccgccccgcctccgcccgcgccccgcctccgcccgcgccccgcctccgcccgcgccccacccacttccccaagcgccggggtttgcgcagcggcggaaatgggcagggcggagcgagcgctgcggctaagcgaaggcggggaccctaccctgtcggctc

SEQ ID NO: 9237 - DNA, 539 bp, Homo sapiens
  source 1..539: mol_type = other DNA
gcaaatttcactgatcacatttctattaagtccactgagtacactgctttaaataacatatttcctctattataaaacagagagtgtgtgtgagagtgggagggagcctctccccttatatttacaggggtgtaatttaacgttcagaaatacagatttgggagttatctatcacccagcatgatttcattgatgagacaatttcagcgacgagatcgcccgccgcgcccctccgcggcccgggactgctcatcatcttttccaggaagcgaccgtggaaacgcccctagccttccgttccgcgctgccaggccgcctcgcctcccgctcccgcccgccccgcgggacacagcccgcccgcactccggggcccgagcgccgaccacactccaggcgcagccggggagagccccgcgcgcgcatccctccgcccgcggccgaggcgacccctcgcggtcccgcccgcccgagcttcccgcggaggcacccggccgccccgcctcccccgccccgcgcccgccaactcccagctcgcggcc

SEQ ID NO: 9238 - DNA, 367 bp, Homo sapiens
  source 1..367: mol_type = other DNA
aggaccaaccacgttgcaggcagcaagcaaatttcactgatcacatttctattaagtccactgagtacactgctttaaataacatatttcctctattataaaacagagagtgtgtgtgagagtgggagggagcctctccccttatatttacaggggtgtaatttaacgttcagaaatacagatttgggagttatctatcacccagcatgatttcattgatgagacaatttcagcgacgagatcgcccgccgcgcccctccgcggcccgggactgctcatcatcttttccaggaagcgaccgtggaaacgcccctagccttccgttccgcgctgccaggccgcctcgcctcccgctcccgcccgcccc

SEQ ID NO: 9239 - DNA, 517 bp, Homo sapiens
  source 1..517: mol_type = other DNA
ataagtcattgcttcattgttgaatatataaaacaaaatatcactaattgtcatagaatataagtgacagcctgtctggagcagctgctgaggggatgccagctgcagtaggaggcgtggccagagctgcccgagccccgtcccctaccacgtcagcgaggcgggagacccatgttcctgggcacagctgcagccgtccagccgcagctctgcaccccactcttgggggcccaggaaaccccctgcccctgcaggctgaaagtgcctgctcctgaggttcagcttgggtgacagagtgagaccctgtctcgagcaaagttgtggccaggcacgggcgctgctgcaacccagctgggtgtgcacgtgttcagggcagcactggctgagggtggctccgcgtgggcctgcaggcacccctcagcacaaccctcttcctggggggaaaggggtaggtccctgcccaccttcaagccagggatggcctgaagcctgggggctctgggcccacccatgggcc

SEQ ID NO: 9240 - DNA, 488 bp, Homo sapiens
  source 1..488: mol_type = other DNA
tgaataatgctttactgcctttaacatatttcataaatatatactattaatatattgataggtgaatgagtatgtcactctctggctcctgggagttttttaaattactttttttattttatttacttcaaagttttttattaactttaaaaatcttttctattcttttataatttatttatattaacctgagcctcagaactgagtcttaagtgagaacagaggctccgggcatgctcggtaaccataactgctcttgccctgaggcagggcccttacaggtggcaagtaccagcgctgctgggagtgcagttgaacacacaacaagtttataaagtggggatgttgcattttcaaaacaataaagagttattttggacaaattaattgaacctcattgggcagatcaaagatttttaaaaggttttctgaactccttcctaaagagggtgcgtgcgcgcgcgcggagggagggccggccgcggaga

SEQ ID NO: 9241 - DNA, 201 bp, Homo sapiens
  source 1..201: mol_type = other DNA
gggtgttttaagagcccccagctctggttctagtaccagaccggctctctcacaggaaccttgttgactgtcactatcaggcctgtttcaatttgagggtaaatgcatgaatggtccctttaaaggatggccaccaggacagaggagccagctctgctcttgctggtcttaagcaggaccagatcgaaggcacttaagggc

SEQ ID NO: 9242 - DNA, 331 bp, Homo sapiens
  source 1..331: mol_type = other DNA
gcacagatcctttccacaaagggcctgtgagtcccttccttttaggaagcacattcctgacagcattgtatgcgattcattatgaatgtcacacaaatggaagcacttcataatacctcacagcttgtacaaccagttaagttacaaagcacttcaagtgaaatcattgtttcatcaagaagtgtctgtattttatgaggtaaactaagattattcccgatttgattcacattctaatttcataaaacgcgctaggggcagctgcctgcaccccctgctcgctgaagtacgacccacatgggaagtaggaagtgcggcgcctgagcttcct

SEQ ID NO: 9243 - DNA, 498 bp, Homo sapiens
  source 1..498: mol_type = other DNA
attaatggcctaaattaagttacaggtatgaattttacataaaacagattaatattatatgtcataatggaattttaaatattccgtgtccatgcatttttaatctttacgtaattgaatgcgcaaggcaactgcatttcttgagcccacttttgcattttttctacttttgctaagctttagcattttttaaaaagaaaacggaaaggctacacattccattccatcattatggttccttcctgggccaggttccgcgagcagggcccaggcgctccctcagcagcctcgggataaggggggcggtggagagtgaattccggccgcacattcccgcatggaatggacactgcccgcctgattggctggccactccagtagccggactccctctccctccgcgcccccgcccgcgcgcccagcgggctccgctcggctcgcgctgcgacccggcccgcgcgctggtcccgcccccggggcgcacggctctataaatac

SEQ ID NO: 9244 - DNA, 386 bp, Homo sapiens
  source 1..386: mol_type = other DNA
cattgtatgcgattcattatgaatgtcacacaaatggaagcacttcataatacctcacagcttgtacaaccagttaagttacaaagcacttcaagtgaaatcattgtttcatcaagaagtgtctgtattttatgaggtaaactaagattattcccgatttgattcacattctaatttcataaaacgcgctaggggcagctgcctgcaccccctgctcgctgaagtacgacccacatgggaagtaggaagtgcggcgcctgagcttcctcgctgctggcgagctgtgccccacgctcccgctgcaacagtcccgggcatcgcagctgccagtcaaggctaggaggcggtcggggactccgcctcctcccgacccgtaggtctgggag

SEQ ID NO: 9245 - DNA, 282 bp, Homo sapiens
  source 1..282: mol_type = other DNA
catcacatcaggtggagttctcagtcaggtcctcagagtgagcctcaatcttcaggaaggtttcttgccaggattaatgagttcagtgtccttgtgtgtcccgcatcacacacggcattcaaaatctatagactaccctatcgcgcttgttttttaagtagggtcatctaaattaaaaacaaaacactggtttcatgtatcagactacttgtagaacttgccgcgcaggctgtaccaatattttttcacacttacaaggagaaaaaacacacacaaaaacca

SEQ ID NO: 9246 - DNA, 437 bp, Homo sapiens
  source 1..437: mol_type = other DNA
aagctggaggccacattgataaagtcggccccgccctttttcatcagctagcgattcctgaaaaggatcttcaagatttttatgtttctcagaacctagcaataacttggaaaagttttccaagtagcatgtctggtggctgcggcgctccagcttccagccaccggcagaggaaccctctacggcactcagccgcttcgactgcggcggcgcccgggaggaggaaaggcgcgtcccgcctccagctgcagggccaggcggcggcgcccgctggcgtcgctttccctctcccggtcggcctcggtgcaggccaggctgggcgggccgggcggcgcttgggggccgggctcggagtcccccctcctctcggggccgtcccgagcggccgggccaatgggcgcggagaggaagggagcgggaagcggggcgccttgggc

SEQ ID NO: 9247 - DNA, 435 bp, Homo sapiens
  source 1..435: mol_type = other DNA
aacccgtagatcagtgtctgctggattcaaaccaatatccgttgtaagacaaaagagttaatttgtactttacccctccgcaatcgcgtctgctgaaccttctgcgtcctttttattgcactgactggtcaaaggaaagagtgttcccttagtcaccttgacaatttccaaaagcgaaacttgggctctagactagatctacactgagtctgcggggcgcggagtccctgcccaggtcagtagcgccggcccggcgggcgggcggggacaggggcggagcctaggccaggcgtggtcttccgtgggagagaaggaaattctttgccccacccccttagggtccctgtcgccccggtaaccatgatgcacggcagccaaccagcaagtcgcggccctgctccatgattgggactagcggcccaccgagtttcgcgg

SEQ ID NO: 9248 - DNA, 480 bp, Homo sapiens
  source 1..480: mol_type = other DNA
tccctgcccaggtcagtagcgccggcccggcgggcgggcggggacaggggcggagcctaggccaggcgtggtcttccgtgggagagaaggaaattctttgccccacccccttagggtccctgtcgccccggtaaccatgatgcacggcagccaaccagcaagtcgcggccctgctccatgattgggactagcggcccaccgagtttcgcggcagcagcttcctggagccatttttcagctgccggccgcagcacccgggctgccgccgccgcctcgcaatccgttgcatcggccgcccccgacgcggccattatttttggcccccggggcctgtgcggtgcggaaaaataccgccgggggtggggagggggcggctgtcgtcgccgccgccgctgcagcctccatggacgctagccagccccggcttcgccgccgccgccgccgctgccgccgccccgggcgcgtacagcggcgccgtag

SEQ ID NO: 9249 - DNA, 568 bp, Homo sapiens
  source 1..568: mol_type = other DNA
cctccccaccgtccccagccccggcgggaggtgggctcgcaccgcgcggggtcgtgggcgcgctgcgggccgctcggggagagcactgggccgagcatcgtgggcctcgggggctgcccctccaacggctcttcccggcgccaggagggtcggggggctcggccaggcgcgcggggcggcggggattgccttggcgcgaacttcctctttctcgggcgtaggaaggggtcacggactgttggggtgctagcccccagtcggccttggaggctcgttggcggccgggggtccctgcggcgtgctcggagcgcaggggatcggcgggctcgcgggctggcgctctggcctgggcgcatcctggcagtggcagcggcggcgcccgcgtggcccaagcgcccaggccttcctcgccgggccccgggcctgcccttgagccctgtccccctctccgccccccggcgacggagggcgggggcagctgggttcccgtcccgccgcctgggtcgggacccgccggtgacgtttcgcacacgtgcgcgcaggacgcgcctgtgactgcgctggaggg

SEQ ID NO: 9250 - DNA, 437 bp, Homo sapiens
  source 1..437: mol_type = other DNA
gataaacagagaaaagggtggtttttttttttttttttaaatggcattttaattagatgaaattgtactaggaaaggcatttgcaaaacaaagtaattggcataaaactcacgatttcttactttttcaagtaaagatattcttctggtaaacactttgccatctaagttttgtgtgttgatgttcctgtttttttaatattaaagaagagacctcttttcacaaaagattaagtccttaaacttccagttttaaactgggaataataataataataaataaatagtgaataatatttatgcaaagtacttagcacagtgtctaacacataaaagtgagaagttggctattaagcatttctaggaacccgaggactcagggttgttattttagttcttggaatcaaagactaagttaaacaaagcaatgatgtaatt

SEQ ID NO: 9251 - DNA, 581 bp, Homo sapiens
  source 1..581: mol_type = other DNA
taaactcttaaatcaggggttattaataattgttccttcatttaactcaactatagaattatctgcagtttttaccatttaaaagtaaagcccaaaacctcaatcatctgtaaactggagagataacacatatgttaaacatacagatacgctatttttaaaaagacaaaacacatgtatttttaaaaagacaaaacaaaatgtgtatttcaaaaagagtaacaggggactgaaaatcctgatttctcaatccttattctatatctcttggtatttagtgtaaaaattttaaaatctttacctagcaatcttgaggaagaaacttgataactgataatacatgagattgttacctaagtgaaatataatcctatatattcaacaaactttagagaaataagataaattttaaagtaaatgacttctgtagttttatagatcctccagaatgttcatttctggccagtatgtcttcctgaatatgaataagaaataaaataccatttgatgtttgaaattatgggtaatacgaatgcctgattcattatattcatgaagatatcaaaggtttataaagccaa

SEQ ID NO: 9252 - DNA, 429 bp, Homo sapiens
  source 1..429: mol_type = other DNA
ttttctttaataaatcagcatatcttacttgtagacatatagattgaaatgtcatcttcatggatgtgacaaataaagtcatgacattgaaagaactcaaggaattatttgagaaaacaaaacaaactaaactatttatatattatttttgccatatgttctattatgcttaatatttttgatcctattattgattgcaaaaagactatagacagtctcatctccattattgactgcatatcaatacaatatcacaaagtactgtactatgctttaacatttttgcctagtaacaaatttattactccagcaatttaatttgcttgcttagacactccattttaatctaggtttttcaaaagcagtaatatcatctggtctctgctcaccagataaaaccactcatttagattgatggggttcagaatc

SEQ ID NO: 9253 - DNA, 360 bp, Homo sapiens
  source 1..360: mol_type = other DNA
atttaatcctgacggtaggtgcctcttcactcattttaaaaatatgtacagtcatatgtttagacacacaatgtgttccaacaacagtattcaggagggtacaggtctgtagcctagaagcaataggctctaccatatagctaggtgtgtagtacttctacgaccaaaatatggtctgggcagaaaaatgcccatcctggggagcctcggcagggcccagtgaccagccttccatggcccttcacggtgcaggcaggaacaagcctggcgcgccagacagctcggccccgcccactcgccggcccctttggagggggaggcggcggcggcggcggcggctgcgcgggcctcgggtgcgcg

SEQ ID NO: 9254 - DNA, 401 bp, Homo sapiens
  source 1..401: mol_type = other DNA
gacagaactgggtttgaactctctctctctctttcgttttctaatccttagaatgttcctcatctgaggaaagaataatatttacctctgaaggttattgtgaatattagataatctacataaagtgccttacataatgagctgcaaaatttcaactctttaaacattttccttgtatgtcccagactggactggacaaagcggaaaaaatcctttccctggcgtaaagcttggcacagggtaggcactcaaaattttgtccatttactgaatgagcgcatgatgaatgagcgcatgatcatgagccaggcgcaagccaggcctggttcactgactcgctccccgcgcgaggccagctgggaacagcgtgagcggcgcgcagccgccgcagagttcaccac

SEQ ID NO: 9255 - DNA, 429 bp, Homo sapiens
  source 1..429: mol_type = other DNA
tatataatatatataatatataatatattatatatataaatatatataatacatatatattatatatattatatataatatataaatatatatataaatataatatatatatttatatataatatataaaatatatattttatatattatatataaaaatatataatatataaataaataaataaaatatatataaaataaaatatataaaatatatatataaaaaaaatatatattttattttctaagacaggctggagtgcagtggcaaaactgcagagctggcttaggcagccgggcccctcaaagactggaatttgcagtttatcttccagcaaagaaaaacctgggcaactacatccaggaacttaattgctttaatttggattgggtttccaggtgaacctggtgtggtgcgcgcactgcggg

SEQ ID NO: 9256 - DNA, 527 bp, Homo sapiens
  source 1..527: mol_type = other DNA
tatataaaatatataatatatataaaatataaaatataaaatatataatatataaaatatataatatataatatataatgtataaaatatataatatataatatataatatataatatataaaatatataatatataatatatataatatataatatattatatatataaatatatataatacatatatattatatatattatatataatatataaatatatatataaatataatatatatatttatatataatatataaaatatatattttatatattatatataaaaatatataatatataaataaataaataaaatatatataaaataaaatatataaaatatatatataaaaaaaatatatattttattttctaagacaggctggagtgcagtggcaaaactgcagagctggcttaggcagccgggcccctcaaagactggaatttgcagtttatcttccagcaaagaaaaacctgggcaactacatccaggaacttaattgctttaatttggattgggtttc

SEQ ID NO: 9257 - DNA, 429 bp, Homo sapiens
  source 1..429: mol_type = other DNA
agtctcgctctgtcacccaggctggagtgcagtggcggcctcccgagtagctgggactggatggtctcgatctcctgacctcgtgatccaacattttactgcatttttaagttaaatgttcttaaaacttttttattcataaagatgcttcaaaatgtgcttttaaaatctacatgcagtatggtttcattgtattatctgaaaatgtcactgggaaatgatctgaaaaatgctatattgggcaattactgaatcttctgtagtttgtgagtagaaaatattaggatgtctatccttaataatattatctcctccagtcttatcaactgatacaaaattttttaattaaaattttcaacctttgacatcagaacatcataattccagaaactggactccagttaaccagtaacttctgtatcagtgaca

SEQ ID NO: 9258 - DNA, 492 bp, Homo sapiens
  source 1..492: mol_type = other DNA
ttttcctgcacagccagataaggaatttccttatctgacagagaaaactcttttccaaagaaatgcaattgtcttaaaacccgttccttaggaatcgcattaaataattagccacactgagacttttcatagatacttctgagggtagctccaagagattacctgggaaactttacctgtataataggacaattttttcccactgaatgtccaaggagaatcatttgcaaaccaaagaagggtatacttaattgagttattgagtaatcactggcaaaagtaggagctttccctcttgctccctacaccacgttaaatttaaatataaattaaatgatgtgggaatgggtagctcatttccaaactgcaattttcataggtatgaaaattccctcacttaggtacaggtgcaggtacaggtaggcaagcgctttggctgtcccacaggtaccttccgagcatgcgtggggaagtagcacgcaggcgcggcac

SEQ ID NO: 9259 - DNA, 358 bp, Homo sapiens
  source 1..358: mol_type = other DNA
gctgggattacaggtgtgggccgccacgctgcttttaatgtaaaatatgcataatttgtgttttaagattaccatcagtttcatgaagagcttaatttttcccatggatgaatacctgataatatatcgtgagcgctgcaggaatctgacaccaggagtggctgctcttagagatccacccttctgcacaggtgagcctttttatagaaagcaaaaaatatctggagacaactttgcttgcatctctacacaaatttcatgttaaaatgaaatccaaagatgcagtgcttctggcctaaggcgagcacagagtttgtttgctgttctggtgaatggaaaacgatattattttgaaatg

SEQ ID NO: 9260 - DNA, 298 bp, Homo sapiens
  source 1..298: mol_type = other DNA
ttttaacggatgaagaatgctttaatcttactagtggcttgactagggtagctagtatgactttgaacgctatattgaatttaatgtggcaactgtaatgaacctgtcggtcacacagcttgtcggcaacagacttgcattatggaccgcgcacaaattccggggatgccgacctcccccgggagaaggtcgcgccaggagagaagccgcgcggcgcttagggcaaggtgcaggcggcgcggcgagacgcggagagagggcgctgctctgtggctctgcaagacccctgcgttcccgt

SEQ ID NO: 9261 - DNA, 253 bp, Homo sapiens
  source 1..253: mol_type = other DNA
ttaattttaacggatgaagaatgctttaatcttactagtggcttgactagggtagctagtatgactttgaacgctatattgaatttaatgtggcaactgtaatgaacctgtcggtcacacagcttgtcggcaacagacttgcattatggaccgcgcacaaattccggggatgccgacctcccccgggagaaggtcgcgccaggagagaagccgcgcggcgcttagggcaaggtgcaggcggcgcggcgagacg

SEQ ID NO: 9262 - DNA, 481 bp, Homo sapiens
  source 1..481: mol_type = other DNA
tgattcccagaatcatcctatatgaatgctattatcttcattttataattgaggaaacaggtttatctagattaggtaactttctgaggctcttcggtaaatacgagtagccaagaagcttattcacagtgttcaaagcactgcacttatacctcctagtaatgagatgtgcgaggctttcgcatctttattaaaacagtaaaaatgcaagagtcgtttagattatcacgtgatgcaaccagttaacctgcaaggcctggaggtgatgggagcccctcctagcacaggttcccagtcctggggtgacacaagctggggacaagctcccttgagccaccctggcccgggccccggtgcgggtagcgcaaccggggagctgagcaggggagctgagcaggggagctgggcaggggcggctgccgcgccccacatccctgagggcgtgtgtgcgcgtgcgcgcgcgtcgccgtggtaaccgcgg

SEQ ID NO: 9263 - DNA, 448 bp, Homo sapiens
  source 1..448: mol_type = other DNA
cttacttcttcaggagttgggtgcctttgagaaatttcccaaaccactactaatcttctagagcctagagaattagacgtgaaggatcaaactccataaccatacttatctatgtttagatagagaactccattaaagtaataatcattattactaaggtgaatttaccacggtgcttcaaaattgcgagctgtttgggctttgcgcaagaacgaacttcggaagagctggaaagggcgaagagcccgcacccttctccgcccctaggagcgcaagaggccgggagtcaggcgagctggcagccccggtggtccgcgaagcgcgcatgcgcgcttcgcacccaccgccccggcggctcccttgcggcgcagctgcaccagccccgccgggcggttgatgcgggagcgccatgacacaggcgcctgcgcagagccgcgcgttggcctcc

SEQ ID NO: 9264 - DNA, 339 bp, Homo sapiens
  source 1..339: mol_type = other DNA
tctaagttagtagagggccttgtaaggcagctacactttttaagtgcaggaacttgttattctggccggtcagcctagggcctaggagacttccaagttgccatttttctccgctgctggggcgcaactccgcgcagcagcagcaacgcaagccctgctcctctggctacgcagcttggagatctgcctcagcatcgtccgcccagctccacggcaggtcccaggacgcgcagggctacctggtatcaaacaccgacctaggggacaatctcccagtcgttctcggccaggaagcactgagccactgcggcatcgcagcttgcgaccggaggccaacgc

SEQ ID NO: 9265 - DNA, 406 bp, Homo sapiens
  source 1..406: mol_type = other DNA
tgttattctggccggtcagcctagggcctaggagacttccaagttgccatttttctccgctgctggggcgcaactccgcgcagcagcagcaacgcaagccctgctcctctggctacgcagcttggagatctgcctcagcatcgtccgcccagctccacggcaggtcccaggacgcgcagggctacctggtatcaaacaccgacctaggggacaatctcccagtcgttctcggccaggaagcactgagccactgcggcatcgcagcttgcgaccggaggccaacgcgcggctctgcgcaggcgcctgtgtcatggcgctcccgcatcaaccgcccggcggggctggtgcagctgcgccgcaagggagccgccggggcggtgggtgcgaagcgcgcatgcgcgcttcg

SEQ ID NO: 9266 - DNA, 306 bp, Homo sapiens
  source 1..306: mol_type = other DNA
gcctgtaatcccagccactcgggaggcgccatcttcgggctttgtgagtgctggtctcagaaaagcactcacttacttcttcaggagttgggtgcctttgagaaatttcccaaaccactactaatcttctagagcctagagaattagacgtgaaggatcaaactccataaccatacttatctatgtttagatagagaactccattaaagtaataatcattattactaaggtgaatttaccacggtgcttcaaaattgcgagctgtttgggctttgcgcaagaacgaacttcggaagagctggaaag

SEQ ID NO: 9267 - DNA, 282 bp, Homo sapiens
  source 1..282: mol_type = other DNA
tagaagtaatattaacacaattattttcttctccacccgggcgggaattgtttccacgcgagtgagtcgcggtctccgggcaccgcgggcagatccacagggaagtctcccttggccggaataattaataccgtattatatctttggcagcagcgttagcagccgcctgatacactgtagttgattgcagggaaacccatagcaatagtgaaatctgaaataactaagaattaggtactggctgggtaaaatctaattggatatttcagtttcattcaccta

SEQ ID NO: 9268 - DNA, 374 bp, Homo sapiens
  source 1..374: mol_type = other DNA
gtctttgaccttgaccgccctccctgcctgcgcacgtggcggggtggggacagaggtttgttgccgcaggataccgcggggccgacccgtcacgcgcccagcctgactctgagaggctgacgagactcgggaagaggggggcggaaggagtggcggggagcccccccctttccacgccccttggatactccatactggaggagagaggagtctcaactctcaaactccccttttgaggggcgattactgaaatggagaggttaaattcaaaggctccacttttaaaagcgcaaatggtggggtcccgcagggcgcgcagtcgcagtcacaccggggcggtgccggtgagaggcgggtgacgcagcggccgtcgc

SEQ ID NO: 9269 - DNA, 463 bp, Homo sapiens
  source 1..463: mol_type = other DNA
tagaagctattacaataaaacccacaatattgtcattacaactagtgttcaaatttcccttgggtatttttttaaatacagtgtttagttcagacgaagctttttatttttaaaatattttaaaattaatttttttttgagacaggccagctactcgggaggctgaggcaggagatgagccgagatcgcgccactgcactccagcctggtaattataggtgtttctgctccttcaaattgcaacagcagttgtaatttcagtgcctagaacagtagtgattaactgataatcggttgtctagccagggctttacacaaatatatgtcgtgtactacatattaatatatatgcacatacaatattttggaggcaaatctttctccctttcgtaaagggctaaaactttgcattttaagttgaccgcgcaggcgcccgagggaagaggcgattcgcgggatccag

SEQ ID NO: 9270 - DNA, 559 bp, Homo sapiens
  source 1..559: mol_type = other DNA
ttgcagtaagctgagattacactactgcactccaaaaaaaaaaacaaaaaactcccataatttattttgtttcttttccccattgaaaattcccaaatcatgtttccattatggaaaaatgataagtaaatgactaagaactacattaagattatgcctatacacttaaacaaaaaactcaaagcttatgcttttttttttttaattaatgagagctattttttatagattcgtggaggaacatttaaagtggtccctccttctgtaaaaatgaccgtgggctgaggggtggttactgcccccagggaaatcactcactggtaggattcccttattgcttcagtatcagagatgcattaaaatatcttgagtgtaatttaaactgtggaatatcaactgtacttgtatcatttagatgtcattttaaatatttacattttagcaagacttttaaaaaggactcatttcatttcaaagtgcaaattgtgttatcgtgtacatatctgtatatttataaatattatatatattcatacatccttcactttaaaggtacatt

SEQ ID NO: 9271 - DNA, 322 bp, Homo sapiens
  source 1..322: mol_type = other DNA
ttaaggattaaaggaattgttaaatatagtgaacccgacctgagtcacccctggtcacctgctctgacctaagtcacctcagaattagcttagactgtgcggtccaacccttatatagaagtaaaaattgccttgctgagaaaattaaatttatgtttgagtgctatttccttgtggcatcaaaaatttatttataacagaattaggagtaattacttctaaaattctggagaatgccctaaaatgtaagtatgggatttgcatctcacccacaaactccagggctgctctctcctggagagggagggaggggatttaaaac

SEQ ID NO: 9272 - DNA, 418 bp, Homo sapiens
  source 1..418: mol_type = other DNA
ttactgatcctttcacaaggtgacgtactattctagttaacatattctaaatacacaatttattcattatgatcacttaacagatggagactgagtcaggaccttttccctgggtctccactccaaaaggcccttttttgggaatgtctgtctatcaggcagacccatgagagctgtgtccaaagcagccccggtagagagagtgccctacaaagcagccctcttcagcggggctttccagcacagccgtgggcaaaaggcctccagcgcgctggatccaccgggctcgctccccggcgcgattccacgggagctgccgcgccagctcttgcaaaggagcctggcgtgccggcgatcagctggaagcaggcaccgaagcgcagcctcagtgacgccgccggcccccgcgccgcgcctc

SEQ ID NO: 9273 - DNA, 266 bp, Homo sapiens
  source 1..266: mol_type = other DNA
ctctgttgcccaggctggagagcaaaagtgcaatcatagcatcctcctgcctcagcctctggagtagctgggactataagaccaactaattttaaaattttttgtagagatacttcatccagcctggatgcgtgctttaaaatatgttggttatcaccgaatcattctttcagtcaacaaatatttattgctcaaggggtgttgctctgattcagctctagcagcaaagctcctgacgcgagggcagacacaggagcccggtgatc

SEQ ID NO: 9274 - DNA, 381 bp, Homo sapiens
  source 1..381: mol_type = other DNA
ctttcctccttttctgtcctttaaaagcagaacctgatttgaggcattcttggccctgaagttgaacggatcagaccagacttttccgagtgaaaggcattttccaaggcgctctcaacgggaatgtctgagatagcgaactgcggctgcagagcaccagctgagcttccgtgtagacgggtctgcagaatctgccgtctcccgtcttctgggtcccctggcccgcccggagtggggacaaggaaatggaaagcccggctcacccggctctcctccctcgcagccagcagatggctcccgggctctctcgcgagcccgctcgccccctctccagacgcagagggaggctgcgaggaggggcgcggtgcccgccgccgccac

SEQ ID NO: 9275 - DNA, 554 bp, Homo sapiens
  source 1..554: mol_type = other DNA
tttctgtcctttaaaagcagaacctgatttgaggcattcttggccctgaagttgaacggatcagaccagacttttccgagtgaaaggcattttccaaggcgctctcaacgggaatgtctgagatagcgaactgcggctgcagagcaccagctgagcttccgtgtagacgggtctgcagaatctgccgtctcccgtcttctgggtcccctggcccgcccggagtggggacaaggaaatggaaagcccggctcacccggctctcctccctcgcagccagcagatggctcccgggctctctcgcgagcccgctcgccccctctccagacgcagagggaggctgcgaggaggggcgcggtgcccgccgccgccaccgcagcaccgcacagcgtctctcctgggggtgcgacctacgccggggacccagcgctcgggcaccggaggccggcctcgcaccggtgcggaggccggctctcgcgagggaggagggccggagctgcccccgcccagccggagcccggcaggagcgcgaggaaaacctactccccccgccccgc

SEQ ID NO: 9276 - DNA, 316 bp, Homo sapiens
  source 1..316: mol_type = other DNA
caactttttgccttctaaaatcctgaattttcagaggtggaaattcactcaacagatatttgaacacctattttgtgccaggtggggctggtagatattaaatatgtaatcccactgttaattaaaactgtgataagtattcataagaaagtcctttacctgaagaagtggggcaggagccctcctcttgggaggactgaagcttaagggacaaatgtttgggttcttaaaagatcacgttcagatcctatatgagcaggtggctttggaaaccatatggatgaccatccttgttcctgagatcaatagatctgat

SEQ ID NO: 9277 - DNA, 422 bp, Homo sapiens
  source 1..422: mol_type = other DNA
agatgacttatacatgcatgctttttataaataaatctgaaagttacatctggttcaactttcttatctaatatccaagcactttctatagattatccaacgaaaatttctaaatatatagtcaaaaggtatcagtgtagtttgtacacgtttccacaaagccttgcccaattttgaacagtcctgattgttagaattggtcttaatgtggctcttaggagccaaacacaatcagcatcctaatgatgctactttaaatcacagtgacttgcagtatccccaatgtgtatgtcctatacaatcaggactcaataattgctgttgacttcttccttagcctggagacagtttctttcttctgccaggacagcgcgcagggcggggcggggacaggcgcgccaggagcggggcgggcttccagc

SEQ ID NO: 9278 - DNA, 240 bp, Homo sapiens
  source 1..240: mol_type = other DNA
atggtcttctgaaatgttttgccaagttaattttcatggaaaactcaatggcctttgtgcaaaaaattctattagggcaaaatataccccatctccatgaagattatccttataagaagggacattgattcttaatgagcttgatttgattatcaatcaaacaataaaatgtaaagttaaaaattaaaaataagggctaaaggttttgggtaattatttacctcccagaattagacaatt

SEQ ID NO: 9279 - DNA, 489 bp, Homo sapiens
  source 1..489: mol_type = other DNA
gcccaggacatgcctgtacactgctgtagactttgtaaacactgtgcacttaagctacactaagtttataaaaaaattttatttcttcaataataaattctagcttactatttcattttgactttataaacttttaaatgtttttaaactttttgactctggtaatcacagcttaaaacacaaacatattgtactgctgtacaaaaatattttctttaggaggcgcctgtagtcccagctactcgggaggcagatcacgccactgcagtccagcctgggcaacagtctgagactccgaacaaaaaaaaaacaccaaacattttctttatacccttattctataagctttgatctatttttaatttttaaaaattaaaaaagatttattaaaactaagacacgcttcttggaaaatctattttcaagtgttttacttttctaacaacattggtaaaacacttgtgtaaaggccttgaacttcatggacaa

SEQ ID NO: 9280 - DNA, 359 bp, Homo sapiens
  source 1..359: mol_type = other DNA
ttggtgtgtatgtatatatgtattgaaataaacagcaataatgatggttgacaaattgcttattcaaaaatattttgcaaatccaaggtatcatataatctgatatggtaaaatcctgaggtctaacctgaccagcacatattgagactgctccttgcatcagtggctgctctatccacggaaactctgcttgagttgatcttatcaataagcagatagtatcttccagctcttaagatacagggggaaaaaaggaatttgttttacctttgcttaattctttccatatacggatttagaattctatatttttaatcaaccaaaatgctgacatcaacgtgttttgcactcacagtggg

SEQ ID NO: 9281 - DNA, 452 bp, Homo sapiens
  source 1..452: mol_type = other DNA
cagaaagctaggagtctgaaggctttgcctcatctatgagacaaggacaagtgccaaatttatgccacttattttccaaagtggttacagaatggcccataaatgctacatgatagcatgtgtgcaaatttagaaataatacaaagcattattacatatagtttgtgaatactcatataaatagtaagaatagaaaaaaatggagaaatcatattatatttatgccaggcaagttcaagtttacccataatattacaattcacatatttcaaagaagaaaaaaattaacaaaatttagtaaaaaacacaaaaatactgaactctttaattataatttatctctttttaaccttttcaaaaaagactaaagacattccgaatgcttcttcaaagcctatttggcaagaagccctgacttttattaatgattagcaacttaagccctagggtgg

SEQ ID NO: 9282 - DNA, 426 bp, Homo sapiens
  source 1..426: mol_type = other DNA
ggattttcccctatttggcctttagaattgtaaataaataaataattttgtgttgtttcaagccatcacagttgtggtaatttactacaacagcaataaaatagaattagataagcctactccagcgtatggtgagactcaagggttgcgtcacacttacaaggcagcttcctgggaagttgccagggcaattaggctgtgggcaccaaatgcatatggaaactgaggaatgaacacctcatttattgaggagctactaccaattagaatatgtatttcatttgttcaataaccccatgagtacagtaacacaatccttgctttacttcagtgacttgtcccccttgctttcagaaaaaaaggcttgttgactgaatggtatcttttgagatactctaacagtgagaacttgaaaatgaagttaaa

SEQ ID NO: 9283 - DNA, 401 bp, Homo sapiens
  source 1..401: mol_type = other DNA
gggtcagcaggcaggccaggggcccagacaggccagtggctcccagaattcaagtttaacatttattatgttgttatcataaatgcctcttacacctgagacttataaatgtgacaagctcttattgtgagatagtaatccatcttttttccccatgaaataataattctaacgggtggtgatagtacttttccgtcattaaggacccagggatcccacacagctctaagctgggggcactcactgctgggccactagtgactcccatttggactcccatcagagtctgtgaactgaacctctgcttctttttattgctgtaaaagaaggatattttcttcctacgtttccccctcctttaccggagaggcggagtgcaaatgatatgaacaacgtcacta

SEQ ID NO: 9284 - DNA, 365 bp, Homo sapiens
  source 1..365: mol_type = other DNA
aattcaaaaaggaatttagttgttaagattcacttccctggggaatctcatcaaccagagaagacaccatctaaacagactttgtcacagctgtccttatgaatcaagagagcttataaacacagctggagtgtggtggctcgcttctcgagtaactggaactacaggcgtgcaggacctcttaaatatctatttagaaattggtcggagtccactcctttccataaaaaaggtattttgacaaaatcctaattcggccaattattattagtattcctggggattgggtcaaacataaaccttacaccgatgcagattctgatttcccattgggtatttgacattagccaatgggagaattcctc

SEQ ID NO: 9285 - DNA, 503 bp, Homo sapiens
  source 1..503: mol_type = other DNA
atttgattgaagtgtatagctatacaatctaaaattaaactgtgcatggtcttacctataatttgttaagaaaagcaattctattataatgatggcatgatgaaactccatcccttaggccagtggctgtccctaacaattacccattaaatcaaatcattctccagataatcccaatactgtaaagtttgtgaaacacttgtcagataattcaattattctaattggttaatgttatgacttaattaatttgaatcaaaaaacaaaatgaaaaagctttatatttctaagtcaaataagacataagttggtctaaggttgagataaaatttttaaatgtatgattgaattttgaaaatcataaatatttaaatatctaaagttcagatcagaacattgcttcaggatttaaaaaccaagggggacactggatcacctagtgtttcacaagcaggtaccttctgctgagttctgaaagacctgttgcttttcaccaggggaga

SEQ ID NO: 9286 - DNA, 324 bp, Homo sapiens
  source 1..324: mol_type = other DNA
ggaaggaaattatacccatgagtgcattcctaaccccgcatgcacattgaatatgtcataccatttgctgtagcaattaatggcatacacaattatttgagtaatttcccaaaatgagcccctctcgcccaagctgcagtgcagcggcgtgataacagctcactgtaacctcttacaggcgagagccgccggctaattttaaataaagcgcatatgcaaatttccatttcttttttatattttaactagaaacaatttgtaaattttaagacttcaggaaacttttccagtacaagacttgtccacatctataaaagaagagta

SEQ ID NO: 9287 - DNA, 361 bp, Homo sapiens
  source 1..361: mol_type = other DNA
agaataaaattttgaattgagaagtccctttcaaggggattagccttattttaacaccaataatcttatcattcttttctctaaagctgtagcacatattatccagacttaagtttatattccccagacttttgcagaaaaatgagtcattcaacaagcaatgcctcccaaaatttaaataaaaatattaaaatgattttgtatgttccccaataaactattccgtaatttattagttagcaagtgatgcttagcgtcattaagctgacaagtttttcttgctccacccacttggtgaccaaatttgaaaaaaaaaaaaaaccgcgccaactcatgttgttttcatttgtatttaaggaac

SEQ ID NO: 9288 - DNA, 470 bp, Homo sapiens
  source 1..470: mol_type = other DNA
aagtgctgtaattacaggcagtcttgacctagtggcctgattatggccaatcttacataatgtgtgagatcttgacctttaattacagacaacccatgttcctgtggattatgatttattagattgcacatgcctaaataaactgaccaattagacagctaagagatctgtgttacttccctcacatatataaataattttaaataaaaatcatggcgtgaataatttctttccagagatgaaataagtcttctgccaaagattacttattaatttacaaggaaaaggggaagttttgtttctccgtgaatttgattgaaaattcatttttcattaaaaagagaaaagtcatgtcaaatatgaatttccgcagattatttttgttatactcaacttttccgggtaaaacctcctccaaggggcgggggcggtgcctaggtgatgcaccaatcacagcgcgccctaaggcc

SEQ ID NO: 9289 - DNA, 375 bp, Homo sapiens
  source 1..375: mol_type = other DNA
ttacaaagcattaactagaatatttctttagagtatgatagtacgtaactgacctactattaataaaattaacttaccttagtgccttcttaggcagaagcacggcctggatgttaggaaggacgccgccctctcgtcgttgcggatggccagctgcaagtggcgcgggatgacttcttgttgtcgcgagccgcgttgccggccagctccaggatctcggcggtcagccagggcgcgcctgcccaacccgctctgcgtagttgcctttacggagcaggcggtgcactcggcccaccgggaactggagaccagcgcgagaagagcgggatgtaaaacatggccgcttttatatgcatacggatgacaactgtgcag

SEQ ID NO: 9290 - DNA, 229 bp, Homo sapiens
  source 1..229: mol_type = other DNA
tgaaacctaagcgagcctgcggttccattttaaatttccaaataaaatttggcgtctggccacactccgacacggcgtgcttggccagctctccgggaagcagcaggcgcacggccgtctggatctccctgaatgcgccaggcgggaagcctcgcccgcgatgcgctagcaccttgtacacgtacacagagtaactgcacagttgtcatccgtatgcatataaaagcgg

SEQ ID NO: 9291 - DNA, 305 bp, Homo sapiens
  source 1..305: mol_type = other DNA
aggcgtcgcgtcgcccaagccggagtgttcccgggtttctaagctgggtttttccgagttccaaacacggcacagtgtatcagtttctgtgcactgtcaagtgtcccatactttgttaaaggaagaaaggaatgtgagttaagttctgacaccacaatgttaaaaaagtcggatctctaaagaggcctatttatagtagcctaatagccaatgaaaaggtagacttttaagtgtcgtttacattggcatttgtgacgacactctaaaattaatccaatcataaacgaaatctgattaacctcatt

SEQ ID NO: 9292 - DNA, 432 bp, Homo sapiens
  source 1..432: mol_type = other DNA
tatcttttgattttggaaacattttttagatgtagatattaacattctaataatagaaatgaaaaaactaaatcatattatacaaaaggatttcagttttaaatgtacagaattttctttttctgaaaaggagagtcatatatatttcagatgtgagattgaatttcagtcaagttaagataattcaaatttgcaaaatagacactaacttgaaaggtgcaattgtatcaatcctgtggttagcagaattttgatgaatgccctaaaatagggcaggtttaacagaattcacaaagcatccttatgtcaatcgccttggactacatatagctttccaatgagaaagtatttatagtacgcttacacaaacgcgacttaaaaaagtatgtaaattaggaattcccaaactgctctttttattggctaggaaaa

SEQ ID NO: 9293 - DNA, 533 bp, Homo sapiens
  source 1..533: mol_type = other DNA
acaatagtgtatgtcattctttaagaatcttttccagtaaacatttgttactttttcaaagtaatcccgcagggattttcaagattttaaattgaaaatactttttttttatgtctggacgttttaatttcaacaaaacgaaataatagtgttaagttctttgagtcaaacccgttccaggatattagaattttactataacacaaatgaaacacaaagttccttatgcttaacagtgtatcttagaaaaccttgtttgagtgaattagccttgtactctataatgaaacgaggaatcattggattttggaaaaaaaattctaaagcactttctaacgcaaacacattcgattttttatagctaaacaggataacagatcagtctattaagttaaatgatcaatgtctttgcaggtcatggtctacgtgaaacatcaaagaactgtaacggaaaacgacttgtttgaaagagccagttctctatccaaatttaccagaatcttgcacaatcagagtgattctgttcctatata

SEQ ID NO: 9294 - DNA, 367 bp, Homo sapiens
  source 1..367: mol_type = other DNA
cgtaatttaagaaaaaacctacgagcagttgcctacttctttggctaccacaggttgccaactcactttggaacgcggtagctcacgcctgccgaaacctacacactgggtgcagttgtgaggggcagttagatatttaaatggcaattacaaattttaataaatcgggaagaaaacccttttggttatgtagttttcaaacacttctttacagccgggtcctcaggcttccggtctgtgaaggaacaattgataacaatttaaacatgttaatttatttaatctgatttggttgttaaaacagccttaaaactctcacgcctccgcggagccggcgcgttggtgacgtcatcctaggtccgaattc

SEQ ID NO: 9295 - DNA, 313 bp, Homo sapiens
  source 1..313: mol_type = other DNA
atcttcaagggggaagagcaggatcaaactgttgcaatgatttctggcttgcagcccaaaaaagtgtgttttgaggtcacagcctatggagtgtctagcttcagagaatatgtactcctttctctggaaatcagaaaaattatattatttgataccatatccttaggctctgtaaaaaagatcctcctctctacgtacctctgctaatatttctattaccatgtaaaagacacgagacaggtgaatataaagaaatacttatatacattcaatgtactttagtggtttctgcccagcaactgatgagaaacat

SEQ ID NO: 9296 - DNA, 153 bp, Homo sapiens
  source 1..153: mol_type = other DNA
ccttggacttaaccccaccacctactggcagaaggtcaaggtcaagtgggaaagggtttttaatcctactcagtattcagccactgcaacgagtcctctggctttggtacctaataatcccaaaaggttatttgctgcttgagattttggttg

SEQ ID NO: 9297 - DNA, 316 bp, Homo sapiens
  source 1..316: mol_type = other DNA
tttatctagagtctggcctcagagaatatgtaccagcactgcctctggaagccagaaaaattacattttttgagtgcagtggcttaagcctgtaatcctagcaggcgggtgacagagtgaaactccgtttcaaaaaaaaagtgcattgtgtctgcaaatgttagcaaactgcacagtagcattgtgttctgctgatatttctattatgataaaagacttaagacaagtgactatatagaaatacgtatatacacacaattcaatgtacgtggtttctgcccagcaactgatgagaaacatcaaaaaaacttattct

SEQ ID NO: 9298 - DNA, 319 bp, Homo sapiens
  source 1..319: mol_type = other DNA
gtattaactgcaaagttttgaattgaatcaagattattctgcaagatatctctacaatgacaagatttagtgtgtgtgtggtccttggactcaaccccaccacctactggcagaaaggggtttttgatcataactcaggattctcagcaccttatccgatagctttggaatgaatgacaaggccttcataacagccactgcaagagtcctctggctttggaaagatctacatagagaagcctctccttgtggatagtccaccaaccttggggaccagccttgggaatctcaaggcttgcaaaaggttacttgctgctta

SEQ ID NO: 9299 - DNA, 368 bp, Homo sapiens
  source 1..368: mol_type = other DNA
tggtatctatgagatagcagagctgatgtcaaactgttacaatataatcaaatttcatctgacttgcaaatccaaaaagtgtgttttgaggtcctaggccacagagaaccagtttgtcacctcttacagagatggcatttgtagtctatctagattccagcttcagataatatgtagaaaccagaaacattatattatttgataacagatctatgctgtagtaaaacagtagcattttaattagtgcattgttctgctgctatttctattatgataaaagacttaagtaaatatgtagaaatacttatatacatggacaattcaatgtactggtttcctcccagcaactgatgagaaacataaaaact

SEQ ID NO: 9300 - DNA, 324 bp, Homo sapiens
  source 1..324: mol_type = other DNA
agggagtgcaacgttgtgatgcaaggccactgtgattaactgcaaagttttgaattgaaggaagattattctggaagatatctttacaagaaggtgaaggtagaaagttccctgagggaaaaggtttttgatcctcgctttggaatgaatggcaaggccttcataacagccactgcaccccagcaaaattgccctctacatagagaggcctctccttgtggacacccagtgagggatctccagagagagagtcttgctttcgccgataatctcaaaaggttatttgctgcttgaaatgtattctacccagcaactgctgagaaa

SEQ ID NO: 9301 - DNA, 317 bp, Homo sapiens
  source 1..317: mol_type = other DNA
tgcggcctggaccagcgggcaaacgcgcaggcgttcacccagatattacgggtacaacctagtttcacctcgcccctaaggtacgcgcagggccagtggcgcaactccgcaggagtaaggaaattcctgcaagataaatttgcctggaacccaagttgtgcccagccttgcctggccattttggccgttcagagattaaattaaagtctctattgtgttcaaaccgggcggaaactatcttttaaagactttttcaggctgtcctctccggcttggactcggggcggctccccgcctgcagccccggaagcgcatcc

SEQ ID NO: 9302 - DNA, 514 bp, Homo sapiens
  source 1..514: mol_type = other DNA
agcccgcgcggggaaaactgccctgagcttggcttagggatggtccgcaggccgcctggtgggagcaggaccgccgtggcccggtccgttcataagcgcgccgccggggggtcgcgtatttgcaacataagtatgcatatggataatgtatcaatacacacgtgtaataacaaattcttcaaataattgtcacacatttaaattttcagacattcacaaaatcaaatgtaaaatattaaactgaaagttcacaacttaaattttcaaaaattaaatctaattaaatttccaaagttgaactgttttcaaaattaaattttaaaatattcaaaattccgaggtaaatttccagaaatagttaaaacctcaaaactcaaaatttttaaatgaaatttataaactttaaaaggtgagtcatgaaacttctctaaaattgttctgcaaaattccctaaaaagccggcatcaacccgccttttagcgtctcgacaagggaacaagtttcccagaatcaa

SEQ ID NO: 9303 - DNA, 428 bp, Homo sapiens
  source 1..428: mol_type = other DNA
tattagaacagtgtttgatacatgctacacactcaaaatgttattattcaaaatattaagacaaccctgagtggaatattttgaccttgaaagtttcattaaaaataaacatgaaagtattgtctcagagactcacaatccaagtccttggccaggctgcccaggtaaaaactgttttttttttaatttaacaattgagctgggagaatacccagtgttcaacctaaagaactgagttctgtctgattccaaatcagacgtggatgacagcgctgtgtaacataaactgcaacgctgttggtgccgtttcttcttagacagggtggcagcgatcgcctccccccgcagccggccgagggctcccagagcgcaggcgccccgggccccgcccctttccgaagactcggctcctattggcccaggggccg

SEQ ID NO: 9304 - DNA, 455 bp, Homo sapiens
  source 1..455: mol_type = other DNA
tgattaagtttaaaattaagtaatggcctaagagatttgttcacatcttaacttttaagcgtggtaaaatctactgttttcaaaaagaagagtcttgatgtctcactttctttcacatggaataaatgttaagttcttttagagaaactagtaggacaccgccctgtgcgatgtgactttgcccagcagcttgttgagctcctcggtcgcgggccgcgttgcccgccagttccaggatctcggcggtcaggtactccagcaccgctgccagatacaccggcgcgccggccccgacccgctcggcatagttgcctttgcggagcaggcggtgcacaactggagaccggccctagaagagcgagtcttggccttagcgcgggctttcaaccaatctggatttgcgaatcctgattgggcagacctgatatttgcataagcgattctatataaaagcg

SEQ ID NO: 9305 - DNA, 176 bp, Homo sapiens
  source 1..176: mol_type = other DNA
ctggatatattttttaaatttatgggaataactttttaaatgtacaatatttctcatagtgataagtcccatgaaaaagacataggtttggcaatttttaaaaagctgaccatggaagacctttctgaaagttccgatgctgcatcagcagcctctgtgtacagactctggcctgc

SEQ ID NO: 9306 - DNA, 331 bp, Homo sapiens
  source 1..331: mol_type = other DNA
agaaaacggccctggtttctggccagattggtttcccccagaatggggaaatcttcagggattcccagcgagatctgcttcggaggctcctatgccggctccttggccgcctgggcccggctgaaggtcctgcgactcctccgggtgggctggggggagggaactcggactccagggccccagtctcaaggctgacctcctccgccccggtgcgggccgtgggggtcccagcgggcggagtcccttgacacttccgcctctgcggtccgcccacaggtggtatcccgaagcctaatgagcaccgcgatcggcggcccagagagggcggggt

SEQ ID NO: 9307 - DNA, 369 bp, Homo sapiens
  source 1..369: mol_type = other DNA
atttcttataatcagttcagtgttcaggaacaccttcgcggagtgttctgggaacgctggtccagtgtgcccgcccggcgccggcgtgcggggcggggctcgctcgtaacgaccggaaggcgcttccggacccgggatcatggcaacagccagccctccggactcgtgacgtcacccttctagaggcctctgcaggagaaagctggggagtcctcgaagggggcgcacctcgcctccttctgtgcggggcggtcccgccctgaggggaagtcgggtgccgggccccgccctgtttgtcccgagctcgcaggggtgtgagtcacaagtgtgcacagagggaacacaccaggtccctctgaagcagaaccc

SEQ ID NO: 9308 - DNA, 300 bp, Homo sapiens
  source 1..300: mol_type = other DNA
tggccaaatcccagctactcgggcccgagatcgcgccatttggtcgccactcatttgagagtcgtgaaaacaattttaatgggtaactaccagtattttcaaagtaataaaggtaacgattgtttgcgttttaaaatcgctctgccgcccaggctggagtgcagtggcgcgatctcggagtctatttcttataatcagttcagtgttcaggaacaccttcgcggagtgttctgggaacgctggtccagtgtgcccgcccggcgccggcgtgcggggcggggctcgctcgtaacgaccgga

SEQ ID NO: 9309 - DNA, 553 bp, Homo sapiens
  source 1..553: mol_type = other DNA
cttatgatggaatattaagcagatataaattactgcttttaaaatttttcctaatgtgaattttctaagcttttaaccgtgaaagattaaattatagacagaatagaattttggtaatagttccgagtatgtataataagatgaattatttaaaaaatctggttgattaataaattcctagggaattggttaacgaaataataaagacattaaaatcacttttgtaaactttttaaataagggaaattgattaaaacaacgcgaagttgtaaaatgccatatactgcatacattttgtgggaaaaaatgtgcatttatctgctcaccaaattatcttattagctaggtactggtttttttttttaatatatttaaaaaaaagagtgtctcctaatgttttaatttaatttaattgttgtgggatcacagacgtcagccaccgagtatatcttctgcgttcaaaagcaattttttaaagcctcataacgtggttacttacggaaacaagaagctcgcttttttttccctcccccaccggggcgggacttcccgc

SEQ ID NO: 9310 - DNA, 558 bp, Homo sapiens
  source 1..558: mol_type = other DNA
tatcatttactctatattgagaaacaattattgaaaatttatacacataaataacacagatgacattttaaaagggaacaaatgaattaattcattgaaatcaggagtcctcaacatcaaataataaatttttttaaacaatgtgatatttatgatttttgtttttattccaagaaatactagttgtatgtgattgcaatcaagacttaaatctaggaaataaaaatcaaaaattaatgtatttcaatggactggagatcctgtagaaattcattttcattaacatgtctgtatagaaggccctctctaatataataaaaaacctgacttacaatgtccttcattcatactgtttttaaataacacgttctatctttgcccaagccaacttgaagctccttttggatagagactttatgtatctggattaatattgtattttgcttccatggtcttatgaagtataaactattaccaattttatctctggaacccaggtacactgaaaagtattatttagctagctttcagtcctctgtaatacagaaagtaaatatc

SEQ ID NO: 9311 - DNA, 427 bp, Homo sapiens
  source 1..427: mol_type = other DNA
tctcaaaacaatgtggtgtaaaagccgtttagttttgacagcattccagtgccattgcaaaatgtggtgaaaaagtaggtggctctgaaaaaaccttattgggcaggacaccaccctgggcgatggtcactttaccaagcagcttgttgagctcctcgtcgttgcggatggccagctgcaagtggcgcgggatgatgcgggtcttcttgttgtcgcgggccgcgttgccagccagttccaggatctcggcggttaggtactcgggcgctccggcaccgacccgctcagcgtagttgcccttgcggagcagtcgcacggcccactggcacgtcccgacatgacgtaacgttcctgagtgtgctattggctaacattacagttaaccaagttttgaaaaacacttattttgattggacaaagttaatat

SEQ ID NO: 9312 - DNA, 603 bp, Homo sapiens
  source 1..603: mol_type = other DNA
acagtgtcttgaataattttccacaagtttgagttttctctaaactgaattatctacttttttaatggatttgcccaggaactaaaaagagaaaacactctaattagaaaacataacacatttaagtttgaatgtgaatctgagtagttagatcatttgtattactggtgctgcaatgcagaagaagtcactctgactgtttccaagctgcaaaatcccattctgtaacttgctacagttagaaacaaacttcatgcccaaaccaagtcttttctcttgcaaaaagcatgaactcatgggcaaatttttaaaaataactttcactggatacttagtagaaatttatcgcgacacgctactaactaacattggattcttatgaaaagctgaagggattttttaaaatatctttcatcaattgcacaagattcttgaaaacacaaacaagtattgttttcctcctttggagcttcaaagtgccaaattctgtaccattgttttaagcatttaatcaaattttgaggactaacaaacacagagtccaaccgcgagcggcggcggccagagggcggtggattggacgctccacggcttatataagcc

SEQ ID NO: 9313 - DNA, 276 bp, Homo sapiens
  source 1..276: mol_type = other DNA
aggctggagtgcagtggcgtgatctcagctcactgcagtagctgggaaccatgttggccaggctggccttgaactccttgttaaatacagtgagttctaaatttctcttcaaagaatcagtagttcacatctgttcccctggtgacctgctccgtcctgagtcacccctggtcacctgctctgacctgagtcatatagaagtaaattgctttggatttctgagactgagtctcactctgtcacccaagctggagagcacctggaactacaggcgcg

SEQ ID NO: 9314 - DNA, 305 bp, Homo sapiens
  source 1..305: mol_type = other DNA
tcagtagttcacatctgttcccctggtgacctgctccgtcctgagtcacccctggtcacctgctctgacctgagtcatatagaagtaaattgctttggatttctgagactgagtctcactctgtcacccaagctggagagcacctggaactacaggcgcgagtagacacagggtgtcaccgcgtaaaccagggctgggactgcaggcgtgagacccctgagatcttcaggactttggccttggaattgtccaaaggcatcccgccttctgcgcagactcacaagtccctgtggacggaattcttg

SEQ ID NO: 9315 - DNA, 422 bp, Homo sapiens
  source 1..422: mol_type = other DNA
gaaaggaagggcattgttttgctcgcatagataaatcaataaaaaactaagagcatttttcacccatcaagatcaaaatattttataacactgtgttgacaagtataggattggtgatttggcattaacaaaagtacaaatttccctaagacatacagactatggatatatccttacacatgaaaaatgacacagtaagttattgcagcaatgaatggggtacttattaacaaattatagaacataatacacagttgaataccgtgcagttgtttaaaaaaagcctttacgtaatatatctagggacatttactctttttaataaatgtatgtgaatgcattacttatccatattactcaataattaaaccgaaaaacgttttaaagaagcccggaagtgcccggctgaagcggccgggcgc

SEQ ID NO: 9316 - DNA, 275 bp, Homo sapiens
  source 1..275: mol_type = other DNA
ccagctacttggggggctaaggtgggaaaaagaatgaacatagatttgttccccatatcttgtggtattaaacctagggtctactcttcaagcttacatcataggtttagcattaaaacagctaagcagctgtaaagatccaaaaagaatatatatttaattacgatttttttgaatacttaataaaatatgctattcctaagtgccatgccatagggatttcacaaaactatgaactttagcaggaattcctcatgaagagttggaatcctaag

SEQ ID NO: 9317 - DNA, 397 bp, Homo sapiens
  source 1..397: mol_type = other DNA
ccagctacttggggggctaaggtgggaaaaagaatgaacatagatttgttccccatatcttgtggtattaaacctagggtctactcttcaagcttacatcataggtttagcattaaaacagctaagcagctgtaaagatccaaaaagaatatatatttaattacgatttttttgaatacttaataaaatatgctattcctaagtgccatgccatagggatttcacaaaactatgaactttagcaggaattcctcatgaagagttggaatcctaagccccagcgacagcgcaagcctgaggcacgcagacgcgagcacacagcaggtgaggggcgtggtactccggtaccctcagtccttgtagacctccaggactcctagagagcttccggaagtgc

SEQ ID NO: 9318 - DNA, 304 bp, Homo sapiens
  source 1..304: mol_type = other DNA
atggttttggtttgattttgtattattattactaaaactccagaaaacttttacaataaattgctttatgccatacaataagttagacttacatgatgagtaaagctttttatgccattgtgtgtgtgagagaggatcacaatgatattggtattgtctgagggtttttaaaccataaataatgtattaattttaaaaatgcttttaaaaatcatcattttcaatagttaacggtctatgcttcatcaacgttttccgtttaaaacctgtgtgcggcccacacacgtatgacattctccggccc

SEQ ID NO: 9319 - DNA, 251 bp, Homo sapiens
  source 1..251: mol_type = other DNA
tttctagttcaaagaattctcagggctttcttctattataggataggcctagtttatcacatgccaggcactgttctaagcactttacacaagagtgcctttccctatttacagattggaaaagccaggattacacaggtaacctggctacctgcgtatctagccaccaagggcagccactgctcgctccaggctgcttaagcaagctttattaactgccttcccttgcgtggaggtaaggacagggtagc

SEQ ID NO: 9320 - DNA, 333 bp, Homo sapiens
  source 1..333: mol_type = other DNA
ttatcatcatcagagtcagaatttgtgtcagactctgagttactgtcactatcagaatatttcgaatcttgggagccgccctcgcgacccacactccaaggaggcctgaggccctcacggccgcgggagtgagacaagaggaacatctgctctgcggggatggtgggctccccgaggagctgcgtcgccttctccgagagcccacgatgtcctcggaatagcggggcatgagccgcgcctcaacgctgggcggttgctacagagattcgcggccacgcaggcgcactagaatcggcgcttccgcttcctgtcagttaccaaacggaaaacgaa

SEQ ID NO: 9321 - DNA, 434 bp, Homo sapiens
  source 1..434: mol_type = other DNA
cagctgcatccatgttgctgcaaaggacatgatctcattcttttagctgcatgaaacatacacatgcatgtattcctctgggtatatacccaataagagagctctgttttaagttccttaagaaatttccaaattgctttccacagtggcagaactaatttacattcccactagcaatgtataagcattcaaagagtttatcttattcaaaaactataaaaacccagtttgtgatactgtgggcaagagagactatttctgttctctgttgtagaatttatttaaagaacgtatgtattgtttagtttaattttcgaaatactttgacaattatttttgccattgtgtttgatgaatttctaaattgcgaaaatgtttgtgataacactcaacggagctggcctgtttttacatgaataaaataaacatccact

SEQ ID NO: 9322 - DNA, 485 bp, Homo sapiens
  source 1..485: mol_type = other DNA
agactcttgtggaagagtagagtcggacctgattgaacatgcgagtacacacacgggaaagaaactctgcgagtctgatgtgtgtcagagttccagtcttacaggacataagaaagtcctctctagagagaaaggtcatcagtgtcagcctttcagaggagttcacacctcgtcagtgagaagccttatcagtgcaatgagtgtggcaaagtctttagccagaatgcaggcctttagaattcatactggagagaaaccttatctatgtatccattgtggaaaaaattttgcaaggagtgtggaaaaacctttagtcaggccttactccttgtggaaaagctttcagtttgacctcagaccttattcgacgaattcatactggagaaaaacctttcaagtgtaacatatgccagaaagcctttcaccacaaagacaaactggcttgatgaggtgttctctccttgtagaacattagcccactgtgg

SEQ ID NO: 9323 - DNA, 384 bp, Homo sapiens
  source 1..384: mol_type = other DNA
gggctacctagcttgccttaggtggatagcaagggaagggtccctggagagcctgggaacaaggcctgacacataatgcctttgtccgaaacagcccctgattggtccggggccaaactttcacttcggcttctgataggtcctgggccaagctaagcagcagctatgaatcatcatttcagctcctgattggtcccggaccaagctgagtcaagcgttcgccaggacagcccagaacgggccccataatgggtactcccggtcgggaccccttctctgcagcgtcttggaggcaggacaaagaactccggcgttatctcagataaggggcgggacctccacctaaatgtgtaggggcgggggtcacgcctgcgcagacgttcc

SEQ ID NO: 9324 - DNA, 652 bp, Homo sapiens
  source 1..652: mol_type = other DNA
atgaataaataatgggtctgttttttaaagagttttttatatttttactattgaacatcttttcacatgttaatttgtcatttctactaaagtctccttttactcttaaacagaagtgcccttaaaaatcaaatagggaacttgcatatcagcattttaaatgcacgtatgtggcatttatcctagaaatatattcttaaaagaatgtaaaggtatagcattgcttttaaagaaaaaatataacctaagtatgcatcaataggatagttaagtaaattatggaacactcatacagtattacttagctgttaaagaataagctgatctgtgaagatctccaagttgtctaattacattatgataccataagtgttttaaaatgtataaatacttattcactaaacaaaatgttcattaagtgctacgttaactctaaagaggggcttgacttttttattgtacatatattatgtatacttaaagaaaataatttgtacagcttactataatggtctttttattgataagacagacctgtgtttcgcggggcaggaggtggcagcgggggtcctcccggctcaccagagagacgagcggccgtgctcctagagaggcagggaacccgccagactccgccactccgctgcgggcg

SEQ ID NO: 9325 - DNA, 334 bp, Homo sapiens
  source 1..334: mol_type = other DNA
aactaatacatacatttatttcctacatacgtacttagcattctagactttgggattccagaagacagtctcctttgtgatgtcaaagagaccagaccttgatgactgtgttctcaagacagttggaaagtgtccaaacagttccaactaaaagcctcagcttgtaagcgatcaggatctcagccagattcctaactggaggcttttcctgtcctaaatgctgggggccgctccccatagaaatggatttctccctcgcacccagtgggactgggattctggaattcctagaaaggaaagagttgcctggcttcagccagtgggctcagaacgg

SEQ ID NO: 9326 - DNA, 583 bp, Homo sapiens
  source 1..583: mol_type = other DNA
gtcttaggacctacagtcctaatgcaagataaggttatgggacctgaggcacccctagatcctggccggcattcccgcattcccaatggggcagggtgctactgctacctggactgctgttgcagcccagcctagcaccctatggtttgataccaggtgtgtgatcaccaagaaggtgacacgtaatctgcactgatagctgggcagtttatcaaggcttaaccttgtggctaactacctagaagttacagaagtggctagtcacaggccatgtggccaggtatggggacaaacagtaacctgttgttgcccgccccaacacacattggggtaacatcaccatgtagtgattgctcactataacctgaaattattgcgtggctctatgtatacattgggcctgtgtgcccagagcctatgtgtccccaaagtttatatgtcaggcctgtgtgccaaacctatatattgggcatgtctccctcggccaagtgcaggccagcgtgactcagcgagtttggaacgcaggtatataacctgtttgtgtaagctcatacttggcttacagccactattgtctgtaaat

SEQ ID NO: 9327 - DNA, 713 bp, Homo sapiens
  source 1..713: mol_type = other DNA
atacataggtgtatatacatgtctcatatacataggtgtatatacatgtctcatatacataggtgtatatacatgtctcatatacataggtgtatatacatgtctcatatacataggtgtatatacatgtctcatatacataggtgtatatacatgtctcatatacataggtgtatatatatgtctcatatataggtgtatatatatgtctcatatatataggtgtatatatatgtctcatatatataggtgtatatatatgtctcatatatataggtgtatatatatgtctcatatatataggtatatatttcaactacttatccctaatgaataaagttactaatgtttccattcagggtgatagatgtcttttaaaaattctatttttataattttgatggagaatgtgattgtgaacatgaattttaaaaagtccagccaacttgctaaactctcttattaatcatcataatttgagtgttagattatcttggattttttatgtaaaccacgcagcatgttccttaaaatttatgtatttagaattcatattctaattaggcaatgcaatcaactctaaaattaaaagtacatttaaaacatgctttttactctcttctattcgcaaatatagcaaattatgaaaataattctgcaccttgcctttaaaaatttaaaagccagagaggcccggaagtggcttctgtgcc

SEQ ID NO: 9328 - DNA, 440 bp, Homo sapiens
  source 1..440: mol_type = other DNA
tatatgggtatgatctgataaggtatgaattttataatcagtttatctaattccagaacaatatttgttgatatttttgttggaatactgacctctttgagtctttccaagaacctcattaggaatgttttaaagcttttatctcgtaactcgttatcattgattattcacatatatgaaggtcgttgattttagtgtgttaactttatatcttgctattttactaaattatcggttttctgacatataatcatacatcagcacatgccggcagaaaccagccggctggcccccgctaagcgctttgggaaggtcccccggagaacatccctttgaggcatctctaatcagagcctcgaccacccatcgggtcgggggcttcctagagcggccgcggaagtgcgccccgcgcgggctggttcttagaccccccgtggccg

SEQ ID NO: 9329 - DNA, 331 bp, Homo sapiens
  source 1..331: mol_type = other DNA
agtgactgggaaaatgatcttttcagacaaaaattttatacagaatttttctaagcgtaagatttcttttttatttagagatttctaaaagagatgttctgattattcaaagactctctacaaatattccttgggcatctctgcgctaccagaggtatggaggaacccagtgacaagaatgctccgtgactaaacaactgaggctcattctggtcccgtaaaatggaaacaatggactaactcttacatttctttttaagtctgatttaggaccgtgatgccagataactaggtaattccggagttaattctgtgagcgtggctcaccggg

SEQ ID NO: 9330 - DNA, 375 bp, Homo sapiens
  source 1..375: mol_type = other DNA
gaagtcaattcattgcccgaaatccagatcttggtttctatataccatttttcactgatgtactgtagcttcatgaagcaatggtgagtgaagtgcacaaaagcctcacttgcagtgagctgagatcgcataactgaccaaattttaaataatttgagcatcaacataataataacagtaattatttgtaaaggaatccatgagttcaactaataaatgtagaaatgtgcttcagtttcctcacctgttaaatggagatgtaatgaattaatacgtgttaaaacactatgttgggaagacaatgtgtcacctagtatctcactcttcctagaaggaacacagccggaaccgctgtttcgcggagagcgggccgcg

SEQ ID NO: 9331 - DNA, 533 bp, Homo sapiens
  source 1..533: mol_type = other DNA
attttaatggataaacaatcttatggttcaaaaagtaaaagatgtaacgaaatctacttcttactgcgtccccatttcacacgacacagaaatgttaccatctgataattaaacctttctttttctaaacaaaactggggctgtttaataaaaggcctcacgatcctccagcctcttggggaggccaggtgtttgcgctccccagcacctatacaaaggagtctccctctgtcccgcaggctggagtgcagtggcgatctcgggtcactggggattctgctgcctcagcctcctgagtagctgagacgctgggattacaggcgcgagccactgcgcgcggccaaagccagctttcttttgcaggggctgagacctggacgaggggcccgggcccggcagccgctgaagtttgtaggcccggagcgtgtggcaccatctgctcttgcgagtggcggagcctcctcggcctttccaagaggaagcactcgctggaagcgcgagccaagccccgcccccgcgagccgcctcttccg

SEQ ID NO: 9332 - DNA, 105 bp, Homo sapiens
  source 1..105: mol_type = other DNA
cctcccagactgagcctcgccggtgtcaggcagagcccagcagagggcggcagggtgctgggagaccctgagctcccaccccgctgccgcgcgccgcccgtgacg

SEQ ID NO: 9333 - DNA, 345 bp, Homo sapiens
  source 1..345: mol_type = other DNA
gtgtacaatgggtttacagggaccccatcataagtgaaggagcacctgtacttacttcattaaaatgctgaaacagtaaataaggtaacatttaataatatgttgtgcagttcttgaaatttaagtactcaccaaatattatttcattcatttattaattcatttgtgcatttagtaaacatttataaattatttcctgtgctactcttttctaaagattacagacaagcagccgtgtctcaaagatctttcctgagaaaagggaaaagttttcaacacagaaagaccatcccatgtttagaagtatgtgatcagaaagcattctttgtctattaactcctgccc

SEQ ID NO: 9334 - DNA, 548 bp, Homo sapiens
  source 1..548: mol_type = other DNA
ctccaccgcccgccccaccgcgctgtgggcggtccagggcggggctgggatccggggcggctcccggggctcgggttgtgggaggcgccctctccgggagctctccctggtccccggctccccgctcccgtggctgccgccgccccggggaagaagagacaggtggccaggctggaggcggccgggcctggggccttgaggcccggggagagccggggagccgggcccgcgcgccgaggtaagagccagggccccgggttagcagggcccagccgatgccgggagcgtgggtaagccaggcttctgcgagccgcgggggccggcaggaggagggtggggacaggctttctctcctcctctccccccaccccgcgcggggctccgcccccgcctcctccgcggggcgctctcttggtccccaggctgagcccggtcggagcctgcgaggcaaccggcgagtagtctccgggtgcgggccgcgccggcggggctcggtccagtcctcgccactcttcctccgccccccgggcgcgggcggggcgcagacc

SEQ ID NO: 9335 - DNA, 320 bp, Homo sapiens
  source 1..320: mol_type = other DNA
ctggagtacatcaggtaatactggttctgcgcgttccctgcagagcaggcgagtagcaatgctgctggaccatggagctgctctagtccaggtccctcggcagtgaccggcgccccccgacgagtgcgtgtgcaccagggcatctccaccgcccgccccaccgcgctgtgggcggtccagggcggggctgggatccggggcggctcccggggctcgggttgtgggaggcgccctctccgggagctctccctggtccccggctccccgctcccgtggctgccgccgccccggggaagaagagacaggtggccaggctggag

SEQ ID NO: 9336 - DNA, 292 bp, Homo sapiens
  source 1..292: mol_type = other DNA
cagccagaaagcagctttttttttgtccccccgcttctggagccgtcaaaaaggctggagtacatcaggtaatactggttctgcgcgttccctgcagagcaggcgagtagcaatgctgctggaccatggagctgctctagtccaggtccctcggcagtgaccggcgccccccgacgagtgcgtgtgcaccagggcatctccaccgcccgccccaccgcgctgtgggcggtccagggcggggctgggatccggggcggctcccggggctcgggttgtgggaggcgccctctcc

SEQ ID NO: 9337 - DNA, 382 bp, Homo sapiens
  source 1..382: mol_type = other DNA
ttgaaacatggctagtgtaatcaatgaaccaaatttttaattttatttaattgtaattaattttaagtggccacatgtatttttggaacctgctaccaatgctggtctcacacttgcaattctcagctgagccaagaggtgagagaaaggttccagatctcactctcccctgtgacactgaacttcccaaaaatatagaaacaggaaaaagaaatctaagttttctttctttttttaagaaccaataataatttctccccctagaagacccttcaaaggttgtgtaccaggcagcctctgctccattgctctgggggggtggggaaggcaaaccctggtcatcccctcctgtttctgcgggcacagctgcagcaattaccgg

SEQ ID NO: 9338 - DNA, 345 bp, Homo sapiens
  source 1..345: mol_type = other DNA
acaactacaagctgccccttcaaagtttctacttggaatataagttacagattaatgaaaatagaaagatttcccaaagatacttattctcatgttttataaaagatcagggaaatgtcaacggatgacataatgatcttatgaaatcctacttaatgagccgtagcacgaggccggttgcgagctgcagaaagcccacgctcgccagcgaagaaatcattatttggcaacgtacggttttcagggggatataccccgcgaaaatttgctggaagcgcagcattggttaccaattttgtgctcaaggagacgcaacaattaattatgacgtagccggctctatct

SEQ ID NO: 9339 - DNA, 329 bp, Homo sapiens
  source 1..329: mol_type = other DNA
attccaggagtgcctagacattctttagtactatagtaattcagataagatgctcttgaaagataacttttgtatttttaatagggacaaggtttcgccatattggccacgctgaggtcgaacttctgacctcaggtgatccgccattacaggtgtgagccaccgctctcagctgcctcagcctcctgagtagctggggttacaggcgcccgccaccacgcctgtcaggttcttcttcttttagagtcaattaagactgggaaaggctacttgggaccagcagctatcagttggttgggaagcttgaccttggcgggctcaccctgcgg

SEQ ID NO: 9340 - DNA, 253 bp, Homo sapiens
  source 1..253: mol_type = other DNA
tctaaaaaaacctactttctaagaaacgtgcatatatttttataaaatagcctatactgtaatttacggaatatgttggcagtatgtaactacattcagatttacaaatcagacatggcatttgtaaaaggcaccgttttctttagagaaacccagcacggtagggtcattactattgctagcaggactcagcttggttgcagcgtctggcccggcaatacccatggctgcgcgctgtcacgttacggcggaa

SEQ ID NO: 9341 - DNA, 275 bp, Homo sapiens
  source 1..275: mol_type = other DNA
ccagggtagggctccacttctgcctctgtgaactaccagagttgacagaggtagagctgaaagagctctgccccgactccctgaggccgaagtgtgggcgcctgctccaggatctgtgcttccggcccccatgtgacctggaatgactcgcaccttggcaatgtgggcgcacatgccaagagtgagcctgggcacccggcccatgcgcgtaccagagcgccctctagtgaccgcggctctgggaacctgaggcgttacgcaaggcctggtgtttc

SEQ ID NO: 9342 - DNA, 514 bp, Homo sapiens
  source 1..514: mol_type = other DNA
actaaataaaataacatcattaaaattactttcacctgtttagactatttttatatggccactaggaaattttaaattgcatatggatctgacagcaaattatttatggtcaaagctgaataacctggctgggcctcagctttctcatttatgaaatggagatcctaatagcgacacagaaataagatcatacttttaaattgcttgtatcaatgtaagttgtaccgtcattgtaaataaattctggccaaattgcttgtatcaatgtaagttgtaccgtcattttgaggcctgcagcaggccagttgaggcatcaccattgaagttgctggtgcagtgtacaccctggcacaaggaccttatctcaagccctgggctgctttggagacagctggccatatggcagaaaggctgccaaaagaatatttcttctgacagtggacagctgacatatcaccactttccttcgccagcctgctgttggcaggagaatagaaccctggctgccacccag

SEQ ID NO: 9343 - DNA, 305 bp, Homo sapiens
  source 1..305: mol_type = other DNA
tggtatggttgaaaagggcttattatgaataataaaagatacactcatcagaacataaccatgtggtaagttgaggtgcatcaggaattaagatgattcaacttaaaatttttgactttatcttcagtgaattcattatatatatatctcttggacccttagaagtttcaagtgacagcccttattagtggcaccccttaggggctccctcgacacctggatcctggggttccataagcaggtaattttcctggtaattcagtgtttctaggaaagccatatgaacacatatgattggcatgata

SEQ ID NO: 9344 - DNA, 575 bp, Homo sapiens
  source 1..575: mol_type = other DNA
ccgagtagctgggacggtttcaccgtgttaaccaggatggtctagattctgacctcgtgatcccgccaaaggcttttcacaaatttaaaaatgtaaaatatcttattaatgactttttatatggatcacatattgaaatgataatattttggaaatataggactaaataaaataacatcattaaaattactttcacctgtttagactatttttatatggccactaggaaattttaaattgcatatggatctgacagcaaattatttatggtcaaagctgaataacctggctgggcctcagctttctcatttatgaaatggagatcctaatagcgacacagaaataagatcatacttttaaattgcttgtatcaatgtaagttgtaccgtcattgtaaataaattctggccaaattgcttgtatcaatgtaagttgtaccgtcattttgaggcctgcagcaggccagttgaggcatcaccattgaagttgctggtgcagtgtacaccctggcacaaggaccttatctcaagccctgggctgctttggagacagctggccatatggcagaaaggctg

SEQ ID NO: 9345 - DNA, 364 bp, Homo sapiens
  source 1..364: mol_type = other DNA
aagatcgcgctactgcactccatcccgggagaagaaaaaaaagaaatccggtatgtattttacatatacagcatgccgccactcagtagacacatgtggctggtggctcctgtcacccagtgggtgacctttggaaagtcactttacatttggaaagtcagtttacatttctttctctgtaaaatgaaggtaataatgtttgagagggttattaaaattgaatgtagtaatataaaaatactaaacccttggttgaaactgattatctgactaatcgttttctaatgtgtatcaacataaatcatttgtaaaaataaataaataaataaataaataaataaataaataaataaataaaatagtc

SEQ ID NO: 9346 - DNA, 354 bp, Homo sapiens
  source 1..354: mol_type = other DNA
tcacccagtgggtgacctttggaaagtcactttacatttggaaagtcagtttacatttctttctctgtaaaatgaaggtaataatgtttgagagggttattaaaattgaatgtagtaatataaaaatactaaacccttggttgaaactgattatctgactaatcgttttctaatgtgtatcaacataaatcatttgtaaaaataaataaataaataaataaataaataaataaataaataaataaaatagtcactccagcctggactttgatgctgtgggcacgcctcagagccagaagttatggtgtgctctgttctccaccctagggaccagaaggagccaggactggaatt

SEQ ID NO: 9347 - DNA, 562 bp, Homo sapiens
  source 1..562: mol_type = other DNA
ctgccgcctggctggccgggaaagacggggatcttgacgcggcggcgcctgggacacggcaaccgcagcacagggcatggccctgcggctggaccggacgcggcggctgcaggcagagcaggcgcaggctgggcagcggcgtacgcttcggcgacgtcagcttccggggccgtggacgggggcgcgcccgagcctcctggaaacctccccaccaaggacctggggacctctggtttctaaattcagcgtcgaggccagacccttaagctcctggaacctcagttttcctttgacaattttacctaggaagtaataattttcgtaaataggtctctgagagtattgcgagcgccacgggtggaaaggggattattgccctctcaagagtcctacgtaggtgactcctaagccttacgcgccaaactcaggctgcggctccctggtgccccaccgcccgcggctgtctgggagttcggcaggagccaatcccggggctggtccgggagaaatctcggcgaagggccccgaatagccgggagattacggcgcgctggttgctcgt

SEQ ID NO: 9348 - DNA, 283 bp, Homo sapiens
  source 1..283: mol_type = other DNA
tatatgcctcctggttatctacaaacagaaaggctaaggaggctcactgcccagttagtggaattagaacaagtgctaaaaaggtatcaaatgtaattttctcaaatttaatcttcttcaattcttggcacaaaaaaaggaacatagcatgtgtgatcccaaatctttataccttagatactggattatattttcagcaagtaaatagtttcttaaacagcagcacaatttacaccggaaattagggccctttctcaccgaggagagtacagcaaaatctgct

SEQ ID NO: 9349 - DNA, 602 bp, Homo sapiens
  source 1..602: mol_type = other DNA
actccagcgggataggtatgacgtgccagcttagccccgcaggtccgccacgctctccccagactggcccgaagagaggaaaagtgtgccccgccctcttcgtcgactttcagctgcaccgggaggcggcggcgcctggccagagccggggcctggagcctggactagacagcctcgccggccggggcgccagtccagcgccctgcgggcaatgggcttcagcgctcgagcacgcgcatgcgcgggcctgtatctccggattcctcgggtcacctggacgccacaccgctagacccggccgcggccgcccgccgacaccccaggagcctcggcgcggcttccgtcgcgccgcgggggaggaaggagggaggcagcgctccggcggctccgcgccccgcactcccggacccgaagccgggaaggtaggtgctgtcccgccgccgcgcccgagcctggggcctgcgctcgccggccggctccgcaagccgcgtcccagcgccccgcgactgcgtcaccggccccccgacagctgcctccgcccgcctcgggcccgggcggacgttttgccgccccggcgacgtcagcgcgtccggcgttgcttg

SEQ ID NO: 9350 - DNA, 416 bp, Homo sapiens
  source 1..416: mol_type = other DNA
agggtgttagttatcaatagctatattgaaagattccagtcactacaaatagactcgttgcctttctgagctcagcaatatttaatatggttgccataatttagtgaaatgtcattccaagaagagagcagatttcctttaggctagtctgatggataaaaggaagaataatttcagattttcctgaaaatgatagaacaaaagttatgcatggacttttttttttttaagcggcccaagacacttcttccagtccagtggattaatcataaagctcttataacattaaactttaaaatatggttaatttaagaaatgttaatatttttatgacttttttacttctcagattcctttcttgtctgttagaaacgtatgtcaaacatcaggagaagtatgctgagaagcttctcttt

SEQ ID NO: 9351 - DNA, 250 bp, Homo sapiens
  source 1..250: mol_type = other DNA
gtgatataaatgaccaagcttcatccttccttctaggatgtcaaagaacaaattattgggaataataatcccttttccccatgataaggtagaatcagattctacttgtgttgcatgaaatacaggaatattcctagaaagttcggaggctcactcaagatggagaattttaatttctccctaaaaatgttaacatctgatggaaaagaacttcagcaattttccccgacagtactttgccctaaggaaa

SEQ ID NO: 9352 - DNA, 245 bp, Homo sapiens
  source 1..245: mol_type = other DNA
aacccttgtgaaactagttccagaggaggttcagtaactgatagtcactatagatttcttacctaagcctaggagcactcagaaagtgaggatcacctactgtgtgtccagcactgcatacaggcatctgcctcggacatgggatttgtttaatgagtttgtgaggcctccgggaggctcccgagggcgcggggactacgtttcccaggaggcctcgcgcggacgcccgggcggggctgtgcgag

SEQ ID NO: 9353 - DNA, 438 bp, Homo sapiens
  source 1..438: mol_type = other DNA
tatacgttgtttattttggaaaaattaaaaattaagttttttttcattaaagatatgttatttccgatgctgggtgtggtggcacacgcctgtagttccagttactggcttgaacaggttgcagtgagccgagatcatgccactgcactccagcctctgactcaaaaaaaaaaaaaagttgtttctattaacatgtaatgggttattaatattctcttaaatgaattaatatttttaatattttgttttaatatcttttaatttatatatgataaaaattgatacaatccacagaaacaaaatttatttgggtcctcactaatttcttttttctaacctcaggtgatcagcccgccttggaacctaaaagtttaagaactgctgattgctgggaaactctgcagtttcgggtttctagagaagccaatcgcgtcgccg

SEQ ID NO: 9354 - DNA, 432 bp, Homo sapiens
  source 1..432: mol_type = other DNA
acttccggaaggttgcggagaacatctgcggcggccgcattccggagccaactgcctccctccgtctctgccaggcatggcggctttctataaatgctttgaaaaaattactcttttcttcccagagtgtgtcacagagtcaacaggctctcgggccagagggtcccaaagcaacctggacgcagtctcggctttccactaaggtcaagcccggggctttgtagtatagcccgggagcgaacgcgccccccctcctccgaacgcgagttggtagcgtccgtgacggccgccggggcgccctctcggtgccactggctgctcctggagggaagccgccttccatcgccgccgcggcggtaattctgtcgggcccgcccgctgacgtcacctgctagccccgcctcctctagggtcccgggcccctgcggcggg

SEQ ID NO: 9355 - DNA, 516 bp, Homo sapiens
  source 1..516: mol_type = other DNA
ttcccccaaagctctgacttccgggtaggcgggaaagccgggaccagcgccccctcccaccctcaggctcccggctcccgctgcggctgttggaactggagcgcagcccatgaagccctgcggggaggggccggtgacgccagtgctggccagctctcaggggccataagatttgggaccctcccggatgtgcgtggggggagtcactccttcagggagcagtggggacggcgccccgtgctagctggagggattcccctcccccatccatccttccccaccccttccagatgtagggggggtgggggatcccctccgcgataggccgcgagggttgacgcggtcccacgaccccctcccacggggcacgatgtgcggaagcccgagcccggcatggcccggaccagtcacctggcccgccctccgccgagctcccgccgcctcaactgactgccccccggggcagcccccgccgcaggggcccgggaccctagaggaggcggggctagcaggtga

SEQ ID NO: 9356 - DNA, 549 bp, Homo sapiens
  source 1..549: mol_type = other DNA
tgacgccagtgctggccagctctcaggggccataagatttgggaccctcccggatgtgcgtggggggagtcactccttcagggagcagtggggacggcgccccgtgctagctggagggattcccctcccccatccatccttccccaccccttccagatgtagggggggtgggggatcccctccgcgataggccgcgagggttgacgcggtcccacgaccccctcccacggggcacgatgtgcggaagcccgagcccggcatggcccggaccagtcacctggcccgccctccgccgagctcccgccgcctcaactgactgccccccggggcagcccccgccgcaggggcccgggaccctagaggaggcggggctagcaggtgacgtcagcgggcgggcccgacagaattaccgccgcggcggcgatggaaggcggcttccctccaggagcagccagtggcaccgagagggcgccccggcggccgtcacggacgctaccaactcgcgttcggaggagggggggcgcgttcgctcccgggctatactacaaa

SEQ ID NO: 9357 - DNA, 243 bp, Homo sapiens
  source 1..243: mol_type = other DNA
aaaggactgatgatttgtattacttatttcttaattcaaccagtaaagtaaagatactgcaactttttttcttcaccggccagaggactagtttagagcacctgtaccttttcagtcaaagtctggatacaaactgtcactgcggctgcgcaaaagagccccgccttctccagaaaggtctggggcggacgggcttgacaggcatgtgcactcttcccgctcgggcagcgggggctgctgctg

SEQ ID NO: 9358 - DNA, 401 bp, Homo sapiens
  source 1..401: mol_type = other DNA
cgtcagcgggcgggcccgacagaattaccgccgcggcggcgatggaaggcggcttccctccaggagcagccagtggcaccgagagggcgccccggcggccgtcacggacgctaccaactcgcgttcggaggagggggggcgcgttcgctcccgggctatactacaaagccccgggcttgaccttagtggaaagccgagactgcgtccaggttgctttgggaccctctggcccgagagcctgttgactctgtgacacactctgggaagaaaagagtaattttttcaaagcatttatagaaagccgccatgcctggcagagacggagggaggcagttggctccggaatgcggccgccgcagatgttctccgcaaccttccggaagtggaatggcgggagcctc

SEQ ID NO: 9359 - DNA, 381 bp, Homo sapiens
  source 1..381: mol_type = other DNA
tttaaaatagtgaggatgcacagtatatagagtgcttaattaaaaacaagcgcttaacaaatgctttttaagcttggagtcaccctctcttgagacacaggctcccaaggtgtgtgtatgcgcgcccgggcccacggcacgcatgcgcagtgcaggggcccgatccactcgggctccggcggctgctgcttgggcgccttcggcatcgcggtggcagttacagctactgtggcggcgcccggtgctatttccgcttccggcggcggggaaccccgatggggctggctctccaagctggcgcggccaaccccgcccccgggctgcgcacgtgcgagcttcgccgtcccctcagtggaggcgtggcctgcaatgacggagcgg

SEQ ID NO: 9360 - DNA, 411 bp, Homo sapiens
  source 1..411: mol_type = other DNA
agcatgattgtagtggtcaccttgctcaagctcccatattaagtggtagagttagaagcttatttaagtagtttattgtatgtcaattatatctcagtaaagcgacgatccactcgggctccggcagctgctgcttgggcgccttcggcatcgcggtggcagaactagaaacttgaaactagaatatgctttttaaaaaaacaaatactagtaggaaattattcgcggcgtcgggaggtcacggcgtcgtttacgcgactggagcaagcggacgccggccccgctccgtcattgcaggccacgcctccactgaggggacggcgaagctcgcacgtgcgcagcccgggggcggggttggccgcgccagcttggagagccagccccatcggggttccccgccgccggaagcgg

SEQ ID NO: 9361 - DNA, 132 bp, Homo sapiens
  source 1..132: mol_type = other DNA
aaagtttgccttttaagcaatgcgggcgagttgtcatttgataaaagactccacccgagcgggcggccgccattctggggtaaattttctcggagaaagacagggctgcttgggttctgcgacccccctccc

SEQ ID NO: 9362 - DNA, 243 bp, Homo sapiens
  source 1..243: mol_type = other DNA
attccatcacttaagttattttactgaaatggcattttggaaaaagtgggaaggtctccactcgtggattcctgacagtggagcgacaacctcgagaaggtataaccaacttgaggtttcctgaactcggccccacgtttgcgtctgcgtcacaatcgaattagaccccaaaattgcggttttttttggttaaagtttgccttttaagcaaatgcgggcgagttgtcatttgataaaagactc

SEQ ID NO: 9363 - DNA, 168 bp, Homo sapiens
  source 1..168: mol_type = other DNA
cctgtctttctccgagaaaatttaccccagaatggcggccgcccgctcgggtggagtcttttatcaaatgacaactcgcccgcatttgcttaaaaggcaaactttaaccaaaaaaaaccgcaattttggggtctaattcgattgtgacgcagacgcaaacgtggggcc

SEQ ID NO: 9364 - DNA, 249 bp, Homo sapiens
  source 1..249: mol_type = other DNA
ccagcctgggcacgtgcacaccttagtctcaactattgcagtgagttgcagtcacacccctgcactccagcctggatgtgtatgggaaaccccaacccctatatattgtaaatagatggggcttaagccagccttgcctgtgacgtgggcccccactccacagcatggcccactgttcactgggccaaggaagactacgttgccatggcactcactgccgtgggatgccgggggccctgtcagttgcca

SEQ ID NO: 9365 - DNA, 328 bp, Homo sapiens
  source 1..328: mol_type = other DNA
aatttggaggttccagcttcacctaccaggtctgccagtgaggagcaggccttgtcacatctggggagaagccctccacaggccccggccccgccagcccagtcctggacagtgggtggtgcaggtagcaccaggccttgataatagatggatacattcattcattcattcattcagcaaagtcatttgtatcttttaaccagaccaataaaagtatttatttttatcacaagagctgttgaaaaatttgactcatttcagctttttgctcaaaggcctcagctgtgaatacagcgcttgcgcaagcgcactcaggcagtctccgagc

SEQ ID NO: 9366 - DNA, 406 bp, Homo sapiens
  source 1..406: mol_type = other DNA
aatttggaggttccagcttcacctaccaggtctgccagtgaggagcaggccttgtcacatctggggagaagccctccacaggccccggccccgccagcccagtcctggacagtgggtggtgcaggtagcaccaggccttgataatagatggatacattcattcattcattcattcagcaaagtcatttgtatcttttaaccagaccaataaaagtatttatttttatcacaagagctgttgaaaaatttgactcatttcagctttttgctcaaaggcctcagctgtgaatacagcgcttgcgcaagcgcactcaggcagtctccgagcccgcgggcgcaggcgcgcttacagccgacagagcgcttcagccgcttccctcgagcctgcagtgcgcaagcgcgggac

SEQ ID NO: 9367 - DNA, 565 bp, Homo sapiens
  source 1..565: mol_type = other DNA
acctaccaggtctgccagtgaggagcaggccttgtcacatctggggagaagccctccacaggccccggccccgccagcccagtcctggacagtgggtggtgcaggtagcaccaggccttgataatagatggatacattcattcattcattcattcagcaaagtcatttgtatcttttaaccagaccaataaaagtatttatttttatcacaagagctgttgaaaaatttgactcatttcagctttttgctcaaaggcctcagctgtgaatacagcgcttgcgcaagcgcactcaggcagtctccgagcccgcgggcgcaggcgcgcttacagccgacagagcgcttcagccgcttccctcgagcctgcagtgcgcaagcgcgggaccttcacgaagccggctctggggcgcgctcacccctgtgaggaggccggaggtcgggtaccagcccagccggggtgcggcccggcgtctcggcccttgcctgcgcgcctaccaggctcgaccccaggtgagaccctcctcaaagccggtgcgtggggcggagcgcgcgctgggttccgcg

SEQ ID NO: 9368 - DNA, 379 bp, Homo sapiens
  source 1..379: mol_type = other DNA
cggatcacgaggtctaggagttcgagaccagcctgcccagctacaatgcacttcagcctgttatcgcaagaatcatgtaatacatacttgatgagttaacgaataacaggttttattgctaggaatctgaattctatcatgtaattaggaaggctggccttcactctcctgggtttaccgacgttgaaactgcaaggggaaggaaccccccaggggatcgtctcctgcagggaaggcgggcggaccgctcgggtacctcggtccccgatggtgtcctagaggcgccgtctctgctgggggcgtggccatcttgccagcccgggcgcaggggcccgaaccgggtgcacactggccggccttcctgccaggaccgctctcc

SEQ ID NO: 9369 - DNA, 261 bp, Homo sapiens
  source 1..261: mol_type = other DNA
catccggcaggagcggcagcagcagcagcagcaacaaccctgggcctctggaggcccgggagcggagacccagccctgggttgagcctgaggcctctggaggctcgggactctcccgacgagtctgagatctgcctccagagtcagcagagaagcttctggaatctcccggcgggggctcagggcaggcctctgagagccctgcagaactgctgctctgtgccctcccccctcccaccagaggacgctgggactggaggcc

SEQ ID NO: 9370 - DNA, 302 bp, Homo sapiens
  source 1..302: mol_type = other DNA
agcaagactgcacctggccttgcttacttttaaataagcagcaaaaatgcagaacaagagtggctgggcgccatcttggccaggctggtctccggccaacaatgctaatatgttttatgagcatggacctgaaatagaattttgtatagtttttggctctataaaatttcaaaatgtaaatttggtaaggaacttttgatttgtcctctgcatccattaaattaatttcacttgttgaatgaatgcgtgagcgaagcactcacagactgaccactcgcagaggccgaaaaagtacagcccct

SEQ ID NO: 9371 - DNA, 436 bp, Homo sapiens
  source 1..436: mol_type = other DNA
tgggaagggcgggccccgctcggagcagctgccgcttcctccccccacgaggggcctgagtcacgggccaccgccctgggtcggcgagctggggtcccgcagcgagtcccacgcggggtgggagggatctaggccccgccctctcctcggcgacaaagcggtcgccgcccccgcccggccctccgcaccccctcccccgggggtcccgcggcctgtgagttgaggggcccctgtgtccctggcccggaccctacagcggggtggagacggccggctctgtcacggcttcatgagagcggggccggcccttgcgccagggttctgggaacgcgctggcagccctgacgcccgggttccgaaagtctcgggggtggctatttcccccgacccgcctcgggggcggagtgcggggcagagggggcggtgctggaagcgg

SEQ ID NO: 9372 - DNA, 296 bp, Homo sapiens
  source 1..296: mol_type = other DNA
ccttaggccctgcctctgggctcagaccccaacctagtcaaggggctggagtctgggcagccaccacgctggggttcggccacccccgcagacccgcccccactttgccagagcggctgggaagggcgggccccgctcggagcagctgccgcttcctccccccacgaggggcctgagtcacgggccaccgccctgggtcggcgagctggggtcccgcagcgagtcccacgcggggtgggagggatctaggccccgccctctcctcggcgacaaagcggtcgccgcccccgcccggc

SEQ ID NO: 9373 - DNA, 445 bp, Homo sapiens
  source 1..445: mol_type = other DNA
ccgcgcccggctttctccttagcctacaggattagcatctatctataagttgatggaattagtctaatgagacaaaggttactatcacaaatattttaacatgtttattctcgtggttaacaaacctttcagtatttacagagaagttatttgccattcttaatccagtcaaactttatagtaagttacagaatttattctgtatattgtattctgtacaatgtattccatacattaatttattttgtggtaaaacagtaacttttcattttagatcggctgcagagccgctttcccttctgtgacggccacagctggatggggaaggctgcgccaggcgggccggaagcctggcggtggcgtgcaggagccccgccctcctgggctggattcagccgggggcggggccgcgggcggggcctgtggcagcgggaatcccgacccc

SEQ ID NO: 9374 - DNA, 377 bp, Homo sapiens
  source 1..377: mol_type = other DNA
ttgcagagttgcagtggcggccactcagtgaagcctatcaggcatctcccacgtaggagacttctagtttcacaagtttctctaaacattttatgtttctctttcaaaacaatggctcgaaaatttccaaggaaatagcaagagttcccttcttgaagtatttgacggaggcagacatgctcactttttgtattgcgcaaggtcgtttttcatttacaaaacaaaaaccccactgcgctcgtccactggctcagaggccaatggacgcctggtacatgaccggcatcgactaatcagggccaggctcgatgaggcttcccctaccgcgcgcggggccgattctcccgcctcccagccccggcgcacgcgcgccccgc

SEQ ID NO: 9375 - DNA, 637 bp, Homo sapiens
  source 1..637: mol_type = other DNA
cttgaagtcgcctttagggttctgtgaacacaaataaaattgatttactgtctgcagtcccactcctcccggccttcagatggcaaggaccggcgggaggcgccgtggccgagtccccagcccgcgcacctccctgggcccaggagccccttttcctggagtcacagaacccagcatccggttgccggagttgccccgcggcgaatccgagatgtggcaatcacccttacgccagggtgccaggcggaggtcaagtccctcacccgggggcggagcgtggcgcggcgtgggcgggattcccggctcatgactggggcggcagggatgtggccctccccgggctaaccaggcagcccggctgggcccgagagccagcgggcgggcgggctgcggactctagcggggcctgccgggaaaggggcgggccgagcgcactgggccgaggcggggtcgcgtctgccgcagcaacggggtgcggcagggtggggaacgcgggagcggggccagctcccaggaaagctggtctgcgagcggcccctgcccggctcccaggtccctgcgcgaccccgcccttcccgagaccccagccgggctgccgcccgcgtcccggaaggtgagtggggaggcctctgggcgc

SEQ ID NO: 9376 - DNA, 497 bp, Homo sapiens
  source 1..497: mol_type = other DNA
aattaatatttatatgtatttatgtgtacgtaatatttattttaacttacttcttgaagtcgcctttagggttctgtgaacacaaataaaattgatttactgtctgcagtcccactcctcccggccttcagatggcaaggaccggcgggaggcgccgtggccgagtccccagcccgcgcacctccctgggcccaggagccccttttcctggagtcacagaacccagcatccggttgccggagttgccccgcggcgaatccgagatgtggcaatcacccttacgccagggtgccaggcggaggtcaagtccctcacccgggggcggagcgtggcgcggcgtgggcgggattcccggctcatgactggggcggcagggatgtggccctccccgggctaaccaggcagcccggctgggcccgagagccagcgggcgggcgggctgcggactctagcggggcctgccgggaaaggggcgggccgagcgcactgggccgagg

SEQ ID NO: 9377 - DNA, 134 bp, Homo sapiens
  source 1..134: mol_type = other DNA
ttgctgcaaagcacaattctaaggatacctacaagtgcatgaatgcgtgcatatagaccagccgagatcgcgcctctgcattccagcaggtgccacatgcctgctgccaaccgctccccagctgcgggaggagg

SEQ ID NO: 9378 - DNA, 261 bp, Homo sapiens
  source 1..261: mol_type = other DNA
gagtggggaaaaagcacctcccacccagaccctctggcccactacggccagagctggctgggcctgagggaggcttgccctgaggactcctgagtccccctcccactccactccgttgggagcccaggggaatcagggcctgggcgtctggacccccgggtcccttagaacctggctggacaggtgagccctgagacctgagctctgctcccttctctgggctaactcccgcagctgggctgggccgagcaccaggaaccg

SEQ ID NO: 9379 - DNA, 560 bp, Homo sapiens
  source 1..560: mol_type = other DNA
cagaccctctggcccactacggccagagctggctgggcctgagggaggcttgccctgaggactcctgagtccccctcccactccactccgttgggagcccaggggaatcagggcctgggcgtctggacccccgggtcccttagaacctggctggacaggtgagccctgagacctgagctctgctcccttctctgggctaactcccgcagctgggctgggccgagcaccaggaaccgatcccagaagtaggaggggcgtcttcccctcgtgggccctgagcgggactgcagccagccccctggggcgccagcgggctgggcgcggagccggccggaggcagcggcgcgggcggctgggcggcctgggagcgcccaggcgggcttggcgggcgggttacctgggggaggccgggccgggcgctagcgcgcggggtgggcgtggcgggcgcggggcctggagctcggcgccgggcgtgggagccactgggcgtcccgaggcgagggggaggcggcgcctgggcccgagccgccccagccctggctcctctccccggaacaggc

SEQ ID NO: 9380 - DNA, 302 bp, Homo sapiens
  source 1..302: mol_type = other DNA
aagattacaggccatttttaattataatagacattgctagattgctttccaaatagaagacttttatatgttacagccttaaaaaaatatcttgtcattaaaaaaaatgtttgttggcaattgtgttataaacatttttattttgcccattcctgattggagaaatgggactagtttcttcatgtgttaaatatggatagtaatagtatctaccttatgaagtgtaaaaatatagctgatgctgttaaacaatgactgttgttgttggcccccacccccttaggcccgagggatcaggagct

SEQ ID NO: 9381 - DNA, 186 bp, Homo sapiens
  source 1..186: mol_type = other DNA
tcaggttgggctcagtggctcatgcctgtaatcccttgccgtgagctgatgcaactgcgagagagagaaatgggggtctccctctgtcacccaggctgtcccaagtagctgggggtcacagctctgagccacctcgccaggctgcaggcattgccaaaaatagttggtgtcttaaaaactgtattt

SEQ ID NO: 9382 - DNA, 157 bp, Homo sapiens
  source 1..157: mol_type = other DNA
aaatagttggtgtcttaaaaactgtatttgcgtgagtcaccgcgcccggcctggagtgtggctcggaagccctctcccgctccagccggttacacgcgccgttagcagcgtgggcggagttggttctgccttcgcggaaccaactggtccagctcag

SEQ ID NO: 9383 - DNA, 406 bp, Homo sapiens
  source 1..406: mol_type = other DNA
accccttcaaggtgcaggatcttagggggcctgagccctgggggcaccctgccacatgtctggctgtcagccccttctcctgtacagggagctcccatccttggctaagaactgggtcggatgctctttctggagcagcctttgccacaggctgctgtagctcttccttggagcacttccaggaagtgttaatagatatatcacaaaacttaaaaataaatacatttgggaaactctgcatatttttcaaatgtatcttccctcttaaagagttatgtgtgatatctgtaatgaggctctgataagtaatgcagtaaagaatttgtcttaggaagatactaatttcactctgtggaacagtgttccctgttccagggctcaggaggaaagtacaggcgctgagcgg

SEQ ID NO: 9384 - DNA, 158 bp, Homo sapiens
  source 1..158: mol_type = other DNA
ggacctggtagagattctctccttcctcttccagctcagcttctctactctgggcaaggtcctcaggattacagagctctctgacatttctcatgacacttgaaaggtgggggtggcctcctcatcctcttcccctggctcagagtcggagctgcaga

SEQ ID NO: 9385 - DNA, 459 bp, Homo sapiens
  source 1..459: mol_type = other DNA
tcaccgaccagatccggctctgggagctggaaagggacagacggccaagtcttggtcattggccagagaaagggcagacagttcagtctgcattttattttttacttcatggactaggagagaaaagctaatcgtcccaaatcaatgcactttggatttggaataattcacagtaatttgtattaggcctttctgggcaagcccagaccgcgtccagggctgccaccaaggagctggggggattcccaataggagctccgagcgcaagtggactttgagctgctgctggcccacgcgcgggagctgggcgtgctcgtgttcgagaactcggccaagcggctcatggtggtgaccccggccgggctttaataaagttgatgggcgcctccccgtggggtttgccttcgcggcggtggggccaaagccagctgctgcgcatgcgccggccggggccccgcc

SEQ ID NO: 9386 - DNA, 519 bp, Homo sapiens
  source 1..519: mol_type = other DNA
ttttttacttcatggactaggagagaaaagctaatcgtcccaaatcaatgcactttggatttggaataattcacagtaatttgtattaggcctttctgggcaagcccagaccgcgtccagggctgccaccaaggagctggggggattcccaataggagctccgagcgcaagtggactttgagctgctgctggcccacgcgcgggagctgggcgtgctcgtgttcgagaactcggccaagcggctcatggtggtgaccccggccgggctttaataaagttgatgggcgcctccccgtggggtttgccttcgcggcggtggggccaaagccagctgctgcgcatgcgccggccggggccccgcccccatgcgccgcgcggctccagggccacgttccagggtcggattcctcagtccctgccgccgcggggcgccctgggatagcggcggggcctcctggtgagcgcgcgccggggcggcctccgggaagtgggagacgctgcgggtcctgggcccaggcc

SEQ ID NO: 9387 - DNA, 324 bp, Homo sapiens
  source 1..324: mol_type = other DNA
gcctgtgcccttagcaggtcacttacccctagtttctaaagagggtcagtaactccctcttgtctagttcccatgaccagatttccttttcactactgcacttgactagtgtttaaaaaaaaacctgggttctggaagaaacttggcttaatcaagaatgatgaaaattagctgcagttaataattaatctctaaagatccttgggaggcccgggcatgggtgggggcccagacacctgcaggagggacgcctccctggtctggaaaagaggggacttccttctattttccccgagaactggaaaatccagttgaccacactta

SEQ ID NO: 9388 - DNA, 275 bp, Homo sapiens
  source 1..275: mol_type = other DNA
cctaaggtgtgtactctcctgagagacgcttccttgtaagggtcagaaggagaccctaccttccttctcctgctatgagtctgacagggggcgtattcaatagcattgttgagtgcttactgcatactcagtaatactctaacccaggagcccagagtcctagttactggtctagggcttctttcatgctaaagcaggcccacaggacttccctgcaacaggtttctaacccgatccctgcttcaaagggtgggtcccttttggcagactgtcag

SEQ ID NO: 9389 - DNA, 456 bp, Homo sapiens
  source 1..456: mol_type = other DNA
acccaccctcccagccagaggtcagcagaaacctgttttctctgggatgtctcatttctgggacagaggcacctctccagggacagctgggcactgtctccggggacaaaggggctggacaccctcgtgcacccgtccaggtggggctgccttggtgtcagagaacctggctccactgagaaataaagcaagccttctgttccataggagccgtgtgggtttgaacagggctcttctctgagcgtaaagcaagctttataagaactcttataaggtctgtaacttcttataaggcttgtaaagggggtaggagctacgcccaggcccgtcagtccaggcccctccctgggggctgggggctgggaggagagtagggctggggcgctgcgggggcggcggcctcgagccactaatcgctgtccgcacaggagggccgcagtctcggggaaccggagc

SEQ ID NO: 9390 - DNA, 255 bp, Homo sapiens
  source 1..255: mol_type = other DNA
gacttccatgtttaaaagagagattcccatgcagggtgttggccacaggctttatagagtttctatatgccagataatatcttcaataggaagttccatttggggtaacatgcccaatgagtattttattatattatagcatagtatataaaaatcagtgcaatttggccaagtatctttagaatgattcatttgttcccaagaaccaaataaacccagcctgtttttgggtatcaaatagcctatccagcctgg

SEQ ID NO: 9391 - DNA, 284 bp, Homo sapiens
  source 1..284: mol_type = other DNA
aacgtaggaatttcatggattattcaggtgggtccagtgtagtcaccaggtcggattttcccctttagacttctgatctccaaaactgtaaagtaatttgtcactgcagcagcaggaattagtcagtatctcataggatggtctcatgtaggagcagctcctcagatggggccacttctgcaccccagaacctcctgcaggttgggcccaaaaagaaacaagtgtttctgttgcgacacctgttgccacagaccacattaaccccactaccaggataaagggct

SEQ ID NO: 9392 - DNA, 307 bp, Homo sapiens
  source 1..307: mol_type = other DNA
cttccgggaggccccaggagtagctggcttaaccactggaggagtgaagagctcctctccagaacttttggatgacatgcatgagttttacacaagattcctgccattggctgcagatcaggggccagatgctggaccatgattccagacttggagtttcaacagttctaaattcccaagcagaggctcgcacaatcctggaatgagagcacactctcactctggaccccagcagagcagggagtgtgaagatggagagaccaccggcagctctgttctgccacaggctgaggccagtgagtcaccc

SEQ ID NO: 9393 - DNA, 319 bp, Homo sapiens
  source 1..319: mol_type = other DNA
ccagagctggctgctgcttcctgctcgctcatccagcccagggccagcagatgggctatggggccaccaaaggcccagctttgacagaggtcatcagcccaggcccctcccctggctgagccctggctccccatttctgagggcagctgccgccccagagtgggtggcagcgcctggttccgggttaggcaatgaggagccggggccaggcctgtcaggtggcaggatcgttagagccccgtggccatgggtaccccacactgcagccactgctgctgctgagtaggcagatgcaccgggctgattaccacgctctggc

SEQ ID NO: 9394 - DNA, 351 bp, Homo sapiens
  source 1..351: mol_type = other DNA
tcaaattttattttatgttacttctgaaaggctaacagacttccaggcagaaagtccttgagggaaacgttctaggggtctctctgggaggcttagaggttgctggagcctggcagcttcttccggagccattggcaggactaaccaggatatcctcctggcagtcatcctgggtggctgccagatggaattccggaggtcccctgcatgcctgcgaagccccagggggagcttggggtagtagctgacactgtcccagctgcatattctttggcttccaatagttgcaagggatttacggagatgcccagcccaggccttcccaacgggtttgaccagttctgttctgat

SEQ ID NO: 9395 - DNA, 221 bp, Homo sapiens
  source 1..221: mol_type = other DNA
gctcacgcctgtaatcctgacagctactgagccgtgatcatgccactgcactccagcctgggttctggagtgcagtggcacaattctcctgcctcagcctccggagtagctgaactgcaatgagctgtgatcgcaccaaacaaagggaagacgcaacatgatttggtgtgtggtcagcgattgctcccggcacccagcgcagcaggagggcataattgagc

SEQ ID NO: 9396 - DNA, 320 bp, Homo sapiens
  source 1..320: mol_type = other DNA
aaatatttggggagcctcctctgtgtaattcggagaagagtagcttcgcggcgcagccagcctgtgcggcggatcccgggaccccttgggctcctcggcaggagccgacggccaagaagccggggccaggaggggcgcggcctctgcgcgcgggcagcgcctacccctccttcggaattcccgggcccgaacttcgcgccgagcgagcccgcccccgggaggagccgcctgggcgcggagatgctccgacgcatttagtgggcccaaatttagacgccggcgcccgccttgcgcaggcgcggtcaggggcagaggcgggg

SEQ ID NO: 9397 - DNA, 273 bp, Homo sapiens
  source 1..273: mol_type = other DNA
gcggcgcagccagcctgtgcggcggatcccgggaccccttgggctcctcggcaggagccgacggccaagaagccggggccaggaggggcgcggcctctgcgcgcgggcagcgcctacccctccttcggaattcccgggcccgaacttcgcgccgagcgagcccgcccccgggaggagccgcctgggcgcggagatgctccgacgcatttagtgggcccaaatttagacgccggcgcccgccttgcgcaggcgcggtcaggggcagaggcgggg

SEQ ID NO: 9398 - DNA, 193 bp, Homo sapiens
  source 1..193: mol_type = other DNA
accttgggaatccaggccgcctccccgcctctgcccctgaccgcgcctgcgcaaggcgggcgccggcgtctaaatttgggcccactaaatgcgtcggagcatctccgcgcccaggcggctcctcccgggggcgggctcgctcggcgcgaagttcgggcccgggaattccgaaggaggggtaggcgctgcccgc

SEQ ID NO: 9399 - DNA, 263 bp, Homo sapiens
  source 1..263: mol_type = other DNA
caggctgggcagatggtgccaggcacccaggctgcggggtggctggatgcattgagggatagcgccacacacacattcaataaatttgaggagctttaatcatgacaccacttaggaggctggagcagaaggattgctttggcccagtagatcgaggctacattgagccatcattgtactccactgcactccagtctgcactgaggtcctggaggggcgccagttccctctcctccacccatccagggggcggggccagaggt

SEQ ID NO: 9400 - DNA, 297 bp, Homo sapiens
  source 1..297: mol_type = other DNA
gttgtagtgacgccattgcaatcaaaaaatataaataaataaataaataataaattaaataaataaaagagacggagtctcactctgggtgggattacaggcgtgagccaccgcgccgggtctcaaaccccaaattatttttttggggggacggagtcttgctctgtcgcccaggctggagtgcagtgccgagtagctgggactacctgggattacaggcgtgagccaccgcaccttgtctcacttaacccaatggggttcaacagtccaatgggagcctcccggtacgctcagctg

SEQ ID NO: 9401 - DNA, 422 bp, Homo sapiens
  source 1..422: mol_type = other DNA
gcctcccgagtagctgggactacaaaccttttacatgagcaggtttgttaatttggtacagattagttaattattgctttatactcagtacctgttttaagaaaaaacaaggaagtggcagcctggcgccaggcccgaaaccaggcctgggcctgcctggcctaaacccatcaacccatgacttagaacgcgatgttattcctagattccagacattgtatagaagaaatcacgacactttcatgtgaaatgcagctgaataaagcccttccttctaccatttcttggttccctgaacaggaagcgaggtaactgacggacggccaaggcagccccttgggtggcttaggcctgccctgtggagcatcctgcggtggactctggccagcctgagtgacgcgacgctcccgggtaggaaattc

SEQ ID NO: 9402 - DNA, 388 bp, Homo sapiens
  source 1..388: mol_type = other DNA
ctccctctctccacagtggctgaaagaatgatggggaagagaggaagaagaaattgccttaggccttctccctcttcacacagtctcactctgtcacccagcctggagtgcagtggcatgatctcgactcactgcaagcctcccgagtagctgggactacaaaccttttacatgagcaggtttgttaatttggtacagattagttaattattgctttatactcagtacctgttttaagaaaaaacaaggaagtggcagcctggcgccaggcccgaaaccaggcctgggcctgcctggcctaaacccatcaacccatgacttagaacgcgatgttattcctagattccagacattgtatagaagaaatcacgacactttcatgtgaaat

SEQ ID NO: 9403 - DNA, 428 bp, Homo sapiens
  source 1..428: mol_type = other DNA
tgcatggagccctcgcaactttgaggtgatgactacaggctcccggttgcaatagacagtaattgtattgtaatgctttctttcacagattggaattctaatcattcagggattaccaatattgtgctacctactgtatcagatgagaatctctacctggtgctttaaacttcaccaggtttaaaagttccccatggtgagtgtagtttaatattacctgaggtgaggtaaggttccctggatccttgtccaggactcaggcacacagtgtgacatcccaggtcccgggcggggctctcagggtctcaggctccaagggccgtgtctgcattggggaggcgccgcgttggggattctccactcccctgtcatgacgcgtccccaattcccactcccattgggtgtcgggttctagagaagccaatcag

SEQ ID NO: 9404 - DNA, 461 bp, Homo sapiens
  source 1..461: mol_type = other DNA
cacactgcttggaagcactcgcaactttgaggtgatgactacaggctcccggttgcaatagacagtaacaaaccctgcttctttatattcaggagatgttctagatccacagtctgggaaagtaaaacttaggagctttgatttaattgtaatgctgttttgacacaggtcttttacaaattggaattctaatcattcagggattaccaatattgtgctacctactgtattgacagggattcgcgcagcctgggggtctctccctggtttccacagacagatccttgtccaggactcaggcagacagtgtgacaagtcccaggtcccggacggggctctcagggtctcaggctccgagggccgcgtctgcaatggggaggcgcagcgttggggattccccactcccctgagtgacgcgtccccacttcccactcccattgggtattggatatctagagaag

SEQ ID NO: 9405 - DNA, 217 bp, Homo sapiens
  source 1..217: mol_type = other DNA
agagagtctttgtagatcaccacagggagccgcctccttggccctgtgatcacccagggactgagatctggaaacaggtctgcaaatctggtcactggtctcattgccagtaacggcgaaggggcttggtgaggcccgcgctcctcggggtgggggcgcggggcaggcagggccctggccgtgggctcgggggaccgggccaggtgactaagtttcc

SEQ ID NO: 9406 - DNA, 523 bp, Homo sapiens
  source 1..523: mol_type = other DNA
acgatggggagctcttcctctcccaaaacctggagactgaggaatggacagtgccccagtcctccagagctcagaccttggccatgaacgtcaggaatttcttgaagctatgcatgcagactgcctgcaggaactacgggcgtagtcctgaggagaacaggtaccgacgctggccaggggctctcctctctattgttagagccactggataaagacagagggtcagggactggacacagaatcctgagcctgtggtggcaggagaggaagccttcagggccagggctgccccctctgcctcccagccttggactccggatcccagagcctgaggccatcccaaggcccatcctcctgccagcctggaagaactgggccccaaccagccctgttcctctcccctccttagaggggagcagggcttcactcacccgcagcgaggcctcagagggcaacatcaccgtgatgcttctatccccggaatatcatactgacctggcgtcaggatggggtatctttgagc

SEQ ID NO: 9407 - DNA, 86 bp, Homo sapiens
  source 1..86: mol_type = other DNA
ccttgtagatctgtcatctggaaacaggtctgcaaatctggtcactgaaccacgcgttgtctgtcccggaaggaacgtgctcataa

SEQ ID NO: 9408 - DNA, 399 bp, Homo sapiens
  source 1..399: mol_type = other DNA
gcggcgctgtcacagcattctatgcgccccagcgccctgggccgctttgacggggccaaactcgggtaggatcctcactgaagcggcgggaccctgggtggagcccgtttccatcagaaccgcccagaggcgggcgctgcccccggaaccgcgggggctgaggcgccagattccagatcgcgctccagcctggactcggaattcctgccccgcgggtctgcattttcacagcggcaggtgtgagtgccgcgcagctggagaccagaagcctgaggcagctcggccctaggtcgggatttccccagctagtcgggaggctgaggcaggagactcacttgagccgagatcgcgccactgcgggcgccgagggcagccccgccctgaattttgtgagcgacc

SEQ ID NO: 9409 - DNA, 356 bp, Homo sapiens
  source 1..356: mol_type = other DNA
gtaattcctgtaatcccagcaccgagaccaccctggctaacacggtgagcgagcacctgtagtcccagctcctcgggaggtgagcccagattgcgccactgcactccagcctgaaaaaaaaaagacacaagacctgtggtagcctttcctttctgtctggcagcagccactgggtaaaccaagatggtgcatacctatggaagaagcagtctgatgtcatgagctgctggcagtaccaccaagaaggcaacttaacagcaagcctgtctatcatggtgttaaccagctagtttgcttaaagccttcagtctgttacagaagagcaagctggatgccactgtggggctctgagtccg

SEQ ID NO: 9410 - DNA, 375 bp, Homo sapiens
  source 1..375: mol_type = other DNA
ctgcactccagcaaaaaaaaaagacacaagacctgtggtagcctttcctttctgtctggcagcagccactgggtaaaccaagatggtgcatacctatggaagaagcagtctgatgtcatgagctgctggcagtaccaccaagaaggcaacttaacagcaagcctgtctatcatggtgttaaccagctagtttgcttaaagccttcagtctgttacagaagagcaagctggatgccactgtggggctctgagtccgatgcagcttggagaaggttgtaaaattcatctgcctaaactgtgttcctggactctgtctggggccaggctgggcagggctgggggctggggcctgggcagggccaggcactcaagtgag

SEQ ID NO: 9411 - DNA, 344 bp, Homo sapiens
  source 1..344: mol_type = other DNA
cattgccatccaccgtgggatgccccaggagaaagacagttgagagaagggaatctcaacatgttttaaatttcctttctcacaaaggctttctcggtatcagcagtttaaagattttcaacgacgaattctcctgaggattctgacacctatccctccaggtggccagagcaggccggtttggcaccaagggcttgatcctcaatggagctgcctgatgagatagacatctcctcctacagtgagtactgatctcatcacataggtcatgggcatctgatgcataattacattttcttctcagttgaacagacacggtagaagacgtgaccgtctgtcctcac

SEQ ID NO: 9412 - DNA, 330 bp, Homo sapiens
  source 1..330: mol_type = other DNA
gcgtcgggatgtccaggaaatttttcgcatgaccccccacgaaggtcatttcaagtgccaagaaggcggcttgtgcccaactgggagtaatgactcctttttttcataaatcacaacattgggggagggcaggatttttctgcccctcaaggtggcatcgagcgtacagctggagccttctgctcaccaaaactcctacttcccgcccttccccacctccaggggtgggggcctttggcacccgtggacggcacccagcggtggatggcggcagcggaggcgaggaccaaaccagcctctttttcccgtttcccccaatatgtgttgggg

SEQ ID NO: 9413 - DNA, 286 bp, Homo sapiens
  source 1..286: mol_type = other DNA
ttaaatttccagaaagtgcttggggtctctggaaacctctatgactggtttagagatgaaatgtcatgaattgttacagattaagttggcaagaaccaggtaaatactactggagactgaagtctaatttatctttcaggccattctgggaatggatgtcctgtgccaggccaagtcgggcatgggaaagacagcagtgtttgtcttggccacactgcaacagctgcatgatttagatcacataattgaagtcatttattaaatgaagagctacatttaccatatg

SEQ ID NO: 9414 - DNA, 219 bp, Homo sapiens
  source 1..219: mol_type = other DNA
acggttttaaaacaaatttcagacaggcatttttcccttgcgcctgcgctcttgcagccaagaaggcgggaggcggaagtgaaggcagatttccctcccctttcgagagcaaagagctcctggcaagatggtgtcctcgggaggcctcagcatcaatgagaggcggcgctcggcgtcccttggtctttctcacttcgtagcgtaacagtgatgtgagac

SEQ ID NO: 9415 - DNA, 169 bp, Homo sapiens
  source 1..169: mol_type = other DNA
ttcgaaaggtgagcgctttgcgcagtgatgaccctcatctatcacccttgactgatggctgctgagttaggcatccactttcagatcaagaatttataagttggttccaggtaaaagtttcctggtttagggaccctgccggcccagttatggcagagaacgatgtgcc

SEQ ID NO: 9416 - DNA, 290 bp, Homo sapiens
  source 1..290: mol_type = other DNA
agtgcgtgcccagcagtcctcaggtcacgggccaaggaccccgtgggtcgttcctcgcgcatccatggaggggtgccgttactggcggtagcagtgaagttagaaacggttttaaaacaaatttcagacaggcatttttcccttgcgcctgcgctcttgcagccaagaaggcgggaggcggaagtgaaggcagatttccctcccctttcgagagcaaagagctcctggcaagatggtgtcctcgggaggcctcagcatcaatgagaggcggcgctcggcgtcccttggtc

SEQ ID NO: 9417 - DNA, 329 bp, Homo sapiens
  source 1..329: mol_type = other DNA
attaatgggccgggccgggtggatcacctgaggtcatacatcctagctactcgaggagaatcgcttgaacccgggaagcagcggttgcagtgagcattgcactcccgcctgggcgacagggcgagaccctcaagccctactattaacacttagtgcgtgcccagcagtcctcaggtcacgggccaaggaccccgtgggtcgttcctcgcgcatccatggaggggtgccgttactggcggtagcagtgaagttagaaacggttttaaaacaaatttcagacaggcatttttcccttgcgcctgcgctcttgcagccaagaaggcgggagg

SEQ ID NO: 9418 - DNA, 93 bp, Homo sapiens
  source 1..93: mol_type = other DNA
ccgccccgaccgggccagatctcccaggggaaactttttcccgcctcctcaatgctcctgctcccaggcggcccctttgggtactgcctgagc

SEQ ID NO: 9419 - DNA, 200 bp, Homo sapiens
  source 1..200: mol_type = other DNA
gtggggagtcgccgggccttccctggaggcagacagtgagtggggatggacccacacacacacaatgttttctttccaaactcctaagggaggaaagaggagactcactctttctggcatctgccaccttctcagctgcccgcttctcagcttgcagaagctgcgctcaggcagtacccaaaggggccgcctgggagcag

SEQ ID NO: 9420 - DNA, 93 bp, Homo sapiens
  source 1..93: mol_type = other DNA
gctcaggcagtacccaaaggggccgcctgggagcaggagcattgaggaggcgggaaaaagtttcccctgggagatctggcccggtcggggcgg

SEQ ID NO: 9421 - DNA, 367 bp, Homo sapiens
  source 1..367: mol_type = other DNA
gaggaggcgggaaaaagtttcccctgggagatctggcccggtcggggcggacacaggccttgggcctacggctctggggggcgggggcaggtctgatgagtaacccctccccccaggttccagaggaagtgatattcaatttctagatcattattggagattatctgtgactttttaaaactcagatttctgctgataaaaattttccccatccggccctgttgggtttttttaaagttctttgttaaaaattaaaaatttacctgtcgaattttacattaaaaaaattactcaaaaaaaattttttttcaaatctatcatctgataaaggatcagggttaggttaggcctcatctcttgctgaaga

SEQ ID NO: 9422 - DNA, 244 bp, Homo sapiens
  source 1..244: mol_type = other DNA
ggattacaggtgtgagccactgcaccaggcctggaacaattttaaaataatgtattggctctgcaaatgcagcttcagaacaactttgtagaaaactttggaaggtgtctgccacaacctcatcatacttgactgatgtccccgatgaaggggatatataatggaccttctcagagatgttatatatgattgctgaattctaagccctgggggcttccccgggccccagccccgacctagggac

SEQ ID NO: 9423 - DNA, 220 bp, Homo sapiens
  source 1..220: mol_type = other DNA
acctcatcatacttgactgatgtccccgatgaaggggatatataatggaccttctcagagatgttatatatgattgctgaattctaagccctgggggcttccccgggccccagccccgacctagggacctgagcgtccgggcccaggggctccgcacagcaggtgaggctctcctgcgcaggctgcctggatccccggcctgcctgggcctgggccttgg

SEQ ID NO: 9424 - DNA, 294 bp, Homo sapiens
  source 1..294: mol_type = other DNA
ctccctgggtgagctggaacgcagccccgtggtacatcgagtgcagccagggttcctgcagccctggatagagtaggctttcccagagaagaccccatcctggaggaaggcttttgctctccatctcctaggagatcaggggtctggatcagaggtctcaatccctgaggaagtgggcactgaaccccctagtttggctgagccaccccctcctgctgcctcacctgggccccaggcagcagaaccagcagcagggtggtgcacgcggcggaagacagacctcccgccctggga

SEQ ID NO: 9425 - DNA, 114 bp, Homo sapiens
  source 1..114: mol_type = other DNA
ggacccccccttaacatcagggaccccagagttccttggggtctgtgaattcccgggggtgatttcactccccggggctgtcccaggctgcatcctgtctggaagttagaagga

SEQ ID NO: 9426 - DNA, 149 bp, Homo sapiens
  source 1..149: mol_type = other DNA
ggacccccccttaacatcagggaccccagagttccttggggtctgtgaattcccgggggtgatttcactccccggggctgtcccaggctgcatcctgtctggaagttagaaggaggcccactaccgggaagttttccgctggttgaatg

SEQ ID NO: 9427 - DNA, 333 bp, Homo sapiens
  source 1..333: mol_type = other DNA
gacaggctggtcttgggattacaggtgtaagccactaccccggctacgtccttttattcatttatgtataaacatttagtaagcacctactaatggagtagcaagggaggtaaagctccatttccatccctccttagtgagtcagtagtcagtggtgaggctaaggcttacctctccctttctcactcagcacagggggctggggaaacctggagatctgtgttctcatttcagtgctgagccagaagatgtctaaaggctgccccaccccagctctgggtaaacaggaagctgggagggagggggtgggcccgtccctgaggtatgaaagcc

SEQ ID NO: 9428 - DNA, 257 bp, Homo sapiens
  source 1..257: mol_type = other DNA
gcagggcagccacccatgcaggctacccttgagactgccagccccggcagctgcaggcctggggttatgtccagctgagcccagggcctgttgcccagtcctccctgatcctggggcactaaggccagcacaggaagtggctcctgccacagctagcaggagggaacccctcccctgcagggggctttcatacctcagggacgggcccaccccctccctcccagcttcctgtttacccagagctggggtggggcagc

SEQ ID NO: 9429 - DNA, 278 bp, Homo sapiens
  source 1..278: mol_type = other DNA
tggtaagaatatgttcactgtacaattattctcatttcaccctatgtttgcactttttaataataaaatgtaaaaaaaacaaaacaattattcagcatgctcaaggagtgggtgtgcaatcgagcctcctacaggaagcatgtttgttaatcagacagccaagcagcctgctgcatagagctgccagtctgaactggagcagggtacatgtgtccacagacatagcagattatggccctagctacaggcccagtctcctaacaatgctggggaggaac

SEQ ID NO: 9430 - DNA, 312 bp, Homo sapiens
  source 1..312: mol_type = other DNA
catgtttgttaatcagacagccaagcagcctgctgcatagagctgccagtctgaactggagcagggtacatgtgtccacagacatagcagattatggccctagctacaggcccagtctcctaacaatgctggggaggaacagccagacagcactggccagtttggagtcgtcacaccccagagtgggccgtcgaggaatcctctgagtctctgctccccaaagaaattaaagaggggtgaagagaacggccccctcttcaccctcaaacaggaaccagtggttggaggggatgaggggaagttatggggccc

SEQ ID NO: 9431 - DNA, 378 bp, Homo sapiens
  source 1..378: mol_type = other DNA
tgccagtctgaactggagcagggtacatgtgtccacagacatagcagattatggccctagctacaggcccagtctcctaacaatgctggggaggaacagccagacagcactggccagtttggagtcgtcacaccccagagtgggccgtcgaggaatcctctgagtctctgctccccaaagaaattaaagaggggtgaagagaacggccccctcttcaccctcaaacaggaaccagtggttggaggggatgaggggaagttatggggccccagatactcctccatgcctgtgggaagcagctctccacaccaggggggcccccacactcccgcgctgctctgcggctcagggagcagcccacctgctgggtgtgctgat

SEQ ID NO: 9432 - DNA, 352 bp, Homo sapiens
  source 1..352: mol_type = other DNA
ggccctcccgggctccccccaccagcaggcgtggactcccctgggagggagggagtgcagcgctcacctcttcgatgcaggcccccgtagatacatatatcttcagggaagagggctcaaggtccaacagttttagaggcaggactggcctggaggtcaggaactctagtccttgctcttttaggcgaaatgatcaggggctggtgacttgcctcaagttcctcatctgtgaagtgagggtcccaggctggggagcctcccgtcaagcctggactttggtggagctggggtttaaggccagctctgcccaactccagagcccagccctttcctctgccctgggctgaccacg

SEQ ID NO: 9433 - DNA, 394 bp, Homo sapiens
  source 1..394: mol_type = other DNA
gcagattatggccctagctacaggcccagtctcctaacaatgctggggaggaacagccagacagcactggccagtttggagtcgtcacaccccagagtgggccgtcgaggaatcctctgagtctctgctccccaaagaaattaaagaggggtgaagagaacggccccctcttcaccctcaaacaggaaccagtggttggaggggatgaggggaagttatggggccccagatactcctccatgcctgtgggaagcagctctccacaccaggggggcccccacactcccgcgctgctctgcggctcagggagcagcccacctgctgggtgtgctgataaccacgtggtcagcccagggcagaggaaagggctgggctctggagttgggcagagctg

SEQ ID NO: 9434 - DNA, 421 bp, Homo sapiens
  source 1..421: mol_type = other DNA
actggccagtttggagtcgtcacaccccagagtgggccgtcgaggaatcctctgagtctctgctccccaaagaaattaaagaggggtgaagagaacggccccctcttcaccctcaaacaggaaccagtggttggaggggatgaggggaagttatggggccccagatactcctccatgcctgtgggaagcagctctccacaccaggggggcccccacactcccgcgctgctctgcggctcagggagcagcccacctgctgggtgtgctgataaccacgtggtcagcccagggcagaggaaagggctgggctctggagttgggcagagctggccttaaaccccagctccaccaaagtccaggcttgacgggaggctccccagcctgggaccctcacttcacagatgaggaacttgaggcaagt

SEQ ID NO: 9435 - DNA, 246 bp, Homo sapiens
  source 1..246: mol_type = other DNA
gtctcattatttaagaaatacatttcgccaggcatggtgacttgcagtcccagctactcaggagactgaaggcaactgagccctggaggttgaggctgcagtgagccgtgatggcccagcctgggtgagacagagccagaccctgccagctgtgccactgcattccagcctgttctgggccaaggagggctcctggaggcttgttctgccttgaacctcggaaggtgggggaacccacatcctggt

SEQ ID NO: 9436 - DNA, 375 bp, Homo sapiens
  source 1..375: mol_type = other DNA
tctcccctacctggcttgggtcagggagagggcagtgagaatcatcaatgccggggcagggtaggagggaaatgtgacacaaacatgcctgcatgtgtgcacgcacgtgcagtgtgcaaacctttaagtaccactttcagttaaagaatctacttaaactcttaaattcctgatctctatagattttactaaagatttcaaattctaaagcaaacaaattaaaatgttttgttagacatttcccaggctggggcaagattcttctccgatctacagagcagaaaacctgacaaaatgcaaggtcttatcattacctgaaccttggacctgttcaaaaatactagaaatatttgtttcatgcgcacactggagaat

SEQ ID NO: 9437 - DNA, 336 bp, Homo sapiens
  source 1..336: mol_type = other DNA
gagggaaatgtgacacaaacatgcctgcatgtgtgcacgcacgtgcagtgtgcaaacctttaagtaccactttcagttaaagaatctacttaaactcttaaattcctgatctctatagattttactaaagatttcaaattctaaagcaaacaaattaaaatgttttgttagacatttcccaggctggggcaagattcttctccgatctacagagcagaaaacctgacaaaatgcaaggtcttatcattacctgaaccttggacctgttcaaaaatactagaaatatttgtttcatgcgcacactggagaatcttcctggggtgctagtgtcagcag

SEQ ID NO: 9438 - DNA, 235 bp, Homo sapiens
  source 1..235: mol_type = other DNA
gagaatcttcctggggtgctagtgtcagcagcctgcagacagaggcctccagcttggtctgtctccagctggcctagggtagcccttaatttttttcaccccacaggaggaaaagctttcggactgctgaagggatggggagggcctaccctggctctagtgataggatctgccctccaaactggaaggcttctaaaaagtttacttttgtggtagcaaaaggggaacctgcagt

SEQ ID NO: 9439 - DNA, 293 bp, Homo sapiens
  source 1..293: mol_type = other DNA
atttcacaaaatgaaacccattgttaagaaattacaaattcccaataatttcaaatataaaaatttattcatgaaaattataggttataaaattaaatgatctttgttcaaatgatttgcatacattatgcaaatagggccgctggcgccacgggccgtgtctcaacggccgacgctgggggcccgcctccttagccaatcgggggcgcccggcccttttttttttttttttaaactaaagacagccctggccccgccctttatgcaaattaaggggcgctcccgggggcggc

SEQ ID NO: 9440 - DNA, 330 bp, Homo sapiens
  source 1..330: mol_type = other DNA
tggctaggacagtgccgcctgaaattatcagccatagatgaatgtggcataatcccccagcgctcaagcgcgcgcgcttaagtgtccacgcatccgtagtgcgacgcacgcaggcgtagtacggtcccccgggcgacagcggtggcggctcctcggggtgctcggctccctcccacctaggccggccccggcccgactcgccctcagaatgtttggggctgcccacaagtatcgcttcgagatccccaaatactatggcgcgcgtgcgcgaaaccactttctccgcagagtgtggggcgaccgccgtgaccggtgatgacactagtctct

SEQ ID NO: 9441 - DNA, 382 bp, Homo sapiens
  source 1..382: mol_type = other DNA
cggggccgaggcccttggcccagggcagagaggcggtaatgcctccacccccggccttcggaagcacgctggccggcctttaaggaagcgcctcttttcttgacaagtcgtgcaacttagtagcacgtggctaggacagtgccgcctgaaattatcagccatagatgaatgtggcataatcccccagcgctcaagcgcgcgcgcttaagtgtccacgcatccgtagtgcgacgcacgcaggcgtagtacggtcccccgggcgacagcggtggcggctcctcggggtgctcggctccctcccacctaggccggccccggcccgactcgccctcagaatgtttggggctgcccacaagtatcgcttcgagatccccaaatacta

SEQ ID NO: 9442 - DNA, 147 bp, Homo sapiens
  source 1..147: mol_type = other DNA
cgcgccactgcactccagcctggaagacagggcgtgacggtgtctcacctggttctgattccggggcacaggagagactagtgtcatcaccggtcacggcggtcgccccacactctgcggagaaagtggtttcgcgcacgcgcgcca

SEQ ID NO: 9443 - DNA, 349 bp, Homo sapiens
  source 1..349: mol_type = other DNA
cacttatgttcgtctaagtgtactcacttaaaaaatgttaaaagctcgttaaaaggctttttaaaataatacacaaaaccattaaacagctgctttcaccccaacagcgatgtgtctttctgggactcgcagtttcgcggggccgaggcccttggcccagggcagagaggcggtaatgcctccacccccggccttcggaagcacgctggccggcctttaaggaagcgcctcttttcttgacaagtcgtgcaacttagtagcacgtggctaggacagtgccgcctgaaattatcagccatagatgaatgtggcataatcccccagcgctcaagcgcgcgcgcttaagtgt

SEQ ID NO: 9444 - DNA, 368 bp, Homo sapiens
  source 1..368: mol_type = other DNA
gaaaaaacagacacagagtctctgagggctcattgcagcctagtagctgggacgggctcgagattacaggcatgagctacctgccctgcctgtagttagggtttggacacattctgcctgacaccaacatctacagattacatagcctctttgtagttgagtgaatgtgtcagtgaacactgccagggtatacatatttttctaattgtaaactaagcatcatacctgttctaaagcatttaccaagttgtatccggggattagctagttcttgggaaacaactgggaccttcagtgctgcacaggacagctcagctctcctcataactcctgagaaaccctggacatgccagggtgtactcaggttt

SEQ ID NO: 9445 - DNA, 248 bp, Homo sapiens
  source 1..248: mol_type = other DNA
gacctcaggtgatccgccggcctcggctggggttgcaggcatgagccaccactcccggcccatgttatcaaatattataatgcagggtgataactgggaaactttaaacccttgtcttgctcatgccgggtggtaggcatccaggaattcaaagcctttcatgacggtccggcgcgcacagacagcgcggggtatacgggggcggtctattcgcagggtccgccccatgagctgcggcaccgcccccg

SEQ ID NO: 9446 - DNA, 329 bp, Homo sapiens
  source 1..329: mol_type = other DNA
acctggctgtcacgaaggcccggaggagggcgcttgcgggcgccaccggaagcggaagccaggtatggcgttcggggcccgggaggagggagccaggctggatctctttccccggcgcggcgctgctgcccaggggactggcctatcctcggccaatccgccctgttgggcccctagtgcgaatcagtcccgccagagacccttgacgggctcctgcctcatgaggggagaggtactggaacgtcccagtgcgagtgtcctggctccagaaaatgctcgcgccacctgggcgcgcggagctttgctcgtttgaaaaagttccagcgcgg

SEQ ID NO: 9447 - DNA, 232 bp, Homo sapiens
  source 1..232: mol_type = other DNA
gagtcaggagcgctgctctcatccccaatcagggcctcatagaaagctcgggctgcagccccatccagggtggactctggcttctcgggctgtggctgctgctgcccatccccctgtattagtaaagattaataagtccctagaagatctcggggagagtctcctatacccattctaccgcgctggaactttttcaaacgagcaaagctccgcgcgcccaggtggcgcgagc

SEQ ID NO: 9448 - DNA, 142 bp, Homo sapiens
  source 1..142: mol_type = other DNA
ccctgtattagtaaagattaataagtccctagaagatctcggggagagtctcctatacccattctaccgcgctggaactttttcaaacgagcaaagctccgcgcgcccaggtggcgcgagcattttctggagccaggacact

SEQ ID NO: 9449 - DNA, 287 bp, Homo sapiens
  source 1..287: mol_type = other DNA
tccctagaagatctcggggagagtctcctatacccattctaccgcgctggaactttttcaaacgagcaaagctccgcgcgcccaggtggcgcgagcattttctggagccaggacactcgcactgggacgttccagtacctctcccctcatgaggcaggagcccgtcaagggtctctggcgggactgattcgcactaggggcccaacagggcggattggccgaggataggccagtcccctgggcagcagcgccgcgccggggaaagagatccagcctggctccctcct

SEQ ID NO: 9450 - DNA, 354 bp, Homo sapiens
  source 1..354: mol_type = other DNA
ccgcgctggaactttttcaaacgagcaaagctccgcgcgcccaggtggcgcgagcattttctggagccaggacactcgcactgggacgttccagtacctctcccctcatgaggcaggagcccgtcaagggtctctggcgggactgattcgcactaggggcccaacagggcggattggccgaggataggccagtcccctgggcagcagcgccgcgccggggaaagagatccagcctggctccctcctcccgggccccgaacgccatacctggcttccgcttccggtggcgcccgcaagcgccctcctccgggccttcgtgacagccaggtggactccgtgtcccggcatccaccg

SEQ ID NO: 9451 - DNA, 360 bp, Homo sapiens
  source 1..360: mol_type = other DNA
attttctggagccaggacactcgcactgggacgttccagtacctctcccctcatgaggcaggagcccgtcaagggtctctggcgggactgattcgcactaggggcccaacagggcggattggccgaggataggccagtcccctgggcagcagcgccgcgccggggaaagagatccagcctggctccctcctcccgggccccgaacgccatacctggcttccgcttccggtggcgcccgcaagcgccctcctccgggccttcgtgacagccaggtggactccgtgtcccggcatccaccgccccacttcgcctgccgcggtcgggtccgcggcctgcgctgtagcggtcgccgccgttccc

SEQ ID NO: 9452 - DNA, 350 bp, Homo sapiens
  source 1..350: mol_type = other DNA
acctctcccctcatgaggcaggagcccgtcaagggtctctggcgggactgattcgcactaggggcccaacagggcggattggccgaggataggccagtcccctgggcagcagcgccgcgccggggaaagagatccagcctggctccctcctcccgggccccgaacgccatacctggcttccgcttccggtggcgcccgcaagcgccctcctccgggccttcgtgacagccaggtggactccgtgtcccggcatccaccgccccacttcgcctgccgcggtcgggtccgcggcctgcgctgtagcggtcgccgccgttcccctgctccgagtcccttgtcgctgggagcgg

SEQ ID NO: 9453 - DNA, 261 bp, Homo sapiens
  source 1..261: mol_type = other DNA
cgggccccgaacgccatacctggcttccgcttccggtggcgcccgcaagcgccctcctccgggccttcgtgacagccaggtggactccgtgtcccggcatccaccgccccacttcgcctgccgcggtcgggtccgcggcctgcgctgtagcggtcgccgccgttcccctgctccgagtcccttgtcgctgggagcgggagggccctggccttcgttctttcaagtggtgggaccccaaaaattcaggagaacttgagcttt

SEQ ID NO: 9454 - DNA, 303 bp, Homo sapiens
  source 1..303: mol_type = other DNA
aaaagattgctgtatctacttatccttagaaaagaaaagccaaagcttttacttctgctgagtgagaaacaagcacaacagatgcagttgtgttgcttccatgtcctgacaggtggatgaagactacatccaggacaaatttaatcttactgtatcgacaagctctagacatgatcttggacctggagcctggtgaggcaattcagacctattccaaaagaatttccttctgcattgacagagctgtcttctggagcccgcagcccctggtatgccgggctgtgtttcagatgaagaactgga

SEQ ID NO: 9455 - DNA, 260 bp, Homo sapiens
  source 1..260: mol_type = other DNA
atccggacgtgccacttctgcctcgtagaagacccttctgtaggatgcagctcatccctgtgcatggtgatcaccatctattatgggggcagccaatggcttggtcttctctcctctcacagatcagggctgctccgggcatgtaaccctcttaagctctagagttcaagacagcaggggttatcagctttcccctctcccgttcgaggctgtggacagtacatttagagtactggtatcaggcccagtgctgtcagtac

SEQ ID NO: 9456 - DNA, 368 bp, Homo sapiens
  source 1..368: mol_type = other DNA
ctggtgcccttggccttgaaggtcatgccagacagctggagtgagtgcagctcccaggcctgcccttcctgggaaggggtgggctggaactgggggaggactcctggggcctggtgaccaggaccgggtgagggccggccagcgtccggcattgaacacctgcccagtactaaagtgcaagtctcccaggtcccctgggactctggaccacctgcctggcacggcaggggtctcccagcagggccagactgtcacccctgagtgaagggcagggataggggtgggccagttgtcacccgtctccctctggctgatccggagaaccaaggatgagatcatcaccaccacgtgagtgcgtgggaatctcg

SEQ ID NO: 9457 - DNA, 488 bp, Homo sapiens
  source 1..488: mol_type = other DNA
tgaggttttgaattataaccatcattttttaaagcattatttatttggggacctttaatatgttgtacttatattttaacagaatcataatctgatgataactttgcatttacttattatgtatagacagttacatcataaaactctcagaattctgtacatacaggatatgtgtgcactgagccacaatataaaatgtttatcttacaaaggttgcagtaagaaaagtttgcaaaacactagcctggtacatatttcattaaggcttgaaagaggcaggccttacagtctgtgagtgctagggctgggatggtccccagcacagtccccaggcctcaacagggttggggtcagctacctggtggcgcacaccctagggcgccggatgctgtatccaggctctgtgtacctgctgcagaaggccctcatgcctgtgctgctgcagggccaggcccgactggtggaagaggtgaggcttccccagctga

SEQ ID NO: 9458 - DNA, 348 bp, Homo sapiens
  source 1..348: mol_type = other DNA
gcttccttcaacgggtggccccacatggcagaggagcccactgtgggcgtgatctgctgggagatttctaagcttctaagacagcaccctataaggttttttagaaaaacaggccagtcctgataccgatgggtgtgtggggatcagacccctggataaggtaggagagcctcccctgagttctcggcagcttgcgagctggccagtcgacttccactgggaagaacccagcagccggtctcaggaaggagtctcgagggggcccttcccgccggggtgtggccctgcttcgcccagagcccctgcaccgggggacagcagacaccctcctcaaccgggttaagaagc

SEQ ID NO: 9459 - DNA, 355 bp, Homo sapiens
  source 1..355: mol_type = other DNA
cttggcctcccaagtagctgggactacaggtgggcaccacaggcatgagccatggcctggaactttatttatttagagacagagtcttgctctgtcaccaaggctagcagtgggaagatctcggctcactgcgattctcgcgtctcggcctcccgagtagctgggattacagtcggcctcccaaagtgctaggactacaggcgtgagccactgcgccgggccgggccagttttatagttttcttcataaaacctagacagaaaaaaattattgaaccatgcccggtaatagtggtcttccactagtttcggaccactgctgtacgcccggaggcggagccggtacgggctgacgg

SEQ ID NO: 9460 - DNA, 281 bp, Homo sapiens
  source 1..281: mol_type = other DNA
tcatatagtttttggtatgtatggaatatttcatcaaaataattttaaaaataaataaattacacattaaaactgtaataactgcatgaagatctgcccctgagtaataatttaatacacttattagggtttcaggatgccagacaaccatcatttatgggttctgtggagaccaacataaaaactcaaactcagtttcctaagtagctgggattacaggcacatgtcacctcagaatgtacttccagactgacaagagctagacaggcaggacctgggct

SEQ ID NO: 9461 - DNA, 409 bp, Homo sapiens
  source 1..409: mol_type = other DNA
gtggagaaataatagttatttttcacaaaactgtattttgttagcatgtaatactttattatttttattgtttaaataaatcaataaatacctactttaaattttctgttttaatttttaatgtagtaaatattgatataacctcataaagaaaagctcttcagagtcttaagtaactttgaaaagtgtaaagaggtcctgagatcaatatttttgaaaagagctgctctcctttctttcctccaaggtagtaaagctggcagggataatgggtggggtccgcccttacacagctgggtgggggtattgttgattctacactcaaacagatccacgccggggctgtaggcaagggcagactccttgcaggggcaggctgggggcccccgctgcctgctgggtcaggctg

SEQ ID NO: 9462 - DNA, 498 bp, Homo sapiens
  source 1..498: mol_type = other DNA
ttatccctgccagctttactaccttggaggaaagaaaggagagcagctcttttcaaaaatattgatctcaggacctctttacacttttcaaagttacttaagactctgaagagcttttctttatgaggttatatcaatatttactacattaaaaattaaaacagaaaatttaaagtaggtatttattgatttatttaaacaataaaaataataaagtattacatgctaacaaaatacagttttgtgaaaaataactattatttctccacagcacagtgagaagctgagcattgctttacatttttgtgaatttgaagtccagtatatgaagaaaatctgaccctcaaggaccctgtgaaagggtatcagggatcctcaggggtttggtccacagactgctgctgagatgctgagagcatgctgtggggcccctccctgtccccactggggcccttggtgcctgctgggggttttatagccctataaagctcaaggcac

SEQ ID NO: 9463 - DNA, 183 bp, Homo sapiens
  source 1..183: mol_type = other DNA
acaggggatactttctagatggttgcatccatggaattcttgagccttctgaagaggggacaactgggccacagggtgaagtggatttaggtatccaccctctccattttgataaggtgctaagatggcacactcttgccagctccaggaggtgaagagtaatggcgctttccaaacggggtg

SEQ ID NO: 9464 - DNA, 414 bp, Homo sapiens
  source 1..414: mol_type = other DNA
gccttgttgctccagtccagcagcagcaattgtcctaggtgtggctgtgtgcacctgctccatcccaacctgccaacttgggcagggtacgtggatcacaaggtcaagagatcgagaccatcctggccttccagctactcaggaggctgagacaggagactcacttgaatccaggagccggaggctgcagtgagtcgagattgcactccagcctggccacagagcaaatgtaatcccctacaaaacaggagttttttttgttgttgttttgctctgtgcccaggctggagtgcaatggcctgatcacagttcactgcaacctcgacctctcaagcgaagctggcattttgaagactccgagtttgcctgcgaggattcccaaagggatctgggcagctggtggccccgccccct

SEQ ID NO: 9465 - DNA, 411 bp, Homo sapiens
  source 1..411: mol_type = other DNA
ggccaggatggtctcgatctcttgaccttgtgatccacgtaccctgcccaagttggcaggttgggatggagcaggtgcacacagccacacctaggacaattgctgctgctggactggagcaacaaggcggatgagtagccccagcccctgcctctgctgctgtggcatcacagaagccatcagtgagtcacttattgctgagctgaatggagattaatttgacccattcctcccaaattcagcaattaatttgggccacatccttttgtccattttccaggaaccagcagaagctgccaccatggacactgtaaatcacagaggcctttgatgatgctcattcagaggactgagggcatcttggcctatggcattggccactagtggcaagcctttgggtttataaattcc

SEQ ID NO: 9466 - DNA, 403 bp, Homo sapiens
  source 1..403: mol_type = other DNA
tggaaattcaagaggagaattttataagtaaattatatctcaagttttaaaaactcaggaaaaatggctggttattaaaagccaggatttcaaagggaaagccaaggtggcttccctgggtctaacatccggggattcaccatccccgaggccttccggggagtgcatcggtacttgagcacccaatggacacactccaaaatggccagtgggcagggaatcctggagcacttgttccgggacatatttcagtaataaaatacagaataaaaatcaagtgtttttacgcacttgagctcacgaagcgtttgcagccccgtcgccagggccggccagatctgggtgggcctgggcagcgctcgctgggcggtgccgacagggcggaatgggcgtggcccgaaga

SEQ ID NO: 9467 - DNA, 330 bp, Homo sapiens
  source 1..330: mol_type = other DNA
aatcccaacactttgggcggccaaggctggtggaccacctgaggttactggagtgagattgcactccagcctgggtgacctgtgtctgtggaaattcaagaggagaattttataagtaaattatatctcaagttttaaaaactcaggaaaaatggctggttattaaaagccaggatttcaaagggaaagccaaggtggcttccctgggtctaacatccggggattcaccatccccgaggccttccggggagtgcatcggtacttgagcacccaatggacacactccaaaatggccagtgggcagggaatcctggagcacttgttccggga

SEQ ID NO: 9468 - DNA, 402 bp, Homo sapiens
  source 1..402: mol_type = other DNA
tttcaccatgttggccagtctggtcttgactccctgacctcaggtgatccaccccccttggcctcctaaagtgttgggagccacaaggactgcaagtcctacacaggacctactgagacaccagtctgggcagctcagggagtgctggcgtcaccccacagtcccagcaacccagaatttggattggattcaggagaggtcggagaaacaaggaggttttcaggactcctccttaacacccccgggagatccgagcccccctccagtcccctccccaggttcagggcggggccggtcggtgagtcagcggctctctgatccagcccgggagggaccgggtctaggggagagagtccctgagtgtgagacccgccttccccggtcccagcccctccctccccc

SEQ ID NO: 9469 - DNA, 310 bp, Homo sapiens
  source 1..310: mol_type = other DNA
atttcaccatgttggccagtctggtcttgactccctgacctcaggtgatccaccccccttggcctcctaaagtgttgggagccacaaggactgcaagtcctacacaggacctactgagacaccagtctgggcagctcagggagtgctggcgtcaccccacagtcccagcaacccagaatttggattggattcaggagaggtcggagaaacaaggaggttttcaggactcctccttaacacccccgggagatccgagcccccctccagtcccctccccaggttcagggcggggccggtcggtgagtcagcg

SEQ ID NO: 9470 - DNA, 84 bp, Homo sapiens
  source 1..84: mol_type = other DNA
tcaagaccagactggccaacatggtgaaatctcgtctcactgacaggttgccttggagatgctggaaaccagcagttggtttct

SEQ ID NO: 9471 - DNA, 341 bp, Homo sapiens
  source 1..341: mol_type = other DNA
catttaaagggattatatatatatatatatatattttttttctttctcaccgctttgagtccaaccatagatacctctatcagaactacttctctctgccagaatttgatgtaattcgaatgcttccacctctgcttgaagggtttaaataactctgtataaatattaactcagagggtacaaatattaacttaagagttacggtcccaaaccccttccagggactgggactacggaccctggtccgagaagtttgaacgttctggacccgccccgaaggcgggcctctccaatcaacagcggttaggagggcggggcgcgtgcgcgcgcacctcgctcac

SEQ ID NO: 9472 - DNA, 340 bp, Homo sapiens
  source 1..340: mol_type = other DNA
catttaaagggattatatatatatatatatatattttttttctttctcaccgctttgagtccaaccatagatacctctatcagaactacttctctctgccagaatttgatgtaattcgaatgcttccacctctgcttgaagggtttaaataactctgtataaatattaactcagagggtacaaatattaacttaagagttacggtcccaaaccccttccagggactgggactacggaccctggtccgagaagtttgaacgttctggacccgccccgaaggcgggcctctccaatcaacagcggttaggagggcggggcgcgtgcgcgcgcacctcgctca

SEQ ID NO: 9473 - DNA, 343 bp, Homo sapiens
  source 1..343: mol_type = other DNA
caccgctttgagtccaaccatagatacctctatcagaactacttctctctgccagaatttgatgtaattcgaatgcttccacctctgcttgaagggtttaaataactctgtataaatattaactcagagggtacaaatattaacttaagagttacggtcccaaaccccttccagggactgggactacggaccctggtccgagaagtttgaacgttctggacccgccccgaaggcgggcctctccaatcaacagcggttaggagggcggggcgcgtgcgcgcgcacctcgctcacgcgccggcgcgctccttttgcaggctcgtggccgttctcccacctgtag

SEQ ID NO: 9474 - DNA, 307 bp, Homo sapiens
  source 1..307: mol_type = other DNA
gaagggtttaaataactctgtataaatattaactcagagggtacaaatattaacttaagagttacggtcccaaaccccttccagggactgggactacggaccctggtccgagaagtttgaacgttctggacccgccccgaaggcgggcctctccaatcaacagcggttaggagggcggggcgcgtgcgcgcgcacctcgctcacgcgccggcgcgctccttttgcaggctcgtggccgttctcccacctgtagcccttccttccaaagggtaacctccggctgtactttagttaaatacccgagaat

SEQ ID NO: 9475 - DNA, 128 bp, Homo sapiens
  source 1..128: mol_type = other DNA
cccaggctggagtgcagtggtacaatttaggctcactgcaaccagtagctgggactacaggtgcctgccacggtctcgatctcctgaccacgtgatccagctcatatttgtggccaggcaccagcttg

SEQ ID NO: 9476 - DNA, 359 bp, Homo sapiens
  source 1..359: mol_type = other DNA
gattgtgctactgcactctagcctgggcgacagagtcccagctactcgggttgcagtgagccgagatcgcatcactgcactccagcctggcgtgttgaccattattatgaattaaagcttatcatccctaatgggacagttatgttttcacaggaagaatatgatgaatgtctgttgctgttacccagagacactttcacagctaaactgactcaccgtctcttactcagcctcagagtgagctgcagtgtttatacatggatatgctcacatctagcaattttcagtagatacatgtatgaatgggtaggacactgcacttgccactacattcccttgccacaatcgatcaagatgat

SEQ ID NO: 9477 - DNA, 127 bp, Homo sapiens
  source 1..127: mol_type = other DNA
caggcaggagtgcagtggcgcgagagtgcctgggactacaggcgccctctgtacaaactcctttgttttagagtttgcaagagtctcgctctgtagctggaattacatgtgcatacctcaggtgatt

SEQ ID NO: 9478 - DNA, 283 bp, Homo sapiens
  source 1..283: mol_type = other DNA
cgcagtgatggagtaccatccttggcaggtggtcaccacaaccacgtgtcttccaccctcgtagaaaagcgaagactgatgggacttcccagtttccttaccctctccaagcaggagagtagagtatctcctctttactctctgactttgagattaatggactggacttcatggtaagaccctcaatcagcagctgaggaagagcgttactctacagcagcactgcccaatatgggatctcctctgtagttttactctgagctttaccagcactgagacaaag

SEQ ID NO: 9479 - DNA, 343 bp, Homo sapiens
  source 1..343: mol_type = other DNA
tcagcagctgaggaagagcgttactctacagcagcactgcccaatatgggatctcctctgtagttttactctgagctttaccagcactgagacaaaggagatgcaaagtccacagctttgaacccctgtggatgcattgctgggggacctgcagtgggcaacttggggatgcttccaacaggccccttcagattgtatctgcaacctgtttccagatccccagaccaggagacgctgctgatgtaccagctacagtgccaggtgctggcacgagcagggtcaaggccgcgttactccccacaagtccttggggcttctggggggtgcccaactccacagaatg

SEQ ID NO: 9480 - DNA, 288 bp, Homo sapiens
  source 1..288: mol_type = other DNA
gtggcgaaagcagtgaacaatgccactgcacagtcgctggtccttattgatgaatggggcatatggggtccccatggctccgcccccacatctttgtggccacctgccacaagggcccctggtgcagtattagctcctcggggacccccaggctgggcatttcccagaggtggggattggctacactgtcttttattgccagccatgcctcccacacagctgcccaggctgggcttcctgacaagcttgtggcggaggtgatgagagtcctactgggcctgggtctag

SEQ ID NO: 9481 - DNA, 268 bp, Homo sapiens
  source 1..268: mol_type = other DNA
gccacaagggcccctggtgcagtaagctcctcggggacccccaggctgggcatttcccagaggtggggattggctacactgtcttttattgccagccatgcctcccacacagctgcccaggctgggcttcctgacaagcttgtggcggaggtgatgagagtcctactgggcctgggtctaggaaaacccatcaaaagtttatgaaactggatttggaagatcctaacctcatgagccaggaagtgctgcctgctgccaccagcatcct

SEQ ID NO: 9482 - DNA, 289 bp, Homo sapiens
  source 1..289: mol_type = other DNA
gaaaacccatcaaaagtttatgaaactggatttggaagatcctaacctcatgagccaggaagtgctgcctgctgccaccagcatcctgcctcctgagactccggtggtctctagaaattttgtttcatattaggaataaagtttattttgaagaaagatattgtttctttagtctcaaaacaagagacgtaaaaatacagtgttgttgctgtaggaagactcccggattctaccccaggataatggtctctcttcgggagggaccagcccgggctgcaccagtgggagt

SEQ ID NO: 9483 - DNA, 462 bp, Homo sapiens
  source 1..462: mol_type = other DNA
cctcctgagactccggtggtctctagaaattttgtttcatattaggaataaagtttattttgaagaaagatattgtttctttagtctcaaaacaagagacgtaaaaatacagtgttgttgctgtaggaagactcccggattctaccccaggataatggtctctcttcgggagggaccagcccgggctgcaccagtgggagtggctccacccttcccacctcagagccatggggagccagggctctggcggggtgcccttggtgcaggtgccgctggggacaagccgccaagacccaggggcccagagcttcttcctttgggtgagtatcagcccaaggtcctcagtggccagtctgggttcacactcagtgaccacacagtgaacccgagtcagcctctgttgcctttcccagctacgtgccctgtggcagggtctggagctgctacagcatggccaggcct

SEQ ID NO: 9484 - DNA, 361 bp, Homo sapiens
  source 1..361: mol_type = other DNA
gggagggaccagcccgggctgcaccagtgggagtggctccacccttcccacctcagagccatggggagccagggctctggcggggtgcccttggtgcaggtgccgctggggacaagccgccaagacccaggggcccagagcttcttcctttgggtgagtatcagcccaaggtcctcagtggccagtctgggttcacactcagtgaccacacagtgaacccgagtcagcctctgttgcctttcccagctacgtgccctgtggcagggtctggagctgctacagcatggccaggcctagcgacagcagctgcatctaggggcccttggtgctgccccacacagcccatcgtaatgactgccac

SEQ ID NO: 9485 - DNA, 238 bp, Homo sapiens
  source 1..238: mol_type = other DNA
ggtcctcagtggccagtctgggttcacactcagtgaccacacagtgaacccgagtcagcctctgttgcctttcccagctacgtgccctgtggcagggtctggagctgctacagcatggccaggcctagcgacagcagctgcatctaggggcccttggtgctgccccacacagcccatcgtaatgactgccacttcccacctgcctgggagacgacctcaggttttcaccatgtttgca

SEQ ID NO: 9486 - DNA, 188 bp, Homo sapiens
  source 1..188: mol_type = other DNA
ccctgtggcagggtctggagctgctacagcatggccaggcctagcgacagcagctgcatctaggggcccttggtgctgccccacacagcccatcgtaatgactgccacttcccacctgcctgggagacgacctcaggttttcaccatgtttgcagaatctgatcaaggctagttcctcccaccctaca

SEQ ID NO: 9487 - DNA, 525 bp, Homo sapiens
  source 1..525: mol_type = other DNA
aggctggactgcagtgtagctgggcctggctaatttttgtatttttacaaatactgcagctctgtcgccaggctggagtgcagtggcacgatcagttcactgcgtagctgggattacaggcgcctgccctggctggtcttgaactcctgacctggtgatccacccgccctggcctcccagagtgctgggacaggtgatccgctcatcaggcggctccctgctgggcacctccccgctaccgggtggggaacgccctccaccggcagggccggccgaccctcttgggccagttccctagctgcccgctgggcgccgccctcgccacccggccgaggacccgcacaaggtgcccgtggcggcgcctgacgggagcgtcgtgctcagggtccgcgcccagcgccccgcgccccgcgctgttcctcgtgagaccggcgggcggcgagccgcgcggcccccggggcagtgtcggacacggcgggcgcgcactcgcaggcggggcacggccgcccccgccaggacccgcag

SEQ ID NO: 9488 - DNA, 371 bp, Homo sapiens
  source 1..371: mol_type = other DNA
gacttctcagccttaagggacccttagagaccatctagtgtgaccctcctgagtagctgggattacagaggctggactgcagtgtagctgggcctggctaatttttgtatttttacaaatactgcagctctgtcgccaggctggagtgcagtggcacgatcagttcactgcgtagctgggattacaggcgcctgccctggctggtcttgaactcctgacctggtgatccacccgccctggcctcccagagtgctgggacaggtgatccgctcatcaggcggctccctgctgggcacctccccgctaccgggtggggaacgccctccaccggcagggccggccgaccctcttgggccagttccctagctgcc

SEQ ID NO: 9489 - DNA, 427 bp, Homo sapiens
  source 1..427: mol_type = other DNA
caggctggagtgcaatggcaagatctcggatttacaggcgcgtgccaaccacttgccttggccgcccaaagtgaggctgcagtgcagtggcgcgaggtcactgccagcctcccgagtagctggtattccctaggcctcccagagtgctgggattaaaggcttgagccacggccctcggcctttttttctttttatcagctgaatttaagattcaaaacattttttaattttattttttaaattttatgtttttactttaacaaatatagaaaagtgcacacttcataatcttaacaaactccccacaattctcgataggaagtgtgtgtagggcacaccgccacccgtctggcagcccaggctagggtccgcgcctgcgcaatgggagccggccggccagggaggaagtcggaatgaaggaaacccc

SEQ ID NO: 9490 - DNA, 460 bp, Homo sapiens
  source 1..460: mol_type = other DNA
accaccgggtcgccgaacttgcggccaatcagccgcttcgcgtcaaacacggtgttctgcgggttcagcgcctccccgatgagccgctcggtgtccgtgaaggctgatctccaccttgccgtgttggaacacccccacgcaggagtaggtggtgcccaggtcgatgccgatcgccgcggctttggccatgccgctccgctctgagattgggaagagctcggtccttccggacgccggaaactcgacgcgccggtgcctgcagccgcacaggttcgctcctcaggctagccgttatccggagagctcgatgaggctgccaggtcgggaatattccagggttttcgcaccaatcagaggccagagtgccgccccctgctcagaactctccagagtcttctgggattcactggaggtctccatggcgatgctgaccgcctgcgcttcagcgcctaattgatct

SEQ ID NO: 9491 - DNA, 530 bp, Homo sapiens
  source 1..530: mol_type = other DNA
ccccctgcctgtccaggccgtaggcgatggcggcggccgtgggctcgtttggcctggcgctgtaggccggcacggtgatcaccgcgttggtcaccgggtagcccaggtacgcctcggcgatctccttcatcttggtcagcaccatggacgagatctcctcggggtagaaccaaccaccgggtcgccgaacttgcggccaatcagccgcttcgcgtcaaacacggtgttctgcgggttcagcgcctccccgatgagccgctcggtgtccgtgaaggctgatctccaccttgccgtgttggaacacccccacgcaggagtaggtggtgcccaggtcgatgccgatcgccgcggctttggccatgccgctccgctctgagattgggaagagctcggtccttccggacgccggaaactcgacgcgccggtgcctgcagccgcacaggttcgctcctcaggctagccgttatccggagagctcgatgaggctgccaggtcgggaatattccagggttttcgcaccaatcagaggc

SEQ ID NO: 9492 - DNA, 175 bp, Homo sapiens
  source 1..175: mol_type = other DNA
cgggtgggggctcccagatcaattaggcgctgaagcgcaggcggtcagcatcgccatggagacctccagtgaatcccagaagactctggagagttctgagcagggggcggcactctggcctctgattggtgcgaaaaccctggaatattcccgacctggcagcctcatcgagctc

SEQ ID NO: 9493 - DNA, 603 bp, Homo sapiens
  source 1..603: mol_type = other DNA
aagtcgatgccctcaaacagggagtcgatctccaggctggcctgggtgctggacgacagggtcctcttggccctctcgcaggcggtgcgcagccgcctcacaagtggttcaccagcctgttgtcaaagtcctccccacccaggtgggtgtccccggccgtggccttcacctcgaagatgccgtcgtcgatcgtcaggatggacacgtcgagcgctcccccttgcctgtccaggccgtaggcgatggcggcggccgtgggctcgtttggcctggcgctgtaggccggcacggtgatcaccgcgttggtcaccgggtagcccaggtacgcctcggcgatctccttcatcttggtcagcaccatggacgagatctcctcggggtagaaccaaccaccgggtcgccgaacttgcggccaatcagccgcttcgcgtcaaacacggtgttctgcgggttcagcgcctccccgatgagccgctcggtgtccgtgaaggctgatctccaccttgccgtgttggaacacccccacgcaggagtaggtggtgcccaggtcgatgccgatcgccgcggctttggccatgccgctccgctctgagattgggaaga

SEQ ID NO: 9494 - DNA, 346 bp, Homo sapiens
  source 1..346: mol_type = other DNA
tcccagctgaggtcaaggctgcagtgagctatgatcacgccactgcattccagcctgggagacagagatcctgtctcgaataaaaaaattttttttccctacatgatcaaagagaatatgatcttctccctccttttaggactacagctgctttcagcttaatgtaaaaactgtcctaagatctgcgacaggttacagaaccggtgattggacccacgggtctaattgttttattctctaaagaggaaaacaaatgaatacagtgtgggactcccgtcctggctgctgctctgctcttcggactcaagaccatggccccctttccgatagaacagattgctcaagc

SEQ ID NO: 9495 - DNA, 436 bp, Homo sapiens
  source 1..436: mol_type = other DNA
gcccctgaggtatctatcaggtgtagtagccagagggagtaaacccctagcaccaccatttaaagggatgtttgctggcccacgtccagccgcgggcctggagtcccagctacccgggaggctggggcgggaggatcgcttgaggctgcagtgagccgtgattgcgccactgcactcttactctcctgatgcctcacggggcgagggacatcagtcgcgcgtccccgcgcagacgggtgcgcgctggccgtgggcggtggggaatctgatttagttgtatgaaagttacaaaattctccaatattttcgtcttgtaaatcacctagtatgagagaaactcgaaaggtcctttctttcctcctttaatccctttttggaaaaaaaaaaacatgaagccagccccgccctcaggccccgagttttctgaccttcaagg

SEQ ID NO: 9496 - DNA, 283 bp, Homo sapiens
  source 1..283: mol_type = other DNA
ttgcagtgagccgagatcccgccactgctctccagcctgggcaacagagtcagaccgcgtttataaaaggatttgaaatgacttatgagtttcaataatttttttttcgccctgtcgcccaggctggagtgcagtggcgcaatcgagtagctgggactacaggcgccgccactagagacggggtttcaccgtgtcgcgcccggcctaatttttaaataaatagagacgggggttgggatggtcccgaactccccaggcaaattcagatttcgctgtgctggac

SEQ ID NO: 9497 - DNA, 461 bp, Homo sapiens
  source 1..461: mol_type = other DNA
aaggatttgaaatgacttatgagtttcaataatttttttttcgccctgtcgcccaggctggagtgcagtggcgcaatcgagtagctgggactacaggcgccgccactagagacggggtttcaccgtgtcgcgcccggcctaatttttaaataaatagagacgggggttgggatggtcccgaactccccaggcaaattcagatttcgctgtgctggacgctaaactggcgcagctgcgcgcgcccgcgcgcgcgcgggaagagtcccagggtcattaacggaccatgggctgctcttaggagcagcacccggctggcgctggccggccggcgccggggactttcttccgcctggccagacagatccctgttttttgtttttcaaaattcagaaagcatctccgaatatttgagaggagtgtgaaacatactgtgtggacaaacaacgccgccataaatggcc

SEQ ID NO: 9498 - DNA, 274 bp, Homo sapiens
  source 1..274: mol_type = other DNA
ccgccataaatggccccggcctcaggggatcccaacggcttgcgctgcctttgcgcagcagccggcgggcggccacgtcgcggcctggctggggtaggagggggaactcggctagcggccccacagcccctgctgactcaaaacaactgtgagtgggctgatgccatcaccgcagcgctctgaatgcctcttcggaaagctttgttcccaagcaagctttcgttcatggccaggctgaagtgcggtggcacacctcgtgatccgcccctctcgg

SEQ ID NO: 9499 - DNA, 481 bp, Homo sapiens
  source 1..481: mol_type = other DNA
agggcacctggagcggaacaacggctccctggaccggccctactacatgtccaagagccttctaaagattctgggcagctccggccctgatccaggactgtaaaaaaaggttttaggccaggcgccgtggctcacgcctgtaattgaggcgggcggatcacctgagtcaggagttgcacctgtcatcccagctactcgggaggctgaggcaggagaatcgcttgaacaggttgcagtgagccgagatcgcgccacacaaaacaaacaaacaaaaagattttattaaagatattttgttaactcagtaaatctgtgccgcgcccggctctttaaaatcggccccgcccctgtgacgtgtcctggccgttcgggtcacgcgctccgggcctccaagagggcctccaagagggccaatcggaagggcagtccgggaagcgcggcggggcctccagaccggggcgggcttctttaaagggtccgg

SEQ ID NO: 9500 - DNA, 178 bp, Homo sapiens
  source 1..178: mol_type = other DNA
cccagccaggccctggaggtctgacagcccctccctcccagagctggttcctccctgggagggcaacttcagggctggccaccccccgtgttccccatccggccgcccagtgcggggcaaccttcctggctacagattgagtcactgcatccccagcccgctgggcaggtgagacgcc

SEQ ID NO: 9501 - DNA, 273 bp, Homo sapiens
  source 1..273: mol_type = other DNA
gaaggcctttaattggcctcaggtaaatacagctatcgagattgtctatcttggtgtatatcatttataaagagtgtcaccagtcagtaatgacgccccttcgtgctcgttagaaagagcaaaaaggcgagggacagagacgccacacctgggcccaggcgtgtctcgccctcggtccctgcagaactgaggccaggaatgacaggaattcctaggacagtcacagccatctccgaggccgctctcccctccctccctcgcccacgtgacccg

SEQ ID NO: 9502 - DNA, 624 bp, Homo sapiens
  source 1..624: mol_type = other DNA
gccccttcgtgctcgttagaaagagcaaaaaggcgagggacagagacgccacacctgggcccaggcgtgtctcgccctcggtccctgcagaactgaggccaggaatgacaggaattcctaggacagtcacagccatctccgaggccgctctcccctccctccctcgcccacgtgacccggggcggccgcgcgccggctcggcccccagcgcaagcggcgatggcggcggcggcgggagctgcagcggcggcggccgccgaggtgcgagaggcgggtgcatgcccgcgcgcgcgcccgggggaagcgcgcgcccgtgcaatgctccgggggtgcaacggggccggggggcccgggcgggacttgcagcaatccagggggccagcaccgggggcggggagtgggcacggaggcgcgcgtgcagccgccggctgcccctgagtgggcgacgggcgccggggccccaggagcacgcgtgaggggcacgaggggccgtccaccgggctggggggcagcgggtgctggaggggttggtgcccggggtccccgcggcctgggggacaaagggggagcggcgcagccgggaggagggggcggggccggggcgcggaggccccgccccctccc

SEQ ID NO: 9503 - DNA, 679 bp, Homo sapiens
  source 1..679: mol_type = other DNA
cagcagcgcccccatctcagcgggggcctccccctgggaggggagacaaggtccaggatgcctgggccctgggaagagagagtaggctccggggcctacctcttcctctgtggggccccccccttccgcggcctcggctgcccggaggggccgcacgacccctcccccgggcccgccccgcatctctggggccgagagaagaggagggggagggggcggggcctccgcgccccggccccgccccctcctcccggctgcgccgctccccctttgtcccccaggccgcggggaccccgggcaccaacccctccagcacccgctgccccccagcccggtggacggcccctcgtgcccctcacgcgtgctcctggggccccggcgcccgtcgcccactcaggggcagccggcggctgcacgcgcgcctccgtgcccactccccgcccccggtgctggccccctggattgctgcaagtcccgcccgggccccccggccccgttgcacccccggagcattgcacgggcgcgcgcttcccccgggcgcgcgcgcgggcatgcacccgcctctcgcacctcggcggccgccgccgctgcagctcccgccgccgccgccatcgccgcttgcgctgggggccgagccggcgcgcggccgccccgggtcacgtgggcgagggagggaggg

SEQ ID NO: 9504 - DNA, 462 bp, Homo sapiens
  source 1..462: mol_type = other DNA
ttagagtagaatcatactaacataataaatcacatcattaaaattagtcctagggttaattatatactaaagacatatttcaggcctgaatactagctttacaagagttggaaaagccatagctaccaacagctctgttagccacggggcggatggggccctgagaggtgccacggatgcacccagggcagcgctcggcacagctggaccggcacccctgggagcaggtggcagcgcccgcagccgagagaacgggtgcgcgcgcgcgctgcgggatgcggcgcgggcggggcgcggggacgcggagggggcgggcccgagtgagcgggcctccgcgcggcacttggcacgcacgcgcaaactggccgcgtttccgctctggcggacaaataaccggccaaagaggaggcaaggccgtccggccctttaaccgcgaaggggggatcctgctcctttaattcc

SEQ ID NO: 9505 - DNA, 332 bp, Homo sapiens
  source 1..332: mol_type = other DNA
tgatttttatttgcaaaacaaaacccacaacataattcaagaagttagccttcaattagagtagaatcatactaacataataaatcacatcattaaaattagtcctagggttaattatatactaaagacatatttcaggcctgaatactagctttacaagagttggaaaagccatagctaccaacagctctgttagccacggggcggatggggccctgagaggtgccacggatgcacccagggcagcgctcggcacagctggaccggcacccctgggagcaggtggcagcgcccgcagccgagagaacgggtgcgcgcgcgcgctgcgggat

SEQ ID NO: 9506 - DNA, 520 bp, Homo sapiens
  source 1..520: mol_type = other DNA
ctggagtgcagtggctcacttataaatcaaaagggtttttacgaacctaaatgatcacttcagagagtttaccctacattgttcaaaaaggtattgaaaagacttctgttaacacactagcttcaattcctgcatttcatacaagtgtaggttatgatttaaaggcatttttgaaaatgtatttactttgccagttgggaatttcatcctagcgtaaaaatgttgtaaacatttttcctccaaaactttttccacctagattatctctagggaaggattgtagggaataaaaaagtattgtcaatcttcctatttatcaagaagttctaaaaaaattagtttcatcttcaagaagacagaactgttctctaaaactttacttaaatgaaatattttgcaatatcttgagactattgactattcacacaagagcaaggtgcatgtgtgcacacacgagcccaaatatgtgtttgcctgcgtgtttgtgagcatgcgtgtatggtgcacatgtgcacgcatg

SEQ ID NO: 9507 - DNA, 563 bp, Homo sapiens
  source 1..563: mol_type = other DNA
ctcacttataaatcaaaagggtttttacgaacctaaatgatcacttcagagagtttaccctacattgttcaaaaaggtattgaaaagacttctgttaacacactagcttcaattcctgcatttcatacaagtgtaggttatgatttaaaggcatttttgaaaatgtatttactttgccagttgggaatttcatcctagcgtaaaaatgttgtaaacatttttcctccaaaactttttccacctagattatctctagggaaggattgtagggaataaaaaagtattgtcaatcttcctatttatcaagaagttctaaaaaaattagtttcatcttcaagaagacagaactgttctctaaaactttacttaaatgaaatattttgcaatatcttgagactattgactattcacacaagagcaaggtgcatgtgtgcacacacgagcccaaatatgtgtttgcctgcgtgtttgtgagcatgcgtgtatggtgcacatgtgcacgcatgatctattgaccctatagatatattaaggggaaaggtttcaccctttgaagcagctgc

SEQ ID NO: 9508 - DNA, 260 bp, Homo sapiens
  source 1..260: mol_type = other DNA
gggctgtggcagcctcccaggtctttacaaccggcccctcgtagcaaggtcccgccgccacgagatctcttccgcatgcagccctggctgaggcagcacctggggtctaggatgccagaggcagcagctgggaaatcctcagggctcctaccagcaggttcactttcacatggaatttcccagttatgaaattaataaaaatcaatggttggaggccaggtagggccagcagcggggccctcccgcttggatgttccggg

SEQ ID NO: 9509 - DNA, 252 bp, Homo sapiens
  source 1..252: mol_type = other DNA
tgcaccccagaccagtcagggatggggaggtggtacctactctcctacttcaggaggggagaagcgtcctatttcaccaaaaaagaagcaggaattcctgaattttatgactatgacgttgccctgatcaagctcaaatatggccagactatcgctttggcaacaaagtaagacatacttggcaacctaaggaggcactcaggcagctgtggctatgacaaagtcaaggacatctcagaggtggtcacccct

SEQ ID NO: 9510 - DNA, 130 bp, Homo sapiens
  source 1..130: mol_type = other DNA
aacaaagtaagacatacttggcaacctaaggaggcactcaggcagctgtggctatgacaaagtcaaggacatctcagaggtggtcacccctcggtaggtaggcagagcctgcctcaccttaggaccgcat

SEQ ID NO: 9511 - DNA, 404 bp, Homo sapiens
  source 1..404: mol_type = other DNA
tgttcagatcagattcagaagaatgtgcatttttaaaaagctccctggctaatcatgattggagactcactgattttagaaaggttggaggctcaaagcctatcatctcagtcaccaagtgccctggtgcttggatactttgaaagagcagctctcaaactggagctccaggcaagttcagcagctcccagtgccccgtgcatccgagctccacggcccgaaggggtaggtccaggggatcctggagccacagcagctgcctggcagcccggaagtgcggcaagtccccgccccggaacgggcggaagtagaggcaacttccggtacagccccgccgagagcgtgaactatcgctgcggaggggcagacgaaggccgggcggaagtgcgcgcctggggccgcct

SEQ ID NO: 9512 - DNA, 325 bp, Homo sapiens
  source 1..325: mol_type = other DNA
caaggcttgggaaagcccacctctcgaccatatcttctcagagtgcagagtctgtgaaaggttaggccatgtccacacacgggatccctaccctcgctagggtaaggacaaccgcggggtttacccgagggggcggcaaccgggggccccacggtctccggccgcgcccgcgctggccgctgatagcgggctcacaacgaggcggccccaggcgcgcacttccgcccggccttcgtctgcccctccgcagcgatagttcacgctctcggcggggctgtaccggaagttgcctctacttccgcccgttccggggcggggacttgcc

SEQ ID NO: 9513 - DNA, 563 bp, Homo sapiens
  source 1..563: mol_type = other DNA
ggggacttttaacagggtctctgtggcaccccagtgcctggcacagtgcccggggcttccggcggtcgcaccgacgcccctcaccagctgccggtcggccacggtcctgtcaggcacaaggctgtacacctggctcctcagcacgatgggcggcagcgcgtcctcaaacaggcctcgcgggaacagctgcatgagttctgagacagccgcgcgcgccgacccgggcaccggaagcgaggccccacccccggggttgccatggttacctggcgaatatcccgggaacgtacggtctccccgggcgtccctcctagaccaggtgatgacgaaaggagcgtcaacttgtcgtccctcaggcccgtcagtgctgggaggggcggtggcgacgcacataccagcatcacctccgccaggccgggccccacgccggccgcggattggctccctccaagggcacgcacgcccggggactcgttggcggcgtggaggggcgccggtggcaaagctcacacctcccccgccccgggaggggtttgcccgccactgtcgctgaatcatcgaaa

SEQ ID NO: 9514 - DNA, 218 bp, Homo sapiens
  source 1..218: mol_type = other DNA
gactgggccgccaggctctccagaggagaatgcctcacctggggtcatcctgggatacgggtgggagctgcaacatcgttcccttaccctgacatattcaaacatcttcatggtaagtgggacccctcatggccagggctgtgcatctccttggaggtcttgagctccacatcttcccagggcgttaacctccccagaggggtctggcatgtactgct

SEQ ID NO: 9515 - DNA, 453 bp, Homo sapiens
  source 1..453: mol_type = other DNA
ggggacttttaacagggtctctgtggcaccccagtgcctggcacagtgcccggggcttccggcggtcgcaccgacgcccctcaccagctgccggtcggccacggtcctgtcaggcacaaggctgtacacctggctcctcagcacgatgggcggcagcgcgtcctcaaacaggcctcgcgggaacagctgcatgagttctgagacagccgcgcgcgccgacccgggcaccggaagcgaggccccacccccggggttgccatggttacctggcgaatatcccgggaacgtacggtctccccgggcgtccctcctagaccaggtgatgacgaaaggagcgtcaacttgtcgtccctcaggcccgtcagtgctgggaggggcggtggcgacgcacataccagcatcacctccgccaggccgggccccacgccggccgcggattggctccctccaagg

SEQ ID NO: 9516 - DNA, 343 bp, Homo sapiens
  source 1..343: mol_type = other DNA
ggggacttttaacagggtctctgtggcaccccagtgcctggcacagtgcccggggcttccggcggtcgcaccgacgcccctcaccagctgccggtcggccacggtcctgtcaggcacaaggctgtacacctggctcctcagcacgatgggcggcagcgcgtcctcaaacaggcctcgcgggaacagctgcatgagttctgagacagccgcgcgcgccgacccgggcaccggaagcgaggccccacccccggggttgccatggttacctggcgaatatcccgggaacgtacggtctccccgggcgtccctcctagaccaggtgatgacgaaaggagcgtcaact

SEQ ID NO: 9517 - DNA, 382 bp, Homo sapiens
  source 1..382: mol_type = other DNA
gtactggcggaggctcagtcttggtccccctgggatccatgaggtcctaagacaagcgtcctccaaatgcagtgaggttagcagagctatgacgtcatggcagtttcgatgattcagcgacagtggcgggcaaacccctcccggggcgggggaggtgtgagctttgccaccggcgcccctccacgccgccaacgagtccccgggcgtgcgtgcccttggagggagccaatccgcggccggcgtggggcccggcctggcggaggtgatgctggtatgtgcgtcgccaccgcccctcccagcactgacgggcctgagggacgacaagttgacgctcctttcgtcatcacctggtctaggagggacgcccggggagaccgtacgt

SEQ ID NO: 9518 - DNA, 391 bp, Homo sapiens
  source 1..391: mol_type = other DNA
cacaagagaggaggcctatcttacctgggccttagaaagagccctgaaatagaattcagttcttggtggcttatatctaatttttgtgaaagcatttgaaaaactatagcaccatggcgcagtctgcctaggcagtggcaggagcgcagaagactctgattcctctcctcggtcctaagaccgaatgaccaacagaggcagttggtgcgagcacagaaccaccccaggctgggattttggttctcagagcccagccctcatctctgctggcttcccactgccctcaggcatctggtgaatgctggagtcctcaccgtccgagatgctgggagctggtggctgggagattcatcaagtactttgttaaaggccaggctgtccttagcatggt

SEQ ID NO: 9519 - DNA, 283 bp, Homo sapiens
  source 1..283: mol_type = other DNA
cccttccatggaaagtggaaccaaattgccaaataaagtacctcctgaaaggggtcagtaagagacaagtgtcttagaagcctgtcattgttttgtgagggcctttaaggcccttgtacgcccaggtatacatgagcttgtgtgcacctataccctgatacagatatattctgggccaagattcagagtttcccatggacacccaggtgtccggggtgcccccacaactctgggtcccagcttagctgggctgggggaggagcaaggtccagagtcaactctg

SEQ ID NO: 9520 - DNA, 383 bp, Homo sapiens
  source 1..383: mol_type = other DNA
cagagcgaggaaactgcccgtctccggggctttttctgcaaggtgggctgttttcctttcaaccaaagaaaggtgctccgacagctagatttccaggctggaatcctgccctccacacccgtgttgcccacaaagcacttagagcagtgtctgggcactaataacaatcacactgggatacctgtatatactggaatgccccaggcaaaccaggctttctatctgtagcttaaactaacaaacaaacccggactgccattttctctctgagacaaacatcatgccagtgagggcccaggtcggggcggacacccttgcctgatgcaggaaaaaggtcaggaaatacggacgtcccaaggccaatgagactggtgtcatgtggc

SEQ ID NO: 9521 - DNA, 283 bp, Homo sapiens; identical to SEQ ID NO: 9519
  source 1..283: mol_type = other DNA

SEQ ID NO: 9522 - DNA, 351 bp, Homo sapiens
  source 1..351: mol_type = other DNA
cagagcgaggaaaccgcccgtctccggggctttttctgtcaaggtgggctgttttcctttcaaccaaagaaaggtgctccgacagctagatttccaggctggaatcctgccctccacacccgtgttgcccacaaagcacttagagcagtgtctgggcactaataacaatcacactgggatacctgtatatactggaatgccccaggcaaaccaggcttggactgccattttctctctgagacaaacatcatgccagtaaccagaatggatgcaggaaaaaggtcagggttgcatttcccttcctttttgaaatacggacgtcccaaggccaatgagactggtgtcattggc

SEQ ID NO: 9523 - DNA, 502 bp, Homo sapiens
  source 1..502: mol_type = other DNA
cagaattacttcctttcattcgtttgccagggtgaccatggacaagccgcttcatccccgggaccataatgctgggaatggcgctggactcacatcctcctccctcctccctgactcggagccgaggggtggaagaaactatgcctatgactcagctccctgaggaaggggtgtggtgggtcaccgaccctcaccccactcccagaggaggacagagcagccggccagtctgggcctgggtccctggccctcactgtggggacggggtacagatccccacccatgccccaccctggctgccccggcccagtggggtcagtgtggggctgggggggagatcacagcctggcagtgatgggagccgtgcattggccggctgcccagaccagctctcgatgtttggggtgtctccgtgacaacccagagacctccggggagtctctctcagctggggtcagggtaaacaaaggccctctctgcacccccagcagcctccagagga

SEQ ID NO: 9524 - DNA, 168 bp, Homo sapiens
  source 1..168: mol_type = other DNA
acagagaccctgtcaggccgtggggccccgggggactatcaggcaatgccacaggtggccccttgccagtctctgattcacactgacttagaacgggggggtggccaggtggactgtttcaaatttccctgatccccaggcttggggcaattggtaagtccccaggtg

SEQ ID NO: 9525 - DNA, 94 bp, Homo sapiens
  source 1..94: mol_type = other DNA
gggtcccagagacgcccctgctccctgccccagactgccaggggagaactgcctgggaggggtgggaggacctgccctatctccgctcccctcc

SEQ ID NO: 9526 - DNA, 230 bp, Homo sapiens
  source 1..230: mol_type = other DNA
ggcatccttcactcaaggccgagactcctgggagctggagatgctatggacgggctcaactgtccttcatgccaatctggctgcctgtcagcagcctcagttggcagcccagagctgaaggcctatgggggttgcccaggctgcccttgggaacctggtgcagggctggctcagggtctgcgcaagatgtttggctgattaaaagttaaaccttaaaagagccgacacat

SEQ ID NO: 9527 - DNA, 179 bp, Homo sapiens
  source 1..179: mol_type = other DNA
agtagctgggagcccagagtctcagtcagcctcctgggtagctgggatataggcgcccgccatcacgcctcactgcaacgctaagacagggtctcaccatgttggcccactttgactcttgagcagcctggccagcccgaccgcgccaacctctccggctgccctctccgcgtggggca

SEQ ID NO: 9528 - DNA, 149 bp, Homo sapiens
  source 1..149: mol_type = other DNA
agtagctgggagcccagagtctcagtcagcctcctgggtagctgggatataggcgcccgccatcacgcctcactgcaacgctaagacagggtctcaccatgttggcccactttgactcttgagcagcctggccagcccgaccgcgccaa

SEQ ID NO: 9529 - DNA, 175 bp, Homo sapiens
  source 1..175: mol_type = other DNA
caacttaacaagttccctaggtgatatgtatgcacacttattttttatcctggagaacaccctgtactgaaaggcttcgctgtcgcccaggctggagcgcagtggcacgatcttggctcaccctcccgggtagctgggactataggtgcccgaattgctgggagagtagctggga

SEQ ID NO: 9530 - DNA, 234 bp, Homo sapiens
  source 1..234: mol_type = other DNA
atctggctgtgtttttgtttaaaaaaaaaaaaaaactggtgtagcttcagctccttagtcctggacgaagaaggtatgtatgttggtagcctgggaacttttcagaccatcgcagttctgaactctgcacaattcacaagtatttatctcttctaaagaggactggcaccccacaatacaatcactgagtcttggtgggggagcgagtgggaaacatctgaagcgctccccctc

SEQ ID NO: 9531 - DNA, 343 bp, Homo sapiens
  source 1..343: mol_type = other DNA
ggaaagaaggcctctccaggcttcgttgcgctccgcagcagaactccccaaggggcggccaggggggtggcctggagggctgatgccagcccgggcgtgcccctcaccagagacgcagagagtcctcgaggccccttgagctaagtgcagcctggtaagcgacccaccctcaaggggcggagggcgcgtagggatgcgctgactcatgcccgtgtgggtggctccctaccgaaaagggcttttacttagcatttaaagacgtttctctagagataaggatggtctaaatttgtctcaatcaaaacatttttgcgctcagaattgagcgctcacgcgaacgcct

SEQ ID NO: 9532 - DNA, 268 bp, Homo sapiens
  source 1..268: mol_type = other DNA
catacataccttcttcgtccaggactaaggagctgaagctacaccagtttttttttttttttaaacaaaaacacagccagataattaaggcgttcgcgtgagcgctcaattctgagcgcaaaaatgttttgattgagacaaatttagaccatccttatctctagagaaacgtctttaaatgctaagtaaaagcccttttcggtagggagccacccacacgggcatgagtcagcgcatccctacgcgccctccgccccttgagggtggg

SEQ ID NO: 9533 - DNA, 236 bp, Homo sapiens
  source 1..236: mol_type = other DNA
aacaccagtttttttttttttttaaacaaaaacacagccagataattaaggcgttcgcgtgagcgctcaattctgagcgcaaaaatgttttgattgagacaaatttagaccatccttatctctagagaaacgtctttaaatgctaagtaaaagcccttttcggtagggagccacccacacgggcatgagtcagcgcatccctacgcgccctccgccccttgagggtgggtcgctta

SEQ ID NO: 9534 - DNA, 350 bp, Homo sapiens
  source 1..350: mol_type = other DNA
agcccatgcaccacccggcttgtaggacgcgcggtggggcgcgggggctgcaagcagcagcagcgcccacgccgcggggagccgctgcccgcagagccccagcatgctcccggagatggcaacaccctcccaactcagcgttcgggatgcatcgcctcagccatgaacaacgcggagttcttccaggccccttgaagagtgcagactcccacctggcctgggtccgcgtcacgtccggggctttctctggcaaccgcgcgagcgttcccttccattgcgccctaggaaagaaggcctctccaggcttcgttgcgctccgcagcagaactccccaaggggcggccaggggg

SEQ ID NO: 9535 - DNA, 343 bp, Homo sapiens
  source 1..343: mol_type = other DNA
aggcgttcgcgtgagcgctcaattctgagcgcaaaaatgttttgattgagacaaatttagaccatccttatctctagagaaacgtctttaaatgctaagtaaaagcccttttcggtagggagccacccacacgggcatgagtcagcgcatccctacgcgccctccgccccttgagggtgggtcgcttaccaggctgcacttagctcaaggggcctcgaggactctctgcgtctctggtgaggggcacgcccgggctggcatcagccctccaggccacccccctggccgccccttggggagttctgctgcggagcgcaacgaagcctggagaggccttctttcc

SEQ ID NO: 9536 - DNA, 370 bp, Homo sapiens
  source 1..370: mol_type = other DNA
caaaaatgttttgattgagacaaatttagaccatccttatctctagagaaacgtctttaaatgctaagtaaaagcccttttcggtagggagccacccacacgggcatgagtcagcgcatccctacgcgccctccgccccttgagggtgggtcgcttaccaggctgcacttagctcaaggggcctcgaggactctctgcgtctctggtgaggggcacgcccgggctggcatcagccctccaggccacccccctggccgccccttggggagttctgctgcggagcgcaacgaagcctggagaggccttctttcctagggcgcaatggaagggaacgctcgcgcggttgccagagaaagccccggacgtgacg

SEQ ID NO: 9537 - DNA, 400 bp, Homo sapiens
  source 1..400: mol_type = other DNA
ggtaccagggttgtgcctggagcggggagtcgcctaccctgcgagtagcagatgagatgcaccccttgaggggcctttgccatgatggggaccacagcctctcggaaccctagctctctctcccatcgaagagatcgagcactgtcaccacagtcccggggtgtgtctgaccagctccctgaggaactgggcaggcccagaggggtggcccctgccagacctcattgatgtattccagcaggtggcggaagctgtacgagctgtcgaagagcccatgcaccacgaccggcttgtaggacgcgcggtggggcgcgggggctgcaagcagcagcagcgcccacgccgcggggagccgctgcccgcagagccccagcatgctcccggagatggcaacaccctc

SEQ ID NO: 9538 - DNA, 343 bp, Homo sapiens
  source 1..343: mol_type = other DNA
cgcgccctccgccccttgagggtgggtcgcttaccaggctgcacttagctcaaggggcctcgaggactctctgcgtctctggtgaggggcacgcccgggctggcatcagccctccaggccacccccctggccgccccttggggagttctgctgcggagcgcaacgaagcctggagaggccttctttcctagggcgcaatggaagggaacgctcgcgcggttgccagagaaagccccggacgtgacgcggacccaggccaggtgggagtctgcactcttcaaggggcctggaagaactccgcgttgttcatggctgaggcgatgcatcccgaacgctgagttgg

SEQ ID NO: 9539 - DNA, 182 bp, Homo sapiens
  source 1..182: mol_type = other DNA
aaagtgctgcaattacaggcgtgtgccaccctcctgagctgaagggttcacccggcccggggggccatatggctctcctgaggatatattcaggggtccccaggaactcctcggtccagagaccaagtggtggccttggagtagagacggggttttagtagagacttggcctcccagaaccc

SEQ ID NO: 9540 - DNA, 312 bp, Homo sapiens
  source 1..312: mol_type = other DNA
aggtgttatccctgtatttatggaaataaagttccatttcctgacctggctccaggcctgggtgcccagagcctggctagggtggggacccccttccagtccccaagactggggggttaagctcagggctccagtggtttgggcctcagcctcatgggtggaatgcgcctgccacccccaggctagacgagggggcagagctcttcctgttccccctaagcccgggggcatagcttctgatctggggagtccagaaataggggcctcagagggggcaggaatgggaggactctctggcccagcccctcctct

SEQ ID NO: 9541 - DNA, 154 bp, Homo sapiens
  source 1..154: mol_type = other DNA
ttgctctgtcgcccaggctagagtgcagtggcagttcactgcaacctctggttcaagggattctcctgcctcagcttcccgagtagctggatcttggccaggctggtctcggcgcctgtagtcccagctactcggtgcagcaagccgagatcgc

SEQ ID NO: 9542 - DNA, 234 bp, Homo sapiens
  source 1..234: mol_type = other DNA
ggcgcctgtagtcccagctactcggtgcagcaagccgagatcgctatgatgctgaaaggatcatgatatgctaaggacatacacacaggtgtatcccttagagggtacctgcagagtgcccttgggagaggggacgggcatccattaaccttttcttgcctgcagcctgtagggtccagggctgagctgtctctactgataccaggcgagggtagggcccggggtgagctcttc

SEQ ID NO: 9543 - DNA, 575 bp, Homo sapiens
  source 1..575: mol_type = other DNA
agtcagggagtctgtgcagcacttacaggtgagggatggggagatgggaccccaagaaccccaactaggacccgtactcagggtcctgagccgggcgctgtgttccaggaccatgtaccgcgttatgtgggcagtgtgctgccagggctggaagaagcggcacccgggggcgctcacctggtcttccgggccttgcgggaggcgcgccccacggagctggggagctgggtcgtccaagccttgcctgaacggaggcgtctgcgttaggcctgaccagtgcgagtgcgcccccggctggggagggaagcactgtcatgtgggtgagtcagctactagacgtggatgaatgtaggacctgcggctgcccccatgacctagtgctaggcgtggacgggcgcacctgcatggaggggtccccagagcccccaaccagtgccagcatactcagcgtggccggtgagtgggcaggagtacgggccacccgagggactcgggacgggcgtccgggctcgtagttcgggagaggagattcacgagctgcgagggcgcctggagcggctggagcaggtgagcca

SEQ ID NO: 9544 - DNA, 506 bp, Homo sapiens
  source 1..506: mol_type = other DNA
cccccggctggggagggaagcactgttgtgggtgagtcagctactagacgtggatgaatgtaggacctgcggctgcccccatgacctagtgctaggcgtggacgggcgcacctgcatggaggggtccccagagcccccaaccagtgccagcatactcagcgtggccggtgagtgggcaggagtacgggccacccgagggactcgggacgggcgtccgggctcgtagttcgggagaggagattcacgagctgcgagggcgcctggagcggctggagcaggtgagccaagcctgctagacctggggcctgggtcagagcggtgctgcccgtgccgcctgaagagctgcagccagaacaggtggctcgaatctctcagcgaccaggtgctgctgctggaggagaggctaggtgcctgtgagtcctcacactagtttcacttattgtttggtgagagtggcagtgtagtccactccaggctgaccacagccactgtgatgtcgtgaggac

SEQ ID NO: 9545 - DNA, 186 bp, Homo sapiens
  source 1..186: mol_type = other DNA
cacgcgcattccagaggaatcggcatttttctagaaaatttccaaagaaaaaaagagatctcttctctttaaaggccagaagggagagccctggggcggggctcgcattggcagctgccgccctccacttcctggccggccccggaaaccagcaggcgttggggaggggtggcgggggaatagcgg

SEQ ID NO: 9546 - DNA, 272 bp, Homo sapiens
  source 1..272: mol_type = other DNA
tccaaatcaactcactgcgcagcacgcggcgggacgggggtgggccaatcctgtgagggtttccttttcccctgattggccgacatcgggaaagacggctgggtctgcccctccctcaactcattcggctggacgaccctttcttaatgttgtacacagagtagaacaggattgacttcaactccgttgggctcaacccctttgtgagtggtgcaaaagggacaaggggacttttcctacaatcactgaccctcactgtgactaaaggtccc

SEQ ID NO: 9547 - DNA, 224 bp, Homo sapiens
  source 1..224: mol_type = other DNA
ttttctttggaaattttctagaaaaatgccgattcctctggaatgcgcgtggggacctttagtcacagtgagggtcagtgattgtaggaaaagtccccttgtcccttttgcaccactcacaaaggggttgagcccaacggagttgaagtcaatcctgttctactctgtgtacaacattaagaaagggtcgtccagccgaatgagttgagggaggggcagaccca

SEQ ID NO: 9548 - DNA, 229 bp, Homo sapiens
  source 1..229: mol_type = other DNA
gggacctttagtcacagtgagggtcagtgattgtaggaaaagtccccttgtcccttttgcaccactcacaaaggggttgagcccaacggagttgaagtcaatcctgttctactctgtgtacaacattaagaaagggtcgtccagccgaatgagttgagggaggggcagacccagccgtctttcccgatgtcggccaatcaggggaaaaggaaaccctcacaggattggc

SEQ ID NO: 9549 - DNA, 113 bp, Homo sapiens
  source 1..113: mol_type = other DNA
aggtggaaggtcgcgcccgccccgccccgctcgcgacgatcgttgggcaggcttctttcctaatcactattggtctgaatgcctgccagtcacaaagacaatgccaagggatt

SEQ ID NO: 9550 - DNA, 266 bp, Homo sapiens
  source 1..266: mol_type = other DNA
tgaagtcaatcctgttctactctgtgtacaacattaagaaagggtcgtccagccgaatgagttgagggaggggcagacccagccgtctttcccgatgtcggccaatcaggggaaaaggaaaccctcacaggattggcccacccccgtcccgccgcgtgctgcgcagtgagttgatttggaatacgctccaatcccttggcattgtctttgtgactggcaggcattcagaccaatagtgattaggaaagaagcctgcccaacgatcg

SEQ ID NO: 9551 - DNA, 441 bp, Homo sapiens
  source 1..441: mol_type = other DNA
agtgacatgtctttaattttttaaaaaactactatttgaaaattggtccccataaaccctcagacattctcaggattttacaagactgtcagagtggggactcctcacttaaacttgtgtagtttcacagaaaaaaaacaaaatgcagttttaaataaagaaatttcttttttccctgggtttagttgagaatttttttcaaaaaacatgagaaaccccagaaaaaaaatgattttctttcaattgatgcaactttgcgcaatcaagatggggctccagtgggtcaccaggcagccctggagggaatgagaccctagagggtacactccccatcccccagggaagtgactgtacccagaggctggtaattatttctctagtacctgaaggactcttgtcccaaaggcatgaattcctgtgcaggccccacctagggcggag

SEQ ID NO: 9552 - DNA, 401 bp, Homo sapiens
  source 1..401: mol_type = other DNA
ccccgcccacaggtccatgggagcttgaggctaagggggatcccaggcacccatctcaaggggctcttttccctaacttgtggggacaccaccagttgtcgtctgagggctcaggcctccacctgagaggttataacctgagaagctctacccttcctcccagtaagaagggaaggtgggtgcccgatccctgagactgaggggtttacgggctgtgaatggaccttcagccctgcccctctggactgcagactgtgaggccagaggccttttctctccccagtctggccagaggccagggttaattactggctcattaagcagcggctggagcccccctcttcggttttaattaagtagaacagggaggggagaacccaggcattccagcggcctgagtc

SEQ ID NO: 9553 - DNA, 247 bp, Homo sapiens
  source 1..247: mol_type = other DNA
atagacggagtctcgctctgtcacctaggctggagtagctgggattacaggcgcatgtggccacgcaggcaatccacccgcctcagcccgaagtgctaggattacaggtctcctgaatagattttaaatacctagaggtcagggatgattattcaatacatatatattgaatacttactatgtgttaagagggcctccactcctgcagctggaggagtttttccagtctcagttgcggctgaccagg

SEQ ID NO: 9554 - DNA, 254 bp, Homo sapiens
  source 1..254: mol_type = other DNA
accagcattgatcaaagggtattgctctgttgcccagcctggagtgcagtggcacaaatggatagacggagtctcgctctgtcacctaggctggagtagctgggattacaggcgcatgtggccacgcaggcaatccacccgcctcagcccgaagtgctaggattacaggtctcctgaatagattttaaatacctagaggtcagggatgattattcaatacatatatattgaatacttactatgtgttaagaggg

SEQ ID NO: 9555 - DNA, 532 bp, Homo sapiens
  source 1..532: mol_type = other DNA
gctgcactgggctgctgccgtgaacaacgcccgagccgcccgctcgcttctccagaaaggcccagtcctgtgggcgtggccttccctggctcttctgtacaggagcagacgccgctattcctggcggcgcgggaaggagcggtggaagtagcccagctactgctggggctgggggcagcccgagagctgcgggaccaggctgggctagcgccggcggacgtcgctcaccaacgtaaccatgctgacgctgctggaaggggctgggccaccagaggcccgtcacaaagccacgccgggccgcgaggctgggcccttcccgcgcgcacggacggtgtcagtaagcgtgcccccgcatgggggcggggctctgccgcgctgccggacgctgtcagccggagcaggccctcgtgggggcggcttgtctgcaggctcggcctaccgacccctcgcggccgtaggttttctgcaggcatgcgcgggcctcggcccaaccctgcgaccggcctccgtccccggagcggggatcacctca

SEQ ID NO: 9556 - DNA, 554 bp, Homo sapiens
  source 1..554: mol_type = other DNA
gccagaacccgtgggaaaccggaacccaggcgtctggcccccaactgggggctgcactgggctgctgccgtgaacaacgcccgagccgcccgctcgcttctccagaaaggcccagtcctgtgggcgtggccttccctggctcttctgtacaggagcagacgccgctattcctggcggcgcgggaaggagcggtggaagtagcccagctactgctggggctgggggcagcccgagagctgcgggaccaggctgggctagcgccggcggacgtcgctcaccaacgtaaccatgctgacgctgctggaaggggctgggccaccagaggcccgtcacaaagccacgccgggccgcgaggctgggcccttcccgcgcgcacggacggtgtcagtaagcgtgcccccgcatgggggcggggctctgccgcgctgccggacgctgtcagccggagcaggccctcgtgggggcggcttgtctgcaggctcggcctaccgacccctcgcggccgtaggttttctgcaggcatgcgcgggcctcggcccaaccctgcgaccggc

SEQ ID NO: 9557 - DNA, 326 bp, Homo sapiens
  source 1..326: mol_type = other DNA
gttccctgtgctactaaattctgaggcaaagaattctccattccctgcatcccaaggaccttgacacccaaattcagtgtttgttacagacaattcagacgcaaagttcatttatcactgataatgacagtcttggccagcatcttgcccatttgccagaaggagacaagttgcaggttctctgagaagcatctgtaataacctggcaaattaatcctctcctgggaggaggaatccaggtcctgcccctcctggggcacaggctgggactgcccagggcccaggggttgtcagggacagaaggccctagggtgtccaggacattg

SEQ ID NO: 9558 - DNA, 289 bp, Homo sapiens
  source 1..289: mol_type = other DNA
tagtcacctgggtaataagcataaaacccaattttaaatatagtcatttttctcatttttaattatcaaacatttataaaatgcttattctgttacaaaattaggccctgtaatcccagcactctgggaggccaaggcgggtgaatggtgccactgctctccagcctgggcgagtgaaactctatcttcaaaagagttacaaagattaatgatgtacaatctctggccttaaaaatctctgaaaactagaaataatttcctccaaagcattattaaatcacacagattc

SEQ ID NO: 9559 - DNA, 368 bp, Homo sapiens
  source 1..368: mol_type = other DNA
gctactaagaataggctttgcccactataaatgaggtaactccaatctcttgtcatatataagatggtagagatgagaagaaggtagctccgttgagagtgttgaacctcagagtttctcctctcattttctctaaatgagagagttgatcatcttgaagtctaggactccaagaagcatgaaagagcttctttagtgaagctatgtcctcagtactgccaaaattcagacaatctccatggcctgacaatttaccttctatttgggtaatttattggtctgtccgtgattgactaacagtcttgaacttacttcttcatctcaaaatatttttctgattggccaaagagtaattgatttgcatttta

SEQ ID NO: 9560 - DNA, 485 bp, Homo sapiens
  source 1..485: mol_type = other DNA
tgcactctagcctgggtctgtgaacagctgactttcacagtcttcgatcgatctctcattcacattgttagggtaaatgccattgaaaaagatatttttactcagattaaattattaacaaactttcaatttcctttaacttattaaagacatccctacctgtaaataggtacggattaagctctagctgtgtcatattatcagatacccggacctgaaagattgcagtgccttcatttcaactgtgagacatgaaataattttcccaaatctacaacacaaacaattgtcttgtcaagtggtgtgaacacatcactgaccagcacagagctggctcgacccagttaaagtgttttacgtgcaactggatcaaatctttcaagtactaatttaaaacaatcctttaaataaggaaattctgtttcagaagaggaccttcaaactgatggaggaaggaaatcagtaacttcctccccataatttgg

SEQ ID NO: 9561 - DNA, 510 bp, Homo sapiens
  source 1..510: mol_type = other DNA
cagactccgtctcaaaaaaaaaagagttgttctatgaacagctaactttcacagtcttcgatcgatctctcagacccattcacattgttagggtaaatgccatagggccacgaaaaagatattcttactcagattaaattattaacaaactttcaatttcctttaacttattaaagacatccctacctgtaaacaggtacggattaagcatagctgtattctgtcatattatcagatacccgctgaaagatcacagtgccttcatttcaactgtgagacatgaaataattttcccaaatctacaacattaagatatggtgcaataaggaccagttttacatgcaactgatcaaatctttcaagtactaatttaaaaacaatcctttaaagaaggaaattctgtttcagaagaggaccttcatacagctgaccagcaactgatgatgctattgaactcagatgctgtcagtaacctcctccccataatttggaatgtgggtggaggggttc

SEQ ID NO: 9562 - DNA, 481 bp, Homo sapiens
  source 1..481: mol_type = other DNA
ataaaatattaattatggtaaaacagagttgttctgtcaacagcttgatagggtaagtgctatacaaacctgtgtgtgttctggagatgacagaaaaaactctttttactcagattaaattattaactaactttcaatttcctttaacttattacagacatctctacctgtaaataggtacagattaagctcagctgtcattctgtcatatcatcagatacccggagctgctgctccttgaggcatttcaactgtgagacatgacgtaattttcccaaatctacaacattaagatatggtgcaataaggaccagacttgtgaacacatcactgaccagcacagagtgtgctaaattaaaacaatcctttaaagaaggaaattctgtttcagaagaggaccttcatacagctgaccagcaactgatgatgctattgaactcagatgctggagcaaggaaatcagtaacttcctccctataac

SEQ ID NO: 9563 - DNA, 245 bp, Homo sapiens
  source 1..245: mol_type = other DNA
tgccctggccaaaaccacctgttacccagctggatttatacaagtagaaaattgcttgggctaccaccagcaccaaaaattcctggaggttgtaagccagaacatcctgaaggatgtgcccacccctggccaggcgcggggcaggtgcctgcagtcccagcgtacctcagcctgggtgacagagtgagactagagtagggggatttattctaattggccaaaacctgacttggcagggtttggtg

SEQ ID NO: 9564 - DNA, 479 bp, Homo sapiens
  source 1..479: mol_type = other DNA
atccgaatactgtaaaattctgtgtattgtgcctgatatcagatgcatcatttcatggtttgaagaacttaaaaaagaaatgtcaacttaattaacttttcaaatactttcactagaagagcataaatacaatatgttcttgcataatgaagaatcatttaccagcagataacagttgaggagacttttgtaatattaaacaagacaaattaatcttaaatttgtacatgtgaagatctagatgtaaaatgcatgaaacatgacccacattttataaacaaaaataaattcagtaatttgttgactcttctcagcagtaaaaatttctgtgacagcaattttctctccccctttattaaaaatcccaagtataataacaactggtttttaacaatattacagagatgtttatcgagaggaaattttcacctcagatgttcatcttgaagacgtcacagccaggcactgggagggaccat

SEQ ID NO: 9565 - DNA, 261 bp, Homo sapiens
  source 1..261: mol_type = other DNA
tctagtacagagtgcactccataaatacttgtaaatttgtacatgttatgattttgttgtctgcaggctgccgaggaggctgtcgaatcaacttgcggatccgggagcagcttttctcctcagactaagacaggtggggcctggagtccaggtctgagattcccatgtggagaagcagcctccactgtccctctgcaagtgaaggaggaggggagctgaactcacggctgagctcggattcacaatagcagcggagaaggt

SEQ ID NO: 9566 - DNA, 417 bp, Homo sapiens
  source 1..417: mol_type = other DNA
tttaaaaacctaattactgttctaaacagtgttaaaatagtgcgcccaacatagccagctcaaggtgctctatttaggagagcccggctcgctcgcctaaatggagtgcaatgacccgatctcggctcacaggctggtaggcgatccggcacttcttaatagtaggctcagagcttgaagtagtaactttgagaaaattcagtgattctccaattaagttgcccttgagacaactgtattttacttaatgataaagaaacatttttgcagttgcctgtacagtgcgaaccagagttcgggctccagttccgctgtctgcgggtctcgcgcgccccctcccggcggcccagcccagaatgaaggccttggctggggaagcgaaagcgaaagctgcccgagccctgacgcccgccctgg

SEQ ID NO: 9567 - DNA, 549 bp, Homo sapiens
  source 1..549: mol_type = other DNA
aggcgatccggcacttcttaatagtaggctcagagcttgaagtagtaactttgagaaaattcagtgattctccaattaagttgcccttgagacaactgtattttacttaatgataaagaaacatttttgcagttgcctgtacagtgcgaaccagagttcgggctccagttccgctgtctgcgggtctcgcgcgccccctcccggcggcccagcccagaatgaaggccttggctggggaagcgaaagcgaaagctgcccgagccctgacgcccgccctggccgagcgtagctggcggaccagagcccctcagcgctgaagcagaagtccccggagctgcggtctccccgccgcggctggtgagttggtgcggaggggaacctggagcgccaacagggacgcagccctgcttcccagtccctctgcacccggcgataggagggagcggagcccggaccacttagctcgccgcggcaggcgggggtggggcagaaggccgaaagctgggttactcaggagagctgacaaggattgggactccacccccatga

SEQ ID NO: 9568 - DNA, 247 bp, Homo sapiens
  source 1..247: mol_type = other DNA
tcagggcactagcggccgcagctcagagccgtggcctctccgaagtggcagatggggcgggcgcggccagtgccaggcgcgcgccctggctcgcctggctctgaagctgcacctggaggggaaagcttaatatctcccacgtgaaactccgcagtgctcagccaagcagggaagactgcgccctctccctggcgccggccttttctcggaaaaggcagggggatgtggaaaagagtcttgttccctc

SEQ ID NO: 9569 - DNA, 366 bp, Homo sapiens
  source 1..366: mol_type = other DNA
tgggccatggtgcaggctcctgcagatgctccagaatcacagctgcagagagtacaaacacaggatttgtaattccttactgtaacggtgaaactgagaaatgttcagaatgtacggaaagatgatcagctattttcaacaaaacaccctgtaggttcttgatatttataataacggcacaccaaacggcccactgctcagggcactagcggccgcagctcagagccgtggcctctccgaagtggcagatggggcgggcgcggccagtgccaggcgcgcgccctggctcgcctggctctgaagctgcacctggaggggaaagcttaatatctcccacgtgaaactccgcagtgctcagccaagcag

SEQ ID NO: 9570 - DNA, 445 bp, Homo sapiens
  source 1..445: mol_type = other DNA
tactaagttatatttccttaaaatcgaatataaaaatgagaagaggactattcaatagtctttagtcagtcccagccctggaaacacaggtgtctccctgggctgagggtagtctttcctcaggtggagcagctcctgtacgaaagccctgagctcatcacccagcacctcagcctggtggagcaggctgaccacatcctctttctggaaggaggcgctatccgggaggggggaacccaccagcagctgctactgggccatggtgcaggctcctgcagatgctccagaatcacagctgcagagagtacaaacacaggatttgtaattccttactgtaacggtgaaactgagaaatgttcagaatgtacggaaagatgatcagctattttcaacaaaacaccctgtaggttcttgatatttataataacggcacaccaaacggccc

SEQ ID NO: 9571 - DNA, 384 bp, Homo sapiens
  source 1..384: mol_type = other DNA
ggtgccagccagccagtcttggggctgccatctgccccaggcgcccatcctaagcaaagtccccccagtgggcacatggccaaggagaggccttcctgggtcaagctagggaagggcatcactgaaagcgaaagcgctttagagtagcttcccgttgactgctcattgcgggttgcaagcgctggctgaccccggtgtggacttctcccgcccggggtaagtccccggttggtgctcccgcccgcagcagcctggggcactggtttgcgcagccgacagccccgccccttcgcggcgccgccaggaggcgcctgggtgctgcggggctgctttgcgcgcggcgctaacgtgtgtagggcagatctgccccgagacaagtgacga

SEQ ID NO: 9572 - DNA, 708 bp, Homo sapiens
  source 1..708: mol_type = other DNA
gcagtagcctggtgctatccgcggacccgggggctccccatgagatcagctctcggaacaaggcaagtcccggcagggccaagcccagactaatggcttcaaagcagccagccgccctggcttggagccaaccgttgccctgaggaccccgcaggcccccagccagagcacggcccagcggctcaggcccaccgcccagacccggagcagtggcagcgcggtgtgcggggcagcgcggtccggagcagcacccagtcgctgtccccagccatgcgagagaagctccggggaggcagcggcacccgcggggagcgggacacctagagctagccattggcactcggacgccgtcccggtcccggccgggcctgggactctccgcgccccggtggggcctgaagctccgggtaccgccgagtcctcccctactggcggctgggggagggaacgagggcggggctctcggaaagtcccaggaacaggctgatcctgcgctgcgaaagcggccgcctgctcagcctccagcatttgatctgagaatctcgggagcagccctggtgcccccaccccagcctcagggcggggctgcctcgtcacttgtctcggggcagatctgccctacacacgttagcgccgcgcgcaaagcagccccgcagcacccaggcgcctcctggcggcgccgcgaaggggcggggctgtcggctgcgc

SEQ ID NO: 9573 - DNA, 250 bp, Homo sapiens
  source 1..250: mol_type = other DNA
ggccacgtgatctggcccttgccagatccaaagaggacctctggatgtttgaatacattacattgtatttctagccctgggcccaacacccagaatttcttgtattttcaatatatgtctgccaaatgaattagagctaatggttccccattgcagcattctgccaggaggtggcactgctctgaagagccagctggtcgcttacagactgaggctgacagcttgaaatccactgggcttcccagccatc

SEQ ID NO: 9574 - DNA, 506 bp, Homo sapiens
  source 1..506: mol_type = other DNA
aaatgggaagccagttctgcaaattggcctttctgtggaccatactctgggtaagttatcggctaatgacaaattaaaggcttactttttagctggcaactgaatcaccataacattttatgttaccagttccaaaattttggggggaattcactcaagcttgggagctttaaggcacatctgcggtccgcaccttatctctccgcgcggcaggcgcgacgagggcgagaaactccctctccagtggtcgcaccacacgacaccagggaaggggcccctctctcgctgacagctcagcagcgtgcgcttccgctggattcaggccaggaccaggcctggccacccgaggctaccccgctaggccgcgggtagtgggggagggggcgctgaggcaggaggtcagcacccgggcgcgggctcccgccccacgaaaagcgcgcgctccaagccccgccgccggagatgcggttccggtccggacgcccagtcagggcgcacccttgcgc

SEQ ID NO: 9575 - DNA, 492 bp, Homo sapiens
  source 1..492: mol_type = other DNA
gctgacagctcagcagcgtgcgcttccgctggattcaggccaggaccaggcctggccacccgaggctaccccgctaggccgcgggtagtgggggagggggcgctgaggcaggaggtcagcacccgggcgcgggctcccgccccacgaaaagcgcgcgctccaagccccgccgccggagatgcggttccggtccggacgcccagtcagggcgcacccttgcgcctgcgctgtgttaggcctgggccatgcggcccccttggccccttggcgcgacccccaggaacgttggggaagcgggcacgtgaccccggtcagccaatctgggtgctgctgacgtggccgcgcggccccgatgctctccccacccccccagcccgttcgggaagggaggggctgggggctacgccccctcccccagcacggcttcgttttctgggggggggttgacaccccggattacataccccgtaccaagcaggccccctggacggg

SEQ ID NO: 9576 - DNA, 469 bp, Homo sapiens
  source 1..469: mol_type = other DNA
ccccctgatgggcctctgtcctggcctgcagagccccggcctctgcaaagttgctgtgtcattgccccagccacccaaacggggccgcttgtacttttgggggccagggcctgatccctggctgggggaaggggactctgctctcttcccccgccctcccggggtttgccctactcggggggtcaggacctaggcccttacgagcctacacaagtttgttttctccctggtagcgaagaaaggggaaacgggggaggggacgccccaccaaagcccaggttttctcgggtggggggtaagggggcggggacggccccagagatgctctggagatcctgactcacagagtctgcacccttatttagataaccaagttaggctcccaaaatggctcctgcccctcctcggaggcggacggccggggggaggggaggaggggaggagggggagggctagtctgagccgcagc

SEQ ID NO: 9577 - DNA, 401 bp, Homo sapiens
  source 1..401: mol_type = other DNA
ggactaaacagtagtaaataatgttttgctgtattataagactctggcaacactgttttagacgccatagaggagcaggccgcggcttctaagatggcaccaccacccgccaggcgtcttgcggccacacccctggcgggttcaggcaggctacgcccacgcgacccctcccgtttccctgctttggccaatggaggagctacgaggcacgacctgctcgagctgtgctggaggctctggggcgatggcttccgcacctcggcggaccacagctcagccaattggcttggagatgtggcggagcttcttcacccgcgtgagcgagcgcgcgcgcgcggagggggtggggaggtggcgcgcatgagcggcgaagctcctcctccccgcctatatataaaggg

SEQ ID NO: 9578 - DNA, 348 bp, Homo sapiens
  source 1..348: mol_type = other DNA
ttataagtgtctaaagtaagaagtaatgttctttgaaagtttgtaaaaatattcactctaaacaaaatagaatcattatattctctatggactttatttttccaaagcaatttcagacctattgatctcatttgatcttaagagctttgctataaggcaggttatatcatcctagactgagcccacagtccatcgcaggactcacagacctcatttgagttctgagatgggtaccacaacagaccatgtcctgtgtgcctagtgagcaatgactcatacaaagctcagtgtccattggttcttttctcagggtctctaatatttcaaacaggagctccctttagcgag

SEQ ID NO: 9579 - DNA, 607 bp, Homo sapiens
  source 1..607: mol_type = other DNA
ttatttatgcaaggtaaggctaccacaaataagataaaatattaacgtaatatatgtacttcatcattacattaaatagtaaatgttttgtgaccttctctatgagtatcaaataaatagctcaaaattgaaatatttaaaatgagactagaaaagtatttcttaaatatggtaaagagaatataaaataaaaaattaacattacctgcaaaatatgggcgcacattgttaccacaggtaatgctgtcctgggtattcttatatgaaaatgaaataacaagactagtaatttaaagataaaaatgttattacactgtttaaataccaggaaatactaagaaatctgaaaaataaaaattatctagaaatttcactagataaacaattaaagatcaacttcattcaagttaattaaaacctctaaatagaaattataacacttctgcagaaatgactgaaagaaagattaattatatattttattagatagcacattcattcttaattatcagcagaatatttttgtaaaatattgacaacataacataaaacatgatttaaaatatagtaacatttgccgtcagaagaaggtgtaacttatcttttt

SEQ ID NO: 9580 - DNA, 420 bp, Homo sapiens
  source 1..420: mol_type = other DNA
caaaggcgccttgttcgctcgtgccctctccgcgccagcgggcggcggcgcctcggctcgctgcggccttccctccgggcgcgctgcgggctccgggcagacccggcgccgtgcccgctcgtgggggcgcactgggcgccgagcgctgcgtgcttctcaggcgttgcccgcccggaggcggcccacgtccccgatataaatacccccgccccggcccggctctgtaattacacggggcggggtgagtgggtggggtggggactgcgacccccaggcccgcctctccccctcccgcccaggcctctgctgaaagggggctctgggcccccgagcgatagagggagggttcccgcctccctccccaggtggagactgaggcgggggccgggccgggggcgggggcgtgggggctctgggcgc

SEQ ID NO: 9581 - DNA, 446 bp, Homo sapiens
  source 1..446: mol_type = other DNA
atccaactagagactttaattctctacaccctgctgtcaaacaacagtgtaactccggctgggttatcagaacttattaacatttgtgtcactaaaattggtggaaaattttccaaccaatccatttgaatgatgggtggggcagcacgtggggtagaccatcgagcccctctattcctcctaagacgcaggatctgcctgtcaggcccgcgacctccggtgcccaaggcctcaagcggtcacagctaggagggcggaagctccccttccccgccccgccccgggggggagggtgctaaggccctcgggagggagggcagataaagcggtcactggctcgcctgcccttccggctccggggttgttgttctccgcctgccaccgccgccgccgccgccgctgcgggatccagccagggccgtcgccgccgccaccgggacgcgacc

SEQ ID NO: 9582 - DNA, 451 bp, Homo sapiens
  source 1..451: mol_type = other DNA
atccaggtcctgcttgatgcctggagccccagactccccatagcctccatggctatgctcatggtcatgtccatgtcctctgtggtagtctcatgggagtagccatggctatggccatggtgtaaatcctcatgtgaatgtccatggtcgtgatcgtgggtatgtccatgccagatgctctcgtgagtgtggccatggccatgggcatggctgtggccatggtagtcctcttgcagatcgtcgtgcaggtcgtcatgacccccgacagcagtcccacggccacccagtggggggcccccaggcctctggccatcacgctgaccagagggacagaggcagtgactccgtctctacgactcattaggtgagcctgcactgacacgcatgcgcgagtgtggaggtaacaggccggaggagaccgcctcctcggtttccaactagacgagggggc

SEQ ID NO: 9583 - DNA, 503 bp, Homo sapiens
  source 1..503: mol_type = other DNA
tcctaagacgcaggatctgcctgtcaggcccgcgacctccggtgcccaaggcctcaagcggtcacagctaggagggcggaagctccccttccccgccccgccccgggggggagggtgctaaggccctcgggagggagggcagataaagcggtcactggctcgcctgcccttccggctccggggttgttgttctccgcctgccaccgccgccgccgccgccgctgcgggatccagccagggccgtcgccgccgccaccgggacgcgaccggcccacactgccctgcggcatgccgctgagggaggaagggcgggaggtcccagggattcccaaggattgggtcgaattaagcccgtcccaaaatgacagcgccaatgtggcagccatctttgtacagacgggaagtctcggcgcgagttcccgccccctcgtctagttggaaaccgaggaggcggtctcctccggcctgttacctccacactcgcgcatgcgtgtcagtgcagg

SEQ ID NO: 9584 - DNA, 464 bp, Homo sapiens
  source 1..464: mol_type = other DNA
tagcaacagtgcatcaccattgcaatcacttctggaggtgctgattgcccaccttgagtgaggggtggataaactacccctgccccaaacctctacccctaactccaggtcaggggtgcgtagaggttgggggccctggccagggacctggcagtcttggacagggggtgatggcagcctacctggtgtcccctaccccacctgttctcggagaaccaagttgctacacaggaagctcccaccagttggtggaggctcttccgccccacatgcagtctttgtctttttggggggaatggggccccttgtcttctccacacccggggcccctaagcagcagtgtcgggccacgccccctcggtgggaggtcggcctgcgctggtggccggcctaaggctggcgggcctttgattggccccggtttgcccttgccacgcccctctgcgctgggattggcttagtgc

SEQ ID NO: 9585 - DNA, 392 bp, Homo sapiens
  source 1..392: mol_type = other DNA
gggcggggacaagatgcccatcagggtcagagtcctcgaagaggcgggccccgggccgcggctctcgagtctatggctccggccgagagttgagtctggacgtcccgagccgccgcccccaaacctcgagcgggagagcgggtcggaccggcagatcttttgcagccctctgtcccctcctggggtcccagatattccaggccccggccccccggagctgaggccccgcgtgggggcctctggaaggggccgcgcgacggtgctgggccgctcccgggacgcaggatcctcacgcgggacgagcccgtcccgtgggcgggagaaccgcggcgtccacgtcccgtcccacccgcgccgcgaatggtgggtgacgtctccgccggcggggggag

SEQ ID NO: 9586 - DNA, 541 bp, Homo sapiens
  source 1..541: mol_type = other DNA
ccccgggccgcggctctcgagtctatggctccggccgagagttgagtctggacgtcccgagccgccgcccccaaacctcgagcgggagagcgggtcggaccggcagatcttttgcagccctctgtcccctcctggggtcccagatattccaggccccggccccccggagctgaggccccgcgtgggggcctctggaaggggccgcgcgacggtgctgggccgctcccgggacgcaggatcctcacgcgggacgagcccgtcccgtgggcgggagaaccgcggcgtccacgtcccgtcccacccgcgccgcgaatggtgggtgacgtctccgccggcggggggaggacgtagggccccagcgcccgggccatggcggcggcggtggcgggagctgctgtctgagcagcggttgcggaccgagcgaacttggcccaggagcccgggcctagggagaggcgcggcggcggcgggagccggcgctctggaggggcggggtctacgcgaggggcggcccccctgacgccctcctccccctcctcgg

SEQ ID NO: 9587 - DNA, 311 bp, Homo sapiens
  source 1..311: mol_type = other DNA
gtactcgcaaaatatgctggaacttttcagggatcactagaaaactcctcagtctctggagagaggaagcaggtctcctgcccattcgccttagacagctttcgtgcgcccgagcagtgacccttcctcggttggtgtccctttccagggacgcgtcagggcaggacgtttccagaaccctgacagccggctttccttgcccgagctgcgatgccgctggatcacggcacggattccagtcttaccatggctgcagcacaagcggcggcgtgtaggcctcccttccggaaactggggaacggactcgccgg

SEQ ID NO: 9588 - DNA, 324 bp, Homo sapiens
  source 1..324: mol_type = other DNA
atgagactcaagttaccttaatggcagtgaagtactcgcaaaatatgctggaacttttcagggatcactagaaaactcctcagtctctggagagaggaagcaggtctcctgcccattcgccttagacagctttcgtgcgcccgagcagtgacccttcctcggttggtgtccctttccagggacgcgtcagggcaggacgtttccagaaccctgacagccggctttccttgcccgagctgcgatgccgctggatcacggcacggattccagtcttaccatggctgcagcacaagcggcggcgtgtaggcctcccttccggaaact

SEQ ID NO: 9589 - DNA, 368 bp, Homo sapiens
  source 1..368: mol_type = other DNA
tggggaaccccaggctttctagaaatgtcaaaacacatagtgtttaccacgacgatgtatacaataggttctatcttcctcaccttaaaggtgtgagaaacttgcccaacaggcagtctggcttcctctaccccaaaatgtggagtgaagttgaaattttgtgccccagaacatgagtttcagccgtaatatcacgggtagcagccaagttctgaagctaggagcaccggaactcggaggagaaacagctccgcgctcaacaccagttcccgggccgcagccgccatggtcgcagcggcggccattccccgcagcctcacttccggcaactgtcagtcccggcgagtccgttccccagtttccggaag

SEQ ID NO: 9590 - DNA, 591 bp, Homo sapiens
  source 1..591: mol_type = other DNA
ccgcaggatgcccaggactccctggaaccaggagcaaaagggctcctgcatcttccaggggtccagcctgtgggacgtcagcagggtgggtggcaccagccagcttgacacactgtgttggggcgaggcctcctcgtcgggcacttacccccacaaagactaatgggagaaggggtgcccggctggccaccttgaggctgcacagcacagcacataccccgtgcctgaggcatagggtggaaaggggccccaggtgtgaggccactgctcctctgatacgcggtgcctgccccccggtgtccgagaggggttcacgcgccagtgcacccggcccaagtacagaagaggcacttcctcgctgttcatcgtccgtcttgaggacgtcctaggagtcctggaaggcggcctgcaagatatccccctgggctgctgactccgaggccaggtcactcccctgggaaccccacacggggtgctgtgcgttcggctctcccagcccccgggcctcgcgcagcccgccccacgaagcccggagccgtgcacaccgagcaggaagggaggggccccgggaccactgcaagcttcctggcg

SEQ ID NO: 9591 - DNA, 282 bp, Homo sapiens
  source 1..282: mol_type = other DNA
ctccccgacatggatttacttaagtctggggatgagaggaaagacctatccccacaatcctagtcaggtggatatggatctgaggctccggggcgctggtccactcttgagaggtagccctgaggggcagtccccaggagatggtggactcacgttcttccttcagtagtaataaacccggaagtaaaaaaagactgtgccggaagtttctttctactagactagcccctctaaggagagcgtgccctcactcaagatggcacctagagagcttcatacctg

SEQ ID NO: 9592 - DNA, 230 bp, Homo sapiens
  source 1..230: mol_type = other DNA
cgacagaacttctggaccacttccacagggacggggaacgaggcggcctgcctcgcggacaagccgcgctgggactccggcttcgggacctgaggcttcttagagatccgagacttctttaagatgtaagcattgccaggtatgaagctctctaggtgccatcttgagtgagggcacgctctccttagaggggctagtctagtagaaagaaacttccggcacagtctttt

SEQ ID NO: 9593 - DNA, 589 bp, Homo sapiens
  source 1..589: mol_type = other DNA
gaggacagggactggcctgtctgtccacccgcgccggcatagggacctaaggcccactggagggcgctcatcaagtagctgctggcatctccgagtcaggacggtcggccagacccacggtcgtgtaggaataaagctgtattccagtgcctgagagccccgtcgacaccgttcggggcgggcgccactactggcgcatgagatgcgctcaatacaccgagccgacggggatctcggtctcggcgccggaagcctctgagagccgaatctggaaccggatgtggctgcttcctgccccgccccctgccgagggggcgggaatcgagggcccttcggaaaacccggccgggatttcggtcaccgtggggatggagtgaccggctctctctccgcctgaaacgcttcccgcgggagtgggaatgtcaaattctgctcctgccttcccccaggggctggagactggaatctttattccagaggacagtggagctggggactcgggcgcctgggtcctggtccctgagcgtccagcgggctcctgctctcggagcgggcggacgcggggggcccaggagcccggcgggggggg

SEQ ID NO: 9594 - DNA, 444 bp, Homo sapiens
  source 1..444: mol_type = other DNA
ttaattttgttataaaatctcagtctcagagagtactctaggggggtcgcagacgaggtcggcctcgtcattccccgcagacgcggatcatgggctcctcgaggacagggactggcctgtctgtccacccgcgccggcatagggacctaaggcccactggagggcgctcatcaagtagctgctggcatctccgagtcaggacggtcggccagacccacggtcgtgtaggaataaagctgtattccagtgcctgagagccccgtcgacaccgttcggggcgggcgccactactggcgcatgagatgcgctcaatacaccgagccgacggggatctcggtctcggcgccggaagcctctgagagccgaatctggaaccggatgtggctgcttcctgccccgccccctgccgagggggcgggaatcgagggcccttcggaaaacccg

SEQ ID NO: 9595 - DNA, 302 bp, Homo sapiens
  source 1..302: mol_type = other DNA
atagaatgaagaaggcaaaaaacttttttttttttttttttgagacctggagtgcagtggcgcgatcggggtttcaccgtgttagccaggagtctgagacagagtctcgctctgtctggagtgcagtggcacgatctcggctcacggcacgctcagcttcccgagtagctgggactacagggggttagccaggatggtcaggcgtgagccaccgcgcccggcggcgaaacacgatattgtactaacatcttaattttgttataaaatctcacaagtctcagagagtactctaggggggtcgc

SEQ ID NO: 9596 - DNA, 131 bp, Homo sapiens
  source 1..131: mol_type = other DNA
gtttttattttttttaacagtgattaaaatatttattggtcatttacgataacccgtgtgtttgctctggtgagaactggagaggatctacccgggtccctgcctggccagtggggaaacaccggtccccc

SEQ ID NO: 9597 - DNA, 256 bp, Homo sapiens
  source 1..256: mol_type = other DNA
gaggacactgtgagcgccggcaccgcctgggcggggtcggggccgtacctgggcctgggactcccacggggccatccttgccgtccaagagagagtctcccggagtgggcgggggcagcggcgacgaagcgagtgcggccacgcccccgtccagcagacgtgtctggtccccacccaagtccacaaggtggtttttattttttttaacagtgattaaaatatttattggtcatttacgataacccgtgtgtttgct

SEQ ID NO: 9598 - DNA, 278 bp, Homo sapiens
  source 1..278: mol_type = other DNA
cattgtgggaaggccttctcccacaagagcatgcgggaccggcacgtgaatgcacctcaatctgcggccgtttgactgccccgccaccgaggacactgtgagcgccggcaccgcctgggcggggtcggggccgtacctgggcctgggactcccacggggccatccttgccgtccaagagagagtctcccggagtgggcgggggcagcggcgacgaagcgagtgcggccacgcccccgtccagcagacgtgtctggtccccacccaagtccacaaggtg

SEQ ID NO: 9599 - DNA, 312 bp, Homo sapiens
  source 1..312: mol_type = other DNA
cttgcaaggttgcagacaagtgtggccacacaatgcgatccagaagagatcatcgtgctctcagagaatgttctgggatccccttttggtggtgtttctttaaaaaaaaaaaaaagcttaagttttacacagaaacattaataaacaataaagttcttttcttactgtatcacagcccagtatccccggggtagggccagggtgcagtggtgagatcacagctcactgcagcctggacctcccagtctcaaccgagtagccgggactacagtactttttcacttcgtgcagtaggagtgagaaagccaatga

SEQ ID NO: 9600 - DNA, 416 bp, Homo sapiens
  source 1..416: mol_type = other DNA
agaatgttctgggatccccttttggtggtgtttctttaaaaaaaaaaaaaagcttaagttttacacagaaacattaataaacaataaagttcttttcttactgtatcacagcccagtatccccggggtagggccagggtgcagtggtgagatcacagctcactgcagcctggacctcccagtctcaaccgagtagccgggactacagtactttttcacttcgtgcagtaggagtgagaaagccaatgaatacctggacccatcgccaatgggaaaaggcaggcttatagcttgcttcggccgaaccaagtcctgagctcccagcggaggaggtggcgatgtttctttaaaggcaaagtggccgagtcggccgagtattgcccagcggcacgggcggggtgcccggctgtgccttta

SEQ ID NO: 9601 - DNA, 380 bp, Homo sapiens
  source 1..380: mol_type = other DNA
tcctgtctcgggcccggagccggccagccctccaaggacccgtggttcccggcggcagatccagcgtttggagcagctgctggcgctctatgtggcagagatccggcggctgagactgctcttcactgaccggccgtgtcatagagcagacccgctattaacaggcgcattgagcggctcatcaacaagccagggcctgataccttccctgactatggcttcgggctgtagagaaggcagctgcccgacacagccttggcctcccccgacagcagctccagctcatggctcaggatgccttccggtgacccttatatgtcaggtatgacaagggcttcagatcctgtgttggcccggcgccttcgggaaaaccggagttt

SEQ ID NO: 9602 - DNA, 289 bp, Homo sapiens
  source 1..289: mol_type = other DNA
cgcatctagcggaccggccggacccgtaaaatatcttcaacctaaagccccagtttgaggcctctttcacctcagagaggggggcaaacacatgaggtggcgcccacaggagtgtacttaaggtgtgggggtggtttgccccccccccacaccacttatgctggaggggctcattctgaggccccagccgctaacagcatcatcgtgctggatgatgatgacgaagatgaagcagctcggcctcacctggggcagaagcccctagctcctctgagcctcatggggccag

SEQ ID NO: 9603 - DNA, 329 bp, Homo sapiens
  source 1..329: mol_type = other DNA
cagctgctgcagcggcaaggagcgcgccgcccttgcaggggaaggggctactgaaagaaaaggttttacttcccttttaagagagctttgggaaacgaggctcggtcctccctacactctccggcggttgggccccaggcaggaaggcggagtccgggcgtagccagtgccgtacggcaaaatggcggcccccagctgctttggtgttcgcggggcgggcctactgtcacctccggccacaggaagcctgtgttccgagggtcgcctcgagagacgtaccttcctgtccctgaaagggagtggacgcatctagcggaccggccggaccc

SEQ ID NO: 9604 - DNA, 432 bp, Homo sapiens
  source 1..432: mol_type = other DNA
ttttttcccctctccccgaagaggaggaggaggagacccaaagtattttatgagcctcatttcgcctgacggcccttcgaggacccctctggagaagaaccattcaggtcccaacggtctggctggtcattagtaacaatagtaataacaataacacttttatggcgtgttataaccagctgctgcagcggcaaggagcgcgccgcccttgcaggggaaggggctactgaaagaaaaggttttacttcccttttaagagagctttgggaaacgaggctcggtcctccctacactctccggcggttgggccccaggcaggaaggcggagtccgggcgtagccagtgccgtacggcaaaatggcggcccccagctgctttggtgttcgcggggcgggcctactgtcacctccggccacaggaagcctgtgttcc

SEQ ID NO: 9605 - DNA, 292 bp, Homo sapiens
  source 1..292: mol_type = other DNA
tccagaccagcttgacgccactgcactccagcctggacagagcgagatatccttgaccatggctcacagatgcatggtagttggggcccaagattttgagccttgagtctttgagacttgagacccagcaaatcacagaattatactatgaaaaagctgaatagagttcatggatcatttagtccacactggatgtttaaataattgatctgaaggactggcaggtgcaggacttgccacagccatgctccttaatcctggcagtgctgagcaaggccttgcatcccagccc

SEQ ID NO: 9606 - DNA, 204 bp, Homo sapiens
  source 1..204: mol_type = other DNA
tcatacaccaggccagattgatttaggtaaaaacaacactcttcattaaaaaatatacagagtcctccttttcatttgcaaattgattttgggtgtgcatgtgcctgtccaattagcaggtagacatacccagactcctagggatccagctagggcggcagccgtcaggcaataataactgctaatgtgtttaagtttgcctta

SEQ ID NO: 9607 - DNA, 301 bp, Homo sapiens
  source 1..301: mol_type = other DNA
ttttcagacagtgtgtctccccacaatctgtctctctacaagcttgtttgaagccatccaggattggagaggcaacgtagttaacagaaatagcttggattttgaagctaatggaatctagatctacaaagaatgtggcattttcgtgattctgagggctataaagaaaagttctttcctgagctttgaatccccactgtcaggcttcaatggagcgcaaaaattcctaaatttcacgtgagggctccaggagccacttccgggccctactgcagtcaccaggaggcgctagtcccgcctg

SEQ ID NO: 9608 - DNA, 326 bp, Homo sapiens
  source 1..326: mol_type = other DNA
gcttggattttgaagctaatggaatctagatctacaaagaatgtggcattttcgtgattctgagggctataaagaaaagttctttcctgagctttgaatccccactgtcaggcttcaatggagcgcaaaaattcctaaatttcacgtgagggctccaggagccacttccgggccctactgcagtcaccaggaggcgctagtcccgcctgacgtccacgcattttctgacgtagcgtccagcactattgcggcaccggaagtggaattaatccgcctacctctcctgcgcggctgtggcgacagcgacgattggtccctgcgtgcag

SEQ ID NO: 9609 - DNA, 258 bp, Homo sapiens
  source 1..258: mol_type = other DNA
cctcctccaaacctagtgtgcagaggataccagctatcaaataaagaatagtttggttttttttttaaataaaggttttattagcatttgcccaagaaggcagatactttcatatctgtaaaagtggccaccccagccccagggaagaacgttcctttggtgggtgtcggcaggggaccggaccccagagtccagaggcggggctagcgcgcgctcccaaactttcgaacggctggggctctgccgctgccggtggcg

SEQ ID NO: 9610 - DNA, 536 bp, Homo sapiens
  source 1..536: mol_type = other DNA
gccaccccagccccagggaagaacgttcctttggtgggtgtcggcaggggaccggaccccagagtccagaggcggggctagcgcgcgctcccaaactttcgaacggctggggctctgccgctgccggtggcgtcgtctgcgccagccctggaagcacggggcgggacgtccacgggaagcggcgcgcacgcccgccgactccctcgcgccaaccgccgacggccgccgcccggtgaaggaggggctcagtcctcccaggtgccgcgcgcaggaggggacacgcgtgcgcacgcgactcgtcaccgggggaccaggccggaggcgggctgccgggaggggggattccctcgtgccccaagggcgaatctcaggtcggaggaaggggctgaggggattccctctcccaccgggtccgactcgctccccaagccgcggagggccagcctcttcttcggcgccctccaggcctgttggaggtgagggaggtggggtgaggtggtgcccgcccccccctccggctcctccctgccgctgcc

SEQ ID NO: 9611 - DNA, 451 bp, Homo sapiens
  source 1..451: mol_type = other DNA
gggacagaaggaccatcaccactgtcccccgtgcctagggggcgctctcttaacccctgagtttggggtgaagggtccttctcagaccctcccactccttaagacctcggaaacagtggcctcacgtggcctgcgaggctggcctggattggccacttggcgtcactcactgagtgccgccgccgaagaggaccggccccctcacgtgacagtggaacgccgcagcggctctcctcagccagcaagtggcagtttcgggttcacacggaaacgggcgtgccatttccgcgcacgtctgcagatgcggtagtcgactccttcatcaggaggtgggcaaaccgcgccatgatagggtctctaatcacgtggctgccacccaggtaagaagaggccgctcttcctcgcatgagtggggggcgggctcccgcggtcctgctcggcggagtggtga

SEQ ID NO: 9612 - DNA, 377 bp, Homo sapiens
  source 1..377: mol_type = other DNA
ggatgtgcttgggccccaggggggacagaaggaccatcaccactgtcccccgtgcctagggggcgctctcttaacccctgagtttggggtgaagggtccttctcagaccctcccactccttaagacctcggaaacagtggcctcacgtggcctgcgaggctggcctggattggccacttggcgtcactcactgagtgccgccgccgaagaggaccggccccctcacgtgacagtggaacgccgcagcggctctcctcagccagcaagtggcagtttcgggttcacacggaaacgggcgtgccatttccgcgcacgtctgcagatgcggtagtcgactccttcatcaggaggtgggcaaaccgcgccatgatagggtc

SEQ ID NO: 9613 - DNA, 481 bp, Homo sapiens
  source 1..481: mol_type = other DNA
ttttttctggagtgtgtggtgaaacagaaaaaaacatgtttaataaacggagattgttcttttatctgctttctgaaaggaagctgacagcctgagaggagttttgcaccggccaactgataaaagagttcatgtatatatccacatttatctcttttaaaaattacctagaaataaggtttctttaattgctggagaacctgcctggttccccgcctggaaacccctcgcagggcggcaagtgccaggcccacatggtaccgggggcgggccgggaaacgcagctttccggggcggctgacggcccaccccctccgaccgggcttcctctgcagcggggaggacttcagcagctccccgggacgcccgttgcgaggacaccctgggcccgtctgcagtagccaatcaacacgaggcttgtaggctgccgttcctcgattggctacctagctccgcccgccgcacttggcgacggtgtccg

SEQ ID NO: 9614 - DNA, 367 bp, Homo sapiens
  source 1..367: mol_type = other DNA
acctcagccttccaaagtgttgggattacaggcgtgagccactgggcccagccttaaattgcaggttgaatctcaatctagtattagtattccccaatgcgactacagaactgattattactatttattttcaccagggctggagtgcaatggcgcaatcctggtttagctgggtgagccaccgcgcctggcccagaactgatgattaacccagctgagcctctgttcatctgaatattgcaagggccactgacagccgccctgcctgcctgggaggtggggtggggaaagtgggcgggacatgctcctgggcctggcccacccagatcaccctacaggctgtcggcctgtgcgtctgcatccggtg

SEQ ID NO: 9615 - DNA, 679 bp, Homo sapiens
  source 1..679: mol_type = other DNA
ccctatcccgggacgcgaatttgagggcaggacttcgggagccagagcctggcggcgctgccgcagcgggtcactcccagggggccggcaccctcatccctgctttttttttttttttgaaaggaaagacggaaggagcgagccaactcctggagaatctctttgtacacaggaatgcggagagaaaaaaactttctattgtgcaatgaaaaggcttttcacgttgagaaaaaagcgcgcctctgggcgccagcctgctctcagctgggcgcggagaccgcgcggtggccgcagggcggccgcggccagggcgctccagggcgcgccctccgcgagcggctccggggtgacgcccgccggagagctggactcccccttccgcgggcgcctgcactggctcttagccagccgagggcccgggtgcaccgggaaccccgagggcggagagctccccactacgcctgggcctcccagggatggcagctccgagagccccctagacccggtgccttgcaggacgcctctggagatcaggagggctggcggcgcattcggcgtccgggaggccgggccccggacgcgcgaggagcgcggggcgcgggaaggcaggcgggtgcacatgggtgccggctgcggggggagggggggcggggtgtggcctccccgcctcccgggcggg

SEQ ID NO: 9616 - DNA, 362 bp, Homo sapiens
  source 1..362: mol_type = other DNA
gcgccgtcccagctactcacacctgtaatccccaattgtctaaaaaaaatggttaagatagtaaattttgttatgtgtattttaccacaatacaaaataataaattgtaaagaaaaaaaaagtttttctagtctgaatcaatattttcatccagtaacctgtatttacatgcaaatatattggtttatgcaagtccgccttgcccctgggagctgggccggttccaggagctcggcttgcagagaaaggcgagcagcgcccctacacggagagtagcggtgcgcctaccggcctcccgctccactcctaaggcaggcggcgaggcttagtgcgcaagcgccattcgtcggcgccgactcctc

SEQ ID NO: 9617 - DNA, 328 bp, Homo sapiens
  source 1..328: mol_type = other DNA
gtctggagttttaaaaggtgaggacagaggctggtgaggccacctcgtccctgccgcctctgggcctctgggcctctgggcctcccctgacactgggggtgcttggtcagccctagcagggggtctcaaataactgccgcctgactttccttctctggcagccacagttccttttgaattaggaatcaaaaaccagggccttggggtgatgggcccttggtgcccaggtcctgacatctacgtgggcagctgagctgaactctccccttggccctgccccagagcaggtccccagagggtcaggtgacccttccctccccaggccacg

SEQ ID NO: 9618 - DNA, 350 bp, Homo sapiens
  source 1..350: mol_type = other DNA
gaacgtgtgccaggcactgtcccaagctctattgaggtttactggcaaataggctaacaatgttaattgaatatgatcacacatctaatagttgtgagtagggatttgaaattcaactgcccattcgaacccaagggcaaccatggatgctgctcctccaggctggcgctccttgggggcccgaagtcgggacagggtcttggagcatgcaaatcatcctgtctccaattcatctattaaatcaacgctgactttactgacaccatggcggctctaagagcccatcatggcgcgtggccccgcccgctccgccgcgcctgcgggagggagcagttccgggtgcggtgcgc

SEQ ID NO: 9619 - DNA, 369 bp, Homo sapiens
  source 1..369: mol_type = other DNA
gtgcctccgtttccttatctattgaatgggggaaataaatgcacccacctcacggggttgctgcgtttaatcagaacgttcgtgctcagcatttcctgggtaatgctgcgctctggaattggccccgcccagccccagcaacagccatactgtttgaattgcatgattaccatgcagcgtgcagacttcattaatccaacactttctttcatgagcgctctgacaggccggcctcatctgggtgggggctagcttccaccgaaccctgattccttccaggaaagccctggaagcccatagcgtggctagccctgcctggagtttccacgagctccccctctgagggcccccaaagctgtggtcaaaggt

SEQ ID NO: 9620 - DNA, 356 bp, Homo sapiens
  source 1..356: mol_type = other DNA
gagggaggcctctggccaacagtgttgattgaagccgcttcttctcctgagagttttcaagccccctctgggaagggggccgaccaggaggccacctgttacactatccagtgctggagggagaccagcgggtgtcccctggacactggggcaagtggagtcacctcactgggcctcagaacatgccacatgggggcatacgccacgtgcgcgcggatgtcaccagggtgggagtagcgcgcccctctgcgttcctgaccctccccctctggggtgagaaggggtccccgccatgtcctcggggtaggtaggggtggcggagcgccgcgagagccctggccttccggattaaaagg

SEQ ID NO: 9621 - DNA, 530 bp, Homo sapiens
  source 1..530: mol_type = other DNA
aacaagtctttgttaagccgggcgccgggcgggccaggcgtggcggagatggcctgcgtgctcggcccctgccctcaaagcgcttccagggcccaggtccccaagtgggcacctgccaacgagccaatcgttggtttcgctggaaggcgatttcacaagtttcacgtttgaatttcacaagactgtccgccgggcccgcgtggacccccgtccacccccacacgccctggggggggggccgggcccacacgccctggaagcccctagaggtgactctccctgggacccctgtaccagggaggaaggaccacacctcctccgtccgggactgcgaggagtgggcggtcgactcgagttcgcagcccaggcctcccacacgcccctccctgccgtcagcacccacccgcgcggcagcggcggcggcggctggcgggcggccgcccttttaaatccccgggctcatttgcatggccccgccccctgagtgacacggctggcgcgggcgggcccgtcccccctgcccctgggtc

SEQ ID NO: 9622 - DNA, 626 bp, Homo sapiens
  source 1..626: mol_type = other DNA
acctgccaacgagccaatcgttggtttcgctggaaggcgatttcacaagtttcacgtttgaatttcacaagactgtccgccgggcccgcgtggacccccgtccacccccacacgccctggggggggggccgggcccacacgccctggaagcccctagaggtgactctccctgggacccctgtaccagggaggaaggaccacacctcctccgtccgggactgcgaggagtgggcggtcgactcgagttcgcagcccaggcctcccacacgcccctccctgccgtcagcacccacccgcgcggcagcggcggcggcggctggcgggcggccgcccttttaaatccccgggctcatttgcatggccccgccccctgagtgacacggctggcgcgggcgggcccgtcccccctgcccctgggtcactccgagccggggctatttctggcgctggcgcggctccaagaaggcgtgagttcgcggcccttttttttatatctataatttaattaaattatttatttattgaggccgcgcacgggccgtgcccagcttcctgcccctcgccatccttcgggggagggggaatatttttgtccccccgcctggctgtgacacataaataccccg

SEQ ID NO: 9623 - DNA, 575 bp, Homo sapiens
  source 1..575: mol_type = other DNA
tcaattaactcatctgcaaattgcgtgttctctcttaggagaaaagacgcctctaatcccagcactttaggggctgagacaggtggatcacctgagcccagctactcgggaggctgaggcaagaagatcgtgccactgcactccagtaataatcctcacacagcttgttttagggtgggcgtgccagggccctcggtagcccagacctgccgtactctaccagccgagcacagcgggcccggagcagggtcttgccgcgaagggcctgggctcaacgttagagcgtggcgcgaccctatgggacctcccagaatcggagctccagacgcgggcgggccaggggccgccggaaaactgcgcgcgccccgccctaccccgtccggcctgcgcagccctcggctgccccctgccgccgccgggcggaccctgcaagccccgctgtccgcctccggattggcggctccagaaatctccaggccaccggctttccgctaccggattggctgcgtccgggtgctgaggcccggcccatttccccgggtcctttgatcacgcgcctgacggcttttccgggg

SEQ ID NO: 9624 - DNA, 347 bp, Homo sapiens
  source 1..347: mol_type = other DNA
tcctttagttttgatgccaactcaactcagcctccaaacagggagtctaactgactttgtttagcatcttttaaggaaaaggaactaggcaaattctagatttttatttcaactctgaccagagtcttttaaaaaagtccagttttagtttagctgaaaatgtgatgaaaggaatttttctacttctcatgtggccaagagaattagggtcccttagagtctagcaggaactgggatacagctcccagttcatatgatggcaatcatggccaagggccttttataatggccttcagatgcccttctgcttttactagctgatgcctactttttcaaatagaaacgaa

SEQ ID NO: 9625 - DNA, 674 bp, Homo sapiens
  source 1..674: mol_type = other DNA
tcctggagaatctgttttcatttattgccagaaacgatgatgtatgtgtgtacacacgcacgcacgcgcgcgtgttcctttctggccctcttgtttaccataagaggaagcaaatcaataaaagattgcagaataaatatttgttctttgtaggctgcagcttcaccccttcgagaccgaccggcagggcccaggggcgggtggcgtgaccttggttcatcctcggccgcggagacgcggcgtgaccttggccaagtccccgcttccccatccgcagacttgcgcggctggaccgctcggtctccgctccggccgctaggcgtcccagttctacgcctacgctgccggcgtagcggtcgcctggagccaccgcgcgaactgggagggcgcgattcgcgaacgcggcctgcgctgcgagcgcgcggccgtcccgcaggccggtgcagccttacgccgctgacgcatcgcgcccaagatggcggcgcggtcgtcgtcgggggtggcggcggcagagggggcggcggccctggcggcagcggagacggcagccgtgacggtggcagcggcggcgcgggacctgggcctgggggaatgaggcggccgcggcgggccagcggcggagccgtgtagcggagaagctccccctccctgcttcccttggccgagccgggggc

SEQ ID NO: 9626 - DNA, 506 bp, Homo sapiens
  source 1..506: mol_type = other DNA
aaaatgttaaataaaaaaattttaaaaaattaaataaaaaaatttaaaaaacatgctgtatatcttttcctggagaatctgtttgtcatttattgccagaaacgatgatgtatgtgtgtacacacgcacgcacgcgcgcgtgttcctttctggccctcttgtttaccataagaggaagcaaatcaataaaagattgcagaataaatatttgttctttgtaggctgcagcttcaccccttcgagaccgaccggcagggcccaggggcgggtggcgtgaccttggttcatcctcggccgcggagacgcggcgtgaccttggccaagtccccgcttccccatccgcagacttgcgcggctggaccgctcggtctccgctccggccgctaggcgtcccagttctacgcctacgctgccggcgtagcggtcgcctggagccaccgcgcgaactgggagggcgcgattcgcgaacgcggcctgcgctgcgagcgcgcggccgtcccgcaggc

SEQ ID NO: 9627 - DNA, 158 bp, Homo sapiens
  source 1..158: mol_type = other DNA
cccagctactcgggaggctgaggcaggagaatcgctgcgccattgcactgtagtgagctgagatcgtaccactgcactccatcctggtgacagagtaaggaaaactggtgaattttgcacacgtctccattaccttctatagtagattagatcatatg

SEQ ID NO: 9628 - DNA, 424 bp, Homo sapiens
  source 1..424: mol_type = other DNA
tggagaccagcctggccaacaggttgggtggcacgtgcatgtaatcccacctactggggaggctggggtaacctgggtgacagagtgagactccgtctcacaaaaagataataaataataaagtttctgccttaatatatatctaacccctagattatgtacttaatattcacttaacgtgggtcaggttcaaaagtttagctattcagatgttcatagaaatagctagatacctagattggtccaataattggaaaatagttttatgttgaaacaaaatggaagccttttttttttttttcagatttgcagccaagattgtcaataagtttctatggagaaataattatttctagctttgtaggtttaaggagttcctgtccccattaacccatagttctcacattgccctgtgttcacagtg

SEQ ID NO: 9629 - DNA, 456 bp, Homo sapiens
  source 1..456: mol_type = other DNA
acccaggctggactgcaggggcacgaacccggctcactgcacattgcctaggctagtctggacctcctgggctcaagcagttctcctgcctcagcctcccaaaatgctgagagacagagtctcactgtcgcccaggctgcagtgcagtgggcctcagcctcccgagtagctgggacactgtgcccggcctctgttttttattaaaaaaaaaaaaagtctacttgtgtgagtgcatatgaatttggaaaagtgtataccacaatgttaatagctatttccaagagcatatatcacttgcataatagattttggccgggaaaaaaagctcagaagttcccggcggcggtttcctagtgcgtgcgtgagtccctcaggcggtcaaggcaccgccgaggccaccccaggctccccgcgggtcctggcggggggcgggtccacgccagcccggaagagacg

SEQ ID NO: 9630 - DNA, 541 bp, Homo sapiens
  source 1..541: mol_type = other DNA
tcttagctgctgatattgagtatctatcttccctcacacatgtgaactatgagatggcagagtttttctgctgcagcccagcccctcatcagtgcctgatacagaacaggcctctcctccctgcagcgtccaggctccaggcagcattcagggctcaaggaagagtgaaggccgttgagggtcccctattaggccccaagccccctagagagctccaacgacatggcctggagtttgctttggcgacagccggtcctgctggcgatcccgccccatggggtcacagggcagaagcaacatcccgggctccgagcgcgccagctgggagggctggggaggagggcgcaccggagggctcccggcacgcgcggggccgcgggcagcccccagaagagggctggggcaggggtcggctgaagcagcggggagccggaccccacccgccacccgccacccgccacccccggcgcctgccaaactggttgctgcctccccggcagccgcggcgcgtccacctgcgcagccaccgcgccgccctgcc

SEQ ID NO: 9631 - DNA, 404 bp, Homo sapiens
  source 1..404: mol_type = other DNA
gctcatgaggctagcaccagggcttgtgtgtgtgcacgtgtcttaaagatgtgcgtatgctgatattagtgtcacagttacgtgtgtgtgtgatacacagacttgtggaaatgcatgtgtgcaaatatacatgtcctggacacacgagtgcttagggccacccatgtgtgcgcttgagaactggcatcacaaggtctcggtgccgacagctagcccagggtggcagcttccaatctgtcaactgttagaaaaaactcaaaattttgaattttcatcaaatgagagaataaatgattaaacacccagtcgagggcggcggccgagcctgtgtccccaccagcgtccatgcgggaggcgggcatcccctgctgtacatgggagggaggctgtctgtgcagagccgg

SEQ ID NO: 9632 - DNA, 344 bp, Homo sapiens
  source 1..344: mol_type = other DNA
ggccttgggatcccctgcagccccagaaacaagagaaaatatctagaactttctcccgtcagaatggaggtagcatgtgtggcccccgcagggctatgggagagcaagttgctgctggctggcccccgattacgggcctgggaaagcgagctaggagtccttcctcaccgccactgtgtgacaggatgaggaccctgtggggcacagagaacacagttcccaccaggtcgtggttggcccacaagcctcgggatccctccccagggttctccacgtaatatgagctgagtggtcccctagctgtcagggcatggatcccccagcaaggagggggattacttagg

SEQ ID NO: 9633 - DNA, 417 bp, Homo sapiens
  source 1..417: mol_type = other DNA
cacgtaagcttacttcccttatttgcaaaatagggggctacgcagtgctgggagagggtagacaagatagtctctatgcttcctttctcattctttgacagaccttgaccgggaaggtgtacgatatatacagaaatactttgtcttctattttaaacacagaacaaggcatgctaaattctcatgactttatgggaaagcagctcttcaaacacgtccttcaagcgcgagtggcagccccaggctttaacggctctccttgagggtggggacggggcggagtaatggtctggccagaagcctcccccgcccccgctccatcgccccgcagcggtgaggtcacgcggggacgtcacgagtttgtgacgagggcctgggcgggcgacgcttgcgcagtgggcgcggcgcgggaggagg

SEQ ID NO: 9634 - DNA, 424 bp, Homo sapiens
  source 1..424: mol_type = other DNA
tattgaaattgtggaaaataaggaaccagaaacctgggttctagttttggcacgtaagcttacttcccttatttgcaaaatagggggctacgcagtgctgggagagggtagacaagatagtctctatgcttcctttctcattctttgacagaccttgaccgggaaggtgtacgatatatacagaaatactttgtcttctattttaaacacagaacaaggcatgctaaattctcatgactttatgggaaagcagctcttcaaacacgtccttcaagcgcgagtggcagccccaggctttaacggctctccttgagggtggggacggggcggagtaatggtctggccagaagcctcccccgcccccgctccatcgccccgcagcggtgaggtcacgcggggacgtcacgagtttgtgacgagggcc

SEQ ID NO: 9635 - DNA, 265 bp, Homo sapiens
  source 1..265: mol_type = other DNA
ctggttaacacggtgaaacccgcccccccacgagtgagactccgtaaaagacgagataacctttctctatcctctgctataaatatttaccatttttttgagacagggtaccactctgtcacccagcctggagtgcagttctcagtctcctgagtagctagctgagaccacaggtgggcgctatggtgccgggcgtatctcgaactcctgacctcaggcgatccgcccgcagagacaagccagggctggtgtccaacgctcacgt

SEQ ID NO: 9636 - DNA, 326 bp, Homo sapiens
  source 1..326: mol_type = other DNA
gcgggttacacttttaagcatatggatgaaatagagtaggtgaccttgggaaagctcaagagggtgacgggcgcccccttcccagctctccaagcccttcgcaggtgaccgcagcatacctggagtacagctggtgctcaacaaaacacccctcagaggcgaaaggcgtttgcgcggagggaggaagctcgagccagccagccccggcgctgcgcgcgccgccgcccctcaccgcgcgcgcctctggccgccgcaagcaaggccggcgggtggcgcgcgatcttcgcgtcgctctgggcgggcggccgcggcgccgcgctggtggg

SEQ ID NO: 9637 - DNA, 363 bp, Homo sapiens
  source 1..363: mol_type = other DNA
ttttgagacagggtaccactctgtcacccagcctggagtgcagttctcagtctcctgagtagctagctgagaccacaggtgggcgctatggtgccgggcgtatctcgaactcctgacctcaggcgatccgcccgcagagacaagccagggctggtgtccaacgctcacgtcagcgtcgggagtacctgacattccaggcgcgagccacggcgccggcaccccacaaggacaagaattagagaatcattaaatatttatagaaagattaaatacgctcgattaaatgagtcctccttcccgccatcctatagatgaaaggaagaccccgcccctcgctcggctgctggaggcgagggcttcgga

SEQ ID NO: 9638 - DNA, 327 bp, Homo sapiens
  source 1..327: mol_type = other DNA
tttcagcacgcataaattaaatatgtaataggtgcggggacctagtcatcgccctcccgggaagagaagaaaattttaaaagtgaactagttcattaaagtgaaacgttcaaaggagacaccttcctctctttaggctttcctcttagttttaatgagattaaccaaactgatagaaaagtgtcagacttgtcagtactggcgaactgaaaaaaatcatttaattgggtagaaactatgaattggataaattctgctcgagcatttttagttatttagtaaacaaaactgctgacccctcaggagagcggtaggggtgatgtcatcg

SEQ ID NO: 9639 - DNA, 450 bp, Homo sapiens
  source 1..450: mol_type = other DNA
ctcgagcagaatttatccaattcatagtttctacccaattaaatgatttttttcagttcgccagtactgacaagtctgacacttttctatcagtttggttaatctcattaaaactaagaggaaagcctaaagagaggaaggtgtctcctttgaacgtttcactttaatgaactagttcacttttaaaattttcttctcttcccgggagggcgatgactaggtccccgcacctattacatatttaatttatgcgtgctgaaacctgtcccaggagctcccaaaacctttgtacagtgggcctgtttgtccctttccacctgcataatgggggcccacaaggcgcccatgccccgagaggcgtgtctcggcacagcaaagtccacctgcgctggtccgcggagccccgcccagctaggtgagctagggggcggggcgcgggggcgcggtgac

SEQ ID NO: 9640 - DNA, 472 bp, Homo sapiens
  source 1..472: mol_type = other DNA
tctcgctctgaggctggagtgcagtggcggctgggaatgcaggcgcccgggccaggctggactcgaactcctgacaggagatctgctggactcaggtgtcagactgtacacttttatggtaagaagtcatgacacagtaagaagaggaaacgcttcctttctataaccccagtgggcagagcctggccccagccctggcggctcctccgcttctcccacatgtgaggaaagagcgcggcccctgcgcccctgcggcacacgctgtgaggccatccttctcgaggggcgggagctgaccggcatgaaccggccgcagcgagccgctcgaggcctggttggcttcgagctcaggagggacgcacgagcctgccgcttccggctctggcggggggggcacgtgccccgtcccgttgccccggcgaccgcggcgggcgacgccccaacccgccgctccgccgcggtggtacgctcc

SEQ ID NO: 9641 - DNA, 489 bp, Homo sapiens
  source 1..489: mol_type = other DNA
ctgacctcaggtgatccacccgcctcggcttcccaaagccctgggatgacaggctcgagtctcgctctgaggctggagtgcagtggcggctgggaatgcaggcgcccgggccaggctggactcgaactcctgacaggagatctgctggactcaggtgtcagactgtacacttttatggtaagaagtcatgacacagtaagaagaggaaacgcttcctttctataaccccagtgggcagagcctggccccagccctggcggctcctccgcttctcccacatgtgaggaaagagcgcggcccctgcgcccctgcggcacacgctgtgaggccatccttctcgaggggcgggagctgaccggcatgaaccggccgcagcgagccgctcgaggcctggttggcttcgagctcaggagggacgcacgagcctgccgcttccggctctggcggggggggcacgtgccccgtcccgttgccccggcgaccgcggcg

SEQ ID NO: 9642 - DNA, 536 bp, Homo sapiens
  source 1..536: mol_type = other DNA
cctggcgccgcacggccgtcctcgcgagcgagcgcggggacgcaccctcgctccccgactctttcctaggggagcgaggacgagtctgcgcgcggtctgcgcctgacctccctgctcccggggaagccgtctccatggagaccaggcccgctccccattcctgcaggcagcggcccggcagcctggggagggggccaccgcgcccgggcgcgcagggggagcggccaccgcgccgaggccccagaaagggcgtgtttctggcggcacggagcagccccgccgccgccgctggcagaggccggcttggagagggcgggggttcccctccgtcagtcgcccctggcgcccctccgcctcgctctccccgacgtccggccaggaggagccggtagcatcgggagcctcgcgccgagggcgccgcggtccgcgccccgcgactgcagcccccggcctggccccggcggggcgccccctcccctccccctcctgcgagctgggatccggccggcttccgccctcccctggccgcgagaccg

SEQ ID NO: 9643 - DNA, 422 bp, Homo sapiens
  source 1..422: mol_type = other DNA
tacgtcctttaaaaattattcttattaagttaaattgttttatagagaggggaaagtttctcacctcattctgaaaattttggtttttatgttcaacccaaagaccgccagggcgccctccctgcggaggcgagtcccaaggagctcttaatacctgcaactgcttccttcaagctggaagatcagtaggcaaggcctgcggactgcgcaccttaagcctggaggctctgagctcggaggacagagaccgaagccccagggcctgcgtccctgcaggccgcagaagtgatgacgcaaagccctcggggcctccgccaagcgacgacccggctccgagccgcgcccaggccctgacccgggcgtcgtgacgtcagcacgccttccctgggcgctcagcctcgctggccatgcgtcaccccggc

SEQ ID NO: 9644 - DNA, 279 bp, Homo sapiens
  source 1..279: mol_type = other DNA
gcagccaatgaataataacgggaccctgggtgggggagggggcccggccgcggtccagcggccaggccgccctgctagggccggagggaggtgggcacgccgggctcgggaccttcccggggtcctgcgcccgcccggcctcccgccctgggcatggttggcccacgggccccgccaccagcgccggccccccgcctgcgccatagcccgcccgcccgcgcgcagcttgcctcgcgcgatattctaccgggccccggaacccgtatagaaaataccggg

SEQ ID NO: 9645 - DNA, 486 bp, Homo sapiens
  source 1..486: mol_type = other DNA
tgaaaattttggtttttatgttcaacccaaagaccgccagggcgccctccctgcggaggcgagtcccaaggagctcttaatacctgcaactgcttccttcaagctggaagatcagtaggcaaggcctgcggactgcgcaccttaagcctggaggctctgagctcggaggacagagaccgaagccccagggcctgcgtccctgcaggccgcagaagtgatgacgcaaagccctcggggcctccgccaagcgacgacccggctccgagccgcgcccaggccctgacccgggcgtcgtgacgtcagcacgccttccctgggcgctcagcctcgctggccatgcgtcaccccggccttggtgggggcggggctccgaagagctcggttcagatcccggccgcctgggctccaggagccccggaaccaggatactgccgcggcggtggaccgtgcccggtattttctatacgggttccggggcccggtaga

SEQ ID NO: 9646 - DNA, 451 bp, Homo sapiens
  source 1..451: mol_type = other DNA
tgcttccaggcaggaggtattcccagcacctgcagatgtcttcaacatctgtgaccaccattcctgggccctgaatccccctgctgctgctgggacccttaaagttgaggtgcaccacaaggctcaccagtgctctgagtaccctgacctggagaggtggatggagtcccaccaggcatttttcctgctttacaaatgaggaaactgctcaaggaggttaagtaacttacccatatcaggatgagcttgctgcaagctgcgtctgggagccctggaaggctccagaagcctccgggtctgaggaggcttctaaaagggcctcacatgccccgggagccacgtggatggagggttcccgctctcggagagttggtccccagttcccatgcagggagtggagcctctgagcactgccagacgcagggttctcgacagcacagagcctcgtggt

SEQ ID NO: 9647 - DNA, 254 bp, Homo sapiens
  source 1..254: mol_type = other DNA
gtgttatgttctttttgaacacatcacaaacatctaggtgctcagtaaacatttcccaaagcaaggtttaggaggcattggctggaagccaaggtctagggttggggtcgtcagcggcggatccacccctccatcaacccccccctcccatgggcacgccccaggccttggccccgcccacctactccggctggacttgtgcccggccctgccccttgcgaccggccctcgcgccggcctcacgttcaggctcc

SEQ ID NO: 9648 - DNA, 407 bp, Homo sapiens
  source 1..407: mol_type = other DNA
ctgctcaatgacaaggaacatctttttcctggtgaggggatcttattcaccctctgagggccaaatacctataggagctgcccccaccaggcaggggggtatcacacttaaaacgtagatgttatcaaattaactatcaagtgaaagttcacttaacttcccctctgggcgttgaaaggacaggaacagaactttccggacacttcccttaccacggggaggtcgggccaggcttccttttccgaacccagccgcttccctaggggtccagcagcagcgggcgcgaccgggggaccgcggtgtgggttaccgcgccggcctagcggcccagcgacgccccccagcggccagagaaggccgcgcttctcggggttggcccacccaaccgctctgcgggtaggaccgag

SEQ ID NO: 9649 - DNA, 258 bp, Homo sapiens
  source 1..258: mol_type = other DNA
cccaggctggagtgcagtggtgctatctccactcactgcaaccctcctgagtagctaggattgcaggagtatgctgccgagtgcagtgacgtgatctcggctcactgcaacctctttgaagcgattatatgaaaatgccttttccctacaaaagctcattaacctcaaggaggtctcctcaaggagaccgttccacctggagcacctgctcctagggtgggcttggggctgggggcggagctccagagccagcggctg

SEQ ID NO: 9650 - DNA, 710 bp, Homo sapiens
  source 1..710: mol_type = other DNA
gggcccctctccccgggaccgcgctagggctccgaggagctggggcgggtgatgggggacgagggccaggcacccacatccccaatacttggccaccgtccgaggcgcgagctggaagtctcaacccccgtcccactcctgcccaggccccgggcgctcccgcgtcccctccccgcgcccgtcgcgggtcctaccgaaactcggcggccgcacagcgtcgagacgccccccgtgggggcccggggagccggggcgaaagggaccgggtcccggcagggcgggcgcagccgccagggcggagccgggtctggggccccgggagtggggggcaggcccgcgagctggagggtacgctccgccttggcggctcgggactagggtggaggggccgggagccccggggcccgtgcgctccggctctgccgggctcctcgtgacgcggcacccacggcccccggcaccgacgggagccctgcccgcgaggcgagggctccgccctcggccccgccccaggccggagccccaaattccggcgggtgcccgggagcggggcgaggcccggagcgcagggggcagctccgcacgggcgggcgaggagcggggcgcccaggcgcgcgccagccggggtggccgggtcgcgaggccgcggggtaggcggcccgagcgcggctggacggccccgcccctcccggccagcaccgccccctgcg

SEQ ID NO: 9651 - DNA, 351 bp, Homo sapiens
  source 1..351: mol_type = other DNA
gttaagggtatacctccaatacagacatattctttttcccagtagctgggactacaggtgagacggatcactctaggcaggagtgcagtggcaagcctcctgagtagctgggactacaggtgcctgccgccgccggccaggctggcgggattacaggtgtaggctctagttcttattttttgtgagaaataaagataaatacaggatccagtctaatgttttcaccccaagcttctgggggcttctcggggcaggttcttcccccagtggcctgggcctagcaggggagggtcgtgggctgtagcacctcccacagcgcggccaggcctccactccttgagcagggggaag

SEQ ID NO: 9652 - DNA, 463 bp, Homo sapiens
  source 1..463: mol_type = other DNA
accaggctggagtgcagtggcgtgatctcgactcactacaacctcctcccgagtagctgggacggcgcgcgccaccaacctcgtggtccgcccacctcggcctgggattacaggcgtgccgaggtgggatttccccagtcccgactgggctcctagggctaacctggccagctgacctaacaaacgcggcctgcccctctccggcctctaggtaggccctgtggacagatagggatgtgagggggtgtcagtttccaccatcccttctctatggcccccacaaagggcaagggccagaccggggcctcatttgcatggacggcgcgcggccaccaatccggacaggcggatcgacagcccgcgcgccttttgggggcggactgacagccccggggccctatggaaggcgggtcctgcggccggctggggcgggacggcgccgggcgctgccccggggattcgg

SEQ ID NO: 9653 - DNA, 226 bp, Homo sapiens
  source 1..226: mol_type = other DNA
tggtcttgaactcctgacctcaggtgatctctggatcctggttccaacacttagctgtttgctgggtaagtctcttaacgtaaaagtcgctagtgacacttgttaaattgggaggaactttaaacttgaaaaggggcactgttaatacaacgagcgaactccgttttttggacatcattgacccagttgccttgacatcagtgacgtcgcgaggggcgtggcctct

SEQ ID NO: 9654 - DNA, 277 bp, Homo sapiens
  source 1..277: mol_type = other DNA
caagtccttaaagaatggcagaaacctgcaagagcactttgtcaaacaggtgaggaaaggcagcctctggagctacctgctggggtccccaaagaagaggagatgtgaaggacacttctgccctctcccctatggcgtgtcagctcactgcaatgtatttttaatagagacaaggtttcaccatattggccaggctggtctccttgacaagtgtgggccatggtgcctggccccatcttctggtaccctggttcctgaccctgccagagttctggtt

SEQ ID NO: 9655 - DNA, 383 bp, Homo sapiens
  source 1..383: mol_type = other DNA
gaagtcctgaggaaggcctgcctcccccggtaaatccttagacaattaatagaatgattaagactgcaagagatttaagacttattcttaggctcacaccacccccgtctctacagaaatttttaaaattatcccggcgtgccagctactcggagtgagccgagatcacgccaataaataaatacaataaaatagagttttatcttacaataaaaatagagttttatcttacagtttcaagcttctacttggaagtaacacgtatggaggctcccagggcccctacagtctggaatcccgcccgtgcgagccctccacgtccctcctccgccggggtggcctggggcgccgggtcacgtggccggggaagaggttttatcccg

SEQ ID NO: 9656 - DNA, 356 bp, Homo sapiens
  source 1..356: mol_type = other DNA
cgacatgacttgccctaggtcatatcattggggtagcagtgaggcctctttctgctgcaagtatcttaaaaaccaactcaaattggtctaggtgaaggtgtcacctaataacaggtaggatttattgagcacttcctatgtgcaaagtgctttctttttcatttaattaaaaaatttaagacagcacccagggagtgcagtggctcgatcgcagcgtactgcagtaatagagacagggcctcactgtatgtttttgtcacaaaggtgttataattatccctattttacaaacaggacatcaatactgtgcctttcagagaaagaaaacatcgcaaacatctaagatcggttctgat

SEQ ID NO: 9657 - DNA, 440 bp, Homo sapiens
  source 1..440: mol_type = other DNA
ctgctcacgcgcgcacgtggccttgggtagtttaggaagggcctcctaagggcccttgagtcaggcctgcaggcagcccctggtgtgagggcagggagcacacacaccctggcctgctgggggttgcagaactgtcagccccagggatctgggccggaggctaggatcctcgtccctggagtctgacactgctagacacctgggcttgggtgggccaaaggcaaggcctgacgtggcatatgggaatatacaatataaatatattcttataattgtatataataatgtttatatatatgtaacacataaatgtgtattaattcaaccctcacaactctttaaattatccttagttgacagataagtaagtttgcctcactaataacttgttggccacagctgtgcctctgcccacggccagccctgtgggatgcagggga

SEQ ID NO: 9658 - DNA, 511 bp, Homo sapiens
  source 1..511: mol_type = other DNA
ctgggacaacaggcgcgtgctgccacgccaggcgatctttacactagccatgtatttacctataaaatcaggagaaatatgtatatatataatatattaaaacatatatatatttaaatggggaaatatgtaactttgacaaaacacatatgttattgttatcacacaatcagtctgcatatacaggcgttttatatatatatttatatagactacatatatacgtatattatatatgtaaatatttcactgttcctccaacataatcttaacacatagtatgcttttagaaatcgttgactgaatgctagctttgtttgctgggaattgagcagtaggaatgtgtcagtcacatcccaccttcccaggaaggtgaacggtgttccgattccccgcggcgggggcctgtagtgggagctctgccccttccccgcctctgctgcaggccccgcccctcgcccggaaccccggggcgctggccgcggtgctgaaacggcgccctccgcggacg

SEQ ID NO: 9659 - DNA, 588 bp, Homo sapiens
  source 1..588: mol_type = other DNA
taaatctttataggaaatgactgcttttgagctccaatggtcttatggtccacaaagcctaaatatttactgtacggcccaaagaaaaactttgctgaggctatacaatacttcatgattaaataactgggtaagattctgaacatataggcaggccctcttaaataactattttgcctttaagttgccataaacatcaaacttataaacaagacagctttatcatgtattgaaggtggtagaataagaaaacattaaacgtttttattctcatttcccttcctttacagctttcacttaaacttgaaatttcaagagaaaattcacttttgaagtttttacttttcaagtgataaacatgcctgattaatccattttacaggccaggaaactgaggcagatcccagttgcctccgaagctctgactcagcagcatgcagagagccctgccgctctctgcgccttctaaccttgccaggtttccaagcttggatccgccccctcctcgggagcaggtggtaggctccgcgcccaacgcgcaagcgcgcggcatcgtggggcgggggtggggtcggttttgggccgcgg

SEQ ID NO: 9660 - DNA, 378 bp, Homo sapiens
  source 1..378: mol_type = other DNA
acatttttatcctacaaattgggatgaaagataaagtaagcagtatattcatacactcattcaaccaatgtgtattaaatgcctactaggtgtcaaacacttgcagtttaaaagtgattaaaaactacagttgtcattcaacaaaaattaattgaatactataaaagtccttgccctcataggggtacatgtctgcatccagagcagatctgcctgaggaaggcttaagtcttccggagacgttagtaccgtctgtgcagtacacatgtgacacatgtgcactgctgtatgttcggtccactcaggtatgaggagggcgacccaggtaccactttcctggcgaacgcccgcgggctaggccacaacggctcgggaacc

SEQ ID NO: 9661 - DNA, 252 bp, Homo sapiens
  source 1..252: mol_type = other DNA
ggccaggatggtctcggataacagactgagcccagcccctggaaagctttgcctttgggacatatttcgtcagcatctcaaagagtacagcaggtgctctgctgctggtaactactcgcagtcgccggccacggtgaggcgcgcgaggcggagacagtcaccccgcccgcggagaggttccatataaatctcggctctcggagagtcccgggagctgttctcgcgagagtactgcgggaggctcccgtttgc

SEQ ID NO: 9662 - DNA, 548 bp, Homo sapiens
  source 1..548: mol_type = other DNA
gcggaaattcatgatgtgactttgggtcatattttggaatttgttcgattttacgttttcaaatgcatcaaagaaaaagctaacagttaaatctgatacttagtttaagatccgtagctttcaaattatagaaaatctaaaatacagggtataaaaccttgaatatttcaggtctggaaattatatgctatcgacttaatttaaaacacactcacggtgtaaattaaagctaaaaagtatcttaactagataactccctgcaagctctctaagggacttttaaaacacagtattcgcaggaattatctcaaaaaatatttacaatacctcccagcactgttaataactttttgacgcctaagtttcttgctccaaatgagaaaattgttttgtcgaacaatacttaaatgagcagtggtgactaatcagtgagctgcagtgttcttgcaggcagataaagtcggtattttagctctatggatcgctgttaattcaagtgcgaattcaaaaagaacgcttttcaagaaaaaaggcccggagagagctcc

SEQ ID NO: 9663 - DNA, 330 bp, Homo sapiens
  source 1..330: mol_type = other DNA
catatctgaacacagacaaaacatgaatattgtcaaaaggctgctggtttaccagctgtagcttcagatgtattaaatgatacaatcctaaggctctttcaatatgcttgtcatactttattattatccccatttcacaagagggcagaaaccaacaagacaacttgggtttcctcaggctggagaagcagggtatccaggatgacctgagtgaccctctcgactgcctggctgcttaatgcagagccagtcaggcccagaggtgtcagcagagtcggaggcctgagtcacttcctgacccttgctcaagagcatccggagctacagcca

SEQ ID NO: 9664 - DNA, 382 bp, Homo sapiens
  source 1..382: mol_type = other DNA
gtgagctgagatggcgccactgcactccagccgcacatttgatttggtattatagaattagtgctattaattttagtcaggagttcaagaccagcctggccaaggtctcaaaaaatatatatatatagtattgtggatacgtacttttaaaaatccttacgttttagagatacaaaaatatttatgaataaaatgatatgacgccttagaacctcctatcagatgtggttcagaagcctcatcaggatctgtattttaatcaaataaaatgcccaggggattcctgagcacactgttccataatgtgttcacagtcacagggagctcttccagaccggggctggagggaactgggaagcactgcctccccgctcctgcttgg

SEQ ID NO: 9665 - DNA, 551 bp, Homo sapiens
  source 1..551: mol_type = other DNA
agttcaagaccagcctggccaaggtctcaaaaaatatatatatatagtattgtggatacgtacttttaaaaatccttacgttttagagatacaaaaatatttatgaataaaatgatatgacgccttagaacctcctatcagatgtggttcagaagcctcatcaggatctgtattttaatcaaataaaatgcccaggggattcctgagcacactgttccataatgtgttcacagtcacagggagctcttccagaccggggctggagggaactgggaagcactgcctccccgctcctgcttggacccaccagccccgccgctggcccgcgctcggctgggaggcaccggggtcccgctgggcagccccgaccccgtgcctgggccgcacctgccgcagtggctccgtcgggccgggcggaagcgcgggagcgcagggctggacaggcccgggcgtggcggccccggcgcacctgggcgagccggcaggtgggagcgtagcagcccggggcccccgccctcgcgcgggggaggagcgggcggcgcggggcgggc

SEQ ID NO: 9666 - DNA, 526 bp, Homo sapiens
  source 1..526: mol_type = other DNA
tttatttttttgtttttttagatcaaaacaaaagccagtttggtcctaatgcattaaattaatgcttaagcagactgtcaaacttttgtttactccttttaaacggaaagtcagattttttttttttttttttaaaagagatggacaatcgctagacctttgtcctcaggtcctgggcatgggggttgggagggggcttgctgctccaactcttatcgggctcgccccgtggcgggcagggccgtggtgcgcagggatcgcggcgggcgcagacccggtctcttgctcggtgtccccgccgcgcccgcaccgccaccgtgaggccgagccggggatggtgccccgtggcggcggcggcggcgcctccgcgctcctctccgcaccgccccggccgccgccgcgccaggcacgggcggggggatcgctctcgctcctgttcagcgggagagcccgcagagaggccggaggggcggatcctgcctgggggctgatccctccctcccctcggccgggctccgtggcggca

SEQ ID NO: 9667 - DNA, 366 bp, Homo sapiens
  source 1..366: mol_type = other DNA
gctgaccctgggaaagttatattacctatctgagcctcagtttcctgatcagtaaaaggaagatagaaatacctacctcccagtatagcttacaacccagaggggacttggggtggggaagattacaccctcctctgccacccccgatagcgcatctgcccactgagcaaatggcacaggcgagccttaccatatctcagggtcatctccctctcagacctggaccagggccatagactcagtgggcaccaagcaagacttcgactcctggacaaaggtcaggatgccggcctagctcggtgcaagacagcaggcaccctggccactgggtggcacccctcacgtgggtgtggccgaggtgaagaa

SEQ ID NO: 9668 - DNA, 359 bp, Homo sapiens
  source 1..359: mol_type = other DNA
aatgaaccaaaacagaatttcttaatatttttttctttttttttctttgagacagagtctcactctgtcacccaggctggagtgagcgccatgttggccagttcattttaataaaacatgtttttcttttctgattataaacatgtatttacactctattttttaaaataaggcattacagaaagtggaaatctgactttttaagacttcttagaatgttcgggcatagcagatctggaacccactaatcttcaaagataactgagggatgttgtaaaggcaataaagccacctcgagagccagcccatggctctctggattggctgccatgagctcagttcctgggagatactgtata

SEQ ID NO: 9669 - DNA, 678 bp, Homo sapiens
  source 1..678: mol_type = other DNA
ctcttatcgggctcgccccgtggcgggcagggccgtggtgcgcagggatcgcggcgggcgcagacccggtctcttgctcggtgtccccgccgcgcccgcaccgccaccgtgaggccgagccggggatggtgccccgtggcggcggcggcggcgcctccgcgctcctctccgcaccgccccggccgccgccgcgccaggcacgggcggggggatcgctctcgctcctgttcagcgggagagcccgcagagaggccggaggggcggatcctgcctgggggctgatccctccctcccctcggccgggctccgtggcggcagcggcagcagcggcggctccattccccctcctcccccgggagcggcggcggcggccgggccggggccccagcgcgggccgggagggggcacggcggaggccacggaggcaggcgcgggagaagaccgcgctccgcttcccgggccgcgccgacctgctcggcggcctgcccgcccgcgcccaggggccccgaacggtggggccgggcaggcggctggcggtgcgaaagctctctcctggagcgagggcggggggagctgagaagcgaggaccccctcccgcagcccgccttccaattggcctggccagacgagagtcccgccccttgagcggccctaggtcccctgggtccctctgacggg

SEQ ID NO: 9670 - DNA, 557 bp, Homo sapiens
  source 1..557: mol_type = other DNA
cgcacaacctctcttgagacaaggcaccaaccccgcacccagaggcggccctgctcaggagagcacagccgctctgatgtgcgacggttccggacctgtggggcctcagcggggccaaacggcaggccgagacagtatcggggccgggaaggtcactcacccctaaagggagaggcaccatgcgaggccctggtcctgggctcgggaccgtgagaggttccgagttcaggactaggggtccccttagatcctcagatcctgcagaatcccggctctgccccagtgggagccaaggccaggtcgccagagggactgtccgccggctggaggctgtgtgcaggacccacgcctcccaggctagcgagcgggcagcgccccggtgctgcgctcccacggggccggcccctgccctgccctgccctgctcctagcccgcagcggcgcaagtggaaccgcatcccgctctttcgttttcgtttcccggaaggatagcgattaccggagcgcctcgcgcgcctgcccgcctgcggaggacccgggcgcacacgccttggcgct

SEQ ID NO: 9671 - DNA, 482 bp, Homo sapiens
  source 1..482: mol_type = other DNA
aaattcatcccaaagtgctgggattacacgcacaacctctcttgagacaaggcaccaaccccgcacccagaggcggccctgctcaggagagcacagccgctctgatgtgcgacggttccggacctgtggggcctcagcggggccaaacggcaggccgagacagtatcggggccgggaaggtcactcacccctaaagggagaggcaccatgcgaggccctggtcctgggctcgggaccgtgagaggttccgagttcaggactaggggtccccttagatcctcagatcctgcagaatcccggctctgccccagtgggagccaaggccaggtcgccagagggactgtccgccggctggaggctgtgtgcaggacccacgcctcccaggctagcgagcgggcagcgccccggtgctgcgctcccacggggccggcccctgccctgccctgccctgctcctagcccgcagcggcgcaagtggaaccg

SEQ ID NO: 9672 - DNA, 307 bp, Homo sapiens
  source 1..307: mol_type = other DNA
aattcatcaatgataaacagtagatcctaaaatcttccagattgaaaaaaatcaattaagaacaaactagctttcaaaatcctgagagaaaatgttttccaatctatgtgccataaactttttcaaaaaataaactgcttaacaatgattggtttttaaatgatgtgcctggattcatttaataaaaattaattaaaaaaaaaagtactgcagggctttagattttgtcctaaaaaaaaagtgagaaactctttaaggaatttaaactgttttaaactgtagtaattcaataataatcatggataat

SEQ ID NO: 9673 - DNA, 500 bp, Homo sapiens
  source 1..500: mol_type = other DNA
cactcacttctggcagaggcaaaggagagcccttctccaatctagctcttctgccagcccggaagtgctgggagggcagagtgagataaacacaatacagtcctgcatactttatagtcataaaagaccaaattataatgaaaaaatttatgtcttcagttttgaaaattaaattttttgaccctgataaaacaaatttgctatacataatccaattccaaattagttttcagagagtctcttgtaaggaaaaggagaatcgacttcgaattttaaaatttgtgctattattagtttatagagctttcaacaatttacaaatagtttgcataatcagtatatttaattagtatatatagacatatatatatatatttgagagggaacttctgttggccaggctggtctggaccggcctagtgtaatttttaaaagtacaaaagccactagaaaccgtgacaataagaacttcctttgacatggaccatatatagatgttt

SEQ ID NO: 9674 - DNA, 493 bp, Homo sapiens
  source 1..493: mol_type = other DNA
taatccaattccaaattagttttcagagagtctcttgtaaggaaaaggagaatcgacttcgaattttaaaatttgtgctattattagtttatagagctttcaacaatttacaaatagtttgcataatcagtatatttaattagtatatatagacatatatatatatatttgagagggaacttctgttggccaggctggtctggaccggcctagtgtaatttttaaaagtacaaaagccactagaaaccgtgacaataagaacttcctttgacatggaccatatatagatgttttttgaatgctgaaatcttttactcataacacagtttttgatttaaaatttgtaatacacctttgtaatagtcatgaaactcagtatttgagaaaaatgtggagtttttccccttttggccagaatgtatatccagggtagtgactttcgagcaaatgcctccacgcatggggagatcagggtttttccgtctgcaacctt

SEQ ID NO: 9675 - DNA, 594 bp, Homo sapiens
  source 1..594: mol_type = other DNA
cactagattcttatttaaaaataaatctcttcaactgaggaattttcagaaagaaaaatagaagagttttctcatagtgcagaactgggcttctaaacctgaagacactgctataaaaagcaaagttttatttaaaagaaaattgctggttaaggctttttaatggagccaattaattgccagaaaaaccgcgtctgcaaatgttttgcgggcgcagcgtcggatcaccagactctgccctccgcgcggaaacaggagcccagctcagccccgcggcctttcgactcgggggtccgaaccgccgccgcgtccggaggagacgccccctcggccacaaagggaagactcgggccacgcccgccgctccccgccgcgctgtcccgctcggggctggaatccgcccgggaggcgcgcgcaggccgcgcagccagaagccgcagccgggaccggctgtgccgcagcggcgcgcgccccccgccccggaccgcgcggccacgcggctgagtcacccagcgcttcacgttaagagtcccctccgcgcgtggcacgccgggaaggccgtgtctggggaccccgtccggggccgcaccgtaa

SEQ ID NO: 9676 - DNA, 512 bp, Homo sapiens
  source 1..512: mol_type = other DNA
tcaacaatttacaaatagtttgcataatcagtatatttaattagtatatatagacatatatatatatatttgagagggaacttctgttggccaggctggtctggaccggcctagtgtaatttttaaaagtacaaaagccactagaaaccgtgacaataagaacttcctttgacatggaccatatatagatgttttttgaatgctgaaatcttttactcataacacagtttttgatttaaaatttgtaatacacctttgtaatagtcatgaaactcagtatttgagaaaaatgtggagtttttccccttttggccagaatgtatatccagggtagtgactttcgagcaaatgcctccacgcatggggagatcagggtttttccgtctgcaacctttaataattgccatttacggtgcggccccggacggggtccccagacacggccttcccggcgtgccacgcgcggaggggactcttaacgtgaagcgctgggtgactcagccgcgtggccg

SEQ ID NO: 9677 - DNA, 340 bp, Homo sapiens
  source 1..340: mol_type = other DNA
gaataactcgcagcacatgcttccttctctccctagagtcagtgtgctccattctcaagaaacgacaagtgcccaaagacttgggacctcttcgggtggtgagagctcaccttatcccaggtaaggtccttactttaaggaaccgtaatgaagttaattgtattggtttagttaattgtattggtttagttatgcaacttcttgtgagtccataattatttcgaagtaaaaagtaagcctcacccaggtccagccagccctaggcagggggtgaagggaggggcagggcggggccacgcaagcgcagttccgcaatcccggccgctccgggaagtcgcgc

SEQ ID NO: 9678 - DNA, 340 bp, Homo sapiens; identical to SEQ ID NO: 9677
  source 1..340: mol_type = other DNA

SEQ ID NO: 9679 - DNA, 202 bp, Homo sapiens
  source 1..202: mol_type = other DNA
cgccttgcccggccattccaggtcacctgaccggtctcgccacagtctggtgccagctgggtcacaaacagctccgtgacctgtttgtagaagcacttaattaattcatctcttaatcttggagggagcaccaggcctgttacaacgagcgcgcgccgacgcacgtctgagcgcgctcccagcaaccgcggctctcgctgcg

SEQ ID NO: 9680 - DNA, 320 bp, Homo sapiens
  source 1..320: mol_type = other DNA
gaataactcgcagcacatgcttccttctctccctagagtcagtgtgctccattctcaagaaacgacaagtgcccaaagacttgggacctcttcgggtggtgagagctcaccttatcccaggtaaggtccttactttaaggaaccgtaatgaagttaattgtattggtttagttaattgtattggtttagttatgcaacttcttgtgagtccataattatttcgaagtaaaaagtaagcctcacccaggtccagccagccctaggcagggggtgaagggaggggcagggcggggccacgcaagcgcagttccgcaatcccg

SEQ ID NO: 9681 - DNA, 413 bp, Homo sapiens
  source 1..413: mol_type = other DNA
ttttcaagattttccaacgttggaggatttgtcagtacatcattctgaataatactcattttatgagtttacattttttaaaaaactgtaaagttggttgataaatttttagatactagccttgttcctatagttccaaatgaccaaaataggcatttatttatttatttatttgtggttttttccgaggctggagtgcagtggcgcgatctcggctcactgccaccgagtagctgggagccaggctgggtcgaactcctgccgcctcggcttcccaaaagttctgggattgcagtttttttaaaagtgaaaatcgttggccttatttttattaaacaacagaattctcttctgtttttctagaaatgctttattttggggattaaatgaaataacaggttaagtctcttaac

SEQ ID NO: 9682 - DNA, 387 bp, Homo sapiens
  source 1..387: mol_type = other DNA
tctgagttaggtcaggggagtattcaggagacagacaactcatacttaagttcagtggacctcaatttcctcaaaaacgggactgaaaaatcattctggcctcaagatgaaattgcagagaggtgcatcgtttttataatttatgaatttttatgtattaatcagcggtgagccagaaagggggctcattggagggaagtgccctcctgcagcacgcgaggttccgggaccggctggcctgctggaactcggccaggctcagctggctcggcgctgggcagccaggagcctgggccccggggagggcggtcccgggcggcgcggtgggccgagcgcgggtcccgcctccttgaggcgggcccgggcggggcggttgtatatcagggc

SEQ ID NO: 9683 - DNA, 357 bp, Homo sapiens
  source 1..357: mol_type = other DNA
gttgaggccacagtgagctatgaccccaccactagataatacttactacattccaaatgaggagactgaggcacattgaggttaagtaacctgcctaaggtcacacaggaactaggcaaatattcctggaaggccccagtgtcctagagcgggtcatcagagttccctgcaggccgctgggctgccttcaagacttcctcagagaggtgaggacatatcttctctctccaacataggtgatagatgattccaggggagaagcaatatatgtctccaccccataaatgtatgtcaaagagatctgttctggcccgggggcaggaaacctggtttctactttaggcaaatcacctggtt

SEQ ID NO: 9684 - DNA, 395 bp, Homo sapiens
  source 1..395: mol_type = other DNA
agggcacacccaagcccctgggaggggatcttttttccccctcccccaggatggagacccctgatgggagatgcgcgcgacgcgtcctgcgcgcagaccccgcccgcggccccgccccggcccctgcgggcgccccctctggcgttcccgggcggcgggaggctgcggcttcgggcagatttgattttcccgcagcccgggcgccccggagccgaagcccgagccgaggaggtggcgctcgcagccgcgtctcagccccgtcgccgccggcgccaagacccagggagaggcggcgcagcccgggcgctcgggctccgcgctgccggcgccccgccacccccgccgccagcgccccatccggcgcgcccttgccgcccagcccaggctctggagtt

SEQ ID NO: 9685 - DNA, 342 bp, Homo sapiens
  source 1..342: mol_type = other DNA
aaaatgggaatagtaatatctaccttgtgggattttgaagattaagcgtgaaaatacgcaataaaatgcttagcttgatgcctggcacatggtaaacattcaaccatcattattaagtggtgtgcaaagattttttatgactatggaaaaacaaggtctattttcagatctgaaaaatggtaataatactatctacttatagaattgttttgcactgtgtacatcgtacagcgccttacaattgtgagactaagaaattcttcgaatttaatattaggacattctggttgttccaacgaaccaatcagatgcgggcattggaagaagggaccgtcctcttcc

SEQ ID NO: 9686 - DNA, 521 bp, Homo sapiens
  source 1..521: mol_type = other DNA
caaagcttaggctgaggctgaggtagacaagtctgcccgggaggggagaggtgtcccaaccagcacgcgcctactcggtgctggctgcatagaagccggagctcgggccgatctcccagtctggttgccaccagactgggtggcaggagcttctagacctggaggctggcgtggtttcggcagccgacttggcgaggccgcggctggcgggaaccacggatgggggaggcgcccatgcaccgaccccacctgggccactggagtccctcctggcactggggtcgcccccacacacctccccagaaggagatgtagggtctgtttctgaactgagacccgcccccgagtagggcgcacactcagcagagacacacccaagcccctgggaggggatcttttttccccctcccccaggatggagacccctgatgggagatgcgcgcgacgcgtcctgcgcgcagaccccgcccgcggccccgccccggcccctgcgggcgccccctctggcgttcccgggcggc

SEQ ID NO: 9687 - DNA, 463 bp, Homo sapiens
  source 1..463: mol_type = other DNA
aaagctgagcaccctgtgctctgtactgtgcaagaagagcacaaagatgaaggaggcccagctcctctctcattgttgacaattagggacattacagttgaactgtcgttaagagcacaagtgcaccagctgtagtactttaagcaacaaagtaaaatgggaatagtaatatctaccttgtgggattttgaagattaagcgtgaaaatacgcaataaaatgcttagcttgatgcctggcacatggtaaacattcaaccatcattattaagtggtgtgcaaagattttttatgactatggaaaaacaaggtctattttcagatctgaaaaatggtaataatactatctacttatagaattgttttgcactgtgtacatcgtacagcgccttacaattgtgagactaagaaattcttcgaatttaatattaggacattctggttgttccaacgaaccaatcagat

SEQ ID NO: 9688 - DNA, 330 bp, Homo sapiens
  source 1..330: mol_type = other DNA
gtacacttatgacagcgataataacatcaatgaccaaggttttggtcaatctctcaaaattgagaaaactaaatatggcctgagaaggactctgtccttctatatttgagtccttgtgtgtaacatagctgctgaatgttcagttgcctgattcttaataattcggcttaagtttttcttttatcaacagagtaagctctcactaatgagtggagtagtagcttccagaaggaagcctaacatgctgcctggcacatagtaggggacagatatcgcgagaggtcccgcgctcgccacacaaggcctcgcccaggagtggggggttgcttc

SEQ ID NO: 9689 - DNA, 348 bp, Homo sapiens
  source 1..348: mol_type = other DNA
cctattcattgaagaagcaggcttcaaggatcccagctgtcctcaagagtactggttccagcttcctgcttcatgaaccggtcatggcccctgcaaggtcaaggtcattactctctcttgatttaagaaacagacacattatgccaaaattttgccgccttattcctgaatacagctagagtggggaagaccttggcctctccccccgcaggcaagaatgttgcctccacagggggctggtagcctgctaaggcccaggccaccaccactaggtgctttacatacattatatgtcattctattattctgacacagtgggtgtgacctgggtgcaaccagtcacagctc

SEQ ID NO: 9690 - DNA, 360 bp, Homo sapiens
  source 1..360: mol_type = other DNA
ctctctcttgatttaagaaacagacacattatgccaaaattttgccgccttattcctgaatacagctagagtggggaagaccttggcctctccccccgcaggcaagaatgttgcctccacagggggctggtagcctgctaaggcccaggccaccaccactaggtgctttacatacattatatgtcattctattattctgacacagtgggtgtgacctgggtgcaaccagtcacagctcagtgtggtcgggacaagcgcccagccctccctgagacattgtgtgagtcgggctgggcctcaaacacggcccccactgccccaccccagccagggtggtgcttgtgtgggaaggacatccag

SEQ ID NO: 9691 - DNA, 415 bp, Homo sapiens
  source 1..415: mol_type = other DNA
ttgttataggattaataagaaaatactcataagcatgaaaaagagtgcatgttagctattattatcctctgagtttcagggggaggattattttaaataaaacatgctagcagggcgtggtggcaggccctgtaatcccggctactcagggggtgcagtgagccgagatcccaccaccgcacaaaagacattatttccttacaccactggaccttctgaaggagaaagtgtggttggaagaaaccagccaaggctcaagcaatcctcctgcttcggcctcccaaagcactggcccagactgggctccagaagctacctctgggccctgttgccacctcttagccccctgagggagaggtggggcccgagcaggctcctcccactgcgggagtgctggcctttcccctgcagggct

SEQ ID NO: 9692 - DNA, 411 bp, Homo sapiens
  source 1..411: mol_type = other DNA
ttgcatttctaaaatgggaatcccggaagactgagggctgcatccctttcccgcaggagcggggctcccgcctccagtgacgtcagcccgccccagccgacttggaggtctcgggtctgagccgacacccggcgcgccggcctccccgcgagccgcagagccggcctcgggcggcctttgaccttcccgccacgtcgtggcggcgtagagggggcggggcgcgccgaggcgctggcaggggcggggccggggcgcggccacagagcgcgcggggcgggggccgaggggagtcgcccagtcccgccgcttccccacccccggccggcccggcagccctgctccccgccttggcctcccggagaggccccgccccgtccccgcccgccgcgccctccccgcgcgccctccccg

SEQ ID NO: 9693 - DNA, 245 bp, Homo sapiens
  source 1..245: mol_type = other DNA
tgagccaggcccgggagggagctgcccaggtgactcggcccggcccggcccagtccggaggcctcggccagtctcccgcgccaggcctggctcgatgctagccggggtgggacgcaggagagcctcccagcgtagtaacccagattttttttccccagttcttaaaaggaataggaactatgaaaacctatcctaggcaaacgacagcctttcaaaacttgtgaaatcccctggtgagcaccagc

SEQ ID NO: 9694 - DNA, 201 bp, Homo sapiens
  source 1..201: mol_type = other DNA
ccacagggagaacatgacctttattctggccctgtttcagagacagtgtgggcataattggttttctgggaaatgttttacttcctatgaaagagatgtgagtcactggggaagtaaggccactgacacctttttaaggatctgaataccttgagactgtttgtcagctgattcaccaccaaagcatgatttgtaggctta

SEQ ID NO: 9695 - DNA, 482 bp, Homo sapiens
  source 1..482: mol_type = other DNA
gacaaatccttagaaaatgccaaaggaataaccctgattctgtggtcgtcttgtcggaatccttcgggtaagtgcggaagcagctctggggaggaacttccgagaccaaagctcgctgttcgcttcgctgcctgacagctgccctgccgccaccaggcagttctggcctctgtggcgccccaggcccgcgggattcggaggatctggaagggtttggtccaatcccctatccctctgcagcattgggccgggggaagtccttgtaggcgggccaagggtttgcccggcgagatgcccccagaccccgcaagcttccccgccgccggtcacccgctcccagctcctggggacgccatcttggatgtgggcacccctccacccagcaccgctgccattggtgagctgcgcaagccgtggacgggccgaccaattgggagccggaatcctgcaggccgctgaagccgaccggtaacgtcaggggc

SEQ ID NO: 9696 - DNA, 361 bp, Homo sapiens
  source 1..361: mol_type = other DNA
gctaatactaaatctcattgtctgggaaaattagattgaaaataaattcaagtttgtgattcacacgatggagcaatactgtgtccttcaaagaaatggtatttggtaatctgagttggacagctatcataaaccatttcctccgttgctcacgtgttgaacagttagtacttttaggtgaaagattcctatatataaatacatagtatgttctctcttgaggttcattcctcacgaagacgcgggtaggaactttgagccccggcccctgacgttaccggtcggcttcagcggcctgcaggattccggctcccaattggtcggcccgtccacggcttgcgcagctcaccaatggcagcgg

SEQ ID NO: 9697 - DNA, 291 bp, Homo sapiens
  source 1..291: mol_type = other DNA
caggagtcagagaccagccctggcaacacagtcagaccttgtctctatttcatttaaaaaaaaaaaaaaaattaaggctggcagaaatcttaaatttacgaacagtaaaccaacagtagattgatggatggataatttgccatgaacgaatttagtgcatttgcacaagaagtgcattacgggttggacaaatccttagaaaatgccaaaggaataaccctgattctgtggtcgtcttgtcggaatccttcgggtaagtgcggaagcagctctggggaggaacttccgaga

SEQ ID NO: 9698 - DNA, 415 bp, Homo sapiens
  source 1..415: mol_type = other DNA
attatgattataatcttaggatgtcaaaatttaatgatcttttaacagtaatattaacactgttgagtccacagcactttaatctgaagttatctttgcattcctttctattactttaataagtattactaaaagccatatgtctactagaatccttaataaaataagactcttgcaggagtcagagaccagccctggcaacacagtcagaccttgtctctatttcatttaaaaaaaaaaaaaaaattaaggctggcagaaatcttaaatttacgaacagtaaaccaacagtagattgatggatggataatttgccatgaacgaatttagtgcatttgcacaagaagtgcattacgggttggacaaatccttagaaaatgccaaaggaataaccctgattctgtggtcgtcttgt

SEQ ID NO: 9699 - DNA, 447 bp, Homo sapiens
  source 1..447: mol_type = other DNA
cctcctgagttgctggaattataggtgcgcaccagtaaagacaggcgtgctgggattacaggtgtgacataaccattgttaatagttcttctttcaagaattgtttgaaatatttaccacatgaggtgtgaatgattattcccattttatagggacaatcccaattatttggagagctgtcttgtttgggcttgcctgagaatatcacacgaacacctctggtgaatcacttcatacatcagtggaagaggcttcgtgttcacatccctgctggctagccatctggcggggatgctgaagaggagttcctcgccagtaggaactttgtggccagagcggccccacaaaggaagcgtagttctgtctgctgggctgagttaaccaaaacataaaggacagtcagatggctgtctgcctcctctgtgtctgcttacccatgggaggggg

SEQ ID NO: 9700 - DNA, 466 bp, Homo sapiens
  source 1..466: mol_type = other DNA
gtgagctgagatcgcaccactccaggctgcactccagcctgggtgacagggcgagaccctgtctgtaatcagtaataataataataaaattaacagctttattgagtataatttacatgccataaaattcacccactggaagtttaccactctgtcgcccaggctgggatgcagtggcgccatgtcggctcactgcaacctctgcctcccggggtcaggtgatcctcccacctcagcctcccaacacttccatgactttttaataaacttatacagttgtacaattgtcaccacaatccacttttagaacatttctttacttcgttaaatccgatggaaagtttaaagttgtttaaaagtgggctatagtttcacatgacttttttaaaaagaggagaggcgaggagacctctcgaatcgcgcccgccccgcccagggccggattggctcccaacccacgggcggc

SEQ ID NO: 9701 - DNA, 211 bp, Homo sapiens
  source 1..211: mol_type = other DNA
tcagcctcctgagtagctgggaccaccgccatgttggccaagctggtctcaaactagtggttaccattaggattacatttaacatgataatcttgtgttagtactctaacacaggattgaatttacagcagcttaacttcaataatacatatctttatacattgtgtgtctgtcttattggttcaaccaggttgttgctttccacttggac

SEQ ID NO: 9702 - DNA, 342 bp, Homo sapiens
  source 1..342: mol_type = other DNA
tcattgacaggtttaattaatcaattttaaattcccttcttttcacaggtgttgaaaattataaaaatcactttggggagattcctcagatttctttggccataacactgcggaacttgttcttagtctgtaaaatgaagataatgataagattaagtctagcacttactggtttctcttcctcagagccaaaggaggagatagttacttttgcttttgggcggcttttccgcgcaggcgcccctggacctcccaggttgagaggtggagcgggctcagctgcctttcccggggccgggacccggccgggggaggaccgaggcgcggcgctgtccgtgacgt

SEQ ID NO: 9703 - DNA, 319 bp, Homo sapiens
  source 1..319: mol_type = other DNA
tttaagagctgtaacactcaccgtgagactttgtttttttttaattaaataggcaagaatacaaaataacagtgggccatggtataaaatacatttttttatcgtagggtcactggtgtacagtatagtacgattacaacaatgtaaaatactgtttctgtgatgtttgtaggttgttcttacaataaaacaaaccaaaaaaaaactccagcaccggccttgaaggatggactctactcccgggctgtacattccaagatggcgacggcagcagccccacctcccgctgactcggtggccaatgaatgcgcacatagcg

SEQ ID NO: 9704 - DNA, 426 bp, Homo sapiens
  source 1..426: mol_type = other DNA
gggagattcctcagatttctttggccataacactgcggaacttgttcttagtctgtaaaatgaagataatgataagattaagtctagcacttactggtttctcttcctcagagccaaaggaggagatagttacttttgcttttgggcggcttttccgcgcaggcgcccctggacctcccaggttgagaggtggagcgggctcagctgcctttcccggggccgggacccggccgggggaggaccgaggcgcggcgctgtccgtgacgtcatcaggctgcgctgcccgcagtactggacccgagcgcgacggtgcggctggcggacccgggggaggaggcggcggctctggcagcggcggcgacagtgtcggcctgaccccccctccctctctcccctcagcgtgagtgccgacgcgcggcccggggg

SEQ ID NO: 9705 - DNA, 426 bp, Homo sapiens
  source 1..426: mol_type = other DNA
gggccgcggcaagggcaggagctctcagcgcgacctctccgccagctgctccggcccggccccagcaccagacgcctggaaaggggcgggggcctctcgagccgggcagacagccttgcagacccacagccgcggcccgtctcgcgcggctgcaggaccccaggaaccgcaggcgcccggcctttccctagtgcaaaacatttacgaagtgtgcagtgccctgcgggcatgggtctccgaagcgagcggccgtgtttgccccgcgggctgctggcaacggtgcacccggctcggccagctagtctgggtgtcagcgagtgtgcgagcgcgcggctgcagagcccccgccgaaacccagggatagaagagaaaggcaggcagtcagcttcccccagccctgttttgttgctcctttttttaactgga

SEQ ID NO: 9706 - DNA, 506 bp, Homo sapiens
  source 1..506: mol_type = other DNA
tttggtcacttaccaacaccggtgccccagacaaggggctgggggaggggcatttcccaaaattggggagaatggctccccggaatcgcccaggagccagagcggcagctccagggaccttgactccgacgcccccgggaagccagcccgcttggagcgcaccattcgcgtttagggggaggcaccgcgccccggatcagaaacctgctccccttcttcagacagggggaagataagtttgcttcagattctaaaagttctagaaggcctcagccgcccgtcgccgggcgacagcccgaggctctcgttttctcccacagccccgcactccgcctttgaggcgcggaacgaagtggcacgcccggatcccagctgatcagcggctgggctttggcgttggctcccccgggcgagaccattgtgactcctcgggaggggcgcacgccggggagggggcggagcggccattgtccggtcagcgcagcctccgggggaggggacggtgt

SEQ ID NO: 9707 - DNA, 653 bp, Homo sapiens
  source 1..653: mol_type = other DNA
aaattggggagaatggctccccggaatcgcccaggagccagagcggcagctccagggaccttgactccgacgcccccgggaagccagcccgcttggagcgcaccattcgcgtttagggggaggcaccgcgccccggatcagaaacctgctccccttcttcagacagggggaagataagtttgcttcagattctaaaagttctagaaggcctcagccgcccgtcgccgggcgacagcccgaggctctcgttttctcccacagccccgcactccgcctttgaggcgcggaacgaagtggcacgcccggatcccagctgatcagcggctgggctttggcgttggctcccccgggcgagaccattgtgactcctcgggaggggcgcacgccggggagggggcggagcggccattgtccggtcagcgcagcctccgggggaggggacggtgtgcagggcccggggcttcagagcggccgctgcgactccggagccggcggggggctccggtccttccctgcgccaccgcacaggacatctctctggctggggagcggcggtgagacccgccgagggcgtctgtgtccctcctcccccgcggtcctcggtcctccccgtctccgcaggccgagtggtgcggcccgcctccagctgaccg

SEQ ID NO: 9708 - DNA, 509 bp, Homo sapiens
  source 1..509: mol_type = other DNA
gcctgtaggaaaaacaaatgctcaccttggtctcagtgggtgtgtctgatcagctcctactcagaggctggccagggcaggggagatgagggccccagcagtcccaaactttccaaacccccaccccggggtcccgggtttcgcctcctcagcccaggcaacgtcgtctcagacaggatacgagactgctagggaacctgggctgcccctgggaggctggtagagccacgcttcccactacaccttcgtggactgcgaacgggcccgtcccagctcctcccccgcccccggaaaaagcggcggaggggcggggggcggtgcgcgcggatacggcgggggcgcgcgtccccgcgccgcaggtgcggccaggccccacctcccctgcaaggaccgagaccaagctgcgacacagacgcctcttcccccttggccgcttccgtggccgccgtcctcgccgccgccccggctgctgcggcgcgcgtccgctttcacgcactccgccgtggccg

SEQ ID NO: 9709 - DNA, 432 bp, Homo sapiens
  source 1..432: mol_type = other DNA
aacacaaaatatatattaatgtaaaaagtactgcaagttatggacatttctaagtaggcaaaccatgacttaaatctcatttaggctggggggtcacttcagcccaggtgactgcagtagcacacactgcatttaattctattattgcaagtttctagcgctaatttgttttaattactctgcgctgcgtaaactgagaatccttacaattttaaaagaacaacttacagttttcagtttccatcagattccaattttctaccaaattgcagccctgaggtatgaatggttaccaaactttagttaaacaaacaaaattagctcattaagtaacagagaaaccactctgcccagcctgcattgactcactgggacccaatcagcatcaacttgctctccgcgcagcgattggctggaagtcagcggtctccc

SEQ ID NO: 9710 - DNA, 554 bp, Homo sapiens
  source 1..554: mol_type = other DNA
cttgccagcagaatgtcagagaattctttggcacctaactcagtgactaagtgagatgataacatctcttgcatgaatcttttcttgcaaaagttccaggcataataagataatagctgataggattaatgattatgcctctacaatctattgctgagctcatttgatgtaactgctgagcacatctgatgccacttcccatcacagtctcacagaaagtctctgaaagactctccggattgaatccttagtaagacatctgaataaaactaatattaattatttaaatgactgatttttttttctttggttaacacacccaactaaaaacggagagaagtcagttttcccccagaatcacaggtttctgaacatttaggttctcaaggaaaacactaagtaacttcagataaaggtcatagaaaacattattttatatatttccgtattaccagaatgtattggggagcgcgggggctgcccgtgcccctccagtcgctccccgtagggagctgcgcactgcggagccctcgcccccgagcgagcctgtctcg

SEQ ID NO: 9711 - DNA, 457 bp, Homo sapiens
  source 1..457: mol_type = other DNA
caagagcattagggaagactcatccctccctgccctgcaatgctgaagtttccaggtagaggggaacctctagacccttgcgactgtcagagttctgtggtaaaaagttcttattagtcacccctggctctgaggatactttccaggagtggcctgccaagccgctcctttgagggaccctgacagctgggagacccgggaggaggtccggggtgcgggcctggcttgtcgctgaaagccggccaggcgcactgtcggcgctcagagctggtggccgcctcctgcgcttccgattcccagccgcgctcgctcggagagcagtgcccgctatctcctggcccgggaccggcagaggggtgcggcggggcgggcccaggggtctctggcggccggaagaaccgggaccctgccaggcccctcccgcgggcagggcggcccctcgccggctcctccccca

SEQ ID NO: 9712 - DNA, 427 bp, Homo sapiens
  source 1..427: mol_type = other DNA
tttatagtgtaagctctaagaaaacaggtttttgtttgtttttccaacaaatatttgagtcttaattatgtaagtgacacttagctagatgcttacagctttaagtgggaaaactcccagagtacagaaatgttctttctctccatcggataagagcaaatctactgagtcatattcttaagatgtgtattttatgttgcaccccaataaaagtttttgttgttggtttttttaaggttctgacgtatctagacacaaaacgagcctttccttgataagagaaaaagggtaagatgtagcctgttattcctctactgtggcgctgttcattggggcccagcaacagagatcccgaatacaggacgctagcccacgcgaccagacttcacaaacggaggagacgcgggtcacaccagtgcgcatgctc

SEQ ID NO: 9713 - DNA, 360 bp, Homo sapiens
  source 1..360: mol_type = other DNA
gcgggcggatcacctgaggtcagagaccagcctggcagcttcttggcccactgcactccagcctggcgacagagtgagactccgcagggttctcacccgggtaggtgaaagtgtgaatgaaaatggaattacaccgcaacccctcgggcaccgcagggcgtgcaggtctgggcgggcggcgcagcctcccctggcggctgaccctgggagcgcggggagcgccaagcctcttctagcgctcacctcgcgctcactcctgcgctcgccgggctgcttgtgcggggaaggggcggggcccgcctgggctcctccccggtcggagcccggagcaagggggcagagcgcgccgggcgctggtta

SEQ ID NO: 9714 - DNA, 352 bp, Homo sapiens
  source 1..352: mol_type = other DNA
aagctccaggtctggcctgtccctgaccaggagagatttagaccactccatcccggggccctgcacaggtctgaggcaaggctgtggagccaaggcggctccaggcaggagacccaggagaggctcctccactccaggtagaggccgagtccaagaacttaggcaggggccccaagacctcccattgttcatttcaggaaatgtgagggggctctgggccccttccctcagcgcctgctctccctggcctaggcctagcaggtgggcaccccgcacacatttgaggcggggccagatggattggatcccagggctgggtggggccaggctgtcccattccccaacactcccc

SEQ ID NO: 9715 - DNA, 317 bp, Homo sapiens
  source 1..317: mol_type = other DNA
cattctcaacctgattcatttaacagatgtatgctgagctgccatgtgaagtggcagtgtccactgggtatagatgcatccaaaatccagcggtgaattcagctctcactgaggggtcccagacatctgcgctgaccctcactccgggaggtggtgaggaggagagctgaacagcgcccagcaggggttggcctttattggcactagggacccctgccatggccagctcatgagtctactgaggacctaacttggattataattcctttaactaaatgcctggaaatttaacagacatggctgtgcaggcacagtcc

SEQ ID NO: 9716 - DNA, 484 bp, Homo sapiens
  source 1..484: mol_type = other DNA
gagtatctgaagctgtgatacatctatagagttttgagaagggcacactaaacagtaaatattactgtctaaaatacaatcttccctctactaaactctgtcgctactggacctgtaatcccagctactcgggaggctgatgcagtgaggcgagatagcgccactgcactccagcctgggtgacagagtgagactctgtctcaaaaaaaaaaaaaaaatagattctgtgtcttctacttgcaatccagtactaagctaagtcaggacaggtctatcataatttactttttgacttttgactcatggtcaacaaaatgaaacaataaatggttgatgctaggatatagcaccaaattagtggaaaaataaactttagttcaaaatactaaaactaagttcaataatcatacaattcacagttgcattcttttctcacagcctcttgagagctaaaaagcacacaatttgttatttggttcaaagc

SEQ ID NO: 9717 - DNA, 359 bp, Homo sapiens
  source 1..359: mol_type = other DNA
ttatacagtgtatgttttacattatacattcctaccagtaaagtgcaactgattcagtttctctgatagatgaatagtgatgcctcattgtggttttaacttatatttcccacgtggataataatgttgactttctaattccatcatggcatagtttctccttgtcacttgagagaccttgtgaaggaaaaaaaaaatctgtctccttcttcgagcatgctgtatttttttttaaaggcaagggcacggtccaggccgggtccggcgctaaacccagagcccctcatgcgcatgcgccccgtagtggcctccttccggtcgcgaccaattagagggaggaggcgggatcctggctgcca

SEQ ID NO: 9718 - DNA, 374 bp, Homo sapiens
  source 1..374: mol_type = other DNA
ccagtgggggcaccatttgctccccgtggggtggacaattgctcttgaccaatctagtaaattttaaaagtatgaataagagctattgtaaactgctttgactggcactgaattggaggaacataatttaataaaaataaacttaaaaaaatatatatacacactgtccagctgcccaggtggccacttttgcctctttgacccttccatgtttccaaaacagaaggggcctgccggtggcgctctgcgtggtctgaaagtgtgaaaattacatctacctagggaaaattcagagtaaccttcgcctgacgtcagagcggggcgggcggacgggcgcgaggccgggcctggaggggcggcagccgcggcttccc

SEQ ID NO: 9719 - DNA, 157 bp, Homo sapiens
  source 1..157: mol_type = other DNA
agagagctctccatgctccccagggcctggagccgcaccatcctaggatctgatgtcaggctcatctaagatacccagaacagccctagtgagtcaaagaaacctttattctctttatcatttctcaaaatgagaaaaacagttggcactctgaggg

SEQ ID NO: 9720 - DNA, 435 bp, Homo sapiens
  source 1..435: mol_type = other DNA
caacaggctggtttgagcataattattcttagtacataagctcattattgtgtgtgttatccaaaatctgctttttaggacattctattcataccaggattgttttaaataacatttagcatggtgcttggtgtataagaagcatttcaaaaatgttccacgaaaaaaaaaaaaaaaaaaaagattgttaatatccttttggggcctaaatctttttatttagaatgttgatatttcacggacttctgaaaatttattacgattttttgaaatattacattaaaaaattacttactttgataacgaaaagaaccccgttccttaccctagagcgctaccccggcccaggaaagtgggacgcgggactgcgtctcgcctattggctgcgcgggtcccgccctccccctgcccctccccgcccttgctgggatgacc

SEQ ID NO: 9721 - DNA, 243 bp, Homo sapiens
  source 1..243: mol_type = other DNA
gaagacccaaggcttccatgcaacggaaaatcagggcatctttgatttgaacaggtctgggcctcgattaaagaacaaaactgtgttcttgtaattttgtctgcaggagagccggggcctccctggcaaccttccaatattaacagggcacactgcatttattattggcatatactctaccccattttggtgtaggacaacacagaggagcagtggggatgctttagtcaaagaagcccccaa

SEQ ID NO: 9722 - DNA, 595 bp, Homo sapiens
  source 1..595: mol_type = other DNA
ctgtgagctcacagtctgctttgagtagggtctcccccttcactgattcttgtaataatcatgaaaagtcaagggccccaggactgggtgggcgcgatcgccccagcccccactcccagcctagggccggcgcggtcgggttttcctccagcaggcggcgggctgacggctgcagggcgcgctaggcacgtgaggtggcagcgccgtcgccagctgcagaggtgcagccctggccgcccggctcgccttccgcaggggctgcccgtgccgctggaccgcggagaccgccctcccggttccggggctcgcggcctgcccaggaccgtgaatccctctggtttccgcggcggtgttggtcgtctcggaagcgggtgcgctcggcagcgggcagggcagcgggcgcagaggctgccttcggctcctgcagctccgcggttcgccactgggggctgccgcgccggagagctcggcggggacggtgcgcacggccgccgggttcctgggcgcctctggcgcgctgtcgcagcccgcccgactccctcccagattggagcgaaccgggtacgcgcgtatgcgcgcgcgcgtggggggcagt

SEQ ID NO: 9723 - DNA, 280 bp, Homo sapiens
  source 1..280: mol_type = other DNA
gccatggcgatgcctggaagttactgcccctttccatggcagtgctagaaaagctgctaccctgggcacactgcctagggttagctctgctctgtaaggagcatacctctgctgctgctctgccactttaggaaagtaaactaagccccaattttggggctagccacagtgaccaaggtgacatttgaggcctttggctttggctggcacaggggcttcgatggcactgccctagaaggctgctgggggcctgctggacactgaatggtcaagaggatgg

SEQ ID NO: 9724 - DNA, 416 bp, Homo sapiens
  source 1..416: mol_type = other DNA
acgtgtggctcacctgggctcagtgttggccagttggagccaaaatgcatcccattcaagacatgtttattgaacgttccacaaggagttttcattcttgtggtgccacccaaccggcagtgtctctgccaactttggtgagtcattaaccgtctcagtggctccactgtcgtggggagcgggtggaactagatgctctctaagctccttggaccggttgcagcatcagctgggaggagctgcagaatctgtgcacattaagaaactcaataatagcctctggctggggacagccactcaccagcagggggtttcaaggtgcagcacctacacccaggacactctccctcacccctctttagacagctgggaggcagggctctgccaggaaatgccaggccactcctgcctggatt

SEQ ID NO: 9725 - DNA, 290 bp, Homo sapiens
  source 1..290: mol_type = other DNA
aataagtaacttcctctcccctctgcttccttccctggtggaggtgagagggtggaaacaaagctctgtctgagtcacacaggagggacactctcccctacccctctttagggcggctgggaggcaggactttctgccaggaagcgccaggtcatggattatgaactcacttcccagacaatcccaattataaggaggctctgaaggcggcagaccagaggggctcctcctgagaggaactctttggggccatgaaacagcaacttgctcatctgagaggcagatcagca

SEQ ID NO: 9726 - DNA, 510 bp, Homo sapiens
  source 1..510: mol_type = other DNA
cagaggaagttacttattttctatgggttcaccatgcctcctcaactgcacagaccctggtgacaacggttaccatctattgaccacccattctgtggtgggcatttgacatttattagctcaataatgacaattattatctcacacaaggtagatattcttaactgcatttgacagacaagggaattgaacgtgtggctcacctgggctcagtgttggccagttggagccaaaatgcatcccattcaagacatgtttattgaacgttccacaaggagttttcattcttgtggtgccacccaaccggcagtgtctctgccaactttggtgagtcattaaccgtctcagtggctccactgtcgtggggagcgggtggaactagatgctctctaagctccttggaccggttgcagcatcagctgggaggagctgcagaatctgtgcacattaagaaactcaataatagcctctggctggggacagccactcaccagcagggggtttcaaggt

SEQ ID NO: 9727 - DNA, 376 bp, Homo sapiens
  source 1..376: mol_type = other DNA
gcacaggtgggcatgctgctcagctctgtcccagaacctccaggaccagtgtccctgacccttgacagaaaagggccaggcaaggcgggtggatcacctgaggtcaggatcccagctactggttgcagtgagccgagattgcaccactgcactccagcctggaccagaatactgaaaataatcagattgttttctctcccattgtcccacaacatgccaccttggcagctttttaatcaaagaccaggcagttgtttccttgaaaagtcaggccacaagaaacctggatgcttgtgcttacatcctgaaccccatggcggccaagtttgaatttgggcaggagatcagcctggccccatgagtgtgccagtctgat

SEQ ID NO: 9728 - DNA, 308 bp, Homo sapiens
  source 1..308: mol_type = other DNA
acaaaatagaccatgtattttacttaccttatttgttgttccacaaatcatcacagatagagtagatactcaataaatatttgttaagaagaataaaatatttggcctgaagtacaaaagcctgcattttaatcccggcaatctctgagctaagtaaatggcaaatggcctgggtcttttaggcaccctcctaaatctcaggatgcctgccctggggccccttccacactctcccccagtggagctagggctgccaggttcctgtctataggggaccgctgtcactcaattaaaaaaagatagaggga

SEQ ID NO: 9729 - DNA, 347 bp, Homo sapiens
  source 1..347: mol_type = other DNA
atagagtagatactcaataaatatttgttaagaagaataaaatatttggcctgaagtacaaaagcctgcattttaatcccggcaatctctgagctaagtaaatggcaaatggcctgggtcttttaggcaccctcctaaatctcaggatgcctgccctggggccccttccacactctcccccagtggagctagggctgccaggttcctgtctataggggaccgctgtcactcaattaaaaaaagatagagggaggaaagcacgaagcctggcctgctgggtcccccagccagatttagctgctgacagctgcttgggactctgccgccagggcctggcccagacctgc

SEQ ID NO: 9730 - DNA, 655 bp, Homo sapiens
  source 1..655: mol_type = other DNA
tgcgagggtcggagccccgaggtgcctgctccccgaggcgccatccccgcgcggggcggcccctgcaggcctcggccgggagtgccccgaggcgctcgcaggccccgggccggggccgctggccgcccggctcggctaggctcagctcgactccccgggctcgacgggcgcctgggcctctcctgagtggtcagcgagacccgccaatcggggcgctggggccggctctgggccgtcgctgcccgcgctgattggctccagtaccggactccgaaacccaatcagaggctccagccgccgctgccgccgccactgccgctgcctccaaccgcctccgcgcaggcgcctctgaggccaaccccttcggaggagcaacgcgcaggcgtgcgctgctgccttgagcttagtactacgcaggctgccagctgcccacccctttccaagtggccactaggacacacccctgcggctaatgcgcaagcgccacttcgactcgtggggcagtttccgcgcggcggcgggaaaccacggaatttactgccggaagttcggcggcctggctagcaagctagaggggctcgtttccgccccgctaccgggcgggggcggccatctgctccccacctaccagggtcggatccggagcccttccccg

SEQ ID NO: 9731 - DNA, 707 bp, Homo sapiens
  source 1..707: mol_type = other DNA
ggcgcgcatgtgtcccctagtgtagggccattcgtggccccaggcctggggcctgagaacctgggcctgagtcggggaacagggacgcattcccaactggccctggcaccctgcgagggtcggagccccgaggtgcctgctccccgaggcgccatccccgcgcggggcggcccctgcaggcctcggccgggagtgccccgaggcgctcgcaggccccgggccggggccgctggccgcccggctcggctaggctcagctcgactccccgggctcgacgggcgcctgggcctctcctgagtggtcagcgagacccgccaatcggggcgctggggccggctctgggccgtcgctgcccgcgctgattggctccagtaccggactccgaaacccaatcagaggctccagccgccgctgccgccgccactgccgctgcctccaaccgcctccgcgcaggcgcctctgaggccaaccccttcggaggagcaacgcgcaggcgtgcgctgctgccttgagcttagtactacgcaggctgccagctgcccacccctttccaagtggccactaggacacacccctgcggctaatgcgcaagcgccacttcgactcgtggggcagtttccgcgcggcggcgggaaaccacggaatttactgccggaagttcggcggcctggctagcaagctagaggggctcgtttccgccccgctac

SEQ ID NO: 9732 - DNA, 553 bp, Homo sapiens
  source 1..553: mol_type = other DNA
tggcgtgctgagccccagggggaaaggaaggcgtcaccccccacttttttggtgggagaaggaaagagtctattgaagcctcccattctctgtctcctaccctagggcgggtcagcgaggacgcagtcatgggagggtgcggggaggctcgctcaaagccccaacgtacccaagtcacccttcacctggaaaggagtcggttgtttggaggtccccgccccgcggggaagggctccggatccgaccctggtaggtggggagcagatggccgcccccgcccggtagcggggcggaaacgagcccctctagcttgctagccaggccgccgaacttccggcagtaaattccgtggtttcccgccgccgcgcggaaactgccccacgagtcgaagtggcgcttgcgcattagccgcaggggtgtgtcctagtggccacttggaaaggggtgggcagctggcagcctgcgtagtactaagctcaaggcagcagcgcacgcctgcgcgttgctcctccgaaggggttggcctcagaggcgcctgcgcggaggcggttgg

SEQ ID NO: 9733 - DNA, 733 bp, Homo sapiens
  source 1..733: mol_type = other DNA
ggcctcagaggcgcctgcgcggaggcggttggaggcagcggcagtggcggcggcagcggcggctggagcctctgattgggtttcggagtccggtactggagccaatcagcgcgggcagcgacggcccagagccggccccagcgccccgattggcgggtctcgctgaccactcaggagaggcccaggcgcccgtcgagcccggggagtcgagctgagcctagccgagccgggcggccagcggccccggcccggggcctgcgagcgcctcggggcactcccggccgaggcctgcaggggccgccccgcgcggggatggcgcctcggggagcaggcacctcggggctccgaccctcgcagggtgccagggccagttgggaatgcgtccctgttccccgactcaggcccaggttctcaggccccaggcctggggccacgaatggccctacactaggggacacatgcgcgccctgggcctcggcggcccttgggacaggaagcctccccggggcccgcgccccccgctccccgctcccagcgagccgggtctgagggaggcctggggagggtgcgcgccgcggccgcggggtcccgtgtgcggctggcaacggggctggcccgcccacgcctcggagccctatgggcccgcccccgctgtctccctggtggggagagggggccgttagttcgcccactccccctgcgcccgctccgcccgggtctccggcccggcgcc

SEQ ID NO: 9734 - DNA, 422 bp, Homo sapiens
  source 1..422: mol_type = other DNA
tcacagtagaaaactttctgtcgcatccacctcaagctttagtgggtaacttggactctgtccaggacagtgtgactgacctcaaggactaggcttttccgttctagagtaaatgtgaattactctcttcatcttaatgatccattccaggtatccatccactggagacaaagtctatgattgaaatctcctcagtgcttcagcaaagaagttgttgaatacttaggaaaggcagtttcaaggtttaataaccctctaaaagctagaaaaagagattcggcaatgtatatttttagtgcgaattagctttttcttggctagagaggaattcttattattaccacagattggaagaatgtcaggaatttattggatagaacttccttgcctggaagccatctctgaatacaaagctccattca

SEQ ID NO: 9735 - DNA, 295 bp, Homo sapiens
  source 1..295: mol_type = other DNA
aaatatttgtgaagaattgtcttccaatttaaaaatgctcaaagaataaggaatatcttgtcttgtaaattaaaaatattaaaaaataacattttaaaagacaggacatgtaattatcaaagtaagaatttgtttccggatcaaggtgaaacttcctgtttgaggttgtactgcatacaacctcctaaaagcttgggtggtcgtggggcactccccattgagtgaggtgcagggcactctaccttcctcctttctgtattaggaagatcctgaagatcatcttagggcttggacc

SEQ ID NO: 9736 - DNA, 376 bp, Homo sapiens
  source 1..376: mol_type = other DNA
tgtgcacatgggagagaaaattttctgtcttatggacagcccatttcccttttcccttctaactaggataatggtaatagttagtaaagcactttacctgtaggaacccatatggtgctcctgataaccctttgcactaggatgtgtggttacacacccagaaagtcaggaagtctggctccagagctgtgtacttaactgctgccacactacacctaggctctgcaaggaaactgagcagtgcagggccttaccagccccaaccatctgggggccaccctggctggcaccagcaggagggtgggctggcttctcagaggtctgggagactcagcctccttctgccagggctgcagtggccgactcctccgggaaa

SEQ ID NO: 9737 - DNA, 373 bp, Homo sapiens
  source 1..373: mol_type = other DNA
acatgtgcacatgggagagaaaattttctgtcttatggacagcccatttcccttttcccttctaactaggataatggtaatagttagtaaagcactttacctgtaggaacccatatggtgctcctgataaccctttgcactaggatgtgtggttacacacccagaaagtcaggaagtctggctccagagctgtgtacttaactgctgccacactacacctaggctctgcaaggaaactgagcagtgcagggccttaccagccccaaccatctgggggccaccctggctggcaccagcaggagggtgggctggcttctcagaggtctgggagactcagcctccttctgccagggctgcagtggccgactcctcc

SEQ ID NO: 9738 - DNA, 362 bp, Homo sapiens
  source 1..362: mol_type = other DNA
gcacttgcctgcgtgctgacgtaggcacaaagtgagactgtgagtgtgagtgcatgtgcatgcacacctgtgtgtgagagtacaatttgcatttttcccgcttgacaaaagtaagatttcaagtgaggttatttgcaacaagtgactgttctgagcagtttataagaacttccctgtgaatgtatatatgtaagaaactagggtctgagatgctccatctcagcctaagagcccgcacccctgggtctctgaggatcctagggaggggagccctctgactgtgagtcctcccggcttggggccccagactgggtggagcagccacggttggctgggggcagtgggtcccacactgcctcact

SEQ ID NO: 9739 - DNA, 326 bp, Homo sapiens
  source 1..326: mol_type = other DNA
taagggcattaattgcattcttgaggatgacgccctcatgacttaagaatggaaattaagtttctagagatttaatatatacattgggtagtaatccagtaccacttcactgatgtattcatccaacaagcactgatccagggaacatcttgtaattcctgggattaaaccatggctagaccagaaggattcaggggtctggtcgtgcctccaagggccctgaccacctagctgcacacagcagggctgaggtgcccaggcccagagacagaccctgtagctggtgggcctggctgccccctggtctgcagagcccgccctcccag

SEQ ID NO: 9740 - DNA, 312 bp, Homo sapiens
  source 1..312: mol_type = other DNA
ttttagatttcttctcagacctggaaagcatattttttaagataaaatttttaatcttgcttgtacatctctgatttatttcacatttgggaatatttctgaagtgaatcctctccattattgattttacaaaacctgctggattttttctagggtgtggccctcctggtgatgaagaggaggtgcaccccagtggagagggggcctctggagagcaaagggccctctgttcccccttactttgatttacattcaagtatcattctcccttagattttgtaaggttgaaaggtaattgtcattattaccaca

SEQ ID NO: 9741 - DNA, 335 bp, Homo sapiens
  source 1..335: mol_type = other DNA
ccttgggcccttgggcgccaacctgcatactcctactgtaaggagaaggggcagtggacttggaatcgagtccacttgacaagttccagtggtgcaactgcaattacacacagtttgtaaattgcatcgtattttaaaactgaatcttcaaagtaactaaagaaaaatatgctagagtctttcatctgtttatgttttaattaaacacagagatgaggccaggtcctggttcctgggcgccagggaccctccctaccatggaggcctgggcatgacgtccctggccatcctgtgacagcctgcctttccctggaaagggcggcaaccctcagggg

SEQ ID NO: 9742 - DNA, 308 bp, Homo sapiens
  source 1..308: mol_type = other DNA
tacacacagtttgtaaattgcatcgtattttaaaactgaatcttcaaagtaactaaagaaaaatatgctagagtctttcatctgtttatgttttaattaaacacagagatgaggccaggtcctggttcctgggcgccagggaccctccctaccatggaggcctgggcatgacgtccctggccatcctgtgacagcctgcctttccctggaaagggcggcaaccctcaggggcttctacagaggcctgggaagctgtgtgccagacagcgtggaagagtgtcccctcccatgagcgcacaggaaaagga

SEQ ID NO: 9743 - DNA, 269 bp, Homo sapiens
  source 1..269: mol_type = other DNA
ctttacgggaaattccctttccgcatgaaggggcctccgcccacccccagcccccacgcagtggggagcaggagggaggccagacagggcccgggcctgacactggctccgtctctgggcccccggccactccccgcgccgagcgcagcccgccgggaacctcagactccaggccggggtttgagcgccccataggattagtccgaggccagggtgaatccctggggtccgggctgccacccgccccgcccgcgcgccgcccgctcgca

SEQ ID NO: 9744 - DNA, 371 bp, Homo sapiens
  source 1..371: mol_type = other DNA
aatttgccagcccagggaggcccagggttggaccagagtctgggtccatcctgccttctccaggagccacgtcctgaaacctgcactcacgaatatttgcttatttggcaggctgctaaaaaagtcataagaacagtttctgcacaagtgaaaactcaggctccatttcaaggtgggctgtagtacggcctcgacctgggtgtctggaggccctgggaaggcccaaggccaaggaggctggggttagggttaggcccaccctggacctggtggtctgaggtcagggcggccatgagaggcctcctgtgggaggaccaaggagcgctgtgggcgcctggagaggcaacttcctctccagctgaggtgcaggg

SEQ ID NO: 9745 - DNA, 476 bp, Homo sapiens
  source 1..476: mol_type = other DNA
ctttacgggaaattccctttccgcatgaaggggcctccgcccacccccagcccccacgcagtggggagcaggagggaggccagacagggcccgggcctgacactggctccgtctctgggcccccggccactccccgcgccgagcgcagcccgccgggaacctcagactccaggccggggtttgagcgccccataggattagtccgaggccagggtgaatccctggggtccgggctgccacccgccccgcccgcgcgccgcccgctcgcagccactcgcagcccaggctcagtcgcagcccctcggagtccggagcccgccgtccctgcggaccggacagtgcggccggcggccggcggccgggacggagcccccagcccgcgaggagggcgcggcgcaggcggcggcggcgcggcggggaggagcccgggccggaaccagggctgggccgggggcggggacgccggggtccgggag

SEQ ID NO: 9746 - DNA, 598 bp, Homo sapiens
  source 1..598: mol_type = other DNA
ccccagggggctgccccacctgagcatcatcccacgggcccgccctggagagccgcagattctcggggaccaggttccggggtcgcgctgagggcccctgaaccctcaccatccagacgcgccgcccggctggccccaccgggagaggctccctggattcagtctggatcccaaagaagggctgaattcggagcaggagggtcgaggatgctctgggctgctgcggcacagggcaggctggttggtcactaaccggatttcccggacagacaactctggcgctgtgggcgggtggcctgggagcccagatccctgtccctggcttaggaccccgggaggaggaaacttgatcgcgcccatctttggggcaaagagaattttccagaaacttttgcagagtttggacaggcacgtgcagcccgcggatctccgggcctcagagagcagggagtcggggagactgaggccccgctccgagagcgcggaggaagcgcgcccagccggcttcctgtgggggctcgggcctcgggcgccccgcggacagacgtgtccggctcctggctgggccaagcccggcgcgggggaggggacccgcaga

SEQ ID NO: 9747 - DNA, 633 bp, Homo sapiens
  source 1..633: mol_type = other DNA
ccagagcggcgccacgccccgggggctgggctgatgggggggcgggtggaagtaccatctctccctcccttcccctcttgaagaagccgcccctggccccgtcccctcgagtccctcgtgggttattctatgaccctggggaacaccaaccccggagcgctccctccgtgcgccccgagtccgtgccgcccacccctgggctgtcccgaccagctctggcccagcgcgtccgctcgcctcctggaagggagcgggcagatgccagctcggccccctccccgcgcggggttccggcttcacgcacggctgccccgagctgctccgggctgcgcgagcaggttcgcgccgcagccgcctggcgcgccccagccccgcgccccgggtgaggaagggagggagcccggggcggggcttgtctgcgcgaaccccgctgggcccaggcccccgccctccgctctccgccaggcggagcttctgcactcaacttgagcgcagtgcaggttaattaccccccatcccgagtgaggggctgcttcatccctcagggaaagcaggcccccagtgacacctctggggtgtggcctcaggcccctgcacccgccctggccgagattccattggcccagacctggc

SEQ ID NO: 9748 - DNA, 717 bp, Homo sapiens
  source 1..717: mol_type = other DNA
tggcccgagcggcgctgcccgccgagccgggagccccctcggcccctcccttcaggcgcgggccgggggcggcttctccgcgaccgggcgggaggggccgggcgggcatgggccttcccggcccggagctgggagtcgaaggggcgagtttgagggacgcgcgggccccgcgcccactccccctccaccggacacggctggggccggcgatgcctgagaggtctggccaggccagcggggggagtgggagggccagagcggcgccacgccccgggggctgggctgatgggggggcgggtggaagtaccatctctccctcccttcccctcttgaagaagccgcccctggccccgtcccctcgagtccctcgtgggttattctatgaccctggggaacaccaaccccggagcgctccctccgtgcgccccgagtccgtgccgcccacccctgggctgtcccgaccagctctggcccagcgcgtccgctcgcctcctggaagggagcgggcagatgccagctcggccccctccccgcgcggggttccggcttcacgcacggctgccccgagctgctccgggctgcgcgagcaggttcgcgccgcagccgcctggcgcgccccagccccgcgccccgggtgaggaagggagggagcccggggcggggcttgtctgcgcgaaccccgctgggcccaggcccccgccctccgctctccgccag

SEQ ID NO: 9749 - DNA, 686 bp, Homo sapiens
  source 1..686: mol_type = other DNA
cctactcctgaagagaagctggaatttgccacaggtggagtttctatggcaccgaaggacagcaggctgcaggagaggttccaagtcaagagcctctttccgagcgggactacaatcccgggcttcccagtgggcgccgaggcagagcggctgggaggcggggcgggtgctgccctctgccgggcgcggagtgacagccggagcccgggcgccgggcgcggggctcggtgacagcggaggcggcggcccgggcgggacgcagggagcggccgcggcgccgacggcggcgggaagggcggacggggcgggcctccctggtggcacggggccggagcaggccgggagcaggtggcgggcacagcttgcgggccaggcacccgaacttgcgacaagttgccggagccgcggggcgcgggcggcggacagatgcgagaggcacgaggagggcccgggacccccgacccaggctccctggcccctatcccgtgggtcccggagacaggtgggagggaagcaggaccgtgcgcgccgccacccacccgcagtccgtccgcccccgggcgcccagcgcgtggcccgagcggcgctgcccgccgagccgggagccccctcggcccctcccttcaggcgcgggccgggggcggcttctccgcgaccgggcgggaggggccgggcgggcatgggcc

SEQ ID NO: 9750 - DNA, 297 bp, Homo sapiens
  source 1..297: mol_type = other DNA
aggaacagcagcagggcgcaggcctgtccctcttcatatgcaagaggcacaaccagaagctggtgcctgaagctgctcaaatagctgtgacttcagcatcctagctactagcctatctcctcccctgagggtttgagggtgctaggagttaggagtggagtcaaagcttcaaggaactatttgttccaaatgtcgacatgcgaaaccctggctatagatcctttgggaacaagacgtaatcttcaccacgtacaccctgggttgaggtcatggctgcccagggcagggaggcagcga

SEQ ID NO: 9751 - DNA, 350 bp, Homo sapiens
  source 1..350: mol_type = other DNA
cagagcttaaagttcatacttttcccctggaaagggaaagcaagggatctggaacttccgaaggtgacatttcttccacccataatgggggcaggctgccttctgctcaccctggccttgccccttatgatcggggcagggataaaagtgcaagatccaggtcctgcaccctactcctgaagagaagctggaatttgccacaggtggagtttctatggcaccgaaggacagcaggctgcaggagaggttccaagtcaagagcctctttccgagcgggactacaatcccgggcttcccagtgggcgccgaggcagagcggctgggaggcggggcgggtgctgccctctgcc

SEQ ID NO: 9752 - DNA, 250 bp, Homo sapiens
  source 1..250: mol_type = other DNA
atgagccctcaaggcagagaccctggctccctcagctctgcacttgtgctcccagcccagggctcagagctgagcagggcccagctcatgtgtggacaaatgaatgagtgctgcctttctttgttgatcctcccagaacggccagcccctgtggatcctcggggatgttctctaataataaatagttcttctttatgctcagagcttaaagttcatacttttcccctggaaagggaaagcaagggatctg

SEQ ID NO: 9753 - DNA, 425 bp, Homo sapiens
  source 1..425: mol_type = other DNA
gccccgccgcgccccgactcacatcgccccgcggcccgggcggcgccgggccccgctcccgggtcccgctgcagcagccgccgcccgcccggagctaaggcctccccgccccgccccgccccgcggccgcggggtcggaggtcaccggcagcaccaacgagacgctgcgggctggcggacccgagcgggggcgaccggcacgcagcctgccacgccagagggcgctcctggccaggggctgagcaagcccggaggggacagggcggagcctgcggcggaggcgggcccgccaggctcccggcgtctgctggatgcctgccgggcgcagtccgagccagagagcccttgcacctgcatggcagaggccaccctccctgagccgcccctctccaccagccggggaggggcgggcgggggccgctggg

SEQ ID NO: 9754 - DNA, 336 bp, Homo sapiens
  source 1..336: mol_type = other DNA
gggctgagcaagcccggcggagcctgcggcggaggcgggcccgccaggctcccggcgtctgctggatgcctgccgggcgcagtccgagccagagagcccttgcacctgcatggcagaggccaccctccctgagccgcccctctccaccagccggggaggggcgggcgggggccgctgggtgacggcagagtcggtccagaactgcccggacagcgacgcacagcgagggtgagaccccagcggagtcctggtccggaaacaccgcgtcccagccccggaggcgggcccgccaagagagggcagttggcgggactgggcactccccttccttctccc

SEQ ID NO: 9755 - DNA, 295 bp, Homo sapiens
  source 1..295: mol_type = other DNA
agggcttcctagtaaggggatcctttaaccagaggcccttgggagaccccagaatttgaacttcagaaattctggaccaaaagacctgacctcaagtcctggctgatcctcagttgggccatctaatatctataaagcacttaacacttcctagcacattgtaacggcctatttggggtaggctttgccacaaatgtcagtgcagaactctggctcacctggggaggaccctgaggtttgactttaaactcattcacatgagtattcaagactctaggggctttggccccaaggc

SEQ ID NO: 9756 - DNA, 573 bp, Homo sapiens
  source 1..573: mol_type = other DNA
atgttcctggactcatcgaatttctctagagcagggagtcttgggctcatctcagtagagcctggagccctgggttgggagtccagacccccaggtcgcactggggattgtcccacttgctagctgggatcctggctaaagggaatgaatgaatgaaacgttcccctcttcctggcgctgcaccgaggcggagggacagcgctggcatctgttgccaggactgcgccgggcctctgggcgggggacgttatgccctgcctgggggaagcccctgctgccccagctgcttcgagaaccgctcgcagctgtgggggttctcccgggctgggaccctcgccccggtcccacgccgcaagcctcggggcccgcagctctcaccgcgcatccctggccggagcgttccaagggccgcccgaacccaccccgcgccgcggtcggggttgcggcgccagactccctcccaggcgcgggaggcggacgccctctggtggaggcgggggaccctggcgaggactctcggcggcggcggcggcgcgcacggcccaggggctgggcggggcgggaggctgggcc

SEQ ID NO: 9757 - DNA, 488 bp, Homo sapiens
  source 1..488: mol_type = other DNA
gagcgcggcccggttctacggtcccctgctcccggtcccacctcgccggtgtcccagccgaatgggttttgccaagaaagtctccgccaaaagtcagtactgaagggggcgcactccaaagggaggcctgcgccactagcacatggtgcagtgcgtcttagaggaggcttccgggggtcttccaggactggggaagtcctgctggggactggatccaggcagccccctctgagtttgcaggctggaaccgccggcagcagccagtctcccctgttccgggccgggtcggaaacgctggtctcagagccgcggagctggacctacaccgcagctagtgggggtgaggcccagcctcccgccccgcccagcccctgggccgtgcgcgccgccgccgccgccgagagtcctcgccagggtcccccgcctccaccagagggcgtccgcctcccgcgcctgggagggagtctggcgccgcaaccccgaccgcg

SEQ ID NO: 9758 - DNA, 190 bp, Homo sapiens
  source 1..190: mol_type = other DNA
gcagtgagccgagattgcgcctctgcactccagcctgagagtgagactctggatcggtgaaaccccgtgtcccagctactcgggaggctgcgttgctctcctggccagggatctcagtgaggcacagctcgccggtgaatgacgcacctccggtctggcacttccggctgctaccggccggcagtggggg

SEQ ID NO: 9759 - DNA, 445 bp, Homo sapiens
  source 1..445: mol_type = other DNA
gtaggtccagctccgcggctctgagaccagcgtttccgacccggcccggaacaggggagactggctgctgccggcggttccagcctgcaaactcagagggggctgcctggatccagtccccagcaggacttccccagtcctggaagacccccggaagcctcctctaagacgcactgcaccatgtgctagtggcgcaggcctccctttggagtgcgcccccttcagtactgacttttggcggagactttcttggcaaaacccattcggctgggacaccggcgaggtgggaccgggagcaggggaccgtagaaccgggccgcgctcctcccctcctagagttcgtggaggcgcagcagagggccgtccctcttccggatgtcggacccccactgccggccggtagcagccggaagtgccagaccggaggtgcgtcattcaccggcga

SEQ ID NO: 9760 - DNA, 370 bp, Homo sapiens
  source 1..370: mol_type = other DNA
ttatatttaaatgtacttaacctaagcctttaggatctctcttgggtcatctgtggcaaaagccagtagtaacttttgcaaacgctgcctccggaaaccccacggttagagtatgggaaactcatgtaaaatacctttaggctcgggagcgtctctggccctttaaggaggagggacagacataagagtctgtacctttaagagcccttacgccaggctcaaagcggccgcgcgtttgtggctgaccctaaactttgcgcctgcggcgcgaaccctcggaacgggtgccggtgccggggtcgcggcccagcgctgcgccgttggcgcaatgcagggcctgaggggcggggctccagcgggcgggccaata

SEQ ID NO: 9761 - DNA, 244 bp, Homo sapiens
  source 1..244: mol_type = other DNA
tgctaggagcacttagtggcgctcacccagccgcgtggtgcgttcccgcggcgccgcgggcttgtccccagtccggcatttttctcgaaaaagttgccgtgcgcggtggactcccagcgcccaagaggccgcccggcgatcacagcgccccctagcatcccgggttccggagctggactcccgtgtcagtggaggcgtcaccgaggggtgccgagacacgccccattccttggggaaggcgtgg

SEQ ID NO: 9762 - DNA, 299 bp, Homo sapiens
  source 1..299: mol_type = other DNA
atgggccctgaggtcccactgcaggcagtactatggctggccaatatggtgaaaccccatttggcgcctgtagtcccagctactcgggactacaggagaatcgcttgaaccggagtgttgcagtgagccaagatcgctccactgcactccagtctggccccagaggacggcggaccatggtcaaggtcctcctgtacttacacaaccttctgtctcagaagggactccggagccgggtccacgccttccccaaggaatggggcgtgtctcggcacccctcggtgacgcctccactgaca

SEQ ID NO: 9763 - DNA, 325 bp, Homo sapiens
  source 1..325: mol_type = other DNA
tggccaatatggtgaaaccccatttggcgcctgtagtcccagctactcgggactacaggagaatcgcttgaaccggagtgttgcagtgagccaagatcgctccactgcactccagtctggccccagaggacggcggaccatggtcaaggtcctcctgtacttacacaaccttctgtctcagaagggactccggagccgggtccacgccttccccaaggaatggggcgtgtctcggcacccctcggtgacgcctccactgacacgggagtccagctccggaacccgggatgctagggggcgctgtgatcgccgggcggcctcttgg

SEQ ID NO: 9764 - DNA, 392 bp, Homo sapiens
  source 1..392: mol_type = other DNA
gatctcacagagtctgtgcaagaaactgattcaatgagaatctagtttctccgtccacagtttctccaaacagaaactaaggccgtcggtgaggccatgattaaagtgcacagaaatctagttaatgcagattctgatttcccaggcgatgaccacgcacggctaagaacaaaaattgtttcctggggaggcccacctcctagaaagttctctgcacccggtggtccagagggcctggagtgcccggaagccggccggcttgcgctcagcggcccaatggggccgcgggagggaggggagagcgctcagccaaccctttccgtccggggcgccgcagccccgcccctcggagcgttgcgacgtccgagcattccacggttgctacatcgtcg

SEQ ID NO: 9765 - DNA, 488 bp, Homo sapiens
  source 1..488: mol_type = other DNA
cgacccgcaagtatttgcgaggcaagtctagggggcgggagacttgtcccttgccgcctcactcccagggcgtggggtgcccgcggctaggtgcctggcaggacgcagattctgggcttcctcttctgtaaagctgggggaaagatgacagaaagagtctgtcacagtgcctgacgtgtagtaagagtcaaatcggccgggcgcacctcaggtcagggcctgtagtcctagctactcgagatcgcgccactgcactccagccaagaaaaagaaaaagaagtcgctcctcatgatgttgtttacttcccgggaggcagcggtccgggaacccgtgctgccccggccccgccgcccacacctgagcctccgtggcgccccgcccccgcacctatgccgcgtggggcgggggctgcgggcgggggtgcgcggcgccggatgagcctcctggcctcgccgagggtgctgagccctgcccagctctggatcgg

SEQ ID NO: 9766 - DNA, 480 bp, Homo sapiens
  source 1..480: mol_type = other DNA
tagccgcgggcaccccacgccctgggagtgaggcggcaagggacaagtctcccgccccctagacttgcctcgcaaatacttgcgggtcgataggtggtccaggctctacttccaagtgggccattgacaggcggggcgctcagaagaatcatctggggagctccttaatgagcctctagagagtgaagtcactgggattgggctgggcccagccaggtgttactaataataagctctttataagaaccgattttcatattaaaataggtttcttttaactcagtgaaaccgggcgcgttttcctggcccgttcgagaccagcctggccaacatgatcccagctactccggaggctgaggcgggaggatcgcttcgcgccattggggtcaccggaggcgtcccccaaccgactgggcttcggaaaaccaaggggcgcacgccgccccgccccgccccgccccgcgactagtcccatcgcgc

SEQ ID NO: 9767 - DNA, 263 bp, Homo sapiens
  source 1..263: mol_type = other DNA
aagtgctttgcccaactctattaggtagggactttacccattgccagaattcaagctcaggcattctaactccgttggcagatagatgatagatgatagatagatagataaatagatagataaataaatagatagattagtagatagaatgaagagttgccaaggtacatttccttggcaccttgataattaggatgtccaggtcctgaaacgtcagtccccctggcctcatgtctccttgggaagacagaaggaattgtgtt

SEQ ID NO: 9768 - DNA, 352 bp, Homo sapiens
  source 1..352: mol_type = other DNA
acagggcagggcaagcgctggctttaagctttcctggcagcatccaggttaagtgcacctgcacccaaatgctggttccatgcatagacaggcccccaggcttggcctgggagctttccaggaccagcaggtagcagctcacccatgcacctgtgtgcctgcactctcacaggcaccaggcgcacactccatgtcccctgccctgtgcgtgcctcaaatgttagcacactcatggccggataactgtacacagcagccctgtcaagagcccacagttggccatctctggacaagcttctagctgacacccactccgtggtggtaagaagggaccttctcccctggggctgca

SEQ ID NO: 9769 - DNA, 195 bp, Homo sapiens
  source 1..195: mol_type = other DNA
atccttctcacatgttagtattttggaggaatttttaaagcctccctgaaggtgagatgggaggatcccagcctagcaccccgacagagtctcactctgtcccccaggctggagtgcagtggtgtgatcgcagctcactgcaactgaatagctgggattacaggtggccaggctggtctcagggcagcttagctg

SEQ ID NO: 9770 - DNA, 404 bp, Homo sapiens
  source 1..404: mol_type = other DNA
tacttggaaaaaattatggtggacattaataattagacaaaacactttggcttgttgtaagtgaagctagccattgtaaattcctaaatactagagtaacataaggaaatgaataatttatttttcttgttaaatatagattttgttaaaattttgaaaaatgcaaaaaaaattgaaaaatgcaaaaataggaaaataaatcacccattattccagtactgaagtaaatggtgtcaatacacgcagtgactgtgccactgcactccagcctgggcagccgagtgagactcataaatgtgtgtgtgtgtgtgtgtgtatacacacacaacaatttaaaggtctggccggagccaaaccagcctggccagcctctatggttgttccagcgccggaacatgaggatg

SEQ ID NO: 9771 - DNA, 404 bp, Homo sapiens; identical to SEQ ID NO: 9770
  source 1..404: mol_type = other DNA

SEQ ID NO: 9772 - DNA, 282 bp, Homo sapiens
  source 1..282: mol_type = other DNA
ggttcttcatgacaaataacttgagaagctgtatgggcagtaagctgctgtagctccccatgatattataatgaaactcagatcagcctggcacattgcaggctaggtgaggacagcctcgggaatttccctgggatttctgggagcaaatgatgaggaaatgacctttcctttttcttttgcggaggtcaaggtgagcttgcatgtcactttacagattaaagtgtgctcattttggacaggtctatccagggaattttgaatgaaaaaatctctgagaca

SEQ ID NO: 9773 - DNA, 308 bp, Homo sapiens
  source 1..308: mol_type = other DNA
gggatatctctgcaagaaaataatttgacagtcgatttgctgacaagggagttaccgcggctcggccccgagtgggctgcgaccgggggaggggcgagagatacatatgtatttctgtctccccagcacacccccttccctctaagcgatggctgagaggcgggagggtggatgcacgcgcgcagcccggcgctgcaaattcatcaggagagcctgcacgcttgctcactagtaagttcgagtaagtgttggtgctttggaaacccaaagcttcctaccctgcgaggggccaggttccctgctgggga

SEQ ID NO: 9774 - DNA, 563 bp, Homo sapiens
  source 1..563: mol_type = other DNA
ggcctgctgcgcctgccgcggcaagggagacccctccccagagagctgctctgcaccccttccccgcccccatcggggcggagggatggagacgcgcgcttcgcgaacctccagcccagccctctcccagccccaccgaggccagggtgcggtgggggtaggcgcggaccgtctcctcgcagcccgcctccaatcctgcatccgggtttaaggcggcagcttcccggccacgctgccttctccccggcctcgattttccggccatgccggagggtccgctgcacctcagggctgacaggtcccgctcgcgcagggccgcaactgggcccgtgtcccccgtcccatcgcaccgccgcgaaggctgcgaacaatgcgccgggcggcccgcgcccgccgtagcgctgcgccccgggggaaaggggacgcgggcgggggccgaggcggacgaccagccggtcgcggcgctggacaccccgcccgcggccagacccagctctgcggagggatatctcccctcctcggtgcaagaaaataatttgacagtcgatttgctgacaagggag

SEQ ID NO: 9775 - DNA, 377 bp, Homo sapiens
  source 1..377: mol_type = other DNA
gtgcaggctggagtgcagtgggctgatcacagctcacgatgcgggctccgagtagctgggactacaggcgtgccaccacacccaagactgtagaaattaaatgtctctatcaagaggaaatcttttaattggcctaatagactctttttcctttgcagcaagatttgtgataaagtttataagtggtcatcactaaagtttttgaaaaattttttaaaacatgttttaaaccttcaaaaaagtgggtaatgttcacctccattactcgtataaaagattaccacaggaatagaatgtaattcattcattcctttgacaatgagcctaccctatgccagactggcaagtccttgagggtctaccatgaactacagttc

SEQ ID NO: 9776 - DNA, 603 bp, Homo sapiens
  source 1..603: mol_type = other DNA
cggcaccacgttccacagtcatggcgcgcgaggaggggcgagcgcgcgcggcggctgcacccgcgccccctctcctcccccggcctgctgcgcctgccgcggcaagggagacccctccccagagagctgctctgcaccccttccccgcccccatcggggcggagggatggagacgcgcgcttcgcgaacctccagcccagccctctcccagccccaccgaggccagggtgcggtgggggtaggcgcggaccgtctcctcgcagcccgcctccaatcctgcatccgggtttaaggcggcagcttcccggccacgctgccttctccccggcctcgattttccggccatgccggagggtccgctgcacctcagggctgacaggtcccgctcgcgcagggccgcaactgggcccgtgtcccccgtcccatcgcaccgccgcgaaggctgcgaacaatgcgccgggcggcccgcgcccgccgtagcgctgcgccccgggggaaaggggacgcgggcgggggccgaggcggacgaccagccggtcgcggcgctggacaccccgcccgcggccagacccagctctgcggagggatatctcccctcctcgg

SEQ ID NO: 9777 - DNA, 388 bp, Homo sapiens
  source 1..388: mol_type = other DNA
ctgtagaaattaaatgtctctatcaagaggaaatcttttaattggcctaatagactctttttcctttgcagcaagatttgtgataaagtttataagtggtcatcactaaagtttttgaaaaattttttaaaacatgttttaaaccttcaaaaaagtgggtaatgttcacctccattactcgtataaaagattaccacaggaatagaatgtaattcattcattcctttgacaatgagcctaccctatgccagactggcaagtccttgagggtctaccatgaactacagttctttcctggtgcaggacgcggtagtggccagcgagagccttccctgggtcagggacgagccagtgacttggagggagcgcaggaggccgctgtccttcc

SEQ ID NO: 9778 - DNA, 409 bp, Homo sapiens
  source 1..409: mol_type = other DNA
aatttgtgagacttaaaacatttttgcatattaaacagagtctcactgtcacccaggctggagtgcaatgtggggatctcagttcattacaggcagccatattactttttaattttacaagttgcaaatgtttaaaatttgagacagggcctcactctgtcacccaggctggagtgcagtggcacgatcatggctcagtgcagccttgaactccccaggctcaggtgatcttgccacctgcccaggctggtcttgaactcctgggctcaagatttcttttctcagagaggataacaatttatttgtcctacagaaagttttaaatgttgtgtacccagagctttctggttcagcatgtacctgggctttatctaatgggatgaacctggctaaagagattagcaaaatg

SEQ ID NO: 9779 - DNA, 388 bp, Homo sapiens
  source 1..388: mol_type = other DNA
ccggtggcgagggcagctccatccaggaggtctagggcctctccgcgccagatcaggatcatggccgtggctcgcacaccggcgtcccccaagatgtctatggcaaagccggctgccaggccgctcaggcccacgctcaggccggcgctagctggaggcagctcctgtgactgtcaccaccaggccatagatggcgatgatgccagccgtgaccaccgggatgatggacttcatgatcagctccggccgcatgacagacatggccgcgatgccggcaccggtcttgaccgtgccataggcagcgcgcggggcgctgaagaccatggcggccgaggctgccatgacggcttgtctgcggagctctgcggccgaggcggaggcgaagacc

SEQ ID NO: 9780 - DNA, 398 bp, Homo sapiens
  source 1..398: mol_type = other DNA
agagccacggagcccggggctagggtctcaccccagcgcggccggcgacgcccagctgcggagggagtggccgggaagaggaagggggtgtggatctcaccttcccccgcccccaccaaaaaaatagtaatccttttatggactcccccagggcccctcgaaccaggttgcagtgaggaatgcggggatccaggagcccccaggccgcgccgaactgcagtggataggggggcaagcggctccccagccagctgttccagctgctgcttcctccggcgcgggccaggcggtgcaatattcctagtagcggatctccggcctgtaagggggcatgtgcagctgccgctgctgctgacatcatcatgttaggccaatcaccggacgcgttggtgggaggc

SEQ ID NO: 9781 - DNA, 368 bp, Homo sapiens
  source 1..368: mol_type = other DNA
ccgctgggactccatgtctccggtcctgacagcagcagcggagaggcctcccaccaacgcgtccggtgattggcctaacatgatgatgtcagcagcagcggcagctgcacatgcccccttacaggccggagatccgctactaggaatattgcaccgcctggcccgcgccggaggaagcagcagctggaacagctggctggggagccgcttgcccccctatccactgcagttcggcgcggcctgggggctcctggatccccgcattcctcactgcaacctggttcgaggggccctgggggagtccataaaaggattactatttttttggtgggggcgggggaaggtgagatccacacccccttcctctt

SEQ ID NO: 9782 - DNA, 382 bp, Homo sapiens
  source 1..382: mol_type = other DNA
gcagagcagcttgcagctgtgctgaccgtgcagacttgggactccaggttggagaaaccgcagacccagctggggccgaggtctccttccaggagccgcgtctactttggtagacgaagcagcatcctcgaaacgcttcttgggctgcagcccccggcgccgctcggccaaggccgcctgcagccgcgccagcgcctcttgtccctgccgcaggtcgcagcccctggagccgagaggccgcctcctccagccgctcgaccgcggcgtggcctcaggcaccaggctcaggtcccgctgggactccatgtctccggtcctgacagcagcagcggagaggcctcccaccaacgcgtccggtgattggcctaacatgatgatgtca

SEQ ID NO: 9783 - DNA, 628 bp, Homo sapiens
  source 1..628: mol_type = other DNA
tactagatagtttacagagaagtttcaacaatttgagatttgagattaaaaataggtggtagttatacttggaccaaagaatgttaaaagattgactagctctcttttaagaatgaaaatatagagataaaagatatctattttgagagtgatttactatttgaaaatgaaccagttatttgcctaataactaagttaaaagtcgttttggtttttaaaaagcatatgcaaaacgtatttaattagagttctaaacaaatcttgtagggttttccccccttcccgtgtcaagttaaactgggtgggtggcttagtaattgttttaaagccaaataaaactgtttcttgaataaaccaatacatttctgaagttgaaaagaatgaatgaacatccttgcagcttgattttccaaaaaaaaaaaaaaaaattttttaaattaaaaaaatcctaatctccacattttttgccaggcgaggcgagcggtttgcccgggcgcagagcatgaaggccgggcgggcgcggggagcggcgccccggcccggcgcgggggtgagcggcggagcgcgtgtggccggcgccgctcggccgggagctcccgcgctccggcccccggccccgcgcccgccg

SEQ ID NO: 9784 - DNA, 365 bp, Homo sapiens
  source 1..365: mol_type = other DNA
gacaaggcactgctttttcagagtgtattataattttgtgataaaaatttcaaggagaaaaaaaaaattcctctgcctctttccttcggggaggggaaaagcgagggatgtctccagaatattaggtttcagcccagagagctattggctatgcctttcccagcgctgccggggccccgggaagaccaagttcagggcgggggcgcaggcgggcagggggcggcgaggccgggccgggggcgcctcggcggggtgggggcccggcgccatgactcattgattgattccgccccccggagccgccgggagccgggaaggagggcgcggcggggcccgaggaagaaaaataagcttttccaatctcc

SEQ ID NO: 9785 - DNA, 256 bp, Homo sapiens
  source 1..256: mol_type = other DNA
atttttaattttaaaaaaaatttatttcttgttttttttgagactgtgctggagtgcaagcggggattacaggggtgggcagtggcgcgatctcggctcactgtaacctccgcccaagacggggtttcgccacaggcgtgagcccgcgcccggcctgtgtaaccattaggtagacctatttactgtacacccattttatgggtaatgaagccgcagtatagaggggaaattcctccccagagacgcagcacagccg

SEQ ID NO: 9786 - DNA, 402 bp, Homo sapiens
  source 1..402: mol_type = other DNA
caatttttattaattagtttgttccagagacggacacttaaaaaaaatgatgttaaaaaagtaatatctcctttataggcttaatgtatgtcataattggctaattttttccatatgattatgatgcctgagagacaagcctatggtatgcttcactaaatgtcgtcaggatttaagggaagaccttcacacagatttttctgtatctacgtgattcatgttacactagtatagtcatgtgagtgaaaaagcagatttcacttagccagctgcctaatctcccagatcattcagcatctgaatgaattcagccgccaaggggaagatcactggcagatcccagtgggggtacttacccctcctgaggaaagcaagttaccttccatgtacagagactgtccc

SEQ ID NO: 9787 - DNA, 295 bp, Homo sapiens
  source 1..295: mol_type = other DNA
ggtgggcagtggcgcgatctcggctcactgtaacctccgcccaagacggggtttcgccacaggcgtgagcccgcgcccggcctgtgtaaccattaggtagacctatttactgtacacccattttatgggtaatgaagccgcagtatagaggggaaattcctccccagagacgcagcacagccgcgccggaagtgcggcgccgtagctaactttgctgtccacagccaggccgcttgactgtaacttacataaactcaagggctcactgcggctaagtgaacgctgactggtcctc

SEQ ID NO: 9788 - DNA, 436 bp, Homo sapiens
  source 1..436: mol_type = other DNA
ttgagcccaggagttcaagactgcagtgagctatgattgtactgccgcattctagcctcaacatggcaaaaagtttactgggcatctttttttagcagtggcacaaatagctgggcctggccctgggtatctttttgcctataataaagccagccagccctgggcgggtccctcacctgtgagcctcagttgcctcacctgtgaaatgtaactcagtggttgaagtgaaggctgaagtgctgtctcttcagagggagtgcaggtgtccggctcctggtgtgggagaggcaccctgtgctccctggcccgtgagacaagattgggtttgggggcggggcccgtcaccaggggaaacggctcgtgagcagctgaggtgcagctgggcctgtggcctagaaggcagtcttgtgggtgcctcctcccccagccgcaactc

SEQ ID NO: 9789 - DNA, 176 bp, Homo sapiens
  source 1..176: mol_type = other DNA
caggctggtctttacagacattagccacggcgcctggcaaatttctgccttctgagagctcagaataaattaatgcctgaactttttacaatctgctcgataagctttaattctattaacctatttgagttctagttctttaacggagaaagccgcgaagacggccttccccacat

SEQ ID NO: 9790 - DNA, 268 bp, Homo sapiens
  source 1..268: mol_type = other DNA
ggcgcaggaagtcgactgttggtgttatgctgacagaaaagctgttttgtcttcaacttaagtttggtgggagtaaaagtcctggaacatgggttttgtgccagatgtgctggaacatgtgtggtggcaccaagcactgtgtgagactccacaggggaagctgcaggagctccgcagaggagcggactccagtactgggcccagatgctgactgttcatttatcagtcaataaactgttcgggcctcccctgacggaagcggaagcgg

SEQ ID NO: 9791 - DNA, 256 bp, Homo sapiens
  source 1..256: mol_type = other DNA
aaatttctgccttctgagagctcagaataaattaatgcctgaactttttacaatctgctcgataagctttaattctattaacctatttgagttctagttctttaacggagaaagccgcgaagacggccttccccacattgaatccgtcccacccaggcccagacgcaggcttcttctcgggctctcccagagcctccgttagggggtgggaaagggcgccgtccgcgggccttggtccgctttgaaggcgggctgc

SEQ ID NO: 9792 - DNA, 374 bp, Homo sapiens
  source 1..374: mol_type = other DNA
gagctgtcctagctgcggcacaagctgggggtgctgccagccgcgggggcggagggctggccccaggagtcctgcgggggctggacgggagggtcagtctggggctgtcccgggcctggctccggcccctcccagagctccgcgcaggctccaaggcggcggtgggggaaaaagggccacgctcaccttctccctcggcccgtccggacccggcccgtctcctgcggccccgctccggctccggctttgctcggccgcactcggcccgctccttcgccaccgcctgcgcgctgcgcccgggtcgagcggtgcctgcgccaccaggcgccgcctgcttcctttttttcttattggaaagaaatagtacaaacagg

SEQ ID NO: 9793 - DNA, 255 bp, Homo sapiens
  source 1..255: mol_type = other DNA
cctgtgattgacagtcaacaatgaagttgctttacacttgcagtagcaacgcccctgtctagggaggcgggtgtcttggaaggtccttgggagctccctcctactttaccccagtgaagaaaggtgccctccgtattagggcttccttcctcccacagcagacgctggagtgcagccctgtttgtactatttctttccaataagaaaaaaaggaagcaggcggcgcctggtggcgcaggcaccgctcgacccggg

SEQ ID NO: 9794 - DNA, 516 bp, Homo sapiens
  source 1..516: mol_type = other DNA
aggggctcaaaggcccctctacttggggtacaccctatgtaaatgaagaggaaatgcgggcatacgccctatggagaggatatttcccgttatatgcccaggctggagtgcagtggtgcactcggctcactgcaatctcctggctcagcctccggagtagctaggagacgtgttagccaggtttcaccgtgttaccgtgttaccgtattccagccgggctccgcccctggattcggtggacagatcctgcccgcctggcgctcagctctgcggatctcaggggatggagtggcaatctcattgctccccttctcctcgagacccgggttaagtgggcagagggctccgagggtcctctcccgccgtgggattgcacagagggcgacctagcccaggattgcgaggcagcgccctccctgcagctggacagactcgggcgcccggcccaaagcccggcaggggcgtgtccgcgcgctcacctgctattggccaggtggggctgtcggctgccagcag

SEQ ID NO: 9795 - DNA, 215 bp, Homo sapiens
  source 1..215: mol_type = other DNA
ccatcccaggctacctgccaggccgagccggggcggggccgcgggtcctcgagctgcctgcagctcggttcttccggcgggcagctgtgcgcgcacgtgcagtcgtagctaagtgccggaggcatttcgggacttgtagtccatacgtttccggcggggcaaggggcggactcctcgtcctcgccagcgggggcggggctggaggactaggcacc

SEQ ID NO: 9796 - DNA, 372 bp, Homo sapiens
  source 1..372: mol_type = other DNA
ctgaagggccctgatcatgattggggaagatacgctcagggcccatggttctgacagggatcggatgaaaccaggcccatcttcatcctctttgggcctgacagatgcctttcaggccccatgggctcccctcaaatggccccagctgcagcgtcccggcgccggtgttcccgcgcgcctcacccgctcagagcccgcggcctccacttccggcggggcaggacgtgcagaggtgcctagtcctccagccccgcccccgctggcgaggacgaggagtccgccccttgccccgccggaaacgtatggactacaagtcccgaaatgcctccggcacttagctacgactgcacgtgcgcgcacagctgcccgccg

SEQ ID NO: 9797 - DNA, 355 bp, Homo sapiens
  source 1..355: mol_type = other DNA
ttgggcctgacagatgcctttcaggccccatgggctcccctcaaatggccccagctgcagcgtcccggcgccggtgttcccgcgcgcctcacccgctcagagcccgcggcctccacttccggcggggcaggacgtgcagaggtgcctagtcctccagccccgcccccgctggcgaggacgaggagtccgccccttgccccgccggaaacgtatggactacaagtcccgaaatgcctccggcacttagctacgactgcacgtgcgcgcacagctgcccgccggaagaaccgagctgcaggcagctcgaggacccgcggccccgccccggctcggcctggcaggtagcctgggatgg

SEQ ID NO: 9798 - DNA, 300 bp, Homo sapiens
  source 1..300: mol_type = other DNA
gtaggaccaagggtgtgctctcaacatccgctggctgggcaagaggccgggtctgtccccaccccaattcccttacaagtaatggagccggggatggaaattgacgtccaaggtcttttccagaggtgctgcgtcgccaaggtggcatcctcggctccgccccggcgctctcccagggcccctagctttccgctgggtcgggcggaaatgagcccttttggctggcggagccgctggcagggaccgggccccaccctgccccagtggctgccgactcacgcgggtgcagctctgttccgc

SEQ ID NO: 9799 - DNA, 265 bp, Homo sapiens
  source 1..265: mol_type = other DNA
ttgcaggcctagggagctactgtctcccaggactccaaacccagtcacttccatggttttgtctctgtcacggtcacctacaaacagcgggtcgcaaggaaccgcggcgctggagtgggtctcctgggcctggaaacgcagtagaggccggctgtcgacctgccctggtgcccagaggtccgcagctccagcgaggacgtggaggcctaacgaccccgaggtcactgagtcagtcggtggcgcagcgcgacattagacggcgccg

SEQ ID NO: 9800 - DNA, 386 bp, Homo sapiens
  source 1..386: mol_type = other DNA
atttggatttgaattttaaacatgcatctcccaaatacttctcttttgtgtgactcacccctgaggaactcatccttgcaggcatcatatcataatggttaagagcacaggctctgaaagacagactgtttagctctattttcctcatctataaaatgggaatagtaactgccttatagagtatttgaaaggagttcatttatttgaaacgtctattacctatacctggcttatcataatttccttatccggacctgcatgacggcagcccgaatggaagcagccttcttcccgggtaagatggattacctgggcgggcgccaggttcagagagcgcagagcgcgggtcagtgcgcacagggccatcggcgccgtctaatgtcgcg

SEQ ID NO: 9801 - DNA, 390 bp, Homo sapiens
  source 1..390: mol_type = other DNA
ttccaggtgggagctgaatgccatctcccatgggtaggaggaagtttctgccaccggggtgggggctaggttcctccccccttgggccgagggccccttccccttggctgggcctcagctctgcccagggccagccaggttctgaagcagtgtctgagcctcaggagcttcgagttgcagctggcatgagacctccttctccccgtcttggggaggtggggaccagcatctgaagttcagccagctcagattttataaaaattaattaaaatctccaaacgtgttgtgtgtttttgacaagcaccctgaggttctggcttcgcctggtccaagcttctcgggcgtggaacccagcaccctgcgactcgggcagaaggttggcaggggctg

SEQ ID NO: 9802 - DNA, 267 bp, Homo sapiens
  source 1..267: mol_type = other DNA
tattttcctcatctataaaatgggaatagtaactgccttatagagtatttgaaaggagttcatttatttgaaacgtctattacctatacctggcttatcataatttccttatccggacctgcatgacggcagcccgaatggaagcagccttcttcccgggtaagatggattacctgggcgggcgccaggttcagagagcgcagagcgcgggtcagtgcgcacagggccatcggcgccgtctaatgtcgcgctgcgccaccgactgac

SEQ ID NO: 9803 - DNA, 479 bp, Homo sapiens
  source 1..479: mol_type = other DNA
atgtggcaggaccctggagtcctggcgccacttctctgccattcctcctcccagctgcttgggggaagggaggtctaaacaggcctggggggccctccggaaccagagggagcagcagctggggcccatcttctaacccttgctgctttcacaacaaagaaagaatgtacaagggttgtgctgggcctccccacagctggagacttggccatacccgcctgggttcagattggtctacagccaaagggacattaaggacaccctgaagagttggcggggcccgcctcttcccctgcccccacctggagaattctgggggaactgttggccagagcctccaggtatgcccagaatctcccggatccctgcagagtcggtggtgggtacagcaaatactcctactgagctcctccccgcctcggcgaggagggggcgtcgagggggcggggcgccgtcggggcttggcggcggcggcggcg

SEQ ID NO: 9804 - DNA, 339 bp, Homo sapiens
  source 1..339: mol_type = other DNA
ctcaaggtcttcaggctgcatcacctgcaggaagccttcttacctgtgtacagagcagaggccctggctgtggcactcaggccagagcacggaattgcaggcctagggagctactgtctcccaggactccaaacccagtcacttccatggttttgtctctgtcacggtcacctacaaacagcgggtcgcaaggaaccgcggcgctggagtgggtctcctgggcctggaaacgcagtagaggccggctgtcgacctgccctggtgcccagaggtccgcagctccagcgaggacgtggaggcctaacgaccccgaggtcactgagtcagtcggtggcgcag

SEQ ID NO: 9805 - DNA, 305 bp, Homo sapiens
  source 1..305: mol_type = other DNA
gacgtcctcctccccaagtccagcctgcagctggaagccgcctcaggactgggaggccgatctcgagtctggacaccgggcggggacccaagcgaaggcgaggaaagctccaatcaatccctctgtattttttatttactgcaaaccccacaatccaagggaggcggaatcgtgcctgctctccggttcctttaagaggcgtcggctccacccctctcagagcgccctcttgtgggccaatggggagcggaggtgccggaaccacggaccaatggggcgggggcgctggggctcaccatataagg

SEQ ID NO: 9806 - DNA, 454 bp, Homo sapiens
  source 1..454: mol_type = other DNA
ccgcctcaggactgggaggccgatctcgagtctggacaccgggcggggacccaagcgaaggcgaggaaagctccaatcaatccctctgtattttttatttactgcaaaccccacaatccaagggaggcggaatcgtgcctgctctccggttcctttaagaggcgtcggctccacccctctcagagcgccctcttgtgggccaatggggagcggaggtgccggaaccacggaccaatggggcgggggcgctggggctcaccatataaggagcggcctcgccataaaaggaaacattgtatctctttatatggggggaagggtcgggggatccctccgccgccagcgcgtggtcccggccccctccacccgccgtctcggccgcggccagcagcccctgccccccgggggacgctgacggccgcccggcgcgccgccctagcagacggacaggggg

SEQ ID NO: 9807 - DNA, 377 bp, Homo sapiens
  source 1..377: mol_type = other DNA
cctgggatgctgacccaggaatagtggacatggtcacagtcctatgtacagagctttcttttgtattaaaaaaaaatactctttcaataaatgtatcatttttgtgcacactgctctgagtagcgatccgattctatacgatttaattcaaagcattgctgaagggtttgggaaactcatggtcggcttcttcctgctgctgagagaggagcaacgtgacctcgatcccaggctcctccggtagcgcgcccccacgcccttccagtgcagccgcccgcggtagcacgcatgctccactcgcgcgctgttccgccacgctcggcgtgggccgcggtgggacccgtaggtgcccggccgtgcgtgcactcgccgtgtga

SEQ ID NO: 9808 - DNA, 294 bp, Homo sapiens
  source 1..294: mol_type = other DNA
gttcttgtgtttgatgtgaaattttaacctgtaacatttatatccttacatataatactatggatggtttgcaatacagggaggctccagcttgcatgcccgctaccagtgaacaggtggtcctaaggagaactgacttcttgggaactccgtgtctgaccttgagcagctcacgacatgtggacacctgttaggaggctggttcccgaaagggtcccggctggatcctcccagttccacaggtgtggactcagcagccgggctctgcgctgggccgggcggggtcacgtggcc

SEQ ID NO: 9809 - DNA, 253 bp, Homo sapiens
  source 1..253: mol_type = other DNA
tgccactgcactccagcctgggcagcagagtggttgagttgttgagtaacccaacatgtcagaatacagtaaagagtgtccatctgcggcgcggtgcattgtgggcagctccccgctctgccgctgccgccgccgtcgcccaaggaggatcggggccgggccgggccgggatgatccgggtcggaaggccgccgccgccggagggagcgggtcacccaacgccgcactgagccgcccccgccccgccccggcc

SEQ ID NO: 9810 - DNA, 332 bp, Homo sapiens
  source 1..332: mol_type = other DNA
gttgagttgttgagtaacccaacatgtcagaatacagtaaagagtgtccatctgcggcgcggtgcattgtgggcagctccccgctctgccgctgccgccgccgtcgcccaaggaggatcggggccgggccgggccgggatgatccgggtcggaaggccgccgccgccggagggagcgggtcacccaacgccgcactgagccgcccccgccccgccccggccccgggggatgcgccgccccgagctgctgcctccgccgccgccgcagccgcagccgcagcgggcacagagcaggtgaggcgggccgggccggggtcggggcgggggctcctt

SEQ ID NO: 9811 - DNA, 393 bp, Homo sapiens
  source 1..393: mol_type = other DNA
actaaaccagacattgctggtttctgctgtactgaacatttgagtcttaggtattgcatgtaccttaggcattgcaccctatccctccaaaaggtaatttaggaagccctgggatcctcagagacatcaagttgcccggtgtgatcacctggttaggatccagctttcagtcctgaatcctgggctgtcggccaggccatggctaaggctgacctaaggtctcacaggacaaagggcaccctgggagagctggccccaggccccaggggcctcctctgggctaggggctcacctcctatgcaccaggcaagacaggtagaggtccctggagacctgatggctggggagggcccagtcctgggccagcccctgagggctggattctggctgcag

SEQ ID NO: 9812 - DNA, 321 bp, Homo sapiens
  source 1..321: mol_type = other DNA
aggctggagtacagtggtgcgccgagtagctgagacgcagtttcgcctcgatggccaggctggtcttggactcctacagaccatgtttccatcatagtgatagctatagctgttacagcgtttacactcataacaatcctatgaggcagagactgttatcatactcaccaaggtggaattttgcatttcaaagaatgcctactccctcgctttgggagtgtctgcactgtggacatgaccgaggctttaatgctctttgaagtaacagcgaaatagccgcccagggaggctcaaagctgagccgtgggggggcggaactga

SEQ ID NO: 9813 - DNA, 311 bp, Homo sapiens
  source 1..311: mol_type = other DNA
tgatggtctaggccggggttcacgaatggttccgctccgcccaccccgcgcggaggccacaggggtcacgtggcggccgcgggagggggaagtgggcggctctgcggccgccatcttgaggattcggaggcggggcgtgcagagctcagggcgcgcgcttcgcttcccctcccctctgcggccgctccctgagtggaggagcggggaaccggaggcgggggggggtgtgtcggacgcgtgctcgcgccctccaaccgccagccgcgggggcgcgctcggccgggcccccggggcgacgcggggccgagggg

SEQ ID NO: 9814 - DNA, 282 bp, Homo sapiens
  source 1..282: mol_type = other DNA
ggtccctgacctcaggtgatccgtgagcccaccgagcttggctgggtcccagaagggggcaaagaggcctggagggcagctttcccccactccccctccgctctgaatctgagctccagaggtttagcctgaggccaaggcggggcgttgggtagccgcggagggccggggccccggggcgcgccgggtgctaggtgtgcgccgtgcgtcgcggggggtgggggcgggctccgcccctggcagggggcctgagcgcgcgcgaggagcagccgctgccgccgc

SEQ ID NO: 9815 - DNA, 213 bp, Homo sapiens
  source 1..213: mol_type = other DNA
tcaataaacaataaatatttaatataatgtcagataatgataagtactatgtcatgcttaatgcattggaggaaaacatgccatttattcattaggcaattattgtgtgccaagtataacatgtaaataaataattacactgcatgctagtgatgcccagcaaaaggagccccatggccccgcctcagatgacgcgacacgccaagtgcgtgg

SEQ ID NO: 9816 - DNA, 290 bp, Homo sapiens
  source 1..290: mol_type = other DNA
ccttccttgcctccagtcaaggactgtgggccctaatgggctggatctggggcactcacaccctgtgtacacatctccctcgcagcctggtgttgaggaacaccatgggccccctggtggattgtcttcccagtgggctggcagagatccttgcctagcaagccagatcgcctctggccatggaagccctggggagtgaagcagccttccctacaggattgctggacacccagtcctccctgcctgcatgcagggggaaaggcagagaccaactctctgagctgcccctt

SEQ ID NO: 9817 - DNA, 307 bp, Homo sapiens
  source 1..307: mol_type = other DNA
gccctgcagccctcttctgctataagagtctttgcagtggtccagagctgagcctcaagcctctacctgagaggctagaatcaggaggcgaatggctctgagggccctaagccacatgaggcctctggagcagctgacaggctggtgaagggaggctggactgtcccctaccatccccaacccaggctgtgttcccagggccagcaggcctatgaaatatgctgccttagactcagactaagactccaggagtctgccaggctcttacaggaggagaatgaagcttcgccggcgcctggcctccgcc

SEQ ID NO: 9818 - DNA, 550 bp, Homo sapiens
  source 1..550: mol_type = other DNA
tccacttaataagttaattcaggtggaaacctcccttcactatattgaatattatattttatgtaaaataatcatcttaacactagggacaaacagaggtgcccttcatttgtcctgcgttacacaagtgagtcccgacagcaccgcctgcaccgtgcagtgtggtgctccagggccctggccctggcctcgcggcacggacacaccgtgcccggctcccctgccctagggaccctatggggtaccagcagctcaagctggctctgcccagccgtggcccctggggcctccctgatgaggccgccatcttggcgatccccatgggccgggatcaccacgcacgctgcgcctcgagtcacgggggcgggagcgaggcgcggcgcgaagggccctggggccttccaaataggagggaacagtgccccctgccgcctgccgcctgccagttggctgaccccactcccaagggaagacgcgaacctcgcgggccggcgtggccttggccgggcagggggcggggcgagcgccggtgacgcggccgttgccatgg

SEQ ID NO: 9819 - DNA, 196 bp, Homo sapiens
  source 1..196: mol_type = other DNA
aacattcagtaatctatttaaatgcaattttaacccttattttaagctaagtgaaacaatcaaggctcaattgagatgtacgactgaacatctttgcagaactgggtagaatgagacagacacaggctgctcagaccacaaggtctggccgagactagaggttctatctcgcgagtagccctgctaatatcgcgag

SEQ ID NO: 9820 - DNA, 332 bp, Homo sapiens
  source 1..332: mol_type = other DNA
gggcctgggaaacctactagtctcattcatgtctttctcctatgttacctatcaaagactaaaaggctgaaaaagtgcacatagtatgctcaggctggagtagtagtctggccctttcaggtcaatgttaatcccactgactttagtgtgcacgggggaatccccaagacacttctggacatcgccggccctccggctgctggcagctggtgccttggggccatttcgggcgccgcccgccggcgccgctgtagttgggctcccgtcgctgaaacccgcgctagccccgcgcgcggagtgggcaagatgctcgcgatattagcagggctact

SEQ ID NO: 9821 - DNA, 464 bp, Homo sapiens
  source 1..464: mol_type = other DNA
actcctgacctcaggtgatccgcctttctgcccaagccatgcttttggataaggattacactactttgaaaccttatacataaacaggtaataattggagggaaaaacatacttttttctacaagaaaaatcttagaagacagtaccaggtatccctgttagcatgatttatatttcacgaccttggcccagttacactggcaaaactgccagcagcggttgccgaaaatgctggggctcctgaatatcttttcgccttaaaccgagaagggatcgtaaaggatcctgcccgggcaaccgtccgcgcccagcaatgcagccgccagactgaggtctgacagcgcgcccgctgcgaagggccgttgacgcggctgcgcaccgcggcccttccgcctcctgcacacgggagccgccacttccgcgggcgcgtgcgcagtggcgggccgggcgcgtgcgcagcgccg

SEQ ID NO: 9822 - DNA, 483 bp, Homo sapiens
  source 1..483: mol_type = other DNA
tgtagagtgcaacagcactaaagtggccctaggcctggttggtgtaacccgagccctagccccgcccgaagtaggggccaggcccctcctaccccgattggttctgcttcaaaacaaaggggaggaggaatactcggtatgcttgcaccgcggtgcctccggttattaaaaccagagcataatcatcccaacaataagccgtaatttggctcgttcgccctgactcaccccagcggcacgcgggcccggagccagcaggctggcggcaccagtagcctcagttctgcagctctcgaggtcgatccgcgctcgcgtccccaccccaggcctcgagtgcgcgccaaggcgcgccccgcggccacttgcgccgcgatgcctcctgggagttgtagggcggcgacgtgtcatttaagtgaattcccaggcctggggactctatatcccgttgccccgcggctggacgcggggaggtggggggcgtag

SEQ ID NO: 9823 - DNA, 409 bp, Homo sapiens
  source 1..409: mol_type = other DNA
cgagaatttccccggaaaatgtccataccccagttacaggcggcgccggagctgctggggctgggagagggtgtcgggaccggcccaggacgccaggaccccagctaccttgagggcttccagccggtagcgctgggtggagttggggtccatcatgaccgtcaccgctttcaccagccgcgccgagagcgcacaccactgcagtcccgggaccacgaggcgctccctcggcgagaccacccgttggtaccgggccgcggcgggcggcgggggtgactcgcgctgggaagaagccggcgctgcgcacgcgcccggcccgccactgcgcacgcgcccgcggaagtggcggctcccgtgtgcaggaggcggaagggccgcggtgcgcagccgcgtcaacggcccttcgcag

SEQ ID NO: 9824 - DNA, 552 bp, Homo sapiens
  source 1..552: mol_type = other DNA
tcctggggtaatctagatcagaagggggagtcctccctctccactctctgagagccctggggtcccgggacctgaaagaggtgttctcctcccgtgcccctcctccctggggtctcgacaccggaaggggagattaattatctgggtcccgcctccctagagtcctgggccggaaagagtccaggtgctcacctcggggggcaaatacgggccccgcagccgctgctgctgccggcccccctagccttgagggttccgcccacggccgggccccctccgggccggcagcagccgccgaacagcccgctgccggcccctcccccgaccgccgccgccgtcgccgccgcccttactgccactgccgtgtccggccggcctgagcagagtggggtggggctctgcacaagctacgccccccacctccccgcgtccagccgcggggcaacgggatatagagtccccaggcctgggaattcacttaaatgacacgtcgccgccctacaactcccaggaggcatcgcggcgcaagtggccgcggggcgcgccttggcg

SEQ ID NO: 9825 - DNA, 341 bp, Homo sapiens
  source 1..341: mol_type = other DNA
agttttccaaggacaactgaggtcttgcctcagtctcccgagcagctgggaccacagatgtgcaccatcatgctgggctggagtgcaatggcgtgatctcgggtcactgcaacctccgggttcaagcgattctcctgcctcagcctcgcgagcagccgccaaagtgctgtgatttacaggcgtgaggcaccgcacccggctgacctcgcagttcgagcagagacagccatgcggctgtgaatgactcgctgtagagtgcaacagcactaaagtggccctaggcctggttggtgtaacccgagccctagccccgcccgaagtaggggccaggcccctcctac

SEQ ID NO: 9826 - DNA, 285 bp, Homo sapiens
  source 1..285: mol_type = other DNA
tgtatcctgcagccagggtagagattaaatttataagatgtaaatttaatcatgccactctcctacttaaaactctttataatatgaactcttttcattccttgtacagagttctccaggagcaccttttctgtataattcatcacattgtattgtatctaccccttgagcacggggcccgcgcctggcttgttctccgctgtctcccctaggacagggcctgagcagcgctcagtggctgagaactcgccgcgctgagccggaagtggaggcgcgggcttccca

SEQ ID NO: 9827 - DNA, 251 bp, Homo sapiens
  source 1..251: mol_type = other DNA
aaaaaaaaaaaaaaagtcaatcaatcaatcattttctctcttccgctgggattaaataaataataaatagataaataaataaaataaatcccagcactttgggaacccaaggcacacctgtagttccagctactccagaggctgaggtgggaggatcgcaatgagctgtgatcacaccactgcacttcagcctgagtgacagagggagtccatgtatatagcaggctctggttatcaagagggcccagggc

SEQ ID NO: 9828 - DNA, 294 bp, Homo sapiens
  source 1..294: mol_type = other DNA
tgtatcctgcagccagggtagagattaaatttataagatgtaaatttaatcatgccactctcctacttaaaactctttataatatgaactcttttcattccttgtacagagttctccaggagcaccttttctgtataattcatcacattgtattgtatctaccccttgagcacggggcccgcgcctggcttgttctccgctgtctcccctaggacagggcctgagcagcgctcagtggctgagaactcgccgcgctgagccggaagtggaggcgcgggcttcccatgatgcccc

SEQ ID NO: 9829 - DNA, 401 bp, Homo sapiens
  source 1..401: mol_type = other DNA
atcaaaaaagtaattatctgggttatttacacacttatttatcttctgatttcctgagtgctcttcaaaggaatccagaagtggcaacaagcttgctgaggaacctggctaccatttggatctaaaaacaacagttggtggtagttgtagtctataaaagtccccctcttagaatatttctatggaagaatctcaaattcttcacagatcattctggaccccaggtccatatacagtaaagactctaagctgggtttggacttacaaccccaactgtagcctaactgtaggggaagccatactgtggccgtggcaactgaagacatcccgtcccaaactctggaaaggatgagggagggggctgatgcctaggcctcctgggtggaacctagcgtccagct

SEQ ID NO: 9830 - DNA, 218 bp, Homo sapiens
  source 1..218: mol_type = other DNA
tcctgaccttaaaatagattctactcattcattcaacaagtatatattgtactcttattatgtgggccctgggggtatcaattctatcccaggtctgcctgatatccgatactccatttcctaaggaagccttccaggaaacgaatgcaaccttgaagacttgtaggccccgccgttcctgccccaccactgcggcggcgggcgctacgttccggaag

SEQ ID NO: 9831 - DNA, 397 bp, Homo sapiens
  source 1..397: mol_type = other DNA
ttcttctcccctgggaagcatccctggacactctgcaggccagatgagggctccagatggcacattgtcagagggacacactgtggcccctgtgcccagccctgggctctctgtacactttagccagagccggggtgtgcagacggcagtcactagggggcgctcggccacctattcctagcaaagagggaacggctctcaggccctgaatgccccgcgggcgcgtgtctctggacagacgggctgcgggccaggcttcactgagcgtccgcagagcccgggcccgagccgcgtgtggaagggctgaggctcgcctgtccccgccccccggggcgggccgggggcggggtcccggcggggcggagccatgcgccccccccttttttttttaaaagtc

SEQ ID NO: 9832 - DNA, 388 bp, Homo sapiens
  source 1..388: mol_type = other DNA
gggggactcaccttcgtgctcctccttctgccatgggtgcagcctgggaccactgaggcatgggcaggggctggggtgcacaggcccagccacccagcccctccccttctcctgctgacatgacaaaacggggggtgccgaggaccgaagggcaccaaccaccccacaggttgcttagagggtaaaaacccaggaggagaccctgggggaaccacattttcctctctacacaaatctctccagagccttctccctcccagggtgaggaggtgccaagcccctctcacctgggcaccttcaaatgccaccagggaccagggaaggcttttatgccttggcactgcccagcccctagggggccccctgcaccaccttaggcctgaggcct

SEQ ID NO: 9833 - DNA, 515 bp, Homo sapiens
  source 1..515: mol_type = other DNA
tattcctagcaaagagggaacggctctcaggccctgaatgccccgcgggcgcgtgtctctggacagacgggctgcgggccaggcttcactgagcgtccgcagagcccgggcccgagccgcgtgtggaagggctgaggctcgcctgtccccgccccccggggcgggccgggggcggggtcccggcggggcggagccatgcgccccccccttttttttttaaaagtcggctggggtagctcggaggtcgtggcgctgggggctagcaccagcgctctgtcgggaggcgcagcggttaggtggaccggtcagcggactcaccggccagggcgctcggtgcttcttaaacatttttttttaaaactgtattgttccgacggcttggggagattgctctacttccccaaatcactgtggattttggaaacgggggtgaccgccggagcgcggcgtgagccctcccccttgggatcccgcagctgaccagtcgcgctgacggacagacagactaccacctc

SEQ ID NO: 9834 - DNA, 419 bp, Homo sapiens
  source 1..419: mol_type = other DNA
ggggcccccaagaagttaagtgatctgcctaagatcacccaggaagattccactgctagtactgtatgtcagtgagtttgcatgcacacacctggaggaggggcaagtgggcttacttgcccacctggggcacatgtgggtacagtgaccgtgtgtgtgcctagacacaggcaaatgagcccatgtgggccccaggtaaggggctggtgaaaaccgcctgtgactggggacagagacacctgagtcttaagccccaccccacccaggcagcgggagtgtcctcacccaatgggatagggtggcagcgaggctttcagctccctagatgggaggctcattaccctagacttggcactgactacaaagggtaggggcagcccccagcactcccgccgcggcaggccaggggaggggctgtg

SEQ ID NO: 9835 - DNA, 294 bp, Homo sapiens
  source 1..294: mol_type = other DNA
ctgcagtgagctgagatcgcactgctgcacccagatctccccagatccattataatactatttgacctcaaagtgaattttcaacttcttacctcaataaaatccttgtttttcagtagaagtatttccagtgatgaacagtgaatgaagaagatccaccttgtgacaattttaagtgactgaaaatcaaatttttctagtacactcacacgtgtgtgtacacctgacaccaataggattcagtttgaaaaacactatccaaaccccccaggtgggcagtgtccttctgttcag

SEQ ID NO: 9836 - DNA, 304 bp, Homo sapiens
  source 1..304: mol_type = other DNA
ttcttacctcaataaaatccttgtttttcagtagaagtatttccagtgatgaacagtgaatgaagaagatccaccttgtgacaattttaagtgactgaaaatcaaatttttctagtacactcacacgtgtgtgtacacctgacaccaataggattcagtttgaaaaacactatccaaaccccccaggtgggcagtgtccttctgttcagatctcccaaactcccattccttgtgatatatagaaagagtctcagtctctcccttcatcttttgaaccagggaaccccctggcctgggggagggc

SEQ ID NO: 9837 - DNA, 718 bp, Homo sapiens
  source 1..718: mol_type = other DNA
cctccaacgcaggcccgggcggctcatgaatgacaaggagaggacacgctcccggggccggccgcctctccagcccgccgaccagtcagtccccagagccgggggcagcggccggcctcgtgccagcacctgcgaaccctgcccttgcccgagcccgagcccttaccccggaccggcttcgggtgtactcgcccccgggacttggcgaccccggggtccaaaactcgggggcgggggcggctagttcggcggcggacaggcggggcgcagctggcacccccgagggtcgcgcaggggacgcgcacctgcaccgggcaggtgggagaagagtggcactcgggggccgggggcgggggtcccaccctttgggatctccccggggctggggagagccggcggcgcgtatctggacctccggtggtgcggggttgggggcagcgcgcgccacccctgggtcccgcgggcccgggcacctctgggtcccgcaggaggctgggtaggggtcgcgtactcacccccaggcgcagactcggctccggctcggagccccgggttggggcggggcggggctcgctgggcggctcgagctccgggctcctgcggcggccgcggcagtgtatggggggggagggagggggagggggcggagccccgcaggtcccgccccgcacgccggcgcacgcaaggtgcgcgcgcactctcagatcgcgtccgccgg

SEQ ID NO: 9838 - DNA, 334 bp, Homo sapiens
  source 1..334: mol_type = other DNA
ataacagagcccctcagtcaggttgggcttcttattgggactctgccactgagtgacagggaatattctcactctttgaacatacccgagatgataacccattattgatcaattaccaataaaacttgtaaggaggtggctgtcacccaggctggagtgaagtgccacaatctcggctcactgcttttgttaagtaacttgtcgcaggtctctaagactctgctatacttggagagaacttcagcaggccccagcatgtgccacctggggcatgccaaggcctggaccctctggtgccctggagggccactccccacctcaccctggcctggga

SEQ ID NO: 9839 - DNA, 340 bp, Homo sapiens
  source 1..340: mol_type = other DNA
ccctgccctgccccaccttgagggagggggtggagcccctgcctcaacctctgtgcagccagtgagtgggggcagcagtaggctgggagcagccagccagctgcaggcagaactcaggagatccagccagagtccagcggtcagcactgccgggtacccgggcttcactacgccaggctcagccacggagaaaataggggaccaagaactatactactgccagatcagctggagctagggtggggcaggcaagttgcagcccccttctttgcctgtcaacttctcaggggacctgctgggatggggctggaggggatgtgccctgaccccaccatcatcc

SEQ ID NO: 9840 - DNA, 380 bp, Homo sapiens
  source 1..380: mol_type = other DNA
ggattaaataagtaggaagttcttagcacataataactaattaatattctcgggagggctcgcccaaggtcagctcctgtttcagagcttggaacaaggttctctgatctgattagcaccaggcagggctgaggggcactgggatgaccttgacagtccctgttccagagaagactgcactctggagcagagttcttagacatgtggtcagaccagtggcctaaccttgccagactggggctaggcaagctggcccccagtacttcagaatgtgacctcatttggaaacagggcattgtccttataatcatttggacaaccccttcctgtgatgggatgaccgtgatacgccgagagttctggggggagggtctcttctc

SEQ ID NO: 9841 - DNA, 323 bp, Homo sapiens
  source 1..323: mol_type = other DNA
agatatacccagctatctcatagaatttcatttaatcccagctgtgtccagctgtgcccagctaggccaggagagggcccacaggggcctgcttgggtcctagtccccgtcccagccactgagcatgcctggtgctcaggtgtgtgtgcagtctgcagactcactggatcacttgagctcaggagtttgagatggcatgatggcacactcctataatcccagctacttgggttccctctcctccccctagactgggaagtgggggccagcccagctgcccgctcccctcagagcagggcggggctacccctgtgctgaatcca

SEQ ID NO: 9842 - DNA, 325 bp, Homo sapiens
  source 1..325: mol_type = other DNA
ggacaattgtacaagggtttatttcagtatgtcacactgtgacccagaacatctaggaggaagtttgcctggctagctcacagtagggaggaaaatatcctccagcgagggtgggaggccacccagggaggcagtgcagaaatgcatccccttgagggtcatcccaccctagaagagactagggttgggttttcctcctccctagtgggaggcccctcaggggtcaaatatcccagctcctacggaggctgaggcaggagaataatttgcttattgttcccaggcaatacaggatccaattgggattccagtcccctccccgaag

SEQ ID NO: 9843 - DNA, 437 bp, Homo sapiens
  source 1..437: mol_type = other DNA
tttcctcctccctagtgggaggcccctcaggggtcaaatatcccagctcctacggaggctgaggcaggagaataatttgcttattgttcccaggcaatacaggatccaattgggattccagtcccctccccgaaggcttggttgggaaagaagtgagccaagctatccgccccacccccagccctgcggggcacgtgctcccaggtctcagggaggcgacccagggggaggggcagagagaagggggtccgagcccttgggcccctaaccccgtccctttccggagcctcgggtgcccaaaggcgccggccgccagtcccaggcccgaagggcccctcccactgagtcggctctggtctccccgcccctgagccgcgaggactggacgcagctggctgcggagctctgggcgggcgctggggtcgcctgttgcagcc

SEQ ID NO: 9844 - DNA, 285 bp, Homo sapiens
  source 1..285: mol_type = other DNA
ggaagggcagggagtgccccccaccccaccccatgaccaaagagagggcctccctccccctcccttggagggacttgctgggtgaaagacatactcagcaaggcttccgcctgtgagggagctggagggctttgccccacccccctccgcgcgcactaccccctccaagtcaaagttgtgagtggggtggcaggcggccctgggggcgcaggggctcgggcggcggagcgcgcggagtcgccgcgggggccgggggcggggccgcggcggggcgagctcagcgcc

SEQ ID NO: 9845 - DNA, 419 bp, Homo sapiens
  source 1..419: mol_type = other DNA
gcaaggcctgggcccagctaggcctgagtgtggggaagcacatctgcctggcttcccatgccacccaatgggaaagctgtttaatctgctggtgccagggggtctccccctacacaaatggctccaatcttcttttcaaggtcactcttagaaaggggagggggaagggctgtgcccccacatccattatggccagcaactaggaagcccctgggcagtggttcccccactctagccatgaatccaggggctccccagggagggtggagagaccagcctctggtttgacctcagtcatcatcgatgttgtcgcagctgctgcagattataaactgcttcggctgagcggccagcaggcaggggggccgcgcaggactggcctgctgggccaggggggggtcttactggactcctccact

SEQ ID NO: 9846 - DNA, 506 bp, Homo sapiens
  source 1..506: mol_type = other DNA
ggagggcgcatgtccccgtgctccgtgtacgtggcggccgcaggggctagaggggggtcccccccgcaggtactccgcggggaaggaggggtcagccgatccctccccaaccctccatcccatccctgaggattgggctggtacccgcgtctctcggacaggtcagagcgggtcgccgggtggggtcgctgcaaaaaccctgccccggccgcagccggagaggcggagcctcgcggggagggggcgggaccgccgagacctgctggaaatgccgcagtgccgccgccgcgccttccgccgcatgtcggcaaagagtccccgccagccccggccggcgccctccccctacgctgagccgggatctggggctacccaaggttgggtcccgaatgccagtccctcgccccagtcccgcccttgggtgtggggacgcctgccccactgtgtgggcggatccatactcctttaaggcggagggatctacaggagggcggctgtactgggcg

SEQ ID NO: 9847 - DNA, 457 bp, Homo sapiens
  source 1..457: mol_type = other DNA
gggccctgctagcccctaccatccaaataaagatgcctttccaagttgctgcagagcctcaatgtcctgtccacaagatggcaatggtcaccatgacctctggcaggggacacgccgggcgggcgcctcttcagggctggggctccccgcgcccaggggcagcccaggtccccggaacccaagccgcgtctgcctccgggccgcgcgggggcgctgtggtccggcggcggcccggggcgctgcgtggtcgcggcaggggcggagggggccgcggggagggaggcgggaagagcgcggcacttccgctggccgctggctcgctggccgctcctggaggcggcggcgggagcgcagggggcgcgcggcccggggactcgcattccccggttccccctccaccccacgcggcctggaccatggacgccaggtgggggctagggcagcagcgagctcacgt

SEQ ID NO: 9848 - DNA, 378 bp, Homo sapiens
  source 1..378: mol_type = other DNA
agcacagacccttgtccttgctgtgggagccctcaccactgccctgggggttgccatctggaggagcctggggataagggtaacccagggaggacgaggggggccctgctagcccctaccatccaaataaagatgcctttccaagttgctgcagagcctcaatgtcctgtccacaagatggcaatggtcaccatgacctctggcaggggacacgccgggcgggcgcctcttcagggctggggctccccgcgcccaggggcagcccaggtccccggaacccaagccgcgtctgcctccgggccgcgcgggggcgctgtggtccggcggcggcccggggcgctgcgtggtcgcggcaggggcggagggggccgcggggag

SEQ ID NO: 9849 - DNA, 483 bp, Homo sapiens
  source 1..483: mol_type = other DNA
tagacaacagtttccctgagaagacgctctttccaaaaaaacattttcatgcctgtgatgtgggaccacaggagactgtcttccaggacccaggagaactgctcctttaaagataagggagtcccctttccctacccgtacccctgggcactgatgcaggggataggaagcagtgcttccccatcccatgacaattaatagatatttcttttaaaacaaatgaatgatccggttgtagtcccagctactcgaaaggcttgcagtgagcagagatcaaccactgcactccagcctgggtgaatgaatgaatgaatgaatgagtgaatgaatcaacgaaggagtgagtcacccgggaagggggattccggaggggcggggcctctttccggaagcgcccgccgggggcggggagggggcggggccatccgcgtgaggcgaccctgttggtccggaggggcggggcgaggaggaggacccgcttgg

SEQ ID NO: 9850 - DNA, 302 bp, Homo sapiens
  source 1..302: mol_type = other DNA
ccaaactgtgagccttttggtcaaaatggggcaggaccttttggtcaaaacttagctttggcaaagtagctctcagagctgaaggcactgccaccagacagctctgggagcctccagtcccaccgcaaacagaccttgtacgtgtggagagaaatgacttccagcagcaggagatccagatccttcaaggacatatgtccttctttggccacccctacacctcaagaagctcacagtctagtgtgggtgtcaccttgccttcagagaggaagtggtgcttgagctcagactgtcccttggca

SEQ ID NO: 9851 - DNA, 469 bp, Homo sapiens
  source 1..469: mol_type = other DNA
gaagggacccaatcccgggtgcctggcccctcacaaagcagcatcctggccactggggcagtagcctgtttagcagtgctcaccctcctccgcgagcgccaagatgagttttggcaccctccaggagatctggggccccaaccacatcttgtcgcgccaggggcgtctggtaccagaccttcagctgggggaaaggtggaaggtgccctccctcccgcagggcctaaggtcaacaggaggcctcacgggagttccagtgacttctacaggtgccttggagaaggtgcgtccaccctcctctcaaagcggccgcttccacggaaccgtcccgaggccgggcctggccaccctgcgcgcgagtaagccgcgtgcctggcgcgcagcggcagcggcagcggaggaagcagcggcgcgctcgtcctcccggcccggcccgctcctagcaacgcggggcgtccccaacgacaaa

SEQ ID NO: 9852 - DNA, 400 bp, Homo sapiens
  source 1..400: mol_type = other DNA
agccccatgagcaccctgattgcatccacaagggcctgttggcttcagggtcaacaggtatatctcttatcagtgaaatctctgcagctattagctaatatagcagatgcccgtgtctgatgccaaggtccaaggaaactggcaaatgcctacacatactaggtcttcaataaatatttgttgaatacctcttgaatgaatgagcaattactgctagaatacggatttattttgtcaattttgtaccctaaaagcccaaaatcaatgaatatttgcttaatgccgaatgaggcgctgtgctagactctgccagcgacccaatcgatcgcttccaccccggcggcagaggccgccccctgagtcctcctaccgccaggggccgctgtaggaaacgcctggc

SEQ ID NO: 9853 - DNA, 374 bp, Homo sapiens
  source 1..374: mol_type = other DNA
ctcccgagcagctgggattacaggcgcctatgttggccagcctggtcttgaactccaggaggcatgagccactgtgcccggcctcatagcatttctctaccatattaaaacttgtcattgaagtataacatatgtgcagaaaaatgcacaggtgaattgctggatgcattttcgactttcaaaaatgttatttatgtagttgtaaaatatacataacacagtatttgccattttacccaggctggagtgcagtggcgcgatattttaagtgtacaattcagtggcattgagtacactcacactgttgtgtagtcatcactcacctgacatgccagctacgctgccttgaagactgtggtcattactgtgagaaa

SEQ ID NO: 9854 - DNA, 511 bp, Homo sapiens
  source 1..511: mol_type = other DNA
acacatgagtgaggaagctcctctgtgacctctgactgactaccaaaggatcagaaattaaaaatgaatgttgttgtttaaaacaacagagtttgagggtgatttgttatatagcaatagctatccaggaaaaaagtatttaacttctgtatggtgagatcatggatattaataatacttttccatattttccaatatttctataatgaccatttatttctcttataatcagtaacaaaagaagggaaaacttaaacacgaatttagggacttaaactagacttggagaaaagctttctatgcaagatttattagatagaaatgaatctgttttctggctaaaatttggttttctattttgaaaaacgcagctggctgtttaagaagataggcgcctggcccggccatggctggagctccggggggccggcagccgagccaggcaggacgctgcgcgccgcgttactggagccggtgtcccggcaaccccggaacgcgcctctgtgggaga

SEQ ID NO: 9855 - DNA, 424 bp, Homo sapiens
  source 1..424: mol_type = other DNA
ttcccaacccactaaatattttgatattttccagggatggagggtagcagagagtttgccaatccctacctcactcctcatttacgagggatgaggatactgagattcagtaaggttattacccaaacttatgagattccagtgcgtaccaatggcattattaatccagactgggcgagattctgcaggtttctggaagaaagtaatagctgctattgttttgcagcagttattatggatcagatactgtgctgggtctatgatctcatttctctattttacaggttaggaaactgagccttaaataaactactggattttcctgagtattctgtgaataaattcctattactgaaatacttgaaagggctagattaataaattaacaaagcctctatctcgcggctgcttccacatcgcgagc

SEQ ID NO: 9856 - DNA, 401 bp, Homo sapiens
  source 1..401: mol_type = other DNA
gaatgttaaatataaataagacttcatataatataaagagtgaaagactgaaagcattgtcttacgactactgtattatttaaagaactacatctatatcaattaaatgattttaaaatgaggaacgaaaaagttttcaataacaaaacatggtagttaaacgcctgcgtctagtaacatgagtggaagcatctcttcctcggagttgaaaatcaacttccagtattcctaaagaattcaaacgccgccgcgtggctcagcgctgcccaagccgggccctgaaggccgcgcacaacgccccgcccccggcgagcgtggcggaagtagctcgctcgggctgggagagcgcgcgccacctggccaagcgcgcatgcgcccgcactgccagtgcggggggcgtc

SEQ ID NO: 9857 - DNA, 618 bp, Homo sapiens
  source 1..618: mol_type = other DNA
tcccggccgggggcggaggccacggcaggggcgccagtgcgagggcagcaccgagcacaggaagggctgtcggtgcggacgagttcggccgggtggtcggcgatgatctccaccatggtgcggttgtcgtggggcggccgcaaccggggcactgcagctgccgccgccgcagccgccgccgccgccgcagccgccgccgccgcctcctgctgctgctgctgctgttgctgctgctgctgctgctgttgctgctgctgctgttgctgctgctgttgcgcagccaccacccattttgccgggctgcaggctgctggagggggggctgaagcgccactgccgggcggagtctgatgggccaacagagtctggcgatgcggcgcagtccgcagaacacccggggtgtggggtcccttggggcaccgcgtcctgggtgcgctggcgccccctcccagttggagtccggtggtgaagcggtgtgggttcagcagtccagccccggggccggcattgccgcgcgctgcccgccaccgccgcgccgcgccgcgcgctgctacccagctgcaggcggccgcgcctccgccctcccgcgccgccgcctccgcggcggccgccgctccc

SEQ ID NO: 9858 - DNA, 519 bp, Homo sapiens
  source 1..519: mol_type = other DNA
agccgggggctcttcctacaaagagggacgcgacctggcgagattgcccctagtctggggccgcctctaggcttcggaaactgcacacggcgcgcggggggctccttctcgcggccggctggcggcggcagcggctgcgattcgcaggctcgagattcgttgccccgaggcctagccggggagccgggctggcagccgccgcgggaggaatctgagcgtgcagcccgcgcggggggagcggcggccgccgcggaggcggcggcgcgggagggcggaggcgcggccgcctgcagctgggtagcagcgcgcggcgcggcgcggcggtggcgggcagcgcgcggcaatgccggccccggggctggactgctgaacccacaccgcttcaccaccggactccaactgggagggggcgccagcgcacccaggacgcggtgccccaagggaccccacaccccgggtgttctgcggactgcgccgcatcgccagactctgttggcccatcagactccgcccggcagt

SEQ ID NO: 9859 - DNA, 320 bp, Homo sapiens
  source 1..320: mol_type = other DNA
ggcatacacctaagatatgtgcatcttttctgtgtgccccttttggtgggggttctgagcatcactaagacagggctttattaaagaaacagaagacttgagagccatctcctctctctcttggccttggtggctttgccagggcctcctgccctgcggggtcttggggcggggggccgtggcccggcccaggcccgagctgccggggtgtccccgccgcgtccccgcccggctgaccccgccctgcagccgccggctattttgggcgcgttggcggcggcgggatcgctgacagtcgcggatcctgtgacacctccggg

SEQ ID NO: 9860 - DNA, 267 bp, Homo sapiens
  source 1..267: mol_type = other DNA
ggcatacacctaagatatgtgcatcttttctgtgtgccccttttggtgggggttctgagcatcactaagacagggctttattaaagaaacagaagacttgagagccatctcctctctctcttggccttggtggctttgccagggcctcctgccctgcggggtcttggggcggggggccgtggcccggcccaggcccgagctgccggggtgtccccgccgcgtccccgcccggctgaccccgccctgcagccgccggctattttgggc

SEQ ID NO: 9861 - DNA, 533 bp, Homo sapiens
  source 1..533: mol_type = other DNA
cacacatattcacagcatctgtggatggcattgactgatgcactaagaaaactttaaatagtttttcctcggtttacatttaaaagcccctttgaagacagagaatgtgtcttctaacgctttgttgtgctcaattcagcattctgtataaaataaaaattaaagccataagtctttgagtccctaatttgggtggtctatactgatttccagataagaaatgtaaatggaattcattacctaaccagggcatgtaattcatttatcacagggtatcaataggcaaataattgttctatgtgataaattcagcaagaattgtagctctccactgaattgcaggggttcttgaaaatggctacatattcaaaatttcagtgtataccaggaagataattcaattcaatctctggcttacccaaagaatcttggagttactgccaatccccagggtctaataaaaatatctttaggttgcttataaaactctccagtaaataattgttagagacctgtcattgatagcagttgct

SEQ ID NO: 9862 - DNA, 529 bp, Homo sapiens
  source 1..529: mol_type = other DNA
aaaggaagcattgtttttaagtccttacgtgcttttaatccagccctttaaaaaggcacttaaatgtaccttttattgtttttccaggaaattagttcttaaatatcattatctataattaacataaactctaatctaatattttcgtggacgtccccgccgcgccccaggggatgttctattttcaaagcccctaggggactggagagggggtgacattgccccccagaacgccgagcgcgcgaggcgcgtactcaccagccgccgcggtcgcttctttccaatgcgcggaactcggcgctcgcggcacctggcactcgtgggccgagctcttcctgaggcgcctgcgcagtggcaggcgccgcgccgcggggcacagccccaacgtccctatctgcgccgctcggggcgctccgagtgtgcgcagctgccaggcgagcgtctaaggcgccagctcagggctggctgggaccgggcagcagagtctcttggattggatgctagaaccagcgttgaatgtaactttctt

SEQ ID NO: 9863 - DNA, 457 bp, Homo sapiens
  source 1..457: mol_type = other DNA
acatgtgattaatattcttaatttatttgtactttttatttcatggacaattaaattcaatagtgatttagcaagtacttctataccaagttctgtttggcactacagataaaaagtgttagcgaatgttggaaagtttagttacattattctattaaataaccttccaattggggaactggctgaagcttctccagacttgtgccggaccttggtgcagccaaagttgctttctccgcggccacctaagctgccaggttggcagaaggccatcggcttggcaattgcctgaggccttccaaagaaagttacattcaacgctggttctagcatccaatccaagagactctgctgcccggtcccagccagccctgagctggcgccttagacgctcgcctggcagctgcgcacactcggagcgccccgagcggcgcagatagggacgttggggctgtgc

SEQ ID NO: 9864 - DNA, 263 bp, Homo sapiens
  source 1..263: mol_type = other DNA
tgaaggctttctgaaagagtaatcaggcctgatgtttgtagttttaatgtttactttgcaaacaaaggtagaaacagagtctggagctcggatgccaccaccagagagggtggctgttcagcctctgaacctttggtttaatattcttttgtgccccatcgccaattcgtgacaagactgttgggcagcgcccgcccctgcccccgctgattgacaggccgtgcagctactcctgggagcctggctttcgggggcaacccagg

SEQ ID NO: 9865 - DNA, 370 bp, Homo sapiens
  source 1..370: mol_type = other DNA
agttgctttattccgtaaagcagagctggttgaacccttctgtcctcaggtctgatggctgcaaacaaagctgtgaagcccgcgcagggcaccctcagcggcctgggctgggccgggcgcagggctccagccagagggcgccagcgcccaccaagcgcagaagcccgggaggaccatccaggggctccccgacatttcgggtcagacatctggtaagaagagtcccgaggagcctcttcccgctgaggccgggactcctgcagccaggctcccacgccaggtgcccggaggctcctgcgccctcccgggcacctgaagtggatgagtcggagctggggacgcgcccatctccgccggctcctgcgagagc

SEQ ID NO: 9866 - DNA, 290 bp, Homo sapiens
  source 1..290: mol_type = other DNA
atgataaaataaaaaacaattggaaatttttcctttggtcactcctgtttgattgatttatttattaaacaagtatcatatctgacaagctctgagattcagcccatgcccgggatgcattaggatgcctctgagtggcacagagcataacagaagccaagcaatttgcaaaatgcctcaacttcctgcttcctgctttttgcaaacatactaacgctgcttgaattgatttagtctgagttcagatttagcacataatcatgttcaatgtcattgccatgagcgagccg

SEQ ID NO: 9867 - DNA, 353 bp, Homo sapiens
  source 1..353: mol_type = other DNA
tatttttacatattttaaagatagttagaagagaagaggcaagtttttgctcaacttaagaatgccctttcagacaattctaacaaatggcaattatctaaattcaattctgaaattgtgtttatgttaatgcagattaatcagagagaagagccaacgtctcgtctacctttttttgttgaaaacaaacaaaacgtgattgtatgtcaactttggaaaaaaacaatcgtaatattgttatagttgctttattccgtaaagcagagctggttgaacccttctgtcctcaggtctgatggctgcaaacaaagctgtgaagcccgcgcagggcaccctcagcggcctgggctggg

SEQ ID NO: 9868 - DNA, 496 bp, Homo sapiens
  source 1..496: mol_type = other DNA
cagattacgtttttaaaaaggtcatcctcatgaaaaggaaaatgattcgcctggcctccaccgccacctctgccaggcgggcatggaaggggcgacctctccgatgcgcactgccgggcgcgaagccgcccgcgcaccctcccccagcgcggcgcgtgccactggcccgggaggcccaggcgtgggcagccgggtacctagctcggccacggtagccgcgcagcctcctcctcctccgggacggacattcagcagtagcgcaagacgcactccttctcgccgctgcgctgcaccgcgccgcggcggccgcttccctgccagggcggccccttttcaaccggcgagtggccgggtgaggatcggctcggccgggtggacccgcaaccttcctagcagtcccagctggagtggtccagctgcactgggcaatgtagtccgccgggctcattggccggccgcgggtccctctgcggctccgcccccggcctccatgcgg

SEQ ID NO: 9869 - DNA, 531 bp, Homo sapiens
  source 1..531: mol_type = other DNA
ttattgacttctcagaatcctgcaaggtaaacagtatacagattacgtttttaaaaaggtcatcctcatgaaaaggaaaatgattcgcctggcctccaccgccacctctgccaggcgggcatggaaggggcgacctctccgatgcgcactgccgggcgcgaagccgcccgcgcaccctcccccagcgcggcgcgtgccactggcccgggaggcccaggcgtgggcagccgggtacctagctcggccacggtagccgcgcagcctcctcctcctccgggacggacattcagcagtagcgcaagacgcactccttctcgccgctgcgctgcaccgcgccgcggcggccgcttccctgccagggcggccccttttcaaccggcgagtggccgggtgaggatcggctcggccgggtggacccgcaaccttcctagcagtcccagctggagtggtccagctgcactgggcaatgtagtccgccgggctcattggccggccgcgggtccctctgcggctccgcccccggcctccatg

SEQ ID NO: 9870 - DNA, 285 bp, Homo sapiens
  source 1..285: mol_type = other DNA
agcaatttgtacaatactttggtgttaactccaatttggatacgaattactcattttcacaaacttaaattggattacactttatcttttacacatttggaacttaacttcgatgaagtaaaaatacgaaaagttaatctttcgcaaaattttgcacaggatattgttgttaaagcattgtctcctctgacagaagcagaaaagtgtgaaaccgcatggaggccgggggcggagccgcagagggacccgcggccggccaatgagcccggcggactacattgccca

SEQ ID NO: 9871 - DNA, 467 bp, Homo sapiens
  source 1..467: mol_type = other DNA
tatttgtatgtaatgacatttcgaaacgtggatccgatgtgtctaactttgtaatgtagacatatcctggaaacttctagtttgcctgcacttttccattccaaatggaggcctcaaagggttatcctgttaagattttagtatcttgaaggaatgttgattccttcaaaattgggaaatatgtaccagttgctatatactttcacacgttattttaacctcataacaactcttatcaattcagatgatcgacggagcacccgtgccccgcagcagcacccagggccctcctaccgtcgggaacgccactggctagtaccttgcctggcccccaccgcagccctgtgtcaggccgtcacacggcggcctccagagaagctccttgggcccttaggcgttaggccaaccccaggcctcggctggccccgcccactctccgcggccggaagtggcggcgccgagtgagg

SEQ ID NO: 9872 - DNA, 515 bp, Homo sapiens
  source 1..515: mol_type = other DNA
ttgaaggaatgttgattccttcaaaattgggaaatatgtaccagttgctatatactttcacacgttattttaacctcataacaactcttatcaattcagatgatcgacggagcacccgtgccccgcagcagcacccagggccctcctaccgtcgggaacgccactggctagtaccttgcctggcccccaccgcagccctgtgtcaggccgtcacacggcggcctccagagaagctccttgggcccttaggcgttaggccaaccccaggcctcggctggccccgcccactctccgcggccggaagtggcggcgccgagtgaggcccggaagcgcgacctcgggcgctaccgggtcttaccagtccgtggcgggagtcccggaggaccctcgacgggggagttgccgagaaaaggcctcgccggcattcttccccgccttcaggcggcgcggaggatttcgaggccctgaggcgcggcccttaatttccggaagtgggggccgcgccgcgccgtcaa

SEQ ID NO: 9873 - DNA, 317 bp, Homo sapiens
  source 1..317: mol_type = other DNA
ctttgtcctagctcatttttaaaaaattaagcaaaatcagaaaacagagaacactgtcttcctcatcatctcctggagcttgtaagagaaatttctgtcaccaaaaacgaaaagttcgggcttttattcatcataaatggcagcttgccacctttaaaaggcacacgatatgtgttaacaaatcacaaattacttttgatccaaatgagattcagagatctgagcatctgaggcaattccctcacagaggaattctgctggccctgcagaaagtggtgagacagcgggcatgaaagtgctttcccctccccagatat

SEQ ID NO: 9874 - DNA, 469 bp, Homo sapiens
  source 1..469: mol_type = other DNA
acaaacgatttaaaaatataaaattttaataacaccacataaatttcaaactacgaagttttaaatgagtgtgtttttaatttattagaaagtggattgattaaaccccaaataactctgtgttacactgagctatgaaacgtccagggagaaatgacaccagcacagtggcaggccttccaatctggagcacggtccacacaacttccgaattggtgttcagtgtaaaaatgcgcagggcattgccaactatagatgctcggagtaattcagtgtattcagagaacactgagcacgacaccacccaggcattgcctggctctctccgcggcgggctaagttaaccgcgggtcgctcgagcaggctagcgtcgggagccgccgctgctagtgagaggccggggccacacacgctcctccccggtacctcctccagcatcaccaggggaggagagggtcggggccaggcc

SEQ ID NO: 9875 - DNA, 419 bp, Homo sapiens
  source 1..419: mol_type = other DNA
tcttcacctttgtcttaaggtcaaaagaagacgttagagatgtctttgagttccatttaaattaaaaataaaatctattgttaggtttaaatgagtcactgcttcattaagctatcaatattagataacacatattgaatgaatgtttcttcacatgtatttgcattacaaactgatttaaaaatataaaattttaataacaccacataaatttcaaactacgaagttttaaatgagtgtgtttttaatttattagaaagtggattgattaaaccccaaataactctgtgttacactgagctatgaaacgtccagggagaaatgacaccagcacagtggcaggccttccaatctggagcacggtccacacaacttccgaattggtgttcagtgtaaaaatgcgcagggcattgccaact

SEQ ID NO: 9876 - DNA, 558 bp, Homo sapiens
  source 1..558: mol_type = other DNA
gtgtacccggccacatataattggtgggactaaagcatcagttcctacagtctgactccagagtccatgaggaattccctgaagatactcttgggactacctgcatgggactcacccgaagcacttcagtttcctcttttgtaaaatgaggatcagtgaggtcacttccagttcaaaaatgagctgactataattcatctttaacccagcaacctggatgcagcctgccatctttaaatatccatgctattgagcggtattttaagtaccactaaatttatagtttgatacacaaatactcacagagtttccctggaaacctaggagaagtttgaggtacagccctcccgcgggggaggactaagcaatctgctttcttggcactgctaaagacaaagaattcatcgtctaatttagtggtcatcttttaaaagttgaaaccagatttctgatttttttctttggagaaagaaaagtgagaactaggtggccaaacaagtctgtccacttggtggaggacttcccatgggcgtgagggaaatcgcagtttttaaaaca

SEQ ID NO: 9877 - DNA, 630 bp, Homo sapiens
  source 1..630: mol_type = other DNA
gtttaagcaatctttcttgacctaaaggttaaaaatatgttcctatattttcttttttgaagtttatattttcatatttaaatttttaatctatctagaatttatttttgtcaggtgtacatttaatgtatttcctcatatggaaatgcaattattcccacattattatgaaagaatacataaaagccctgcatatgcttgcatctatttggagtctatagattcattttatctttatttttggaactattacactctaattactgtaactttaccgaattgaaccatttgtcagcttggcaagttccactgaaaaccctgttagattttttactagaatgacaatgaatttatagattaatattaaaacaatctattaatatttcatacatatgtacatatagagagagaatttttatgtccttcaataattgctttataacatttccataaaatttgaatttatattttattagaattaaataataataattttataaattatttttatttttattgttaagaatggctatggccctataggaatgttattagttcttatagcttaagcatttaaggtaaacttagtgttcctcgaaagagtcaatgatgttatctttgacaaccttt

SEQ ID NO: 9878 - DNA, 387 bp, Homo sapiens
  source 1..387: mol_type = other DNA
gctgccttgcagcagcttccaagtgtgctgctgttggaggactgactgtcaccctgctgaatcatagagccctggtcaccatcttgaaattcttaattttcaaatgagtggcatcacattttcattttacatgaaaccccataaataatgtagagggtcctaaactctaaggcaaaatggcctgagggctttggagtcagaagatcagactttccaaagaaatatgacatctggactggggccagaatatgctccagctcagtggaagaagatgaggacattcttgacttttacagagttttccagtggccagaggacaagtttcctgtttcctctagggagcctggagagaggcatcatgtggagaggatctcttatttatccgtc

SEQ ID NO: 9879 - DNA, 585 bp, Homo sapiens
  source 1..585: mol_type = other DNA
atcaaactttctcatcttctcctgtgagatgtaaaagaaacattaacttagcaatgatgtaaccgttctgtgttgagctacccaatatggtagcccctggccacatgtggcccctgagcactgtgactgagcaactgaattttaaatttaatttaattttaactgtaattgaaatttagatagccatattagacagaacaattctaacattttgtgatttttttgatgcaaaataacctgggtataagtgattaatcttgtgaccaggtctatgtactgagttttatctaaattatttgagataaccataaactcgaggacatctttttgctaattatatctactatgaaaaaggaaattttctggattgattcattattatttatatgcttaaacactcaaattatatcctggtattaatgtttttctttcctgaaatgaaaaggaaacctcagtgaaatataaaagactgatgttaaatgcacctaattgcaatgttaagcagagagctctagagcagttttctagtaagtttgtaatgatggaaatttactacatctgcaatgggagcagaagtcatgatgt

SEQ ID NO: 9880 - DNA, 441 bp, Homo sapiens
  source 1..441: mol_type = other DNA
ggttttataatgattttaaaatttttattctcacactattttattttatgcattaacatcaaaagaaaattaataaattaattgaattcagagacatcctttgctttctttttgagaattaacatattattatccccttcattattccataacagaattacaaattgctaatttagacgtggttgttagtagctcattaccttgaccaaaagtaatttatgagccaatgtggctaaagtttcatagttttcaaactggatgactccttggaaagaaaacaaatctttactaaagaagttaaaaagtagctagttgattctttagtcttaaataaaaaagttggaaaaggaaaaacagtatctacccttatattatgcatgaagggctgcattccttcagtagggcaaaagtgttctctacctgcacaggcagtaatgcgtg

SEQ ID NO: 9881 - DNA, 480 bp, Homo sapiens
  source 1..480: mol_type = other DNA
aggataacagctgctctcttacattcagaagtgtgtgagaatattccagttctccttctgaagcagaatactattggaaatcaactcaaaaatttttagcattattttttgggggaataatccgattcaaaactcttgatttttaaattaggaaaatgcatcttttgatacatttcaaggagttcaaaagtcccgggttttaaatccttttagtttggatttccttaattgcattcataagcccatattaaaattaaaatataaaaaattaaaatctttgccccatattaaagaatcaatatatatgttttgaactctccactaagtgctctgtggtctattcatctcgatgaaataatttagttggaattatctcggaaaaaataagtaaacagcgaacgccaaggggcaccctccctcccgggtgacatcacaaagggccggtcccccgccccttcggcgccaccacgtgtgtccctg

SEQ ID NO: 9882 - DNA, 365 bp, Homo sapiens
  source 1..365: mol_type = other DNA
tttgaaaaaatgcctggcagtatttcaaatcatgatgccttttaacaactcaaattatactttaaaaagaaaaaaagcaaattataaagtttaaaggaatctgtgaaacagaatttatttgatgccgtgaatcaagtgcgctcgccggctgcttcgctgcagaaagtaactccgcgtcgccgccgcggaaagtggggcaactgagcctccggggggagagcgagcccaagctcctctgcaccgcttcctcatccgctcgctgcacctggacgcggtcggcgcgcgacccccggccgtgacgtcaccgcacctggcagcagccgtggggaccggggggagaacgagggcgttctcgcgagatttgc

SEQ ID NO: 9883 - DNA, 577 bp, Homo sapiens
  source 1..577: mol_type = other DNA
taaaggaatctgtgaaacagaatttatttgatgccgtgaatcaagtgcgctcgccggctgcttcgctgcagaaagtaactccgcgtcgccgccgcggaaagtggggcaactgagcctccggggggagagcgagcccaagctcctctgcaccgcttcctcatccgctcgctgcacctggacgcggtcggcgcgcgacccccggccgtgacgtcaccgcacctggcagcagccgtggggaccggggggagaacgagggcgttctcgcgagatttgcgggcgggctccgaggctaggcgggcgctcggggttggagccgagggtctgggcaaaccggtgggtccctccccactgcgggagcggccagggtgggaaaaccgcggtcgggcgggcggggtagggccctcccgccgccgtggctcctggggaggccaggggtgaggagctgtcgccgcctttgcctctgcctcgagggccgcgctgaagagactgggcgccgcgggcggatggaggcgactcttcgccccgcctgagctcaggaggggctagcgcggagcgcgggtcccgcctccagccgcgg

SEQ ID NO: 9884 - DNA, 407 bp, Homo sapiens
  source 1..407: mol_type = other DNA
ctgggaactaattaaggggtgcctttcagtatattggagaacttcgtgaagattttgaaaaatgccacactctagataaatatagatatagcttttcaaacgaagttcataaatacaaaaaaaaagagtttttgagtgtttcaaatttaaaaaaagatatgtcactgaccatgttgctttttggtaagaatagtaagaagtaatcctttcttatggttgtacggtcactcagggacccagtctcatggagtaactactattctgaattgctggcaccaatgctaccttgtgtttgaggaatgattagggaactttaggctcaggctgatttgtaagaacgtctgtcacctggtgtgaccactccagtgcattgcccctcccactgcaggagctactcccatgcactg

SEQ ID NO: 9885 - DNA, 350 bp, Homo sapiens
  source 1..350: mol_type = other DNA
ctgtgttactcacttttgtatgcccatagtgcagagcatggtgccttgtacatagagtatgttcggtaaatatgtgcaataaaaagtcctttgattacacaatggcttgatattgatgagccattgacctaaatggagctgacccatttcctttctcctggaaatatctaaatgaaccgtgtgcattccccacaagtggacacagtgtcttctgtgtctgaaaacagaaatctctctgttgctttgatgcaccagagtgcagcagatgcaagcagagtctcatgcaatcatctgagacaaacaagtgactcactttaatggatttgcttcaacagacttgcacaagcctt

SEQ ID NO: 9886 - DNA, 281 bp, Homo sapiens
  source 1..281: mol_type = other DNA
ttagatttttatttagagtttgaagttgagaaggaactcgaaatcttagttttaacgattggaatttttatttttgtccacatttggaaatggatatgtcctttacatgtcttctagacgaaagataatgactatcaatttagcagtctgtgcaagattattcatttaatatttattgagtcttttctgtagatgctggcacaatttgaaataatatgtgatacctcagatgtctcaaagtgtagattcagaacttatggaagtctgattaaaataaacat

SEQ ID NO: 9887 - DNA, 308 bp, Homo sapiens
  source 1..308: mol_type = other DNA
ggagtctccgcagccctcagctgcagcggactggtctgtggatctctgctccttttcttcgctgaaaagcagaattcgaggggcgagaaggctgtctcctggagccctggggctgtctggctcttcaattcactccagcggggagggaagagctgtgggcgctccacccctgctcatgcggtgagagccagcgcgggaagggcgcggggagaccggggagggggtgggccccgcggcgcccgccgcccgcccccacgcgcgctgtcggtgctgcaacttgctgcagcggcgcttacacatgtcacatg

SEQ ID NO: 9888 - DNA, 272 bp, Homo sapiens
  source 1..272: mol_type = other DNA
gaaatcagctttaggaactttctgtcctttaatctcaagaatacagaaagtgaatgtaacaatgcctggagtctccgcagccctcagctgcagcggactggtctgtggatctctgctccttttcttcgctgaaaagcagaattcgaggggcgagaaggctgtctcctggagccctggggctgtctggctcttcaattcactccagcggggagggaagagctgtgggcgctccacccctgctcatgcggtgagagccagcgcgggaagggcgc

SEQ ID NO: 9889 - DNA, 289 bp, Homo sapiens
  source 1..289: mol_type = other DNA
gaagctgagatcctcatttttcaggcaaaactacctggtgtgtctggagtttctggaattccactcacaggaaatcagctttaggaactttctgtcctttaatctcaagaatacagaaagtgaatgtaacaatgcctggagtctccgcagccctcagctgcagcggactggtctgtggatctctgctccttttcttcgctgaaaagcagaattcgaggggcgagaaggctgtctcctggagccctggggctgtctggctcttcaattcactccagcggggagggaagag

SEQ ID NO: 9890 - DNA, 623 bp, Homo sapiens
  source 1..623: mol_type = other DNA
aaattttatttaaatgtatttatataacaagaaaatgaatatggatttactggaaaattaatacagaagtttaaaagataaatttacttttatgtttcaatatcactttatagtgatgttgtcatttaaaatagcagaagatatattatctgagcatctaaacaccataactttctaaaattttagtatgtgttttgatcctcaatttataaaccaatgtgctataataattgaagaaattatagttcatgatgctattgtgctatatatagggcatgatgattgctgcaggaatgacataggtcattaggatatcatttgttcatatgttttgacagttaaagctctttttaaaccaatgaattgttcaagtatgtattatataccttttttattatagtattatggataaatgatacatatgtgggtatttggattgttaaaaagcaaacacatgtattgtgcaattgttttcatgttggtacatatatagttctgcatcacactatttaatagctgcatggtattgtacagtttacatatcacttgtgatttcaacaggaaattgttactggattccagtgaatgctgtggtcatgggaggcttgcccagacttgcccag

SEQ ID NO: 9891 - DNA, 310 bp, Homo sapiens
  source 1..310: mol_type = other DNA
tacaatacagtgtaaatacaactgttatatgcactgggaaaccaaaaaaatcgtgtgacaggctttaagtatgtttgtacattattcatagaaaaagtattattctaataacattttgaaatatttagccaaaaagtagaaaaactgggactcaattacctcaatttagacctctatgtgggcacaagagtgagtaggactcctggagaaacacagacactaatgtccaaggctgcacttgacttcactagtgcccgcggctaagggcagatcttttaggacatcgggcatttcggctttaaagggaggg

SEQ ID NO: 9892 - DNA, 350 bp, Homo sapiens
  source 1..350: mol_type = other DNA
aaattatatttgatattagcataagtacatcattaaacacaaaattatattggcagaaaatcatcaagtggtttaaaactttaccttctttctagataaaactgagaacgagttagtaatgtaagcttttatgcttaacactgtttacactcttaatcctgtttacacacagtgacctctgccaacgggaacagttcagggtgcttaagtggccaaagaagccttctttccagaagtacctccgaattgccagggacttcgcacgtcctacgagggcggctgcacttctgcgtcccccccgccagcgtcagccggacgactctgggggcgtaggccgacaccgccctccc

SEQ ID NO: 9893 - DNA, 500 bp, Homo sapiens
  source 1..500: mol_type = other DNA
cacttgactatctataaggatgatagattagttattttactctcttcctatttaagactaaaagatatatcacaactcatttgtgtatttccatattttcacttgcgtaaatcagagtaaggagtcaataagtacataaaatacagtcctatatattccccattgctcatgggataatatttagcatctagcatcctcggtactgaatgtgaatgttcttggcctaaggcaaaaagtttcactgccttatttatgttttataatacttttataaccactattatatcacatatttgtttttatataatcattcacttatatttatgttttcccaactagattcttaattttctcaagaagttaacagaccaattatatatattgctttagattcatgccttctaatgtctactgaattaagttaaacatgattctagaggcctgtgcaatagattgttgtcaacatttagaagcataattttccccaatgggtggggcat

SEQ ID NO: 9894 - DNA, 396 bp, Homo sapiens
  source 1..396: mol_type = other DNA
aaatttttagtcagtgctgcattgtaacactgccaaaggaaaatggcactgagcaccaagtttgtttttcagttgtgcccaagtgagtctccagagttggtgaaatctcaaagaaccaaggtatgacggatattaatccttggcttgaattcactccttttcgctttgaaaacaactgtgaatagaaaaaacatgtctttaacccatgctggcatgacactggcagcgcactgcaataattagctctttaaattgaactacattaattcaggcattcttgtttgaatgcgaagtacggcgcaggtatgcgagacattttctttcctcatcaactggtggtaatgagaaaaagagaactctgcttttcacaagggaaaacgtgcaagattttctccg

SEQ ID NO: 9895 - DNA, 801 bp, Homo sapiens
  source 1..801: mol_type = other DNA
ttgaactcaaaattaactataattttaaaatgtgcctattgtgtagacattgatctgtgattatacattttgtcacattgatcaataaagctaaatataaaaatgaaaatgcaatctatatgccaatatgagcatgcagaaatgtctggtatactacttgtgatttattaatttatacttctttatttatataaactcaatatttaagattattgtattttagaatcagaggaaatctgaaaaatgattgacatcttccatagatgaaagaaccaaataatgataatttagcttggagatcaatattatctttaattttatacaaccagaaaatacaagtaaatacagcacatctttgaatatagaaattctgaaagtcactgtggccttgtatttacaaacattaaagataaaattattatccaaaacagtaatgtccaatagattattaataaacattttagatagctgtaaaaaacattgtgttctctagagttcataaaaattatgagcttaatttcaatccaacagaaataattctgaaaactctaatgttgtgatgctaataattgggctaagaattttcaaactattgactggcaaaaacatggataaattgtaatatatgaacttcaaagaataaatgcacaattacaaaacttgatatagcaatttatttttaaaagccatttgaggaatcaccaaataatttcaaaatcataatgaaatttgagactactggtatgacaaatcctgtttcagccttgttgataaaacaggaaataggtgtttcatatatac

SEQ ID NO: 9896 - DNA, 528 bp, Homo sapiens
  source 1..528: mol_type = other DNA
taagcaagatacaagaaaaatattttttattaaataataatgtattctttcttacaaagaacaaagacttaattcataattttaaaaagagcttttcagaataataagacaattcaaaaacatctgattacacctagtttcagagtaaattttctattctcatatgttatttctcatcatgtgactcaaatgatttctggaatttttagtgttttctggacaaatctctattagaattctcccaaattgcagaagttttccttttaaccaggaaggtcttaggaaaatgtatgtgacacattatagaacagttaccaaactccataagattgtgtagtttatatgtttggtgattctatgtatcctcagcatctagaatcatcttaagacctcaataaataattactgaatgaatttaataaagttgagaagtttctggaccagcaagtccaactaatctttgcagttagttcccagggtaaaagtttaaaacataatcatgatttgtaatctttacacatttaaaag

SEQ ID NO: 9897 - DNA, 400 bp, Homo sapiens
  source 1..400: mol_type = other DNA
cacaaattaggagacaataatttatattgctgctttttttttttgacagagtctcaccctgacgcccaggctggagagcagtggcgcgctcagcctctgggagtagctgggactacaggggcccattgctttttaaattcactagtttattcattatgtatagctatttaaaaaagagaaaaactacggtgaaaccccgttactgcagtgagtcgcgatcgcgccactgaattaaattctcatgcttctcagttattaaaaagataattatatactatggatatcataaccctttatatcccaagataaaagaaaagtaatgtcctgcgggataaaccccagtttctaaaagagaagtataaaaagatgtgctctccacctttctctcttcaatcatgaa

SEQ ID NO: 9898 - DNA, 597 bp, Homo sapiens
  source 1..597: mol_type = other DNA
atccaaaataatagtttttgcaagcatgcaatttagatcagatatgaaattttcagttccataaacagaattaaaacattgaacctgaaattttgaaatcagatgactatagaaaatttatgaatcatacaaagacttgaactctatctcttttaaaaatacaaaaaatcacctctactgcactccagcctgggtgacagagccagacaaaaaaaaaaaaaaaagacatatagaatatttctcacatttttagtgaatccagaatttactgattatttaaataattgcatattatattaattgaaataaagttatttaatctccctggttctcattgttttatcagcaaaacaaaactgatctcaatggaaactttttctctaaaatcttatgattcaggcattcaacaattttatactaaggcattagaatacttaatattacatataacatagaatagaggagatgattactataacacctataaataaaatatcttaaaaactgtgttgttttcatgaaagtctagttaaggttacacagcaggttttacttttatgagaaaaatttaataatactttttgagttcatgaaagg

SEQ ID NO: 9899 - DNA, 392 bp, Homo sapiens
  source 1..392: mol_type = other DNA
cctccaggcactaaacaacttggtggaggaagatggaaatatgtgtgcactgcttccttcctgccctctatttataaaatataacttccaagcatttaagggttattacctaaatgtagaatcttcctgatgatggaaacttgggactgtccatcaccattatttatttttaaagctgctgaaaagtgtaaggcttgattttgcctttcaaaaaaggcacaccccaatctgggcaaaattgtcgggtggttgttggaaaaagcagctttccatataaaaggaagctttaattaatatatatttctatctctaatatacatatattggagctagagctctagcttcactccacagaaggcgaagatacaatatttattccttgtctcctggga

SEQ ID NO: 9900 - DNA, 427 bp, Homo sapiens
  source 1..427: mol_type = other DNA
gtccatccctgttcgcgcagagctgcacacagcagtcctggaccaggcgcagagatcctcttctgggcgtctgttccggctatgagaagctctctattcatttcatgataaaattcagaatccatggtgcgatgttttcctttttaaaaactatatgaatcatcttattaagaaaaattatacaaaaaaaagaagatgcactaaaatatttttcactatctctttgaagacattctgcttaaaccttttcaattgtcgtgtgcgtacgttgcttccaacatctgaaaaaacatggaatccagcacaaactgaggtgtatttaagtttccaaaggttttaggtaaaatgaccagaaaatattagaaatggtcatcaacggtggctagcttttttgttctatggtgacagagataaagttaaaaaaaaa

SEQ ID NO: 9901 - DNA, 355 bp, Homo sapiens
  source 1..355: mol_type = other DNA
ttgtcgtgtgcgtacgttgcttccaacatctgaaaaaacatggaatccagcacaaactgaggtgtatttaagtttccaaaggttttaggtaaaatgaccagaaaatattagaaatggtcatcaacggtggctagcttttttgttctatggtgacagagataaagttaaaaaaaaatttaaaatctacatagaaaataggggactgatggcccctggtttctcattatgagatgtgtcattttcgatatagaagttataaaatgtatatattatattaatcaccctgaatttggatctgcagtgacccagaggtgcttatataactatatgatcccccatttccaattatagatgg

SEQ ID NO: 9902 - DNA, 347 bp, Homo sapiens
  source 1..347: mol_type = other DNA
tacaaaaatttttcagcttgtcacgggttgccaaactgtgatatacagcagagttgatgtaaacttccacactttctagaggatagttttactactgtcatcagagtttgaaggtggagactcagcgtcttctggtcaggtatcgccagacgtgttgaccttcctacaccacctcctcttgcctttctcagcaagacttgtttagacccatacccctacagtgggtatatgaataactcttacttaaaatttggagaaaaatgtaagacacttttcctttggtcattactaacgaggaaaaagcctgagtggcttatgttaatcattaaacttacccatggtcaggt

SEQ ID NO: 9903 - DNA, 342 bp, Homo sapiens
  source 1..342: mol_type = other DNA
aggaactattctcaaggacctgagtccaagttcatcttacaaaacaccaagttgcttggtagcatgcagggttggaacattatttattccttgtagatattcaacaaaagaattgttaaattcaattaaataggatatatcttattattaaatatttttttcattttttgttttacttcaaactttttcttcctcatgaaccattaaaatagagcagctgtacatatgttcataaatacatgatattgacccatagcatagcagctctgctcagcttctaacaaaggactggtcttcatgaatttctgagaaattgggggcgaaatccaaaatggtgtcacg

SEQ ID NO: 9904 - DNA, 258 bp, Homo sapiens
  source 1..258: mol_type = other DNA
ttcagtaagctaagttacttaaaaggatcttgtgatctttttataagaccagaaagcctttaatttacctgttattaagtaagatggagggtaaacacagattttttttttcacctaaggtactgtagttctatattctatcctatagattctcaaaatcatttggatatatcttaaaaatgatttgctcaatgaccagcctctgtgagccaatcccggatggtacgtttcccgccaccgcggggcgcgcagcggaaa

SEQ ID NO: 9905 - DNA, 406 bp, Homo sapiens
  source 1..406: mol_type = other DNA
gcaacatgtcactgaataggcctgtctgacaaataatgaagaaggctttttaaaagcaaagccaacttgatttgttaattgatcatctcatggtaaaatacgagcaagtcgggaggtggaacccacccccgcaccctgcctccaatagattgtatgtgtgggtcgctgaacgcccttcccgagggacttcggaaatggccccctgagaggctttgcagctaccagggactgcgagggtctgcgtcctgggtggaaggaagcggcgtcagtcaacttcctcgcagcggcggcagcggcgcgggctgcagcggagcgcgcgggtctgcgcatcccgcccccgggtcgggaaggggcggagctgggcgtcacccgcccccggcggtctcctcctcccggccgctccccc

SEQ ID NO: 9906 - DNA, 225 bp, Homo sapiens
  source 1..225: mol_type = other DNA
gagatgattgcattagttcattgaccatgggtctaccgaccatttacacttctcgttggcggggcgcagtgaggtccagagaaggaacgtccctctctcccacgtctcatcctccgggagcggggcggggcgaagcggaagaggagccgcgctccaaggccgcggcccacttaccgcgagaacgcggagtcctgcggatggcgcacgcgcaaacctcctgtgatg

SEQ ID NO: 9907 - DNA, 717 bp, Homo sapiens
  source 1..717: mol_type = other DNA
taataaaaaatggaataggaattagttttttttgttcattacgttcattactggtaggattaaatccaatatttgcgaatataatttattaagaacaccttttgtccttccaggagtacttttaagacttaatattaaatagaaactttcagtgagaaagttcctcgaaagctcccctaggactgcaagttctcgataaatacttgagtacactgatcgtccgtgcagggcgctgtggccagccagaaggccggttcgcggcttccctgcttccgccgcacccgcgccgccctcagcccccggggccacagcccgcaaccccgggagcatccggctgcccggccacccccggggcgctcgctgcctccggggcctgcccttcccgcggaggaaggagcggagcgagaagctgggcccacttcctgtccgggcaggcctgggcgcccgcctcctccgcggcctgctttctccaccgcgagcggctgagcctcgggccccgagaatgcggccgggcgcggcgctggcgcgggacgaggaggagccgagccccgctcgccgcccccgtacgcctccgccccggtagcccgcgcgtgcccagcggctagagggttaagcccgcggggggcggggccaggcgcgccgagtgcgggccgcgggctgggcgggggctgggcgggggctgcggccgggggcggttacgggcggccgggggcgggc

SEQ ID NO: 9908 - DNA, 553 bp, Homo sapiens
  source 1..553: mol_type = other DNA
tctgctgtgaggacaattgtcattgatccagatataccaagatgatctcatctcaaattcttttacttcattacatctgcaaagagcctttttccaaataagatcaagttcacaggatctagggattttcttggggtccaacataaccccctttgcaattgatgaatccaggtgatggatactttcatattatattatgggcaatttgagtgacgcaaagaggatagcatatgcaaatagggttcccggatttagataaaatgcaggatacccacctaaatgtgaatttcaggtaaacgataaataatatttcagtataatctggtttcataccgtgtttggaacatagctataactaaaaaattgttgattgtttgcctgaaattcacatttacatggatgtcctatattttatttggcaaatgaaaaaaagtatctttaaaaagccagtttctgctgaaagagcaaaatctaggtgaaatgtattgtttaaactttgattaccaaccttgaaaaggaacatattaaccagtgtcttctgataagcagatca

SEQ ID NO: 9909 - DNA, 465 bp, Homo sapiens
  source 1..465: mol_type = other DNA
aatttaaagtcaatttaaactgtaatctcaggattcagcagtgagacgggatggtgccactgcactcatcctgtatttaaaaaaaaaataaggtcagtttaagtttcgcattaggcaaggttttaagtgctttccaactctggaattctaatcctgggcctgaagtttaaaactaggatcgacaccaggcaaacttggattttgacctgggacaactaagtcacttgacctcactgatccctccactgacagtggggacagtctgcgaatggagttaatttaaaaatcttgctccgtcaggcgggaggaaaccccagccctggctccaggacagggccgaaggcaggaacgggtccggctgccgccgggatgttgcagcacagggcctcctggctgcctggcctacaggccgcccggattcagccggagggcatggaccgggtggagtccggcgtttccaggagg

SEQ ID NO: 9910 - DNA, 514 bp, Homo sapiens
  source 1..514: mol_type = other DNA
tctgctgtgaggacaattgtcattgatccagatataccaagatgatctcatctcaaattcttttacttcattacatctgcaaagagcctttttccaaataagatcaagttcacaggatctagggatttctatatggacctatctttcttgggggccaacacccttttattattatgggcaatttgagtgacgcaaaaggatagcatatgcaaatagggtctctggatttgtcagataaaatacaggatacccacctaaatgtgaatttcagataaacaataaataatatttcagtataatctggtttcataccgtgtttggaacatagctataactaaaaaattgttgattgtttgcctgaaattcacatttacatggatgtcctatattttatttggcaaaaaaagcatctttaaaaagccagtttctgctgatttgattgccaaccttgaaaaggaacacattaaccagtgtcttctgataagcagatcttctttcagtgggagagaactat

SEQ ID NO: 9911 - DNA, 514 bp, Homo sapiens; identical to SEQ ID NO: 9910
  source 1..514: mol_type = other DNA

SEQ ID NO: 9912 - DNA, 569 bp, Homo sapiens
  source 1..569: mol_type = other DNA
tagttttgcaatttttctgttacataaataaggaaaaaaactaagtctgagatttgcttcaaatattgtcaataatttttgaagcactttccagatttatgtatatcagacaatttcctttagaaaagtagaaattacatatacgtgtattaagccctttctatgtccaggcactgtggttagccacggggacttggttaaccaccaggacttgaggcccacctcggggaatgcagctgaggtcttttgtctgcccagggcaaggacaactcagccatataaaattttgtgacattatttgtaatttagtctttttaaacaaatttagaaggcaattctgcagcctatttaacaagatcctccttaagcagtgttcacaggatacttggtccccagtgaccttctgaggcagccaaatagatatgaaatctttttgtgcatttatggatagccttgaaattaattgctgtcattttcttcctagcagatcatggaactcggagactaaagtggtgtgggagtggctgctcccaactagactccacccccttcagaaggcaggagttgtc

SEQ ID NO: 9913 - DNA, 505 bp, Homo sapiens
  source 1..505: mol_type = other DNA
cggtggctcacgcctgcaatcccagctactcgggaggctgagtcaggagaatcgcaaaataaataatgaaaaaaattaaaaatttaaaaattaaaaaacatttaaaaaagcatctaacttagatggccacatgcagcgcctcatgggagcgcagctactcgtatacccttgaccgaagaccggtcctcctctatcggggatggtcgtcctctcgaccgagcgcgcagcttcgggagggcgatcggggtgacagatgtcgcagcctcaactttacacttaggtcaagttgcttatcgtactagagcttcagcaggaaatttaactaaaatctaatttaaccagcatagcaaatatcatttattcccaaaatgctaaagtttgagataaacggacttgatttccggctgtttctatccagaatgcgctaaatactgcagtctccattggtgagtcccggagcctcgcccagctcccgcgcgctagagccgcctgctggtctcaccca

SEQ ID NO: 9914 - DNA, 560 bp, Homo sapiens
  source 1..560: mol_type = other DNA
ttgtaaactcagagaacagtccacaaagtgtcaaagggttactgctttattaattaaatttgtgttgcttacagcagtgtgagtttgcaattatgtaaatttaaaatcagggacctggattcttataaggatgatttaaggtaatgtctacaatatcacttatgacataaatcaatgtgttataaaattacgtgttgtccagtctttacaactacttgcaaaaactcttaagagttcaaaggaatgctaacaggcaatcagttgcgttttcattttatttttctgtaaaggtaacatgaaatttgctgtttaaccactttgaatacaattcagtggcattgattacttgttttttcaaatcagaaaaatgttttcacaacgattatctttaatttaatgtgtcttgatggttgatcgagccgatctgcaacgaggcgttaggggtccctgggcgctgtgctgccctcggcccagagctgcgcctggcggctcggccgcgcgagccagggcgaacaggacgcgggtaacttttcccagggaaagcggccggtcgtccccag

SEQ ID NO: 9915 - DNA, 604 bp, Homo sapiens
  source 1..604: mol_type = other DNA
gacctcgtgagccacccgcctcggcctcccaaagtgttgggattacaggcgtgggccaccatttttaatctctccagaatagaatggattagaaatttaaactctgtaaactcgttgaatgtttaaactttaaaaactcagtaaatgtttgctaaattaaagttataggctatgaagcctatcagttttgtagttaaaaagatttaaattgtgtaaaagcaaagtatcaccttatgaacaagtacattccggtgctcaaacctgagcggtgcctcgcgggcgccgtctccacggcacttgggtttcagggccatggaatcgcaagcccttttccaaaaactttagtcgttataacaactgtgactgttgagaatggcgcgggactctagccagaggctccgaggactttgtagcgactgtcccaacccacccctaaatttgggttgtaaaaatttttaagtgttcactcagcccaacacgcgggttgggcttgaggttcggcacccgggcagcctcaccccccgcgtcaggcgcgcgcacacagtaggtccgcgaccccctccactaggcagcccgcggggatgggtggccgggccgcccacac

SEQ ID NO: 9916 - DNA, 609 bp, Homo sapiens
  source 1..609: mol_type = other DNA
ttccggtgctcaaacctgagcggtgcctcgcgggcgccgtctccacggcacttgggtttcagggccatggaatcgcaagcccttttccaaaaactttagtcgttataacaactgtgactgttgagaatggcgcgggactctagccagaggctccgaggactttgtagcgactgtcccaacccacccctaaatttgggttgtaaaaatttttaagtgttcactcagcccaacacgcgggttgggcttgaggttcggcacccgggcagcctcaccccccgcgtcaggcgcgcgcacacagtaggtccgcgaccccctccactaggcagcccgcggggatgggtggccgggccgcccacacgggcagcaccggcactgcgcatgctcggcgcgtcggcgcaggtttccgcagctgagggggcagctccgcggcggcgtccggggtctccagtagggctgacgcggacgggcgccctccactccccgagtccccggcagccgccgccaccccagcgcgccccgatctggccccctgccccgcgaagatggctgccgtacgccgggcccgcagtagaactctgctaagctccgctacacccagcacccctcctc

SEQ ID NO: 9917 - DNA, 636 bp, Homo sapiens
  source 1..636: mol_type = other DNA
gtctgctcagcagagcctgctgggacgaaccagcagtactgttgttctagttcatttttctgtagaaatgatgaaaattgaatatactttgcgcaagttgctttaaaaaaaggagtcttgacaagtgtagtttttcaatcctagaagaggaaaacagagtttacttaagggctgtaaaatggttttttttttgttcttaacttttagggaaatattaaattaatgctcattcgcttagcaaatgttaatatcgagagaaaaatctaaaatgtaacatagttgttctgtaataaaattttctttattattcttcccttaatttaaaaacaaaataattatgtctatattgcctaggctttataacaatgtttttgatttttgaaaatatgaatcttatttgccaaggtttttaaaaagtagatctattccaattagttataacaaaatttgcaccatcagagacaatatcgttactgttcagggtatcatttcttcagtaacacaatgtttctttcctaaacatagaattttacttaaaatccatgaggatttagtcttgaaaatcaacattcagttggggaacagaaacttcgtgctctgcaaccactaggttgtagctgattagcttgtcattta

SEQ ID NO: 9918 - DNA, 372 bp, Homo sapiens
  source 1..372: mol_type = other DNA
aaaacatatgaactgaactgatttaggctgtacttagaagaaataattggtttgagcctcgctctgtcacccaggcttgactgcagtcaccatcttggccaggctggttttgaactcccaaccttacaaagtgtttagaacacttagaattagtgggacattattgctagggttaagtgtcttctctctcttgcacacatgagagagaactattaccatcacaagaagaaaaacatctgtacttccttatgaggttcttttcaatgtccattttagttcaaatgtcctcataacataattctgggaagaatcaggctggttaagtgactcccaggctgctcttacctatccagagcctagagcatctagatt

SEQ ID NO: 9919 - DNA, 318 bp, Homo sapiens
  source 1..318: mol_type = other DNA
tcgcgccactgcactccacagagcgatgaaggtctttaattatccaaaaacagcaaggatcttccgtttatgccgatcctcatttaacaatcctttagaataatttctagagtagaaagtaaatcctttgcaagggagttttaaccctttcagctttaacgatgaagtggatccccttcacccaaatgcggacagactcctgcgctattgcgcaggctctgcgttccggggccaaccccggcctaggctcttcccgcgattggctcccgggccgcatgacatattggctggccgcgccattgtgacgtcacggtcagc

SEQ ID NO: 9920 - DNA, 412 bp, Homo sapiens
  source 1..412: mol_type = other DNA
atgcttaacacatcatctgactaatgaagaataattagaacatttattttccatgatctatttttctattattgtagcttaatatcatgttaactttttaagcaataaaatttgtagtcaattataatcattgaattttttttctcatgcagacctctctgtgatcattattaaactctaaaatgagcctaataatgttagaaccacatgtgaggtgctgtagaaagtaccatatctggtagatacgtgctcctcttataaagaataggctatttataaccactatcttctcaaaagagagcagctggtcagtccccgccccctgcccccggctggctggagagacggagaggagggcgctcgctgctctgctcccgggccaaagcgcaggctcggcctgccttatccagtg

SEQ ID NO: 9921 - DNA, 469 bp, Homo sapiens
  source 1..469: mol_type = other DNA
aggtcattgctctgtcaacacatatttattaaacaatcgacagtagggaataatgatttacacatgttgacaaattgattcctcttaataaccaggtcaattttttggccaacactatacacatgtacactatgcacataattacgacatctataaaagatagaattaatctaattttatgcagatagactcgcagtcagtaagtgaagagttgaactgtttcactctctaagtgtgaggccctataatatggtgagttcgtcattgattcaaataatcaactttcccaagtttatctcttctgattaggaaaaaaaatgcatttttgcgtaaagcgaggccgaccgcacgcccccttctcgcgagcccccgcggttcccaccgggcttcaggcgagcgcaggatcgcgcccaggagcggcgagctagcggacgcaaagactgggcatgctccgcggcggcgcaggttt

SEQ ID NO: 9922 - DNA, 340 bp, Homo sapiens
  source 1..340: mol_type = other DNA
gccccaaagcgtaccttgcgcgccgggggcgccaggcgctacttgcccgctgctcacggctgccccagaagtgtgagctggccgcgcccggccctctggtcctcgggcaccggagtctgagagtctgcgagattctcatagagtttctgagccaccagcccggcccagatgttggcccctgacaactagctgtggctgccaggtgagcatcctccagcccggatgaccggggaggctccggcgtcaatcacaatgatgaatcatagctaaaatctggagccacggagttcacttttctatagaagacaaagctgagcatgctcagtggccaaggcaaagt

SEQ ID NO: 9923 - DNA, 381 bp, Homo sapiens
  source 1..381: mol_type = other DNA
cagacccctccttacggactgggaagaaaggaggtaaagttgaaaagaccaagtgtcctcttctccatttcaccggggaaacgctcctgtgcctagtcaaggtacaggagagtctatatggagagtctaatgcaaaaactagtttccgaccaaactttgccttggccactgagcatgctcagctttgtcttctatagaaaagtgaactccgtggctccagattttagctatgattcatcattgtgattgacgccggagcctccccggtcatccgggctggaggatgctcacctggcagccacagctagttgtcaggggccaacatctgggccgggctggtggctcagaaactctatgagaatctcgcagactctcagactc

SEQ ID NO: 9924 - DNA, 391 bp, Homo sapiens
  source 1..391: mol_type = other DNA
cgccggagcctccccggtcatccgggctggaggatgctcacctggcagccacagctagttgtcaggggccaacatctgggccgggctggtggctcagaaactctatgagaatctcgcagactctcagactccggtgcccgaggaccagagggccgggcgcggccagctcacacttctggggcagccgtgagcagcgggcaagtagcgcctggcgcccccggcgcgcaaggtacgctttggggcatcaaagttgttctgctaccgccagcagccggcccgcagcaggtcgccgggaaaacccggagcggagcatccctcgggccgggaaacgccctcggcgcgcacccactggcgcgcatgctcagtccgcgcggcggctgcgagtaggaag

SEQ ID NO: 9925 - DNA, 445 bp, Homo sapiens
  source 1..445: mol_type = other DNA
ggatgctcacctggcagccacagctagttgtcaggggccaacatctgggccgggctggtggctcagaaactctatgagaatctcgcagactctcagactccggtgcccgaggaccagagggccgggcgcggccagctcacacttctggggcagccgtgagcagcgggcaagtagcgcctggcgcccccggcgcgcaaggtacgctttggggcatcaaagttgttctgctaccgccagcagccggcccgcagcaggtcgccgggaaaacccggagcggagcatccctcgggccgggaaacgccctcggcgcgcacccactggcgcgcatgctcagtccgcgcggcggctgcgagtaggaagctccgcgcggcggcgggggcggcgacggcgactggcgggtgggtacagggacggggcaggggctcccgctccaggttccttgaag

SEQ ID NO: 9926 - DNA, 556 bp, Homo sapiens
  source 1..556: mol_type = other DNA
gtgttaaaaggatgttttaaacaggctgaagtattaaatcaccatagagagcagtcttagtttactctgattgctgcaaaacacagggagaactatttaccattaagttgcccaattaattttctttaaggcatgtaacattttctaaagaaatctgaaagtacttgttccactgaaaaaaatgagatttatcttctatatcataactttgctcaagaacaaaatccatttttgtgaaggaaaacacttttatttcatggtatttttaaacatcattttgtcaactctccatggaataaagttgacaacaccccttgaatatatatttgcatgtctttattaagcaacattttgaaaaatctacaaagtaatacaaacatctacagtactaggttgcaaattggaatttggaagcgctagatctgtattctagagtatattttattctgttgcaacagctattaatgaattctttgatcgttgtttatagggtttgaacatctataaatggaaacactagctaaccagtttcatgtcctgcaatatctaacatgta

SEQ ID NO: 9927 - DNA, 536 bp, Homo sapiens
  source 1..536: mol_type = other DNA
cagtgggcaagcaagcattaccgcctgagctcctcctcctggcagatcagcattagattttcataggagtgcaaaccctattgtgaactgcacatagattatgatgacttgtataattgttttattacatattataatgtaataacaatagaaataaagtgcatgataagtgtaatgcacttaaatcgtccatggaaaaatcattttccatgaaactggtccctggcaaaagatttggaacatgcaaatcctaagaaagtgggaaaaaaaaaattgataacgtttttaacattaactggagtgacagtttggtaattggctctctgagaaagcttcagcatattctgaaaattggcaggtagctccagagtgagctaattagttaggaatgacttttaatactcactacctttaaaatgaggaagatgagtcataatttattatttaaagtcctccttttataatgtgttgttgtgaaagatttgacaaataatgattgctcctttagggactaatttaatcaaagagtgtgacta

SEQ ID NO: 9928 - DNA, 678 bp, Homo sapiens
  source 1..678: mol_type = other DNA
atattcagaaatttagatcatattctagtgctaatagaatcacttatagcaattattttactcattatgtttccataatctcaggcttttgataacatcgaaaatgtgaagaggcataatctaggtttctaaaataatagcctttgatctatatctagtcctttggatacaacccaaagcacaaatgtagatattacagatttggagaaaaatcaatacttatgaagactccaatcaatttcacatatgaagttttaaggtttgtctcttggaatgaaattctgttttgacaaggatttgattccaagctttattttagaggtgattttgttaataacataacttcagtcactacagatgctcctgtattgttgcttacaatttatatactaaggataaagttactgatattttgaaataactgtgtgttttctagggacacagtgtttgcatgtatttatacctctaaatgtctatgagcatgaccaactgattattgagattggcaggtgctagcgcccttcaatcagctctcttcttttcacagaatatataattggaatacatgcatgaaaagaaaagagggaaaacacatatcagtggctttttttctttttctttcataatgttccaaatctaaaaattgtcaaaacagaaatctcacaattcctcaatttt

SEQ ID NO: 9929 - DNA, 411 bp, Homo sapiens
  source 1..411: mol_type = other DNA
cattagtccgggttttctgattgaggacatccacccagcaactcttgctgaagttgtagttaatgagtaaatacagtgtaaacacaatgacaccttgtccccttcaagataccctcaggtatgacagatcctagcaggcaacctcatgagagcggatgggtgaaacgaataattgcattttttattacagccataatagattttttgagaggcatgcaatagtcaatgtatctctatgcataagattttatgtagatattttgatgatgcataatttctacactatatgaaatataagttttttaactttgggggaataacaatagtttatttctaacatacattatcttggtcaaacattgaaattcttgattaatgtttaactatgagaagtatactcattcaagtaaa

SEQ ID NO: 9930 - DNA, 261 bp, Homo sapiens
  source 1..261: mol_type = other DNA
aggtataattgacaaataaaaattgtatatatttaaaatgtacaaattgatgttttgatatgcatatacattgtaaaataatcacgcagtaatttagtgattcattatgtagactttttttttttttttaaaaaaagagagactcacattggtttaaacattagtccgggttttctgattgaggacatccacccagcaactcttgctgaagttgtagttaatgagtaaatacagtgtaaacacaatgacaccttgtcccct

SEQ ID NO: 9931 - DNA, 596 bp, Homo sapiens
  source 1..596: mol_type = other DNA
tacagtactaggctgcattttagacatttgctgcaaatgactttatcttgaagtctacgtgattacacaaattattataaatactcatgacaggcaaggaaattaaaaaataaattttattaattactgtattttatgtttaaattataccaaaatctttgatgatatttgaaattcttttacataaaaaagtaaaggcacaagcactttttcttctacttcctaaagactcttaggcactgagaaggagtctgcactgcgggatgcccactggaattacctactgtgggctgacaggcttgagcccagggaaaagcgaggacgggaccacggccccgctcggcctagatccgctcccaggtgagcgtcgctgtcctccgggatcgctcctcgccccagaccaggagcagggtgcaggaaagaaaggctttttcatacttcagacaggttccgagccaccacttgggacttgttgtaaccccctccagcgctgcaccttgtctcggggaggcgcggttcgagccggaatcagcctccctccgcggacctgacgctgggcaggtaactcccctcccctccctgcccgcgcccaggcg

SEQ ID NO: 9932 - DNA, 446 bp, Homo sapiens
  source 1..446: mol_type = other DNA
ggtctatgtgtcaacacataaagacataaacctccttatctgagatatatgtttggtctgggttttttgaaaaacagctcagggacgtatgttaagatgttaatttcctttgaaaaaattcgagatttttttttttttaatacctagcaccttcctaagagggttggaattattacttacatgaagaatgaatgagtccttgtaagacaaaatcaacagatgtgatctatgtataagcttatattattatttaatacataaaccaggaaacttttgagggtgaaagttttaacaaaaactattttttaagaggcattagtcatcaaaataagtgagtcttaaacttatactgacttgtaaaacagttaaaaagcaacttcagtagtttacaaattctcacctgccaaagcagtgctctcctatgttcaacacatttaataaattcg

SEQ ID NO: 9933 - DNA, 361 bp, Homo sapiens
  source 1..361: mol_type = other DNA
taagttcctggaaatatacaagctcctagattaaaccaggttgaagtgatcatttaaaaattggattcacaactgaattctattagaaattcaaagaataattggtaccaatcctgtttgatgaacatagatgcaaaaatcctcattgcaattctagctaactgaattcaaaagcatatcaaaaagataatccattatgatcaagcaggttttatgtttaacatatgcaaatcaataaatgtgatgcaccacataatggggaaaagttgattacagttggcaaagaggaaatcaaaattttgctgtttgccagtgatatgattgtatacttagaaaaccctaaaaactaattcagtaaagt

SEQ ID NO: 9934 - DNA, 411 bp, Homo sapiens
  source 1..411: mol_type = other DNA
tctaatatcctaagaacttgtatagaattttcccttagggctttaatgactttattcagcgcttaaccgtcatttaggaacgtacctctgagagtacctctgacatgtaacctatgttttaaccttgctgattgcctcaaaaacatttttaaatagagcttattgttataaagcagagctcaacgcaaatctacacttgagcacccaaggctgcctacacctgatctatgccaggtgagaagttcagccctgggcgctcagtgtccgcaggtgccccgtgcacccgctgccccaggcgcggccacctgcgccctctcggcgccgccgcagtgcgcagaacagctctggtcctcacagccagtgcaccggaggggcgcgctcccgagctggcgcagtttcccagcgcggtgc

SEQ ID NO: 9935 - DNA, 353 bp, Homo sapiens
  source 1..353: mol_type = other DNA
gccaccatcctggccatggacaccctggctgggtctccggtctaatatcctaagaacttgtatagaattttcccttagggctttaatgactttattcagcgcttaaccgtcatttaggaacgtacctctgagagtacctctgacatgtaacctatgttttaaccttgctgattgcctcaaaaacatttttaaatagagcttattgttataaagcagagctcaacgcaaatctacacttgagcacccaaggctgcctacacctgatctatgccaggtgagaagttcagccctgggcgctcagtgtccgcaggtgccccgtgcacccgctgccccaggcgcggccacctgcgccc

SEQ ID NO: 9936 - DNA, 682 bp, Homo sapiens
  source 1..682: mol_type = other DNA
cacaaaaacattgtagacttccaaattttaaaggcattaaacattaaggataaacacatactttgctcatttccttggattaagtatggccccattttacccatcaaattttaaaaactcaaatttcaatctgcatgtagtcatgacgatttgatttgtgtttatttgcatgggttaaaacaagtcaaagtattgaatacaatttatgggaaatatctaatttgtaagtctgtgtatatttcaactgaaataacttaaaagttatgaatcatgacacatatttgtatttcaactttctgcttaaaattttaatacttaaagacacttaaagctaggttatctaattactgttattgaattattacaactactattttggcagctagaatatatttattagtgattaattgtctgctgtattttattttaaaaggatctggctgtcattaagaaacagtgaattaacctcaatttacaactcatccttttattttttaagaagtgcattttaatgacttacaaaaactagaaaatacagaagtgtattaagtacatgtcactgaaaaaaaaaatggatggcaaaattttcagtgtactacttgaaaactgccatgcatcaccattctggtagcaaaagggttaagttctttttgctttaccagtttcaaattacaatgagaag

SEQ ID NO: 9937 - DNA, 299 bp, Homo sapiens
  source 1..299: mol_type = other DNA
ttccatttgctcactctcaaagtgtctcaaagtgtcacaaagagctttctggctatcttgtcataaggctgtcacctgaaagtgattgaaagcaaggaacatcagtccgctgcaacgtaccttggcgccccagaggggggttcttcttgggcaagggaggcaggcctccttcgatcagtgcaggcgatgctctggggcgacactagcagccaccctctggtcttcggccaaggaaagggggcgggtggggagcgcgaaccttatctcccgggctccgcctccagggggctgagagcgag

SEQ ID NO: 9938 - DNA, 212 bp, Homo sapiens
  source 1..212: mol_type = other DNA
gagtaggagagaaccagactactctgctcctctgggtctagccacccagtggagttgccagcaggtaccaccagcagcactggtggaggtggcagaacaggaggtgatgcttgcaagagaacaccagctgaggaggtgctgggtcaggcaagtccatgctctagcagtggaggtctgtggccagctctctggcctgctagtcaaaactgcca

SEQ ID NO: 9939 - DNA, 622 bp, Homo sapiens
  source 1..622: mol_type = other DNA
cttgttagaataataaagttaataatatatgattcttaaggtgttaataggaagtcaataaattcaagtccctttttcattctaattcacattctgatctaactttgtcattagtaggaaattagaactctataaaacttcttaagatacttatcacctttgacagatgttactagatgtcattcttaaggtaaatttcatataatttattctttgactagcaattgacccatataaaattgccagtgttaaacattttcaacctaaaaaaacagcattttatatgattcacctaaatagtaattaaagataaattaagattatatataactcttcatttgctgtgatgtaaatcagttttttaaaaaaggattttaatatatttgatcactgatgatttaaccacttgagaaagaactaacaagtcactacttaccattgttttcaaaattttagagtagcgcagttgcagacatctttgacagagatggactactatgaatttgtagcgaagatgaggtactcattatcttcccattgcgttattttcactctaattgttgtgtcaaagttttaaggattgtactatgtaatattgacattaaagtaaatatttcatcat

SEQ ID NO: 9940 - DNA, 454 bp, Homo sapiens
  source 1..454: mol_type = other DNA
ccaagaagcaattggtatttccctttcttgacccctgaaaagaaaaatatctattcttagagtggagaatcttatgccatgtaatatcctatagaatggacaaattaaatttgtaagcattgcatcagtattctataaagaaaggtaaatggatactttttccattaatttaacctaataaacaaatgacatggtggttaaaatggaagcgtactttgcttctcatcaaattcatttggtcttttgcagaagtcagactatgctaatgattggtattgccagaataatctttactagttgtcctggacatctgcttagtgcaaatatttggcatatccttcttgtagggttttaatacaagctacaaaatggctttaggctagattcttttgaatagttatcagcatattattgctgtgtgttgcatatgcatgttgaagcatatttaaggagc

SEQ ID NO: 9941 - DNA, 586 bp, Homo sapiens
  source 1..586: mol_type = other DNA
tcataaaaactgtataatatttaactagggtatgattataaaagttacatataaagtttaactacatatatatatatgtatatatatatatatgaatgcacatatatttccttttgctaaatctttcatgctttaaattatataatttatctatttggtatcacattaaagtcctaataattagataaggtcatggcttggaaatttatattatttgaaaagtattataaactattttaaaagattgattttttttagaaacaattttattagagaattataagcatttatattattttttatgacttgttttgaataagagtcttaataaaatttacagagatctttgagcttaccaaaattagttggtatttcttaagaaaaaaaaatatatggtgagagtctctgaaattcaatttgaaaggcactttgaatccaaatttgaagggcattcgttgaaccaccaaatagtttcaaaggttaagtgttcattagtgtatctgcatttcagaaaaccgaagcataatcttctcatgacagtgagcagtaatgtttgtgcctttctcataagcaaaatggcctcaga

SEQ ID NO: 9942 - DNA, 636 bp, Homo sapiens
  source 1..636: mol_type = other DNA
taaaaattcggcatcgccgtggaagggagcgagccgcgcttcactctccacagaaacccgtcgcggcgtgtcttacctcggctgaacgacccgagaagaccgatttcatcggatgcctccctttctggagcttgcggtgccagcagcagaagaaggcgggcgactcgacggcggggctggagggcggcggcacaggcacccgcgctgggcgcacgccgggacggcgggcacgggtgagcgcggctcagcgcgtcatgcctggcgctcgcggccccgcgcccagcccaatggctgcgcaccccgcgccagccgcgctacgcgagtgatccagggctgcggggagcgcttcgacgaggctgcgactcggcggctgggatcctctccccggcgcccccgcccccgtccgtgcgcagcccccgggcgcagccccgccggggacgcggcgagtggggaggagcagcgccgccgccgcggccgcccgggccccgcgcatcgtcctgcggccgccgccgacctcagcatcccagaagccgggcgcacgtgggtcggggcggggacgcggcgctcaggctgcagccgcggcagcctgcggggggcgggaatggggcgccgcggcgggggctcggcttgacatca

SEQ ID NO: 9943 - DNA, 406 bp, Homo sapiens
  source 1..406: mol_type = other DNA
taaccttaaaatcctagtagtttaattaagttcagtctgcgaagtctttgcctaagccaattcttagatttaagtctttcaccagcaccatttgttgaaaagggtgtcagatcagttggctaatcagatacctcatagctctttgttgtataattttgtgcattgtagatcagggtcaaaatgataaaaaacaaataaaagctttaaaagaatattctctgttaaaatttgctttcataaatttcatgtttaaaatcatttgtgaataaatgttaaaataaaaaggtgcgattttggtaaggcaatttctgagcaaatcacacacaattttttttcattcccattgatctattacatagacgaatatttggttgtcggctattttattatagtagagcaacacttc

SEQ ID NO: 9944 - DNA, 521 bp, Homo sapiens
  source 1..521: mol_type = other DNA
tagtttaattaagttcagtctgcgaagtctttgcctaagccaattcttagatttaagtctttcaccagcaccatttgttgaaaagggtgtcagatcagttggctaatcagatacctcatagctctttgttgtataattttgtgcattgtagatcagggtcaaaatgataaaaaacaaataaaagctttaaaagaatattctctgttaaaatttgctttcataaatttcatgtttaaaatcatttgtgaataaatgttaaaataaaaaggtgcgattttggtaaggcaatttctgagcaaatcacacacaattttttttcattcccattgatctattacatagacgaatatttggttgtcggctattttattatagtagagcaacacttcttcacccacgcgcggggcagtcgcgcggcgcggtcgcgcggcgggtaggaactaccatcccagcatcctctgcggcgcggggaaggaagccccccagctcacgcaggggcgggtcccggtagcgcgaggcgg

SEQ ID NO: 9945 - DNA, 406 bp, Homo sapiens
  source 1..406: mol_type = other DNA
ccagagtgtgaggagcctaaaataatgttatcacttaattcttttcataaactttattgacaacgattggtgtgtttttttaaaaaacctttttaaatttttggtaaggtattacctgagaacagattaaatgcatagttgaatataaaagatctattttatagactggtttatgagtgtgaacacacaaaaggttaaaaggtcaaccttacagcagtctataaatagatctctcatattctctcagtatatctgagaatattgaaaaagtgcatttcaaaatcactggtaaggatacttcagattctttcctgatccttaaatacataaatttaaaaatgcagctggcgtctccggcgaggggcggtctcggggcggaccccagcatcctgcgcggcgcggggaa

SEQ ID NO: 9946 - DNA, 470 bp, Homo sapiens
  source 1..470: mol_type = other DNA
ctaaaataatgttatcacttaattcttttcataaactttattgacaacgattggtgtgtttttttaaaaaacctttttaaatttttggtaaggtattacctgagaacagattaaatgcatagttgaatataaaagatctattttatagactggtttatgagtgtgaacacacaaaaggttaaaaggtcaaccttacagcagtctataaatagatctctcatattctctcagtatatctgagaatattgaaaaagtgcatttcaaaatcactggtaaggatacttcagattctttcctgatccttaaatacataaatttaaaaatgcagctggcgtctccggcgaggggcggtctcggggcggaccccagcatcctgcgcggcgcggggaagcgggccagtaagggccgctcctcctccgccggtggcgtcggcgctcacgcaggggcgggtcccggtagcgccaggcggt

SEQ ID NO: 9947 - DNA, 251 bp, Homo sapiens
  source 1..251: mol_type = other DNA
gctttaaacttgcaatgtttttaaaagttgaggactttttaatgccaattatttcactcagaatatttatttatttatttattttttggagtgcagtggcgagatctgtaaaaatgaagtaaattcactttgcttcccacatctagctagacagggaaagatggagtagctttttctttactctcatctcagtataaagtggtaacaggacaaaaggacggtcgaccgataggaaccttcgcgtggggggt

SEQ ID NO: 9948 - DNA, 546 bp, Homo sapiens
  source 1..546: mol_type = other DNA
ttaatttttaagaaataatttaaatgaaacaatttccattccttttagtcagaatatttgcataaaattatttttcataacagtccttttttatatattggtgtaaacataatattcttcaagaaataatgttgaaagcctactcaggaataatcttccttaactctttaaatttttatttcatgtgaattcattagttattcactgaatttggtattacatatttaattcttaaatattgaggccccattgtgagtaataaaaatcatattatctttgtgtatatgcttcatgttatttaaccagaaatgtcttatctctaaaaatttttagtagtaattatttaccaaacttaaaaacatttctataaatataaagcttttctttatatttaagacaaaatataaaggctagaattttgtaacactaaatattttagtgtgaaattgaatttttttattactatagtcttttcaatctataatattttttaaaaactagacattgtggcttgagaatttatcaatcatctttccgaaatgacca

SEQ ID NO: 9949 - DNA, 434 bp, Homo sapiens
  source 1..434: mol_type = other DNA
gtaaaaatgaagtaaattcactttgcttcccacatctagctagacagggaaagatggagtagctttttctttactctcatctcagtataaagtggtaacaggacaaaaggacggtcgaccgataggaaccttcgcgtggggggtagttcctgggtccggggagcagacgatccgctcggtctctgcgtccgcccctcccgtgcctcagagacttgcgctccccaggcccgagcccctgtcggcccatcctcgagcccgtgtggctcgcgaaccagccgctgcagccccctcccaggcccggcgtccccgagccccgcgggcgccgcgcctgcccttctttggctacgctgcagccgcggtgtcggcgagtcctcccgggttgcccccgcgggcgtcagagggagggcgggcgcccgcgtggtgacggcgacgcc

SEQ ID NO: 9950 - DNA, 190 bp, Homo sapiens
  source 1..190: mol_type = other DNA
agtatatccataatttattgactcagttaactattacatgaatctaataaaacaggaagcacttgagcccaggagtttgagaccagcctggccaaaattgcagtgagctgtgttcaccccactgcactccagcctggaagagctcctcttactgggaagaggctgacccactgacactgcaaagagtccg

SEQ ID NO: 9951 - DNA, 758 bp, Homo sapiens
  source 1..758: mol_type = other DNA
gccctcccgggctcccttggaggcgcctggaaagctgagccgccgccagccacccgccagaacaggggcggggcagggccgcgggtccgcacagagcatgcgcagacgaagcacggcgcatgctccgcagcgcggcgggtccacagatgaggggagtcgagactcccgcgccccaccacccccggcggagctgctgctgagccactcaatctgaaataaagttcgtttaaaaatcataatcattcttaagaggaactagccgctcggccccgcagggagagctggcgcgtcgggaggagacagcggcggcagcggttgcgccgcgaccaggaggagccggtggcgccgggcggcgggtccgcggccggtgggggacggtgagtagcggctcgcgctgcggtgcagcggcgctgcactcactcgccctctccaggggctgggggttcgtccggctccactggggaagactcagcttctccccggggtcccgggttgtgcggcaggggtatcgagggcaggggcctcccggcccggctcccccatcccccggttcggaccgccgagcgccggctctcccctcctagagaaggtgggcggcagcgccagcccggcgccccctcccagctcccagcggtgggtacctggaattgcctgtggagcgagggcggcgctgcgtccccagtctggccgaacgttcggctttttgcctgccccaagtcccgactggggaaggggcgacccgggctgggccctcgctc

SEQ ID NO: 9952 - DNA, 473 bp, Homo sapiens
  source 1..473: mol_type = other DNA
agaaatggacttatgcattatatgaactctgtgtaatttcattaatttattctatttattctcattaaggaattattacaataaatgcagctacgaacattctgattatgcaccttttgcagacagtcccaaactgttttgttgttagtttacattccagcagcaaagtagaagaatgcagttactctacatccatcttttttttctattctattttattttgaaatataaaaacaactgaagcaaagttgagattgctttacttggccacttaagatgtcatctggtcaagaagagttcacgatctaggagatcctggccctcccgggctcccttggaggcgcctggaaagctgagccgccgccagccacccgccagaacaggggcggggcagggccgcgggtccgcacagagcatgcgcagacgaagcacggcgcatgctccgcagcgcggcgggtccacagatgagggga

SEQ ID NO: 9953 - DNA, 273 bp, Homo sapiens
  source 1..273: mol_type = other DNA
ttctcgactctgacgccccgcttgtgagtctgcagtcggacatctggaaagtaagctgtgcgaggccccaatacgaaattcaaaatatgtattgtatgtatcatctgccaaatgggggtaatacgatcttataggaccttataggtcgctgaaataaagcgccatattttcctcaatatagggaatatttgcccagacgcgctccactgagcatgcccagagcctcaggccaaaccccctcctacccgccaaggggaggtggggcagggctgg

SEQ ID NO: 9954 - DNA, 292 bp, Homo sapiens
  source 1..292: mol_type = other DNA
acaaattagagcaaacgtggttacctattttctaactgtgactaatgaatcatcctcccttccacagatagggtctggggactaatgattgtacacctcaatcatgtctgccgatcacatgcctgcacaactggagtgcgcctgagctgacacctgtgccttagggacgcaggtgaagtcctgcgccttagctgaagaagtcagggagagcccgcggccttcccgcctctcctggcaccaccaccaatgagtggttggcggaggtgggccgcgtcctgttcccgcctctcca

SEQ ID NO: 9955 - DNA, 441 bp, Homo sapiens
  source 1..441: mol_type = other DNA
ttaattttttgccttgtaaacaggtggtaaagagatcatttattagaccatgtgctataggtagtgcactacatgaacaatcagtttatatacaccatttcatgtcctttgcagggacatggatgatctcactcataagtggttgataggtgcaacaaaccaccatggtacatgtatacctatgtaaaaaacggcaaataattttttagtgttgcacagaaaataatatctggcttttaaaagtcagacagatttcaattcaaatctaattatttcagaagctcaggtaggatggctaaatgccataactaagttttattatactaccattaaattatgcatttcctaaagtagcatagtttggaaacaaatagcatatattttagaaactgtccccttgaactgtataaattgcaaaataaacagatatattaccctttc

SEQ ID NO: 9956 - DNA, 337 bp, Homo sapiens
  source 1..337: mol_type = other DNA
ttgacaaaaccgaggattcttaatttctaaaaacgctttctttaacacaattgagcatcttgaccaagcctaaggccgtggcatgcttcgagtctcctcatgtgacatgtgtgcactcccctgcatcccggagcactcccggcagccccttccctcccccgccccggggatgctccgactcggcgcaccggttcacaccggcggcggccgccgcggagtgacgtccggagggggcgggcctccgcccccgcctgtcggctcctggcccgcggttccaggccgcgattggtggctggaggcacgcggcgcaagggcgccgcgggccggctcggctacg

SEQ ID NO: 9957 - DNA, 463 bp, Homo sapiens
  source 1..463: mol_type = other DNA
gcaggtgagtagctccttttggttggagtgactgacaagcaacaattacttcctggacctctacacaatatttgttaccacaaataatgtatttatgaaaagcatattttccaaattaataaaagggtgatatctaaaatttctgcagatttcctcaatgtatcagcagactgcttactggataccaagaatgtttcttggaggtgtgccgagccagcacagatatttgggcagcacagtcaattaataacatcaatattatattaactcctctgattcgcccctcccggcggcgcggaggtgtgagctagcccgcaggcggtgccgcgtcctccgaagacagggaggggcgcggcaacgccgggaagcgctgcagcccggggccccacggaggcgcggcgctcgaggccctaaagcgcgcaggcgcggcagcgacgcaggccgcggcccccggaacaacagt

SEQ ID NO: 9958 - DNA, 468 bp, Homo sapiens
  source 1..468: mol_type = other DNA
atcagcagactgcttactggataccaagaatgtttcttggaggtgtgccgagccagcacagatatttgggcagcacagtcaattaataacatcaatattatattaactcctctgattcgcccctcccggcggcgcggaggtgtgagctagcccgcaggcggtgccgcgtcctccgaagacagggaggggcgcggcaacgccgggaagcgctgcagcccggggccccacggaggcgcggcgctcgaggccctaaagcgcgcaggcgcggcagcgacgcaggccgcggcccccggaacaacagtggggtcacgtgacacggcccctctccagctcccgcgccgccgccgcacgccgatggctgcggggtctcgcgccgtcgcaccgtccccacgcggcaagcgaccttcgggctcagggcggcggcggctgctggcagcgacgccgacgtcctgcgcgtaccccctctcc

SEQ ID NO: 9959 - DNA, 403 bp, Homo sapiens
  source 1..403: mol_type = other DNA
atgcatccaggatacaagtttcgaaagctgcgcagcagccacacaatcatttcaccaacatttgtaatacgaggtgatatatcttgttctgaaaggtctttcattttcatgaaggactaactttttttaacctgtaagacaatcttgatagctttttgataatgttctcaatctccccaacctgtgaaaagcggggagggggttggtctccccggaaacagggccccttgcgcggtgccagccccgctctgccccgggcgcaggcagagcccggctcctccccgcccctgcggtttctgcgcaccagggaggagcctccccagaccggggcgtggcacagcctccttcccgggaaagcgaggaggctcagaactgattctgcgcgcgccgcctgggtggggtc

SEQ ID NO: 9960 - DNA, 793 bp, Homo sapiens
  source 1..793: mol_type = other DNA
ttcatgaaaaatgtgtaaatattatataaattatataaagaataaatcataaaacatatacacatgtataattttatttattgctacaaatagaaatttttttctacagtgtgattttaatattttaaaatattacttttctttcattaggagagtgattaaatatatgtttcacacacttactgcaggatcaagtgtaatacaaatgatttatgtttaatttagtaatttgaaaatataaggatagtattaaagtcaggatatactaatagaatcttaatttgacaaaattctaatgcactcagtaactgttctttctataatctcacagatagaggtgagatttcatttattctacctttcagtgccataattcttctttaggaaaaggtagattctgtattacttcttttataaagatcatcatagaatcaataagtaacatactatacaacaccatctgaggttgttactaaaccttcagcatcaggtttccctagcaacagaaagcttttttctttctcactgtctgtatatgagttttttacaaaaacaaaaaaaaaattgtaataatctctacaaataaaataaggaataattaaattgtagagaagtattttgcttatggatttacacaaagctccagatggtgatttgctatattcatctccagattagctaaataaaggccaggccttatgtcagcctgcacatggctttaatgactttacctttgtactgcaaaaggttaaggcttttagtgctatgtttcagaagacacatataaaagaag

SEQ ID NO: 9961 - DNA, 394 bp, Homo sapiens
  source 1..394: mol_type = other DNA
ggggaaacatcccttttattccaaaaaaatactattgttccagccagagacactcagcagctcggtagctgggatgtgccccctccgctgcggactggatcaattctgaatagctctctggctgcgacaggtctgtggtcgccgccagccccagcggtgggaggcgaaccgcggccctggctggagctccgtggagcccccctcccgccagccgcgcccccggcaggcagaactccaggaagtcgcagcggccgcgccgcgcgagccgagcctctggcgggcggcggggcgcaccgcagctgtgcataagaagggcgcgcggcacccgggacgcgcgcgcacacgagcacgcgggaggccgccgcgcggacgcgctcccgggacacgcgcaccc

SEQ ID NO: 9962 - DNA, 458 bp, Homo sapiens
  source 1..458: mol_type = other DNA
attccaaaaaaatactattgttccagccagagacactcagcagctcggtagctgggatgtgccccctccgctgcggactggatcaattctgaatagctctctggctgcgacaggtctgtggtcgccgccagccccagcggtgggaggcgaaccgcggccctggctggagctccgtggagcccccctcccgccagccgcgcccccggcaggcagaactccaggaagtcgcagcggccgcgccgcgcgagccgagcctctggcgggcggcggggcgcaccgcagctgtgcataagaagggcgcgcggcacccgggacgcgcgcgcacacgagcacgcgggaggccgccgcgcggacgcgctcccgggacacgcgcaccccccgcgcgcgcgcccaagggagagcgagcactgcgcgccggcgcgcacacccgagacagagctttactatctcgctccctc

SEQ ID NO: 9963 - DNA, 434 bp, Homo sapiens
  source 1..434: mol_type = other DNA
accgcggccctggctggagctccgtggagcccccctcccgccagccgcgcccccggcaggcagaactccaggaagtcgcagcggccgcgccgcgcgagccgagcctctggcgggcggcggggcgcaccgcagctgtgcataagaagggcgcgcggcacccgggacgcgcgcgcacacgagcacgcgggaggccgccgcgcggacgcgctcccgggacacgcgcaccccccgcgcgcgcgcccaagggagagcgagcactgcgcgccggcgcgcacacccgagacagagctttactatctcgctccctcgtccgtccatcagtacctgcaggggggaggagagcataagcttgagccttcccatagcagccgccgccgccgccggtcacttaacaatcgtatgtatgcatttttaaaaataaatcctgatttgac

SEQ ID NO: 9964 - DNA, 563 bp, Homo sapiens
  source 1..563: mol_type = other DNA
ggcttttaaaactaccagagctcttatttagaacaatggttctcaagtttggctcagattgaaatcctcaggcatttaaagtacaagggtacttaaaagttacccaggtgattctgactcacagtgaaggagtagcctcacctggggaagctgttacaaatgcagattttctggctccactccagacttcttgaatctgaaactcagaggatgggattaagagttttcactggaaagctgtgcacatttctttgtttaatgctctttaaaatttaaattatagtataatgtgataattgcatggttatagctcaatgctattcttgaactgtcagaacaggacagaagttaattttcatccaagttatattttgtaatgcttcagtaataagcctagaatagaacagcttctactcatatctcttttaggttggaaaaatctacagggaaaaaaatattcaaagctagttataactgtgatgtccattaacgtttgttattaatagtattgttgtgtatgcatacgtgatgtactgcattcatgaagtaggctttgaaaatta

SEQ ID NO: 9965 - DNA, 284 bp, Homo sapiens
  source 1..284: mol_type = other DNA
ataacatcatgtgataagttcatgtcctgtgtggaatgtcatcagctaagctattctcagaggcctgacatcagcaaactggtgaagaagtataaacctctaaaattgacttggatctccaggtccacctagctgagtcagccctcccacatctcagcttgcagggaagccagcgagggcagcgtggtgatgtcactgcgtccgcacgcgccccgcccctgagcagtccttgctgccccgcccccgctcggctcgccgccaggggacgctagtgggtccagtct

SEQ ID NO: 9966 - DNA, 489 bp, Homo sapiens
  source 1..489: mol_type = other DNA
acttttaagcttgatgattttcaccattgtggatcaataatataatttatcctatttctcccactgtggcaatactgaaataaaaatgtaaaaccagtttatctgttttctaatttctataaatcattctgtttttcatatatacacatacatatgcatacactatatgtatacatataaatttactatatatgtatatatacctacaaatatatatgcctacaagtatccatatatacctcctatatatgtatataaacctactatatatgcctacaaatatatatatactctctctacacacacatacatggatgtatttaaaatcactacttactttatataaactcttgacataaaagtgaaaaaatgaaacataaatgatatattttcttagctctgaaactgctagtaaaacaggcattactcccagctctaaggcgacatcgctgtcatctgtcctcgcggagtgggagggtcacactggga

SEQ ID NO: 9967 - DNA, 467 bp, Homo sapiens
  source 1..467: mol_type = other DNA
cccccttccccactcgcagggagctcactcctcggcggtgccgcagccctgtccggactccactgcgcctctgaggggctcaaataccacacatgcccgggcgcatctgcttttcaagaaaatgtaaaaactgtgctacacatggaaatatgtttaggtggataaataatgcacacctgcatacgtttccataggggccttacatgtggtacatacatcacatgatgcaggcttcatgcgttacgttccggtgcggtgccctccggcccggggttaccgggggcggcgcgggcgcgggcggggattcccggactccagccccaccacgttccggagcgagcatgcgcagcgcggtcggccacagcgccgccgccgtccccgcagtcctccctgcagccaccgccgccgccgccggaacgtcccagtcgcggcgcgaggaagacgcggccccagcctctgccgcctcc

SEQ ID NO: 9968 - DNA, 355 bp, Homo sapiens
  source 1..355: mol_type = other DNA
ctgggtttcaacccagactctgacactaggatctacatcttgagattgtcatcagaacagaaatagaaagttccattagaaaacttgtattcaaggaaatcaaccagttcaagttgatttccaattatttaacaattagacgcaacatccattgtgaccccctgcggcccaacctggcgggtagaaaccacctgcagcctggcaggtagaaaccacctgcgggtgtgtggttgtcaagaacacttgagttctactggccagcgcacaggccacccgggaagtctccgaggcaagctgcgtgctcagtcctcgcctgtgcggcggcagggaaggggttaagggcgactgttgtcat

SEQ ID NO: 9969 - DNA, 349 bp, Homo sapiens
  source 1..349: mol_type = other DNA
gaggataatatgtctggtagtctcagagtttaagaataaacaacaagtagggggcttgatgttacatagtaataggcatggcactttgaaaaagttacttcatctttcttatttggagaataagggtaacttcagtcttaccttataatgttgttgtgagaattaaatggcataatttaattctcaaaaccattgttttaatgtaagcattttcaatctgttttacagttcagtgggctctgaaagcttccactgtattcctatagcagttctgaaagctgccattgtactcctatagcagatctaaaagcatctgaggacacacccctaggcctgggctcagagcgct

SEQ ID NO: 9970 - DNA, 418 bp, Homo sapiens
  source 1..418: mol_type = other DNA
aaatgaatgcacaaagcttttcccttctaattcattcttattgtggtaaaatatacataacagaaaatttaccattttaaccatttttaagtgcacagtttcatttttaaaacaagagtcgcagctgaaacaaaagttttataaatcaatgatcttctgttacgagcgaaagaaggcatctgtcctgccccggcgcagatccgcgcagggaccgggctctctacggctaaagttctcgaactccgtgtttttctcccgttctcgcgggaacttgggaactggcgctggagctggaggggcagttgaagctcctgaagggcggggcacggagcttgaaggggcggggcctagcccggggccgtgcggccggggacctgtgatcgcaggtatagccggctggcccgggctccctcgggac

SEQ ID NO: 9971 - DNA, 466 bp, Homo sapiens
  source 1..466: mol_type = other DNA
taatacatcaattataatggattcattttgaacatgttaagattgacttatctttgagaacctagaactcacctaaggcaggtgtacatggcttttttgtgatgtacatacctgtggaatattcccatttatcagctggcagaagactaaggcctgtctgggcacagtagcccaaggtgagtggatcacttgagctcaggagttcatggtgggagggatatatacatatatgtatatacataaatagttgtgtgtatatatacacacacatatacagttgtatatacgtatatatatatatagttgtgtatatatacacacacacacatatatatataacaagtacattggagaggctgtgttcaggagcacagatgaacaggttggcctttgccaagggaagcctcttactgaaagcaaggtgcaaggccacttgtgctagcagcatgcgtcagcaagatagcag

SEQ ID NO: 9972 - DNA, 427 bp, Homo sapiens
  source 1..427: mol_type = other DNA
catttttaaaacaagagtcgcagctgaaacaaaagttttataaatcaatgatcttctgttacgagcgaaagaaggcatctgtcctgccccggcgcagatccgcgcagggaccgggctctctacggctaaagttctcgaactccgtgtttttctcccgttctcgcgggaacttgggaactggcgctggagctggaggggcagttgaagctcctgaagggcggggcacggagcttgaaggggcggggcctagcccggggccgtgcggccggggacctgtgatcgcaggtatagccggctggcccgggctccctcgggactggggcgactgcgcatgctcgctggccgcgctgggccagtagccgagccgcggtgacgaaccggctccgcggttgcgccggggcgggatggtgctgacccgggtcgggcc

SEQ ID NO: 9973 - DNA, 340 bp, Homo sapiens
  source 1..340: mol_type = other DNA
caagtagctgggattacaggaaaggtataaaaggatctccttatctaggagaaccagataattctcagttcatgataagaagcttcgatcgtataaccacttgatgtcacatggtaacttttctttaaaagaaaagacaaaattccagaattctggggattctatccactcaacgctatcagagctggtgggatgtaaggttgcactggatcctggcgttagtcggtcagaatggacgaactacaaggtagcctgggtctctcttggccaaagagcccagggatgcgccggccacggaggccccgccctctgcagggaggctccggatcatgcccccttg

SEQ ID NO: 9974 - DNA, 261 bp, Homo sapiens
  source 1..261: mol_type = other DNA
aaattggccttactaagaagtgtaagaccgactcttgcaggactgtgtttatttggcttgcataagccatattactgccaggtctttcagactctggagccagactgctttggatttaaatctcaactcctccactagtagtgataacaatatcataagttaaatgagctaacagttcgtttaacagagtaatcactcaatgaaatgttatccctgcatttccaatgttgtgccagcaagagcttcttgtaaaaggtcttc

SEQ ID NO: 9975 - DNA, 357 bp, Homo sapiens
  source 1..357: mol_type = other DNA
aagaagtgtaagaccgactcttgcaggactgtgtttatttggcttgcataagccatattactgccaggtctttcagactctggagccagactgctttggatttaaatctcaactcctccactagtagtgataacaatatcataagttaaatgagctaacagttcgtttaacagagtaatcactcaatgaaatgttatccctgcatttccaatgttgtgccagcaagagcttcttgtaaaaggtcttcaatcaccttgggcagaaggcctttttgcaaaaagactcggcagcccgggccccgtaggttcggcgcatgcgcagcgcgctcggcgcccgggttccttcctccgcgccacc

SEQ ID NO: 9976 - DNA, 440 bp, Homo sapiens
  source 1..440: mol_type = other DNA
actgccaggtctttcagactctggagccagactgctttggatttaaatctcaactcctccactagtagtgataacaatatcataagttaaatgagctaacagttcgtttaacagagtaatcactcaatgaaatgttatccctgcatttccaatgttgtgccagcaagagcttcttgtaaaaggtcttcaatcaccttgggcagaaggcctttttgcaaaaagactcggcagcccgggccccgtaggttcggcgcatgcgcagcgcgctcggcgcccgggttccttcctccgcgccacccggaagcctcggcgcgacccagtccccctccccctcccctcgccggctagggtggtgcgtgccggcaggccggtcaaggaggcgggacacgtcggcgctaccaccgccaccgccgccgccgcccctcctcccgttccagctg

SEQ ID NO: 9977 - DNA, 409 bp, Homo sapiens
  source 1..409: mol_type = other DNA
gccaaaccggcccggctgtgttgggtgggatttctgtcctcagcttccttatcctgaaaatgaaggccattctaccggctggagttttaggaattcggagcagcagctgggagcaggaggaggaatcccttcgctttctcccctcccccggcaaatttccgcactttcaggtgaacgagcatcaccccctccaggaggtcgtgcagccccgcggggacgctcctcccgctcctccacccgcggtgcagcggccgcctcccgagcttgctcgcggggccgttagcgccagacccggcggagagccaaggggtccctccgcgcctccctctcgcagcccctctccaccagtagcagcgctgctgtcttcccacaggaggacttgggaggacgctggattctgcagcgcccc

SEQ ID NO: 9978 - DNA, 807 bp, Homo sapiens
  source 1..807: mol_type = other DNA
aatcaccttgggcagaaggcctttttgcaaaaagactcggcagcccgggccccgtaggttcggcgcatgcgcagcgcgctcggcgcccgggttccttcctccgcgccacccggaagcctcggcgcgacccagtccccctccccctcccctcgccggctagggtggtgcgtgccggcaggccggtcaaggaggcgggacacgtcggcgctaccaccgccaccgccgccgccgcccctcctcccgttccagctgccgctgccgcttcctgggctgagtccgcccgcggtcccggcggcgccaggtgcgttcactctgcccggctccagccagcgtccgccgccgccgtagctgccccaggctccccgccccgctgccgagatggcgacgcgctcctgtcgggagaaggctcagaagctgaacgagcagcaccagctcatcctatcgaggccaaaggtagcttggacgtcgtcgctgcccacggtcggggccgcgaccggtgaccttcccgccgctgcggcgctcggggcccgagcggacgcctcggcttcgctggccggctcctgccctgactggagggcgggtggctgagcgggcgggcgcggggctcctgtcgaccctcaagtccgccagaggcggcggcgaggtcaggcccgcaggccctgtcagtggccccagcctcccctcctcccagacacgggtttgagcaggtgccagggtgcgatgctcggaccctccacagggctgggggtaggagcgaggcagcgcggaaccgggcacgggtctcctagctctgctcatagctatctc

SEQ ID NO: 9979 - DNA, 415 bp, Homo sapiens
  source 1..415: mol_type = other DNA
ttcctacttcatcatgaaacatttgaaaagaaactattcattccaagttcaacagtttaatcttcaaatatctagtccatatttaacaaatgtttactgagcatccaccaatgtaaagggctgcctgcaaagaggcttcccttctagttagaaagccagaagacacgtacttctataggcttatgcctgtaatcccagcgagccgagatcgcgcctctgcactgcagcctgggcaacagagggagtccacagggccgaggcttcttccattagaaacagcccatctgtcaatttgtagtgggtgtaaggttacccgcaaatcaattcattagatgaggcacaaactgccctaagtacagcctcctggaccagggagggggtgtggacaggacccgcctgctgacggtgacacctc

SEQ ID NO: 9980 - DNA, 531 bp, Homo sapiens
  source 1..531: mol_type = other DNA
gagccgagatcgcgcctctgcactgcagcctgggcaacagagggagtccacagggccgaggcttcttccattagaaacagcccatctgtcaatttgtagtgggtgtaaggttacccgcaaatcaattcattagatgaggcacaaactgccctaagtacagcctcctggaccagggagggggtgtggacaggacccgcctgctgacggtgacacctcttcctcagctccaggagctgggcgggatccctcatcccgctcagctgggagatgccccgggagggcgtcccccggctccgggcggcgagggtagtagccgaccccaatccactccgggggccgccgggggccgcgtgaaggcagcgcggcctggggccggtggcgctcggctgggggccgcagttggctcccctgggggctctgggcggcggcagctcccgcctgtggggaggagaaggagccggatgggcgggttcaggcgcgcgcggcggcggtcccggggccgccggctcctccccgcgagggtgcctgtcc

SEQ ID NO: 9981 - DNA, 357 bp, Homo sapiens
  source 1..357: mol_type = other DNA
taagtccaagcagcaacaaattttttcttttgaattcagcagacagaaatattttaacttcctagcctatgcaatatagaaaaatgttcatgtttaaaaaaggaaaaaataactgaagtatataggcactacagtccctgaaattttctgtaacaaaaacaacaaaataagaatgctttcatgttgtagatagccatattttaaaactcaatgagcagtattattgccaagagtaattaagttattcagattttgaccatatggcatatagctacaataactgttttaatgtctgacagatgtgaatttcattacttggaaccagagtattaaatttaggacgaaatactccggaat

SEQ ID NO: 9982 - DNA, 606 bp, Homo sapiens
  source 1..606: mol_type = other DNA
cccatctctaatatgggataagtgttgttgatttttccatatgcctatgagaaataaattaactaaataaaattaatagacagtataatatttggcacttaataagcattcaattgatgtttatagccagctttaagctctaccgtaaatatgttcttttaagagagaaaaattgttcaaattagtcatttcatttattttttttctcatgagataattatttttgacaagtacatgtaatttaagtaaacacagcaccatttgttttaaataaatgaaagatgttcctaattttcattttctaaaacaaagtagaagcagtccaccttgatttttcagcaaataatccctagatgattagagaagtgtatcattattcattctgaatgttgtactacaataaaaatgtaattgagatagtaacataatttcaaatcaactaattttgttgttactgttgctgttgttctgtaacacaaaatatgacccaatgagaggataattattctgtgtctcagtgagaaaaaaaaaatctattgtattatgaattatgcatctacagtcctcaaaaatatgcatctttaaaaatataacaatcaattgtgt

SEQ ID NO: 9983 - DNA, 579 bp, Homo sapiens
  source 1..579: mol_type = other DNA
tgtgtgtgtgtgtgtgtatcaaaagcatccaaaaaatcacattggtgttccattctgctgttcagaacattgtggttgctcaaataatattaatgctctatgatgaagaccggggcacgcgtggctcggacccggggagtgggcgggtgggtgcccgtgggcgagcggcgccagctggaagcctctgagactccgcctcccgcagccccaaattggaggcagcagagcctgggagcagcctccacggcggcagcggccgccccagtcccagccccagccccagccccagccccgcccccgccccgcgccccgccggagacgcccggatcggcggagcctggcgcgagccctcgccccctcgcctctcccgccgcgcctccgcctgcccgcccccgccggccgaggctgggctgcgggaggcggccgggcggccccgagcttcgctagggcgccggggctgggtggatgcaaacaaccatgaaagactgccccggctctgctgctgctgctgctgccgccgccgccgctgctcctcctcctgccgccgccgctagggctccgctgtgagggggaagcagg

SEQ ID NO: 9984 - DNA, 519 bp, Homo sapiens
  source 1..519: mol_type = other DNA
cattgttttagccttaggaaaggaaaaggctcaattttaatacactgtttctgaaggccagaggctgcggccagtggcaccgtggcctctctctccgccaagggcgcataggctttgggccacccgggtgccaggggtggtggaagacccaggtctctaagcttgtatgttacaacattggggtcggaaccccgaaaagccggcgtcctggacaccccatcctcccaggcttcgcgctgcagtcaggcagagccccggggcagctcgctcaccgcggagactggaaaggatgttcaggggaagatgcctggtccttgcctcgcggacttggcagccgcgtcctgcgggtctgtccactgaactgctgaggactcgcccgtgtgcggggacccgagtgccacttcccggagcgttaccttgcgctccagcctccaggctagataatacctggaaggcagggcagggctgttcccgctctcacccctgcaggatccggcgcagcgacgtagcagcgggagg

SEQ ID NO: 9985 - DNA, 454 bp, Homo sapiens
  source 1..454: mol_type = other DNA
cccaggcttcgcgctgcagtcaggcagagccccggggcagctcgctcaccgcggagactggaaaggatgttcaggggaagatgcctggtccttgcctcgcggacttggcagccgcgtcctgcgggtctgtccactgaactgctgaggactcgcccgtgtgcggggacccgagtgccacttcccggagcgttaccttgcgctccagcctccaggctagataatacctggaaggcagggcagggctgttcccgctctcacccctgcaggatccggcgcagcgacgtagcagcgggagggcacagcgactcgcgcctcggagaggggcttctggggtgtgcgcgcgtgggagcgcgcctcggagcgccccgcactcccccactctatccccgggggcagtttgggaaggaggtccggatttagaattcgaagaagcccgggcggtttgctggctgcc

SEQ ID NO: 9986 - DNA, 580 bp, Homo sapiens
  source 1..580: mol_type = other DNA
gactggaaaggatgttcaggggaagatgcctggtccttgcctcgcggacttggcagccgcgtcctgcgggtctgtccactgaactgctgaggactcgcccgtgtgcggggacccgagtgccacttcccggagcgttaccttgcgctccagcctccaggctagataatacctggaaggcagggcagggctgttcccgctctcacccctgcaggatccggcgcagcgacgtagcagcgggagggcacagcgactcgcgcctcggagaggggcttctggggtgtgcgcgcgtgggagcgcgcctcggagcgccccgcactcccccactctatccccgggggcagtttgggaaggaggtccggatttagaattcgaagaagcccgggcggtttgctggctgcctgcttccccgcccccggctcagaggtctctggctggcgggcgccccgtcggccgccggcttcctccttgaaacccgccggcgcacatgaggccgctgcccccgccgcaggcgctggcggccccctcgcggtgcccgtggtgatgccatgccccgccaccacgcgggaggagaggagggcgg

SEQ ID NO: 9987 - DNA, 192 bp, Homo sapiens
  source 1..192: mol_type = other DNA
atggtgttccacatggaagaggaccaggaggagctcatcttcggtgagtggccagtacctgggctctgccgcccaggctggagtgcagtggcgcgatctcggcaacaggcgcccgccatcagtggcgcgatcattctcctgccgcagcctcccgaggagctgggactacaggcgcctgccatgagtcactgc

SEQ ID NO: 9988 - DNA, 453 bp, Homo sapiens
  source 1..453: mol_type = other DNA
aaaatttttcaggctggagtgcagtggtgcgatctcggctcactgctcctgctgcagccgagtaactggaatctgtgcaacaagatatagaaagtctattctgtaactatatttgaaaccagagagagataacattctgcagtgaccacattagtctctcaacttcctagataaatttaccagaataatcatcaaattgccattttacacaccaaataaaccaaggtgttggaatacactgtgtggtcactgggtggctgccgacacccaaaattctttgaatttagagtgaagaaaaatttctgaattaagtttgacttgaaagaattaagctcagagcagataattacttggaatgaattatcttgggaagacctccggggattggacatccaccctaaggtggatcaaggggcgggttgtttggattccaacaacccttattaaggagga

SEQ ID NO: 9989 - DNA, 202 bp, Homo sapiens
  source 1..202: mol_type = other DNA
atgctccactaatgattttccaggagatgcacatgtggagggaggaccaggacctgatgccaggtctgggactccactgctgtccctgaacagatgctgcacccgggaagcagcaagtgcctttagctgagacatgctggctaggctggtctatgaactcctgacctcaggtgctgaggaggcctatgggtattacccaggg

SEQ ID NO: 9990 - DNA, 539 bp, Homo sapiens
  source 1..539: mol_type = other DNA
aactcctggaaggtctttggcctcccaaagtgggacttgaacaaaagaatcttcttcccaatactgccagggagaaattcttcaaattcatgtttgaggccataacccaagtggcagatgggatctcaaatacaccacggtgtgatgcgccctgcagagggtgggcctgggtcacccccccccccaccgcgatcctggggagtctggacctcccttggtggaccgacacccgagggtctctagggtttttcacccgatgccgcctggaggccactcaccaagcagctccgctggctcagcaatgggggtcgtccgggtctgggtcattgccactggctcgtctctctgcgcgccggcagtgggctccgcaggctgtctcctacacagagcaggcgggaggagggctctgggttgcttcccgcgccgcagccgcgcgcttccggcggggtcgccgccacttccgctcgagcgcgcctcgcgcggccgcggcgcgagccgggacccctggaagggtcgggtgcgcggcccaggaggtaccg

SEQ ID NO: 9991 - DNA, 475 bp, Homo sapiens
  source 1..475: mol_type = other DNA
ctggaatgcagtggcgtgatctcagctcacagcagcgggaactcctggaaggtctttggcctcccaaagtgggacttgaacaaaagaatcttcttcccaatactgccagggagaaattcttcaaattcatgtttgaggccataacccaagtggcagatgggatctcaaatacaccacggtgtgatgcgccctgcagagggtgggcctgggtcacccccccccccaccgcgatcctggggagtctggacctcccttggtggaccgacacccgagggtctctagggtttttcacccgatgccgcctggaggccactcaccaagcagctccgctggctcagcaatgggggtcgtccgggtctgggtcattgccactggctcgtctctctgcgcgccggcagtgggctccgcaggctgtctcctacacagagcaggcgggaggagggctctgggttgcttcccgcgccgcagccgcgcg

SEQ ID NO: 9992 - DNA, 281 bp, Homo sapiens
  source 1..281: mol_type = other DNA
attcatccctgggttctaaaaacactcaataaattaggtattgatgggacgtatctctccaaattgtccgtttgcagatgacatgattgtatatttagaaaacctcatcttctcagccttaggctgatcgagcccccggcccctgcgtttctggctccagccccaggtggcggcgctgtaggctggagcccctggaaagcgctggcctggcagccctggggagtgttccaggcccttggaccgcagggagcaccttcgggtgccggtcagaggtaaggcgc

SEQ ID NO: 9993 - DNA, 309 bp, Homo sapiens
  source 1..309: mol_type = other DNA
ctaccagaggtacaaggaagagctggtactagtccttctgaaactattccaatcaatagaaaaagagggaatcctccctaactcattttatgaggccagcatcaacatcgtcatccctgggttctaaaaacactcaataaattaggtattgatgggacgtatctctccaaattgtccgtttgcagatgacatgattgtatatttagaaaacctcatcttctcagccttaggctgatcgagcccccggcccctgcgtttctggctccagccccaggtggcggcgctgtaggctggagcccctggaaagcg

SEQ ID NO: 9994 - DNA, 339 bp, Homo sapiens
  source 1..339: mol_type = other DNA
aaatataattgtgttatttgaggctgcagtgagaaattttaaaaattaaaaataaaaatagagatgtcaaaaattttcaaggaatctcatcttgaaagaaaaaaggcgggcgcttattctgctctgtactcagctgaagtattcattctgcaagtattagttctttcccgctgggcaccagcggattcctggtgcccagagcccggttcctcctaccgggtgcgctgggaaaagggctgctcctgacagaagggacactctaagagcagcccaggaaccggtgcacttgggcggcctcggaagaagccggggctcctggaggcggaggcgaggcctggg

SEQ ID NO: 9995 - DNA, 452 bp, Homo sapiens
  source 1..452: mol_type = other DNA
tagttttagctattgatgatcattttctaaattaactacactctgccttaagaaaccctcaacagctgagggagatgttaccctggaaacagtgaaatcacactctcatcgagtgactccactatgtttagctctagaggataatcagtttccggttcccgggacgttgtccgggtcgccagcaaagtggagccgcgggtcctgctccttaaggccgaggggcctcgcaccctcaagcctggacgcccttcaggtcccaggaagaggcaagagcaccttgcccccagccattcccaagcccatgggattctgggacagctgggcccgggtgaggctctcccgaagtcgcggctggaccgcagccagggcggcggggcatggactcagggtcctggcccgggccgggggcggggcctggccgggggcggggccaccaggtgcgaggctttatc

SEQ ID NO: 9996 - DNA, 153 bp, Homo sapiens
  source 1..153: mol_type = other DNA
gagcaatgaatgtctctcatgggtagtgtgcccacttcgtattttttttttttaattttgtggattacaaccatttcaaaaactaaaataatgcagcttacatagcgaggataaatgcctcactggccaatggctgcgtgctccttaagtagc

SEQ ID NO: 9997 - DNA, 418 bp, Homo sapiens
  source 1..418: mol_type = other DNA
cagggaggctgaggtgctagaatgtagtgagccgagatcacgccacactgaaaattaaaaattcagaattgaatgttaacactcaagatgtagtaagaaaagtttttaactttttaaaaattaaggaaactaaaagcatactcatagaaagactgattaagttttgtttttcagccctaagatttcataagtcttctaggagttgtctgtataaacaccaaaaggtggattaaattactttttttttttttttttgcctcagcctccggagtatctgggattacaggcgcccagctattttttttaatatatatatttttagtagagacaggtggccaagctggtcactctatccccaggttttacgctctgggtgaggcagtggggaggaaatgccttcgcccaggctccgcccctg

SEQ ID NO: 9998 - DNA, 500 bp, Homo sapiens
  source 1..500: mol_type = other DNA
accaaaattaaatttaaaaaaactttcacttgaaagagaaaagtttctctgtcaatgtttttggagacagagtctcgctctgtcaggctggagtgaagtggcacgtctcagctcactgcaaccattctccagcctcagcctcccgagtagctgggattacaggtgcccgccaccacgcctagctaatatttcttgaactcctgacctcaggtgatccgcccacctcggtctcccagattgctgggattacaggcgtgagtcagtgtgcccaggcaacacacacacacacatatatttaattataagaaagaccaggtcttgctgggttgcccaggctggtctcaaactcctgagctcaagcgacccgcctgcctcggcctctcggatgctgaggttacaggcgtgagcccggaaacttcgagacttttgtagcctcaggaaaggccgcggccagcctcttcgcggcatgggcgtggctcccagcgacttcccagcctggg

SEQ ID NO: 9999 - DNA, 432 bp, Homo sapiens
  source 1..432: mol_type = other DNA
gccgcgggctgaattacttccacgcccctggctgcagtacgtgattcttgatcccgagcgctggggccgccgcgtgcgaatctggtggcaccttcgcctagccatttaaaatttttgattggggccgcgggcggcgacggggcccgtgcgtcccagcgcacatgttcggcgaggcggggcctgcgagcgcggccaccgagaatcggcaagctggccggcctgctctggtgcctggcctcgcgccgccgtgtatcgccccgccctgggcggcaaggctggcccggtcggcaccagggagcggaaagatggccgcttcccggccctgctgcagggagctgtcacccacacaaaggaaaagggccttgtcgcttcatgtgactccacggagtaccgggcgccgtccaggcacctcgacccacactgagtgggtgg

SEQ ID NO: 10000 - DNA, 319 bp, Homo sapiens
  source 1..319: mol_type = other DNA
caggctggagtgcagtggcactcactgcaatgagtagctgggtcaccatgttgaccaggatggtctccatcccttagtttttatagacaaacagaaggtgagtatcagattgtcagatcacaaagatctgataaggcaaagtgatcaaattcattgatcgtaggtggccagatgacctttagtaggagcagtggcgggcgcctgtagccccagctactcggtctgtctcaaaataaataaataaataaataaataaataaataaataaataaataaataaataaataaataaaaataaagcggcgacgctggacgtaga

SEQ ID NO: 10001 - DNA, 399 bp, Homo sapiens
  source 1..399: mol_type = other DNA
gtttgcaatcaaataactgtacaccttttaatttaaaaagtaccaactagaattagatctaaagctaactgtaggactgagtctacataaaagcagctggctttgagcggattcgtcgctttcacggccatcgagccgcgccccaagcccctcggggtccccgggcctggtactccttgccacacgggaggggcgcggaagccggggcggaggaggagccaaccccgggctgggctgagacccgcagataatctcaatacaacctttggagctaagccagcaatggtaactcgcccctgccttggggaatcccagggaccgtcctctcgtcatcactgaggtggagaagagcatggagcgcacatcgcccacagtccccgagaagttggggggaggggt

SEQ ID NO: 10002 - DNA, 479 bp, Homo sapiens
  source 1..479: mol_type = other DNA
gtaggttctcaaatacttgttaataaataagtttgttcgagaagacataatgatctagtaattagctcattaaaaataaacgttcttctttcaaggcctgccttgatagccatccaaaaaggccaatcttgccctagatttatgctaaaatgacttatttaaatataataggcacttatttaaataggagaagctagatcttagcctctacatgagatcatgtggaaaatctgaaagcattttaggttccttatgtttgcaatcaaataactgtacaccttttaatttaaaaagtaccaactagaattagatctaaagctaactgtaggactgagtctacataaaagcagctggctttgagcggattcgtcgctttcacggccatcgagccgcgccccaagcccctcggggtccccgggcctggtactccttgccacacgggaggggcgcggaagccggggcggaggaggagccaaccc

SEQ ID NO: 10003 - DNA, 473 bp, Homo sapiens
  source 1..473: mol_type = other DNA
atattctaaaatacccctttaaaaaaaaaaatatatatatatatatatatagttttttctgagatctggagtgcagaccaagcctggcccaggctgcagaggtagctacagcagatgaaaagatttaaaaatcattttcacgtggcaagccatggtaaaatgtaactatttaaggctgctttaaattagactaatagcagagtggtcagactatactgaaagcagtacctcaaagaactattcttgtttgccttattcctatgtaaataactgaaatctttgtttttctttgatttttacttacaatgtattttaagtttgtcactctaaatggttatgagcaagtttaagaaaaatcttcagcaaatactactcaacatcgttactgttaccgctttaacatttaaggcagtaaaagacttgggacttaaaaagtcttttagaggccaccctcaccccgagccaccttcctt

SEQ ID NO: 10004 - DNA, 356 bp, Homo sapiens
  source 1..356: mol_type = other DNA
aggattccataggtcgaaccatatgaaactacctatgttgattacttttaccgctgtttttccgcctaaaagctatgctgcgattgcgccactgcaccgccacagtcacgaggtaaatatgccgccacagtcgatgtcaagttgtgaaaagcccccactcatcctcgctgcgggcagggtggcccctgcagggggtgcaggagcgggagacggtcgtccgaacaccggctccccggcatgcgtagaccggcgggcggagcgggccacctaagatggcggcgggggcggagtcggcgcggccgcctctgggcgggaccgcggggactagacgtggccgcggggcggtgtcatcgccc

SEQ ID NO: 10005 - DNA, 364 bp, Homo sapiens
  source 1..364: mol_type = other DNA
ccaaattctttctgtagcaaaaatataaaggcatcttcttaggtaattttttttttttttttaaggtgataaatcataacattttcctggaaaggaaagcagtagacctcattttttgttttaaggaaaaatagtttttctgtttccattcatatacattaaataactataaaattctgactcatagtctggaggacaatgattgagccggggaagtgggcgcgctctgttctccgcggccagctgggacgccgggccaggtggggccgcctgagcagcgtaatggggatgggaggggtggagcctccaagcatttcagattactaaactcgaatcaccccacggtgcccgcgaacttccccgg

SEQ ID NO: 10006 - DNA, 357 bp, Homo sapiens
  source 1..357: mol_type = other DNA
cctttgcaagctgttaagcaagtttctggattccccaaaccatagcacatagctttgtcatgagacattagaatgctaccatctaaaaccgcttagaaagtttaagttgtcagggactgaatgtgtctgttttccaccaaattctttctgtagcaaaaatataaaggcatcttcttaggtaattttttttttttttttaaggtgataaatcataacattttcctggaaaggaaagcagtagacctcattttttgttttaaggaaaaatagtttttctgtttccattcatatacattaaataactataaaattctgactcatagtctggaggacaatgattgagccggggaagtgggc

SEQ ID NO: 10007 - DNA, 338 bp, Homo sapiens
  source 1..338: mol_type = other DNA
cctttgcaagctgttaagcaagtttctggattccccaaaccatagcacatagctttgtcatgagacattagaatgctaccatctaaaaccgcttagaaagtttaagttgtcagggactgaatgtgtctgttttccaccaaattctttctgtagcaaaaatataaaggcatcttcttaggtaattttttttttttttttaaggtgataaatcataacattttcctggaaaggaaagcagtagacctcattttttgttttaaggaaaaatagtttttctgtttccattcatatacattaaataactataaaattctgactcatagtctggaggacaatga

SEQ ID NO: 10008 - DNA, 400 bp, Homo sapiens
  source 1..400: mol_type = other DNA
gtccgaagcctccgctcggggttccgtcctgaagcaccaggggagtgagaaaggactgggaaagccatcccatcactgagccccgcgcgggcggctgtccgggtttccaatcgcgcttggagacgcgtttaatggaaatcctgtaaatcggttttaagggttacgcatccttgcatttccgaaaatgggagtcggtcccctccccattgttcttaatgtagaaaaattcattaaagaaatctcatagggaaacccgagcttcattaaagaaatcccagtccgccccaagtggcggagtacgcggcttcccttggcagggaacccggctgcggctgtcccgccccccagcggggcactgctactacggcgatcggtccttcaccgccggaggttaagtagc

SEQ ID NO: 10009 - DNA, 438 bp, Homo sapiens
  source 1..438: mol_type = other DNA
caaggattataaggaatagttttaatattactaatttttatcctttgcttttcttatttgaaatggcaatcaaataatttgtaagagtttgtagaaagtatttgtacatacttgagggtaagtacaagaaataaacacttgtaatggggattacttaagcaaatgacaccgacagcctttctgtacaacaaataattgctgtgtactccagtaatgaatgtagtgccctgctggatctgggacagcaagacttttgagtccagattcctcttccacaatttggggacactgtggaagaacttcttgctcgcagcaattccttcggtggaaaaaactcgcgtaagaggagtaattcttttgttttctttgatcgagccggctagagcggatagagccgtactgccgctctaggcgcaagcctctcttcggcccggaaag

SEQ ID NO: 10010 - DNA, 251 bp, Homo sapiens
  source 1..251: mol_type = other DNA
gaaattttggaaaatcattaaatagctcacttttaagtagtaatgctatatgtcctggtttttataacagtaagagaaaaagctactaggacaaaaggggtacatgtcacgcacctctgttccaagtgatttattagataaagtcgcggttttacaagcctacaccgcacgcgaagtgtcaccgtagctctaggaccacgcatgcgcgaacgcagattcgcgatccaatggctcagcctttggcggaagag

SEQ ID NO: 10011 - DNA, 646 bp, Homo sapiens
  source 1..646: mol_type = other DNA
tttctcttctttagaatatcataataatgaaccaggtttataatttcagtccacagttagcatcaatataggagaaaattctattccattgtcataggctgaaactttgttcagctttttctttagtataagttggaatgaagtcagggcacttcttacccatagctccaagtgtgtccccatatggaaatacattatttgcattatgtgatgggaaccacagacagtatgatataaagcctacaatcgtggttttcttgaaagcttcagcaataatctaactgacagtctgatgttaaaggggtgaaatttcaccttttttgtgaatacattagatacattagaaaacaggaaataaccaataaaggctgtttgttaattacacatgaagttataactagggttttattttaaaccagatttgaatactacattgagaacatcaatagaaaactagaagattttagactgtcattgacctcatgtgcactggaacaggttaagtatgccaggaccagccattgctacttagataaagcaatttttatgtagttaatattagcacaaatccttttttctgctcctgcttcctagcaacctgaagcagagtatctgcttgccaatctgcttttggttaaaaaaaaaa

SEQ ID NO: 10012 - DNA, 584 bp, Homo sapiens
  source 1..584: mol_type = other DNA
ccttagtgttaatttcacatatgtaattagtaaaacggtccccaaaactagttaattaaacaatttctaaaaagtttcaatctcggcagatgaagcacataaagtatcttgagacattcttcatgttgtagagaacaacaggtatctcatgtccttaagattttccttcttaatgttactcctttcaaaatcataatgttatagacattcctttatggtaatattattttaataacattcaggtacatagctggacaaaagtttgatatgactaggtaagtgatctagctgtttggaagtgatctcacttttttaagacctccatttatgcagaagtgatacacttttaaaaagcattttttatttcagaacatttatctgagagagctaatcgagaagaatattgcattagtaaattgctaagccaaatctcagtctgtagttaagagcttcaaaagcagaagtccttaaaagggcctgccggttttcccacagggtgagcagcgctgtatccactgataacccagctgcttaggaactgagtaaagccggctccaaacttctcagctgttgacaggcttgac

SEQ ID NO: 10013 - DNA, 482 bp, Homo sapiens
  source 1..482: mol_type = other DNA
aggtatctcatgtccttaagattttccttcttaatgttactcctttcaaaatcataatgttatagacattcctttatggtaatattattttaataacattcaggtacatagctggacaaaagtttgatatgactaggtaagtgatctagctgtttggaagtgatctcacttttttaagacctccatttatgcagaagtgatacacttttaaaaagcattttttatttcagaacatttatctgagagagctaatcgagaagaatattgcattagtaaattgctaagccaaatctcagtctgtagttaagagcttcaaaagcagaagtccttaaaagggcctgccggttttcccacagggtgagcagcgctgtatccactgataacccagctgcttaggaactgagtaaagccggctccaaacttctcagctgttgacaggcttgacttcagggagaagaagctgctttccctgaaagaaagtg

SEQ ID NO: 10014 - DNA, 804 bp, Homo sapiens
  source 1..804: mol_type = other DNA
acatttagcatagatttttgctcatttttgttttttaaagaacgatactgaaagacaagaaggagttgagtttcagtcgtgaaacattataatcattttatttccttgaatgagaatgtattatttttataataagagaaaatttttaaaggaaaagaagttaaaaaaaaaaaaggcctcacttgtaaggtagggtatggttttttcagtaaatgacaagggactttttaaaaaacaaaacactgccatttaaagactggtaggatcttccctgctaaattattttggaaacttctttaaaaataaatgtagaccacgaatcatttactaaacatatttaaattctaaggtctcctcaagaaatgacattttcacatttcttaggcatctgtggtgccagaggagcaaacccatcgcacacgccaggtctgccatggggccctgggcggtggagcccgcgccgtgaaaggcctaccctgccgaaagcccgggcggcgggcgcccacaagtcagggctcggtgcggcgccgcagccagctctgcccgcgagccgagtccgggctgctgagggggagccgcgctgggggcggcggcgtcggggcgggggcgggagccgggcggcagctccagcgcccgtgggggaggagcggcagcggcggcggctggagctgctgtggcgaccgacgcgaggcggcccacccctgtccacatggacagtcgcaaaggcctccgctgatgcattcacgcctgggcggggtgggcggacggccgtagcggcggcggctgcagaacgagctaggggcc

SEQ ID NO: 10015 - DNA, 710 bp, Homo sapiens
  source 1..710: mol_type = other DNA
tcttgccaatcaggaaagattattggttcgcattaggaaaaagattttaaaggacgttttaaacaataagcctttcttgacatttagcatagatttttgctcatttttgttttttaaagaacgatactgaaagacaagaaggagttgagtttcagtcgtgaaacattataatcattttatttccttgaatgagaatgtattatttttataataagagaaaatttttaaaggaaaagaagttaaaaaaaaaaaaggcctcacttgtaaggtagggtatggttttttcagtaaatgacaagggactttttaaaaaacaaaacactgccatttaaagactggtaggatcttccctgctaaattattttggaaacttctttaaaaataaatgtagaccacgaatcatttactaaacatatttaaattctaaggtctcctcaagaaatgacattttcacatttcttaggcatctgtggtgccagaggagcaaacccatcgcacacgccaggtctgccatggggccctgggcggtggagcccgcgccgtgaaaggcctaccctgccgaaagcccgggcggcgggcgcccacaagtcagggctcggtgcggcgccgcagccagctctgcccgcgagccgagtccgggctgctgagggggagccgcgctgggggcggcggcgtcggggcgggggcgggagccgggcggcagctccagc

SEQ ID NO: 10016 - DNA, 655 bp, Homo sapiens
  source 1..655: mol_type = other DNA
cctcgtcagaatcttctagatttccagaagtttccaagtcgctacatataaatgttgcagaaaaacgtgtaattctcatgtgcaagtaaagaactgttttcattgtaaaggtgatgtgtttttaccatataattcaaatttgcataggtacttcatattttaaaaggtgactcacaggtatgtcactaataaaaacaattaggggtgcgaaattcccatcccaagccccctttgtgcgggaaggttcccccctatgcagggcagcccagtccaagccggcccgatccggggccgagtgagcagtggttcttgccgcaaccgccacgcagcctcgctgccgcccaagcgcggacacctggttcctgggtcccccgcgcggagccccggactcctcgcctatccagccggacaggacctgctttgccgggaccggcaggcttgtccaggggcagcccctctctgcgctgcagggcgcctaccctcgccccagaggctctgcgccgcgggcggggcgaccccgggggtcgcgcgccctctcccggagcgcgccctccctcccggagcgcgcgcccgacggcctgccgcggccccggcgcccccgccccttcgggcgctccgtagccgtgacgtgcacgccgcagtgccggggactcgg

SEQ ID NO: 10017 - DNA, 338 bp, Homo sapiens
  source 1..338: mol_type = other DNA
gtgaaactaattattctgagtaaccttactctaaatattatagtgaggtgagtcatatttaatgaaaatttcaaaaaacatattttcctttgcattttgaggattttgtttgaatttaatgatagaccaaaatgcaattactgtacacattaccttaatgtgtgtcagtttaaaatagttttatattgtcatagcaagaagcatgaaagtattttttttgtcattctttatagctggttaaaaggaaaaatggaaagaaaaaggtttatacttgagtcatttcataaacaaaaaatttacttgttgcaaatttagtttttcacaaaagaacaagtgat

SEQ ID NO: 10018 - DNA, 525 bp, Homo sapiens
  source 1..525: mol_type = other DNA
ctcctcaaatttaaaagagatagtattaacagtgtttatattgtcatattgatctatggataatctatggacatctctaagaacaatgtctatccacaacacaagagctccatatacagtagtagttgcagtgtgtttcatgactcagcaatatgtagcatgtatagtcaaaataatataaaatcaaatattcaaaaactgaaattacaataagttattctcaatatctattatttgataatacctaaaagtgatgttatttagaagtgcaaatgagactactagaaaggcacaattttttcttacaaactttgtagaaaaaaagtatttgaccccttaaacacagtgcatacagattttaaacattaaaaccagacttaaatcaattcatatactttcagggacagaaattaagctcttttaatggatgtttcttgtacatgtcattttagaaaacatctgaccctaactgctgtaactaactaagaaaaaactgtgtctgtagacacttgtttataatggcat

SEQ ID NO: 10019 - DNA, 346 bp, Homo sapiens
  source 1..346: mol_type = other DNA
cacttaaaaaagctttaaggttctttaattccaaatacctaattagccatcactagcctttttgtaataaggaaaaagagtatctgaagcggtttgcaagcaatatacagcacaagggtagcgcgatcccgagcttgcccagcgtgagagtgatggctgaagcctgtgctgcggctccgatccctccgcggaaccactgtgccgcgtgcggagcgctggggacgaggccggggggcgggggcgcgggccagagccggggccgagccctgggccgcgaaggcggcggactcctttctgcggcggagggatccgcggcggaggcggccacggccgtagtcgctgcctg

SEQ ID NO: 10020 - DNA, 521 bp, Homo sapiens
  source 1..521: mol_type = other DNA
gtttcatttactaaaattttgttcacgacttttgttttggtatcagagtaaatctggtctcataaaatgaattcagaaatatttttgcaatgctcattttatgccttgcagaactttgagaaatattacgcataaagtgtaacatgacgggtgtcattcaaatatatgtctcaaatataaaataatcagttttttgaagttagctgaattagtgagtgatttataatcacagatttcagaaaattagagctaagtgatttaacattcattaaaagcctttatgggtaggaaatgaataaggtacctgctgtgtatatatttacattataaagtttacgtattcattctttgttcttattcttacaatctcaaagaagaacaacagcgcgtaccgcgcgcggaggtgggcgtgccctctcagccaatggggcctcgcggccggctggcggggctcctcattggagcagcagggaggcgagcagagggcccccagagggaggccgggctacgtcgtgccctgc

SEQ ID NO: 10021 - DNA, 330 bp, Homo sapiens
  source 1..330: mol_type = other DNA
caggcccagcaaactccatgttggacgtgcttgctttccatatgcaacgcactctacatacaatgggcgccttataagcacatagcaaatgtgaaaaatattatcaacattgctttgataatattaatatattatatatattagaatatattatatattagaatatattatatatattagaatatattatatattactaatataaaaaatattatcaaccctgctttagagaagatgatacctcttctccttcctctgaggtgcagaggcgcggtacaatttttgaaggccgtaagttaaacatgttaaaacttgcgcccgcccccttcg

SEQ ID NO: 10022 - DNA, 218 bp, Homo sapiens
  source 1..218: mol_type = other DNA
tggaaacatcggttttaccattctatgattgcaaagatatctctaatgcaagttcttaacgtgaagataaaggaggggaataaatatgtatgtgcccaagtatactttcactggaaaaggcactttctatccctgaaggatgtatagacagttttaataataacacatctattattatcgttttgtttgttttaataacaaccactggctcttcagca

SEQ ID NO: 10023 - DNA, 275 bp, Homo sapiens
  source 1..275: mol_type = other DNA
cttcatggttagaagattcattaaacgcatttgccttcaaatattagattaacaccagagtagtgttaaaatatgtcacacattcctgactagcagtttgtttgtaatttgtttacaatttaaaagcaagttatttcccaaaggaaatctaagcaattgttaagtgttttacattacgcagtcgccaattttacagcgtaggagcctggagcgctccgcgttttgcccccgctacagctagagcggtcggccaatggagaccttctcccgcactc

SEQ ID NO: 10024 - DNA, 270 bp, Homo sapiens
  source 1..270: mol_type = other DNA
acagttttaataataacacatctattattatcgttttgtttgttttaataacaaccactggctcttcagcagagccgatgcggcgtcccgcctcccaaactcccagctggggcctcggcgtctgaccgccacgggtgcctggttcctgcggaggctgccgggcgggcctgggtggcagcggcggtaacctgggctccagggtaacggaggcggagtgcgggagaaggtctccattggccgaccgctctagctgtagcgggggcaaaacgc

SEQ ID NO: 10025 - DNA, 312 bp, Homo sapiens
  source 1..312: mol_type = other DNA
ttgagcttttgtcaaaacttgataaaaaactattcctaaactattagcaactatatagaagctttttatttaacagcatcctcctgggaaactgcgctggaagttgatagaaggattccaatttatttatttttttctactacaattacagttttgctgagaaaaataaaatattggtgtgtacagacaagagaagaccgctcgccgatcccgcctgcttcaggtagctggggtttgcccggtctgtggctcagccacctgcgcgtgttcgggatagagcctgcggccgggcggcgctgggcttttatctgc

SEQ ID NO: 10026 - DNA, 575 bp, Homo sapiens
  source 1..575: mol_type = other DNA
aaaatgagaataatcctactagtaagcatttgtaggaatattttagttacattataacatctacatcattgccatatggcaataaatctggagatattgcagtatcaatggaactccaaagtgcttaatgaccattgcagaatttgtttcataaacaaaatctttaaaaacaagagtctgatttctgttaactataatttcaagtggcagaaatataaatgtggttttgataactttgtttcctttatttctgaaaagcagaatcctgtgtggtactgaaataaaatgtcaaatggtatcttagaaaattctagccctatcaaaaataatatataaaaccatgtaatgtcataaaacttttaaaactgctttctcatattttggggtaaccttttaaaatggtaattcaataaactagtttttacttctgtaaatttatacatttttcaaggtcaaactgatactgttattttgaatatgaggttttaaatattttcttgcttaccaacaacttcttaacctgtaggtataacaatacctgtctggagtcatgaatgaaattctgagtgctgaat

SEQ ID NO: 10027 - DNA, 546 bp, Homo sapiens
  source 1..546: mol_type = other DNA
tttaaaaaacaagtagatgaaaggactattctcaaaaatcttgttttatgtgagaaaccatcaaattatgaattccaagtactgtatttttatctaaacaatttttcaaaatagccacatcaggttcaagcggacttaatttagcacaattatattgctttgttcattccatgtatagtaaaagagtctacaaaacacatgcaagcattcatgcaattatatgttgatttgttcatgggtcgcaaagtctattctccatcgctgaagcatggaagacaaacttgtcatggatcccaggacgtatccggggcggataagaaatcacccgtggggaggcggtgaactcctccgcaggggccgatgcccgggacaggggcgggccaaggaggagcccaggtgtcccgctcccgctcgacggcgcgcgcctgcgcgagcccagttggcgtcgcacccttgagcgcccctacgccagggagggagggagggaggaggggcggccggccccccgcccccgcgcgcggccacgtgacgccggctgaggagatt

SEQ ID NO: 10028 - DNA, 273 bp, Homo sapiens
  source 1..273: mol_type = other DNA
gagttaacaagtgacagctgcagttagtttcctgctgaccacaaagccacttagcggcagagcacacctgagcccttaatctctctaagccaggctgtgatgctaggagcagccgtttgctcgggagtggctacctcccaggcaaaagcccgcccacgggcgtccggggaacgcaccctaccaacccaggcgccgcacgggtggggtcgcggccgcaggctcttccggggcgggcctagcctgacgcaggaggaggggcggcccccgtcgcac

SEQ ID NO: 10029 - DNA, 487 bp, Homo sapiens
  source 1..487: mol_type = other DNA
agggggccgcgaggaacgcgcttcgccgcctccaattttaactcgcagcaaaggcaccggacacctagcggccctttccctggactccggggcagcacgcactccccgggcgcgctctctgcgcccactcggcccgcccagtcctcggccattggctgctcagtactggccccttggagccactcgtgcgcaggagccgcgcacgcccgaggcccgtggtgccgcccccgcgccttctcgggctcgcccagagctccccggcgcgcttcccgaggtttcgagaatgatttgcgtgcaagagtggactcatgagtccacacttggataccgaggtttaaaactcagggcgtacataaattaaatgtatgtataaatacacgcatctacgggcgcacacagtatccccgcactaactgctgggctgcgtgccctgcgggcgggggagcagagggggcggcgccctatgcccgctctgggccccggaagc

SEQ ID NO: 10030 - DNA, 542 bp, Homo sapiens
  source 1..542: mol_type = other DNA
taatggaagaggaatgttcttttcctccactctttttttagtaaattcatggacagagaatgtatcctggtaaacacttagattaaaacaaatttacatagttgattactataaatgaaaattagtgactcaaattctccaggtttctaagctacttagactaagccaatcaggtaatttttgctacttctgggcaaaatgtatctgaattcctattcatgaaatctaagtttacctctttcatctctcatttaaatgtggaaaaacgaaatcaataaaaatctatatatgcttattaagcattttaaggagggaaagctttgagcagtgactacagcagtttttcgttacatttaaaaaaaagtatggatgttaaaccatactcgggtcctcacccgaggaccgcacggccgacctcggggaggctccacccctcttccgcatgcgcacaaggagcagaagccgaccagctcgtcatgggaccgcccctctggcccgaccaatgtggaagcctcctcgggtgctccgccctccccgcaggc

SEQ ID NO: 10031 - DNA, 366 bp, Homo sapiens
  source 1..366: mol_type = other DNA
atgccccctgccgcgctacatctggggaggggggcgggtccatctgcttttaattttggtaagagaaaagctaatgaatcaggaatgaatctcctctccatctgaagtttgcggcctcaattctgaagcttaacctgccgtgcctttgctgctgccgcagtagattttcagctcctgaatcagggtgaattccacgagattggggggagagaaagggattccctcaccttttccggcaccaggaggaggcgcgcagcccagctccctacctacggctgccgaggttggccgcgcgtcgggaatctccccgacagtcctggccctcccccgccccccgggttggtttttcccagctgcggaggttgg

SEQ ID NO: 10032 - DNA, 385 bp, Homo sapiens
  source 1..385: mol_type = other DNA
gcgcaactcctttaactcaacgtggcagagctgtacagccaactcatgattcttagtgtcgtttgttttgagtcacactacacctccttgaacaatcatttactgagtgcttaccgtattagattcagtaacctagtattgattattggcactttctaaatggcctttagattcaggtgactgccagataatctacacctttggctttgcagtaaccccactgctaaggcacttggcttctggcgtgcccgggtgtccaagtctccagctacctagagagacgtttctaactaccgcccctggcctgagtcagcggccccaaggccggcgaggtcaagttcctttggggcgccagggaaaaggccatggcagaggtgctgccacg

SEQ ID NO: 10033 - DNA, 457 bp, Homo sapiens
  source 1..457: mol_type = other DNA
aagtgcagatccatatgctttgaaaaggaactagccagaaagtagctataagattttctaaggctttcacatggtctaccctctgtatgctgtctgcacttagttgacaccatgtggataggtactttgtacctctgttgcattgctgcctatactgagtaatttgtgtttgctctgaattggattagtaagtcctttttattcttaaaattgacatctttattaaaatcttgtatatgaaataacagtactttgctctgatttactataaaacattattttagtgctcttctcagaaggaagaaccactctgatcagatctaaatctagtgtaggtcctattgaagaggaagaaagagatccttggccatttttgtttctttcatttttaattaccagagaaccgaaagaaggccatgaatatttccataatgccattgaaggctgcacccagctt

SEQ ID NO: 10034 - DNA, 446 bp, Homo sapiens
  source 1..446: mol_type = other DNA
cgtgccccagctactgtgagccgagatcgcgccactgcactccagccttggcgtaaataaataaaagcagctccttgtttttaagaagccctattgtcttatattttaatagttcttcattataagtatttacattatacactgtgtcaaacttttcaaaactatctttagtttagtttttacttttgtgaaagtgaatagtggagcgtacaagagagaagcaatggcaagtcaattcttgaaaattttgtcgctttgccaaaggtgtgaaccctgggtaagcagagtggggcgatagctagcctctcgccgcccacctttctctgggccaaagcctggttttgaaaatgcgcgccccgccccggcctccggggtcacgcgccttctcggtggtgcactctccggccggcaggtggcgctgtgagctggtaggcggcgccagccct

SEQ ID NO: 10035 - DNA, 560 bp, Homo sapiens
  source 1..560: mol_type = other DNA
agtagctggggcacgtaaataaattctaaataaataaatcctgtcatatattttaagataatagcttgacaatttttctaaaatcagtttaaagtttattatgttgatgcacaaattattatatctatcacaataatttgaagttatagatggaagcaacaactcacttaaaaaaataaagtttactattatttggtctcaaataattcatctatttgaaggatgatgatttcaactcttcatatcttgctattgaatgcttaaatattgacacattatattgaaatatacaacttccgtagcacaacttactctttataattgttttgttagcttaaaagatttttatatatttagttacgtatttgtaaaaactttcatttttttacggtatggtgatagagctctagactcaaaacatatgaaatattgagaaactattcaaataatatttaaaagctgttttcagttcctattatctcttcaaatgaaaacatacagtccacttgagggcgctgtggcaaccgatcgggggcggggatcgaaggcctcagacgtcg

SEQ ID NO: 10036 - DNA, 285 bp, Homo sapiens
  source 1..285: mol_type = other DNA
cttgaagacaattttaaaggtgattaacacatttgtaggttatatgtataatatgctgtattcttataatgaaataagctagaggaaaatatatgtactgttcattaagtggaagtggatcatcacaaagatcttcatgaacctcattgtcttcactgtgagtgcaactcaaattgcatgtttttcaagactcagctgtacctcagcatttaaaattgaatatattgaatactgctagttgaatcaaaaatagcaaatatagagaaatctttcaggttttgctat

SEQ ID NO: 10037 - DNA, 644 bp, Homo sapiens
  source 1..644: mol_type = other DNA
gcgtacccgggctccgggttcccgcctcccgcaccccgcactagataggggaagtcccgctgcaggtggcaggcagacacctgcagacgctctgcaaggaaaggctggggcccggcttccaatcccacccggggctcgggcttgggcggagccagacgctgcggcgagagaggccgcagtgccagcaggatgggctccgagttccccagcgccagtcgccacccctcggtcctggactcgcggaccgcccccccccaacaccgcgcctctgccccgaggggccggagaaggcttccctcgacgtcggagagggggatgcgggccgccggcggcgctcactgtgggcgaggtcgccctgtccgaggcccagcgacggggctgattccccacccccgccccggaaccccggcttcccaggaacgcagggcctgccgcccccagaggcccggatttggaggcggaggctgtgcctccgcggccgcagtgctctgagggcccgcgaccctcggccccaacccccgggccaccgcgggggcctcacccccgcagccgcagttcctcaggcgccagctgcgcgcgacctgcggcgaggcgggggcggggctggcggaccagggggcgtggcgacgagccggaagccacgc

SEQ ID NO: 10038 - DNA, 598 bp, Homo sapiens
  source 1..598: mol_type = other DNA
gagatgaggagcagtccgccagctgctagcctccttcattgcttcaatgaacagaacttgcaagaaatggtgaaaaatacttgcttttgtccagttggaaaaagctggcattcagtaaactaatttagttcaagacagtgatcagatctctttcctaaggatgaatacatatttgtaaaaactgagcagtcagttatgtgtcatgattattcataagagtgtaaaccagtcctgttaaaaaaggtccagataatatgagttcatcctttcatgcgttttagtacaactactttcaatgctgcctttattgaaagcatggtgattcccggcactccaccctgaggtccccgcctaggtccacgtaccagagccccggcaggagacccgcggcccgtcccgaccagcccgcccgcggggcgcaggggcctgtaggtgtgtcccgcgcgctccgccgctcggtcagtcgcccgccagaccactagcccctccgtcgggccgagtccgagcctcggggcccggcttacctcggtcaggaagcccgaaccgcagacgtggccctgcgtggcttccggctcgtcgccacgccccctggtccgcc

SEQ ID NO: 10039 - DNA, 431 bp, Homo sapiens
  source 1..431: mol_type = other DNA
tgcttactcatcattattcagagagagcagtggttcttgaacatcaggtttctagaacttcttattgacattcaaatacaattccggtggttccctccggcctcagggccccgggcatggccggcatcctggatggctctcaacagttctggggacccctcctaggtgtctgagcgaccgccggctctgcctgaaccgcttcccgggcagggggatcctggcctgacgctccccgctccctgcccccgccctgggtctctggggtcagcagagccacccagtgcactgaagcccatggtgggcagaggccctatggagccaagggctccggccgccacccccgctcagcagcgctgccgcaggctgccctgctggggacaccggcttcgctcgggcccctcccgcccagccgctgggcctttcccagtgcg

SEQ ID NO: 10040 - DNA, 358 bp, Homo sapiens
  source 1..358: mol_type = other DNA
tgcttactcatcattattcagagagagcagtggttcttgaacatcaggtttctagaacttcttattgacattcaaatacaattccggtggttccctccggcctcagggccccgggcatggccggcatcctggatggctctcaacagttctggggacccctcctaggtgtctgagcgaccgccggctctgcctgaaccgcttcccgggcagggggatcctggcctgacgctccccgctccctgcccccgccctgggtctctggggtcagcagagccacccagtgcactgaagcccatggtgggcagaggccctatggagccaagggctccggccgccacccccgctcagcagcgctgcc

SEQ ID NO: 10041 - DNA, 386 bp, Homo sapiens
  source 1..386: mol_type = other DNA
taagtatgttataatctcattaaaagtacacagaactaagtgttacaagacatgctaagaccttgtgttgtaagtttgttaaacaaatgacttaaaggttactcgcccaggaaaaccagccttttccctgcagacggaaactgacgcgctccccctggaggcagcgcaggatgctcccgggggtccaggcgtcccagcctgaggtccccatcctcgtgtgcagcctgggcctccgttcttctagatgcctggggtctcaacagcaagcagtgaggaatgagactcttaactgaacaactcctgagactgttaagagtatactattacaggcttaattcaggggtgagacacggccaggtccgccccgttcctcgccgtggtgcggc

SEQ ID NO: 10042 - DNA, 601 bp, Homo sapiens
  source 1..601: mol_type = other DNA
tagttttgatcttcatgctactgtgagaattaaaaaaaaagtttgaaaatgtcacgtccaacactatatttaattggcagaaattacttcttaagggtacaaagattactgtcgaaggtaatctgggactcgattacccgggctcccagttgtaactgagacaagaaaatcgccctgctcatctgggcctcggagcctttgacaggcgggcgtgtaggggctgggctccgccaggcagcgcgcgacgacgcccttgccttggccttcagcccccaacgcccagggctccccccgcagtcggcgggcaggtgtgcgtggtgcgcgagcccagtgcgtgccgggtgcggcgccagcagcggaggggcggcccggcgcccagcggagagccgctggctgggtgggtgtcggcctccccgcctccttctctccccgccggcttgccggggatgcttgcgcgaggcgccccctcgcctttaagctcccggccccggggggcggtgtgtagctgggagggggccgcgaggcgctccgccgagggctcgtccgggtttgtccgccgccgtcacctgactcgtcggaggagccacagctgaggtggggg

SEQ ID NO: 10043 - DNA, 443 bp, Homo sapiens
  source 1..443: mol_type = other DNA
ctgctataaaactggagtacaagtttttttaatagaattgcgtttttatttcccttaaaagactagtacttaggaaatcatgactgcatatatataacaaaacgttgagatcgataggtatcgatatatggctttagttttgatcttcatgctactgtgagaattaaaaaaaaagtttgaaaatgtcacgtccaacactatatttaattggcagaaattacttcttaagggtacaaagattactgtcgaaggtaatctgggactcgattacccgggctcccagttgtaactgagacaagaaaatcgccctgctcatctgggcctcggagcctttgacaggcgggcgtgtaggggctgggctccgccaggcagcgcgcgacgacgcccttgccttggccttcagcccccaacgcccagggctccccccgcagtcggcgggcagg

SEQ ID NO: 10044 - DNA, 505 bp, Homo sapiens
  source 1..505: mol_type = other DNA
actattaataattaaattattttcctatgcagtagctgaatgaatagcagagacaactatagtttacaatcaagatttttgtctaaacttttaagagaaagtccagttttattatttaaaacattttgaaaaaaattataacatttatatatcatcttttcctcgatgcataacactttttacaaatgccctcaaaaaagaattttgtaattaccattgagtgacaaaatacctcttgttgccaataattttctattatcttcaaataataataggctggagtatgaacctagtttatcaatacttttttaaaaaaccgacattctccccattttttagaaaattgttccatgaagaggaattaagtttattcctttgaattctagtctgatcccagtttgggatgcagaaccagttatttgccacaggccaagtcctgagtctccagcgaatcttggcctttttgcagaaatccacaaaggcgattaacattcgctcgatgcac

SEQ ID NO: 10045 - DNA, 428 bp, Homo sapiens
  source 1..428: mol_type = other DNA
aaaaaaattataacatttatatatcatcttttcctcgatgcataacactttttacaaatgccctcaaaaaagaattttgtaattaccattgagtgacaaaatacctcttgttgccaataattttctattatcttcaaataataataggctggagtatgaacctagtttatcaatacttttttaaaaaaccgacattctccccattttttagaaaattgttccatgaagaggaattaagtttattcctttgaattctagtctgatcccagtttgggatgcagaaccagttatttgccacaggccaagtcctgagtctccagcgaatcttggcctttttgcagaaatccacaaaggcgattaacattcgctcgatgcacgcgttcacacccggggctcagcccggtgcgccttcaccgcgagggctaata

SEQ ID NO: 10046 - DNA, 476 bp, Homo sapiens
  source 1..476: mol_type = other DNA
acctcttgttgccaataattttctattatcttcaaataataataggctggagtatgaacctagtttatcaatacttttttaaaaaaccgacattctccccattttttagaaaattgttccatgaagaggaattaagtttattcctttgaattctagtctgatcccagtttgggatgcagaaccagttatttgccacaggccaagtcctgagtctccagcgaatcttggcctttttgcagaaatccacaaaggcgattaacattcgctcgatgcacgcgttcacacccggggctcagcccggtgcgccttcaccgcgagggctaatatgcccgcgagctggcagcggccttccgcccagctctgcggcgtcatggagaacgcgggaggcgtggagctgcggcgtgcgcggccaccgacggccctacgcggcgcgcgggcgcggactccgggtaggcttccccgcgctgctctgcgcc

SEQ ID NO: 10047 - DNA, 465 bp, Homo sapiens
  source 1..465: mol_type = other DNA
aaccatcagattttgagcattattcccattaatatgttggaatagcacaacacttattcagtacctaatattaatcaggcactgcagtatgtagtttacacatgatcctttaatctttaataaacccattatgcagatggggaaaatgagactttgagatactaaagtaacttgcataagcctcagtcattaagtgcagggatggcatgcaaaccaaatctgacttaccacagctggaggtgagctgcatcattcattagccctcagcatgcttaaaggtgaagtttaaggatgattaagcattaaggaaagaatttcagagaaactaaaattcgttttagtccatatttcaagtagtgagtacaatgaacagacattgctgttccgggttaacaggaaagttcgggatgcggaactagctgagcctccgcggacgtgctgcgtcagaatgcgcctcacccctgg

SEQ ID NO: 10048 - DNA, 362 bp, Homo sapiens
  source 1..362: mol_type = other DNA
tatctggcaagatttactatataggcttagctatactcttagaggaaattcaaagatcaatttttagtgaaaccgctttattttgaatttgagagaaatctgtccaattagaatgatgtcaccatatccttattaagtatcccttaatactaatctagactaatttttctttgaggaccaagtggtccttacatatggctcttcaagaaggcaggaagtttgcctcccagcatggtgcctgcgactggtcaccaggttgttgattccctagtgacaagctgtactactaatttccaggagacattatactcagctagttatatagcttacttaactgtgacgagattagagaaggtcactga

SEQ ID NO: 10049 - DNA, 346 bp, Homo sapiens
  source 1..346: mol_type = other DNA
ttcctttaaccttcctaagttacagtttctcatcagtaaaatggaatctcagtgcctgccacacagcaagtgctttctatctcacatactatgtattttagttatttgttatgttgtagaatgcaatgcctggcatgcatgacacctggaccagtgggcgagggaagcccggggaattctctgactcaggctctgacccggactcggaggagctcacctcctcttggccaaggcggcctcgcgctggggaggcggctctcgcgctggggaggcggctcccgcgctgcagccctgctccggcgccccgcgccgcctccgctgcgggtcgggagcgcgcgtctccgcc

SEQ ID NO: 10050 - DNA, 402 bp, Homo sapiens
  source 1..402: mol_type = other DNA
gaagtcaacttctcaataaatggtagcttaagatatttcttttattattcatatttgcatcatacatatttgtattgcaagaaagacttgatgaataaacagttctagctaaagatgaggtcctgaactaagtctaccatcagcaaaacctgcagctgttgtagattttacttacaataacttaataagaatcttgctgaggtggtggaacagagtccccaggtctttgcaggccaaagaaataattcaatctcttctccaagcctgctggaagcctcccgctgtccccttttctaaggaacgtagtgcagcagcgaaggtttagccactagagtgtctttctcagccacggcccacgtgaccagcccgggtcatgtgactccagaacccggcagctgaagt

SEQ ID NO: 10051 - DNA, 522 bp, Homo sapiens
  source 1..522: mol_type = other DNA
ggagacttggccggcgcgtcgccggttcctggatcccaacacaagcgagaaagcggaaacgccaaatctgttttttgcccgcgcgcgtgtgcccgcgggctcgccgtgcagcatgctaagcctcaaggcgcacgtttctcggtggaggcgctgatcggcgccgagaagcagcaacagcttcagaggcggcgggggccgtggacgacggaggctgcagccgcggcggcggcgcgggcgaaaagggttcttctgagggagacgaaggcgctgcgctcccgccgccggctggggcgacgtctgggccggctcggagtggcgcagacctggagcgcggagccgcgggtgagtgcgtgcgcgccgcgtccctacatggccaaggccactcagccactagcgcattggccgtgtcaggctcgcctcgcgggcggccgccgcccactcggcgacccgcgccttcggccgcggctgtttgctgcgcctagcggtgcagctctgtgctggggagcgacggcataccccacc

SEQ ID NO: 10052 - DNA, 617 bp, Homo sapiens
  source 1..617: mol_type = other DNA
ctatttataccaaacatatatatatatatttgttaatcctaacaaaaagtcgagttgaaactacaaaacaaattgtacaaatatatatgtttggtgtcatttaattaaaaagcactgattttattaaatttgttttaaatacatcaatggactccttaaaagcctggtaacgattgtaaattgtcaactaaacttatttcaaaaatttcattttgcgaagttttaaggggttttaaagttgtccatatcgttaaagacgtacagaatgaaaatacgttttaaaaccactctttgaaagaaaaggtggcgtgctttttctgacatttatatgacggactaaaggatttacatatttcttaacctggtatcccctaagaaaaagtttaaataagcctaagccatatctggcgcaatttacggaaccttgaaagattcctgattttctaaaagccgggaacttccgcctttccaggtcctggtacgtcagacagagttcagcgtccgtgtggctggcacatccaagccagacagcgggcgcgggctgcgcggagtcggcgcctcctgattggccggccgtctgggtgatggacagggacccgggctccgcccccgccgct

SEQ ID NO: 10053 - DNA, 405 bp, Homo sapiens
  source 1..405: mol_type = other DNA
gactgggagaggcagagaggaccaaatctccctgacacagacaatcgtttgctttattaaacaagtgtcttgtattacacacagagagtatgcattatgtggatgcacacaaaaaatatgatgaaaagtagatactaagcatactgagtactttgggttttgaatcattaacatcacagctgtttctaataatttttcccaaaatgtttcattttgtaaaaaatgaatgaaacagttgatttactgatactgggattttaaatggaaatgcaatggaggagttgctcattcatccaccactacatatcccttaaaattctgaggtttagacagaaattcataaaataaaatctggggttataagaacatttacgttaatattcagaggccagtgccttctttagg

SEQ ID NO: 10054 - DNA, 544 bp, Homo sapiens
  source 1..544: mol_type = other DNA
atgtggactcataccacatatgaaaattaactcaaaatggattaaaggtctaagagtttaaattataaaactcttaggagaggaaaatcttcctaacattgtatttggctatgacttaagaagggcagcatcccttcccgtcctgtaaggttttaattgtgaataaacaaggaactggattcgaatgatttcttagtttcttctcagtgagcttcggctctcctcgaatgaggcgagactcagagaggacccaggcgcggggcggacccctccggcgcaccagcagccgaactgccggcgcccaggctccctggtccggccgggatgcggccggtacccgctccccgccgggaacaacctctccactcttcctgcagggagctggtgccagccgacagccgcgccagggccgctccgggtaccagggtcggatcgggtgacgtcgcgaacttgcgcctggccgccaagccggcctccaggctgaagaaggacccgccccggccttgacccgggccccgcccctccagccggggcaccgagcccc

SEQ ID NO: 10055 - DNA, 352 bp, Homo sapiens
  source 1..352: mol_type = other DNA
aatgattgaaactatagtactgtacctacaccatggggtataagagggattttccggagccggcgtgaattgtgcccgtgagcgcgcaaacctgctcccacccggagccgagtgtacggtgaggcgcggagcgttgcggggtcggggaagcgctaccacccgctcccgggctccacgagctccggttgcccctcaggcagcgcccggcggctacgggggtgctgtccggaaatggccggaagactgcgcgctactccggccaggagggcggagcggcgagacgctagaggccggccgttcctctggtcggctggggaccgcggccgcgcacgcgcggcggggggcgtggggc

SEQ ID NO: 10056 - DNA, 395 bp, Homo sapiens
  source 1..395: mol_type = other DNA
tagcaataatggaacaggatggtacattctgataaaggataataatgcatcattaaagatccatgtttttgtaatacgggaaaatattcatgaaactacatacatcattaaaaaacatttgttttcctaggaaagagagatgacaggcacaggctctgtctttagaacgtaatgattgaaactatagtactgtacctacaccatggggtataagagggattttccggagccggcgtgaattgtgcccgtgagcgcgcaaacctgctcccacccggagccgagtgtacggtgaggcgcggagcgttgcggggtcggggaagcgctaccacccgctcccgggctccacgagctccggttgcccctcaggcagcgcccggcggctacgggggtgctgt

SEQ ID NO: 10057 - DNA, 640 bp, Homo sapiens
  source 1..640: mol_type = other DNA
agcaaaaagaagttcatagttattaaaggcaacttttttggctagacagtatatttagaattaccatgttaaggcttgtctttttaatgttatcattatgtatgtacacattattaatttaagatgatttatctaactgattccttttgttacctggctagcagggaaaaggataggagcatattctattgcagaagaccttcctatgaagatcatttgaactcttggactttgatatgaatttctttaacaattttctctgcagtgcaagttattaaactaaagctactctattttcaaaatgtgttatcttaataaagaataaagttcttttaaaaatctgctctaagtagatttttccccttttttaaattaaggatattttgaaatattcttgaatttgtgcatttaaattttattgcagtggtatagatgaatgccactgatggtatccttaaattttatttttaatcatgatttatcttttttatagtgatcacttttgaattgtgttcatgtaatcatcagactgttcttttcagaacctttttaaaagggttggttaactacctcagtagcagagttgaactataccctgtctgtactgtacatagaaaatctttgtagataaaagcaaggc

SEQ ID NO: 10058 - DNA, 655 bp, Homo sapiens
  source 1..655: mol_type = other DNA
ccactttcagttgcctaaagtttatcctaactaacctaaaactcagattgagtatatttgtgagttgcactctaaataatcactgtacttacctaattaaaaataaaacagctttacagttagttttgggtaagcaaatatatatctgaaggataaaatttacctcacagactggtttgtattaaagatctaatagtatatggtctatacttctaacagtaatgatgggaaaagtagcttgaatttaaaggtattatacctgacaataaagttacatgtgaaaaatacatgacttgaaagacaaactttcttaaaaatgtcactaaatttcaaatctcaaggtcaaacaagtctgagatgtttgctttcagcatatttttcaaaaatgggaattacttgcaagttaatgggtaactttaaggtgtgacttcatttttcctgttagtctttttttttttttaaataaaatcagtttgtgaacaaaatggggttttcaaacagcaaaaagaagttcatagttattaaaggcaacttttttggctagacagtatatttagaattaccatgttaaggcttgtctttttaatgttatcattatgtatgtacacattattaatttaagatgatttatctaactgattccttttgttacctg

SEQ ID NO: 10059 - DNA, 515 bp, Homo sapiens
  source 1..515: mol_type = other DNA
tgcctcgccccgccccgggggacacgtgcgcctgcagcttcccgaggaggagagcgcggggcggtggcagcggcgtggacaccgcctggaacggctacgcggccgcggagccgggggcgggggccgggcgcgcacagaccggtgggtgccctccgggaagcggcagtcgcactcagcgcccacagcactctgccccgccagccccggaccgggcagggatggggcgggcgggagacacgctgagccggcccgccccgcctggaggggagagggagggggagggaaggggcgggcctttcattcagtctcggcccctcggccgccaccgtcggagcggaagggcggggtcttgtgcctcccccacccccaacccaaggggtgaggagcggggaaggcggcgcggcgtgggggcggagcccgcgggcgcgcgtcccgaggcgtaggctacgccactcgtgcctgagcgaccgcggggggtcacgcgggggcgcgcgcgcgcaccgggagcgcgctcg

SEQ ID NO: 10060 - DNA, 647 bp, Homo sapiens
  source 1..647: mol_type = other DNA
gttttctattaaacattttgtttttcatgtatatcattaaaatatcacatatgtttgatgatctcaaatccttactaaacatacttcatatctgatccaagtagctatgaaaataatctagcattttatgtgcttgtgcaccaaaccactgatttgttatcatagcacagagctcatctggggaaccagtaagctcttaaaaataagctttttaatcaaaaggacattgtttctatttttcattacagctgccctggataaaattagtatcttgtacctagtaaacgattataaaggaaacgtcatttcacagaagatttagttgccaaggttttttttaaaagaaacacagacatttttctctttgtgctgtttcaagttgctcaaactgtgccagaagcccttaactgcttggactgcaaggcaggagccgctcctcgctccactggagccagcccagccggggtttccgcgtccaagcctggggcgcccctcccttcgccgaaggttcccgtgaaagcggagccgcgcggctgcgaggagggcccacagttggggagatcgagtctccaagggcgactctcgcactcgagtaccgccagtccggcggaccaaaggtccgcgggtctccgcgccgctccccttgc

SEQ ID NO: 10061 - DNA, 710 bp, Homo sapiens
  source 1..710: mol_type = other DNA
ctttgtgctgtttcaagttgctcaaactgtgccagaagcccttaactgcttggactgcaaggcaggagccgctcctcgctccactggagccagcccagccggggtttccgcgtccaagcctggggcgcccctcccttcgccgaaggttcccgtgaaagcggagccgcgcggctgcgaggagggcccacagttggggagatcgagtctccaagggcgactctcgcactcgagtaccgccagtccggcggaccaaaggtccgcgggtctccgcgccgctccccttgcctcgccccgccccgggggacacgtgcgcctgcagcttcccgaggaggagagcgcggggcggtggcagcggcgtggacaccgcctggaacggctacgcggccgcggagccgggggcgggggccgggcgcgcacagaccggtgggtgccctccgggaagcggcagtcgcactcagcgcccacagcactctgccccgccagccccggaccgggcagggatggggcgggcgggagacacgctgagccggcccgccccgcctggaggggagagggagggggagggaaggggcgggcctttcattcagtctcggcccctcggccgccaccgtcggagcggaagggcggggtcttgtgcctcccccacccccaacccaaggggtgaggagcggggaaggcggcgcggcgtgggggcggagcccgcgggcgcg

SEQ ID NO: 10062 - DNA, 469 bp, Homo sapiens
  source 1..469: mol_type = other DNA
gtcatagttttctattaaacattttgtttttcatgtatatcattaaaatatcacatatgtttgatgatctcaaatccttactaaacatacttcatatctgatccaagtagctatgaaaataatctagcattttatgtgcttgtgcaccaaaccactgatttgttatcatagcacagagctcatctggggaaccagtaagctcttaaaaataagctttttaatcaaaaggacattgtttctatttttcattacagctgccctggataaaattagtatcttgtacctagtaaacgattataaaggaaacgtcatttcacagaagatttagttgccaaggttttttttaaaagaaacacagacatttttctctttgtgctgtttcaagttgctcaaactgtgccagaagcccttaactgcttggactgcaaggcaggagccgctcctcgctccactggagccagcccagccg

SEQ ID NO: 10063 - DNA, 240 bp, Homo sapiens
  source 1..240: mol_type = other DNA
aacttaaagtgttggcagctacccaagttgccaagattgtctagttcattttatggctagtttgaacaataaggaagcttcttttagcttctagctcccctggaggagggctaagaaatgcacctccagagggtctgtttgccaggctcgctacagaagaagggagtagggtctgccccccttctccgccagggctgtggccggcaaggggctcaggaggtgagtcccttgcccacaccc

SEQ ID NO: 10064 - DNA, 219 bp, Homo sapiens
  source 1..219: mol_type = other DNA
aaggaagcttcttttagcttctagctcccctggaggagggctaagaaatgcacctccagagggtctgtttgccaggctcgctacagaagaagggagtagggtctgccccccttctccgccagggctgtggccggcaaggggctcaggaggtgagtcccttgcccacacccctcggagctgcgacctctccgttcacggtgtcccgggaggctgcgaccc

SEQ ID NO: 10065 - DNA, 592 bp, Homo sapiens
  source 1..592: mol_type = other DNA
taagaacctaaacaaatttgtttatcacagaaaataaatcacaaaacaactttgcgttctttggcaagtttctttatgttaaacaagaattgctttttgcatcacatagatcttctaaactctttgttgaagaggtccgttccttacggaagctgaagagctgtgcaggttttctgggttgggaaccttggagctaagtgtcccacacctggcaagccatgacatacatattttctgttcaggcagcttcttagaattgcctcatacctttctcatgcatctttattaaattcagatgcaaattaattttagaaaagtctaaataggtgtattaattaaatagaaatgctctatatctattttcggaaatctatagctcttgtttaggtaaatatcaggtacttagctaattaaatgtctcttgtttatagattacgtacaaagtgacagcgtactctcttttcatgggcttgaaattgacgtcatggtaaaaattgacgtcatggtaattacaccaagtacccttcaatcattggatggaatttcctgttgatcccagggcttaatggaaacactctgctggtataaaagc

SEQ ID NO: 10066 - DNA, 296 bp, Homo sapiens
  source 1..296: mol_type = other DNA
gtagagtctaaatcacggtcactgaggattgaacctctagagaatgtgtttccaggggacagcgagatctggtacctcacgcactagatccctcctctccgatcctcttggggaacaggaggatatgtccgccgggatcgggacgccggagagggtcgcccctccctaggctttttcccgtcgcggcgcccacgtgaccgagagcaggccttcggggtaagtaaaccgccgttttgccctttgtacgtgctcggcgccgtgcaagcgcgcccggcacgtgaccccgccgaacgttt

SEQ ID NO: 10067 - DNA, 532 bp, Homo sapiens
  source 1..532: mol_type = other DNA
aaatataggaaaagaaaggcactttaaaatatttatttctctctgattctttaccaactccaggattctctatagaaacaggctgggtgtgggtaatcccaacactttgggcagagtgagactccgtctaaagaacaatgtataacacatttatgcttccaagattttattttgctttatttcacaattattttcatcttggttaaattagaaggataattgaggctctattaaaagcatgttctttaaatattattctccttatttgcatttggcttttcctcaaatggaaaggaaaacgatatccaaatagacaattttttaaaatccctccttatttaattacctgttcatataaatatatgaaaatatatatgctagccttttttttttttctgggaaaaactcaaaggctacaattaatttaaatttaatatttttaacattatattgacgaagaaaatgtcttccttggatcccagactctgggtgggtggggggtttctactggaccaaacccaggatagactcc

SEQ ID NO: 10068 - DNA, 302 bp, Homo sapiens
  source 1..302: mol_type = other DNA
caagggggaagtgagatttgggtggggacacagagccaataatggcagagtattaactctacacttaaatgactgttcccctaaagtaggggtaggaagaaatcagatctagctttctttcccaaatcagaatgctttccactttcatgaaataaacatacttctaggagatgtctccttttatttatacaaacatacacaccgccgggtccccgcagccccgcgccgctgcgccgcagcctccggaagacaggggacgctgtggcgccgggcggggcgccctccgccgctctctctagcag

SEQ ID NO: 10069 - DNA, 319 bp, Homo sapiens
  source 1..319: mol_type = other DNA
caagggggaagtgagatttgggtggggacacagagccaataatggcagagtattaactctacacttaaatgactgttcccctaaagtaggggtaggaagaaatcagatctagctttctttcccaaatcagaatgctttccactttcatgaaataaacatacttctaggagatgtctccttttatttatacaaacatacacaccgccgggtccccgcagccccgcgccgctgcgccgcagcctccggaagacaggggacgctgtggcgccgggcggggcgccctccgccgctctctctagcaggcggggcggcgaagcgg

SEQ ID NO: 10070 - DNA, 578 bp, Homo sapiens
  source 1..578: mol_type = other DNA
attttgaaaaactgacctacactttttgtgcattatatgtatgtcaatatagtttaagtcatattatataaaaatttcgcatttggcttttaacaaatataagacaaacacaaggtttttgttaacataattttaaatacctgcctgatattttacttaaataacgtgtttagatttctaaggctgtgctattataaatcttgttactctgaacatctatttttacacaagcttcttccacattccgggaacattttctagaagaaataaaattaatttcctagtaatcagggaatgtccttaagcaaagcatattctgcatatttgtttgcagtttgagaaaaattactgtttaaaaataaaaccttgttgtttgatttaatcctttttcacactttcacgtctgaaggtggtaacgatattatcgttaacatgaaataaaacctcgatactttttacttttgttttttaaaactagatacttttacaagaactctagttaatatccttcttaaccacggaggttataaagtttttccagcccatcttttgggggaaagaccctcaaagtgggaccc

SEQ ID NO: 10071 - DNA, 308 bp, Homo sapiens
  source 1..308: mol_type = other DNA
ttgccatctaggtagccaacatgaggaggggccgaagaaacaacacttaaaatttgtgatcgtcagtttaatgtactgatctggagcaaggacgcctcagctcagtacgccgctccctccctcctctccagccagggaagggatgcctacgtaacctcggcttcatcccttcttcaaaggggaatgaggcagcggtagaatcgaggacgtagccatgccagatgcactcgggatttcccgcgcgccctcgcggctgcagggcagaggggcatcaccctccggggcgggtttccggcgcggggaggcgg

SEQ ID NO: 10072 - DNA, 308 bp, Homo sapiens
  source 1..308: mol_type = other DNA
tcaattatgatagctaattaacatcccctagtgaaagtggagattatcaggctggagtgcaggggcgcaatctcggctcagctgggattaccggtgcgcgccacctctgaacgatatgtagaataaattataacttatctagaacacaaaatgttgccgcaagtagtttctgttactgcttctctaacagcttggcggggagacgcagtttcgggaaggccggccgaccgggaggccggcgaggcgctctaggccgagcggcttcgctctatgaccacaaggggcggtccccggtgtcctgcgcgggg

SEQ ID NO: 10073 - DNA, 413 bp, Homo sapiens
  source 1..413: mol_type = other DNA
ttccttgagggtggccaatgagtcttaaaaattctttttgattaattccacgcctgtaatcccggagaccccgacaaaacaaagcaattatattgcaattttgtagagtctcagatagctcttatatctttgggttggtccttctgaagaacaaatcgccgccacccagggtacctttcaaagtttactttggacttctgaagctccaccagctccagagaagggggaggaggtggtgacccacccggctggcccgcagaaggcctttggggtccctagctcctcagggactcctctgcgcgctccgggatccatacctggcgcggcggaagtgcgccgcagtccgccagttccccgcctccccgcgccggaaacccgccccggagggtgatgcccctctgccctgcagccgc

SEQ ID NO: 10074 - DNA, 285 bp, Homo sapiens
  source 1..285: mol_type = other DNA
agaactcaaggtcttactttttgtggtccagaacagcgctgtccaacagaactttctgtaatgatagaaatgtcctatatctgcactatctaaaatggtagctgcagccacatgtgatgattgagcactaagaaactgaatttttatttaatcttactttattttaactcaaatttaaatagccacatgtggtgagtgactaatcttgccatctaggtagccaacatgaggaggggccgaagaaacaacacttaaaatttgtgatcgtcagtttaatgtactgat

SEQ ID NO: 10075 - DNA, 366 bp, Homo sapiens
  source 1..366: mol_type = other DNA
atcaaggatcctgtaacctgatggtactgtcgctaccgaaattaagctaactttgactagagattggtttattatatttcccagatctgaaatcaactatacggagaatcttaaaagatttctatgtcgcttatgtagggggatttaaattccaacccggaactcatgacggaagtcgtagtttccgcccccgtgcgcaagcgctctgaggccgccggatttgaatcggcggcgtgctgcggcagctacctccgcctcaggcgcggcgcaaagctcgagcggacggcgggggcggccggagcctctctcgggggagccgcgcctgaggaggcggaagaacccccctgacgcgactggcgtgtgcct

SEQ ID NO: 10076 - DNA, 472 bp, Homo sapiens
  source 1..472: mol_type = other DNA
cacagatcactttctaaattagcgctgtatttgattcttattttaggtatgtgactaaaagtacaacttctagaaacactttttaaaatggatccatccaatatctattacctaaacatttcactgtcttttgattagttttgtaacaaagttcacaatatatgcaccaatattcaaaaacaatttgattctgtaagcctattcatttacagaagcaaagctggctttacagaatttcatcaaggatcctgtaacctgatggtactgtcgctaccgaaattaagctaactttgactagagattggtttattatatttcccagatctgaaatcaactatacggagaatcttaaaagatttctatgtcgcttatgtagggggatttaaattccaacccggaactcatgacggaagtcgtagtttccgcccccgtgcgcaagcgctctgaggccgccggatttgaatcggcggcg

SEQ ID NO: 10077 - DNA, 474 bp, Homo sapiens
  source 1..474: mol_type = other DNA
tatgcaagttcactttcatctcacttgtcataggaatttaaacattaagcctcaaagtatgtatatgtcttttcaaaaaccacattgtgactactagatgaggtaaaatttgtaataacagaatcaaaaaagtcaaccgttaaccttgaatcataagaatcactgatcatcgtaatctcttcacttaaaaatgagggacttggagtatcagatgatttctaaatttcttcttactcacaatacatcccaaattggatattctggataagaaattttgaaaccgcaacgcctaccgcacccggaaggctcaaggaggcgccctgggcagggaacttccggttgcggggaagggcggcgtcctctcccgcagcctagctccgcgcgagttccaggcgctcagcaccggagcagcgccccggcaaccattgaggcgtcacggttcgtcacgggattcggagccgggcggctacgggc

SEQ ID NO: 10078 - DNA, 751 bp, Homo sapiens
  source 1..751: mol_type = other DNA
tggccgcgcgaccgcagccaggtagcgaacggctcgggggctgcgcagcgcggtcccaaagctcagcccggccccgggcccagctcgctgccgcctgccacgggagcggccttgcgcggagggagggggcgcgagaccgcacccccgggcccggcgcgcctcggcctctgggctcccgcccggctcagcccgctgccccagacgtgacccccgcggaaggcgctgcccgggagggccccgaggtcgtgggcggcgcatgcaccagccccttcttggcctggtcagcgaggtcatggcagcgggggcctccgggagcgcggcggcggaggaggacgcgggccgaagaggcttgtcccctctggccccagggctggcgccgcggcgggtcccccgccccaagcaaagtttggggctacgggcgctgcgctcaggtccctccccgcgcagttccctcggcggggtctgtgccgccgccgctgccagggcaggacaaaactgcgcgagcgggacgaggcgacgggcgcccgggctggcggagacgggcggccccacgccgggccaggcggggctcgcgggaggacccagtgaaggggcgaggctcgccggcggtcggagcagcggggcgccagtcccggtcgctgtcgcgggcgggcgctggagaccgggacgccggcgctcggacggactgacttgctgaccgcccgccggacctcgccagcagcccggcgccggcgccgcctcccgcacgcta

SEQ ID NO: 10079 - DNA, 752 bp, Homo sapiens
  source 1..752: mol_type = other DNA
gccgggaaccgaacccagcgcccagcacggggcccttgtggccgacgtgacgtggctccgtcaggtggaccgccgccgcacaccctgcagggccccgggggcggaggggaggggagcgcctcctcggcagaagcggcggcccaggcttgtataaatgtaaagacttaagccgcggctgctgagcacaccgcggctccccaggcgcccgccgctgccgcccccgagtcccagagcccccagtccggccctggagtggggcgtcctcctccagcgaagcgaggagcggggccccgggtggccggggagggggcgcgccgggccgggaggcgcggagccagccgcctacggagcccaactgtttgcatcggggaccggcgggcggggcgcgcccgagtggtctcgccgggaaagggcggcgggcgctggagaaggcgcctggcgcgaagctgggcggcgccccgagggcggaggacaggtggccgcgcgaccgcagccaggtagcgaacggctcgggggctgcgcagcgcggtcccaaagctcagcccggccccgggcccagctcgctgccgcctgccacgggagcggccttgcgcggagggagggggcgcgagaccgcacccccgggcccggcgcgcctcggcctctgggctcccgcccggctcagcccgctgccccagacgtgacccccgcggaaggcgctgcccgggagggccccgaggtcgtgggcggcgcatgcaccagccccttcttgg

SEQ ID NO: 10080 - DNA, 802 bp, Homo sapiens
  source 1..802: mol_type = other DNA
gccgcggctgctgagcacaccgcggctccccaggcgcccgccgctgccgcccccgagtcccagagcccccagtccggccctggagtggggcgtcctcctccagcgaagcgaggagcggggccccgggtggccggggagggggcgcgccgggccgggaggcgcggagccagccgcctacggagcccaactgtttgcatcggggaccggcgggcggggcgcgcccgagtggtctcgccgggaaagggcggcgggcgctggagaaggcgcctggcgcgaagctgggcggcgccccgagggcggaggacaggtggccgcgcgaccgcagccaggtagcgaacggctcgggggctgcgcagcgcggtcccaaagctcagcccggccccgggcccagctcgctgccgcctgccacgggagcggccttgcgcggagggagggggcgcgagaccgcacccccgggcccggcgcgcctcggcctctgggctcccgcccggctcagcccgctgccccagacgtgacccccgcggaaggcgctgcccgggagggccccgaggtcgtgggcggcgcatgcaccagccccttcttggcctggtcagcgaggtcatggcagcgggggcctccgggagcgcggcggcggaggaggacgcgggccgaagaggcttgtcccctctggccccagggctggcgccgcggcgggtcccccgccccaagcaaagtttggggctacgggcgctgcgctcaggtccctccccgcgcagttccctcggcggggtctgtgccgccgccgctgccagggcaggacaaa

SEQ ID NO: 10081 - DNA, 506 bp, Homo sapiens
  source 1..506: mol_type = other DNA
aatggtgtgaatgagccccatcagaacctttcttattagagactaatagactgtcttactagactaatagtctaagagactctaactggtttattgtcacttaatcttgggagaggagaagtttttcctcccagcacatgacactgttcattacaaattaattttaacatgaatataagctcagagagcagagattgagtttgtcttacactcattgaatcatctagaagttctatttttttacttcattcacacatgaacaacaaattaatgtactacagtatttttgaatatggaatccgtgtactatagtatttttttttccaaagctaactgagtatttctcaattgaactagttatttgatccttgataaatatgaccactaaaaggctcacagctgttttcgggctgggttcagggggagagagaggtcagaacttaccttttccccattttgtgattttagaacacattagcccaagagacatcaacaggttgttgcta

SEQ ID NO: 10082 - DNA, 458 bp, Homo sapiens
  source 1..458: mol_type = other DNA
tccaatatagcattggtgtttaaagccaaactacattataattgatcgccatcatccagctttatatttaacactttaatctggtaacaaaggaaagttaaaggacggcatttataaaaatttttcaagcacctctgcttataaaaggcactgtttatttataccacattaattagtaactttttttggagacatggttgaaactttgatccagaaatgtacaaacaaaactctaagtgttctggaattaatttcagaagcttcatagatgaagcttgagctgctcagaaggcctcttttcatcagtaaaatagatgccgagggcaattgcacatgcgcaaaggcgaaccagtagcgtccgggcgcgtccgtggagcgggacggggcggggcggggcggtgccgagtggggcgagagaaggcccgctcctcccattgacctcggaaagggggcggggc

SEQ ID NO: 10083 - DNA, 442 bp, Homo sapiens
  source 1..442: mol_type = other DNA
cttgttctgtcaggggaggagtttacaccttcggtgtgacctaactcaggctgcctcagagagattgctgttggactgcctctattgaactcttactgagggggtcctccaatatagcattggtgtttaaagccaaactacattataattgatcgccatcatccagctttatatttaacactttaatctggtaacaaaggaaagttaaaggacggcatttataaaaatttttcaagcacctctgcttataaaaggcactgtttatttataccacattaattagtaactttttttggagacatggttgaaactttgatccagaaatgtacaaacaaaactctaagtgttctggaattaatttcagaagcttcatagatgaagcttgagctgctcagaaggcctcttttcatcagtaaaatagatgccgagggcaattgcacat

SEQ ID NO: 10084 - DNA, 403 bp, Homo sapiens
  source 1..403: mol_type = other DNA
acagttcctggaacataaatgcttgataaattatggccacaattctttaaatttctaagccggcttgccgcagtaaaaactccaacttccatttatggatttacggctaattcaatcagtaagtcactttgatttttactctgatcaccgagactaagtagataaaatttaaatgtagactgattttcttcacgattgctagggaagaaatccttacagcgtacttagaaatctttgttttaaaatgataacgctgttatgttggcggaggaggcaaccgtggccttgccaaagtcatccccactccctagcccggcgaagcgcaggggcgtgctgggagagctcgctggcagcgcctgcgcagtgcgccctctttgtgccaggctgcagcaagctggttcgg

SEQ ID NO: 10085 - DNA, 326 bp, Homo sapiens
  source 1..326: mol_type = other DNA
gaaaaggggcactcttcacacttaggagtcccagccctgaataacaggctgtgcctgccggccaggagagggtaatttaaattttgcttaactgtccctgcagaggcggatgaagaatcatataataccaaggtcctgcgctcaggacgatgcgctgagggccgcggaggctgagcgggggcgcggttgaaagcggctctcactgaccccacctcccggcgtccccgccgcggcctcaagcccacccggatcccatagggcctgggaacggccgcgctcctgtcttcggaattcccgcggcccctgggccgcgccggcgccgcccc

SEQ ID NO: 10086 - DNA, 630 bp, Homo sapiens
  source 1..630: mol_type = other DNA
aagtgatgaaaaagtcattccttagtatctgtgttcagacactctgtagacaaaattctcacaggtgagcctatactcacgcccttaaaaagggtgttaatacttttaaagaaaaacgcactgatctcattcattgaagttattttttgtatgcagaataaaattgtgtgaataaagcgggcactcgctggagcgcaaaccctcccgactcccggcggggagcgacctgagctcgggagaggggcgccccgtgtcccacggcccgccggctgcggtgctgaaccgcggaaagcgacgcgggcccgggacacgatgtgcgcggcgccggggctgaaagctggccgggagggcggaggcgcgagttccgccctgggccgcggagtagtccgagggctcacacctccccaagtggcgcagcctgggcccgcggggaggctccgcgcagctcccccgagcctccgccgggcctcggccgtgctccgcggcgcggctgttaccccgcccctcctccgcgcccccaacctgcagccgcggccgttcaccggtggcgtccgcgacgttcctgatgaacagcctcgtgtgcccgcggccgctggactcgctccggagctccgccggcccccggcgcga

SEQ ID NO: 10087 - DNA, 622 bp, Homo sapiens
  source 1..622: mol_type = other DNA
attgctccaactaatgagcaggataggtaattttcttcagcagaatacatttaataacacatttgttgttttgtgacatttactctggtattattagcatatagagtagtaaaaacagtagttgatagtcttattttcaaaatattcatttggtttatcacattaatatattgtgtcccatttaacatagttgagacaaagctgatagaagcttttaatatgtggaaaacctcagaatataaacatctacagtgttattaataggcataccgtcaacaacagtttttcagactttgtggttcactctggagaaaaacaagagcatgacatcttgaatttcttcactgggtaattaaaaaactcagttataatgtaacaccagctgcacatatcatgttagtggagttcagcatcaattaaaattataaacgaaacctgtcatatgttccctttcaaagctgttcaagacaactgtccaatatttactaccataaatcttttaactctttggttttaactcatttcaaatttttagttctactctattcaaataaattattatataatagctaatacataccaagagctagtagctgcagcttttagtgggcagtaccgaaac

SEQ ID NO: 10088 - DNA, 644 bp, Homo sapiens
  source 1..644: mol_type = other DNA
tagaagcttttaatatgtggaaaacctcagaatataaacatctacagtgttattaataggcataccgtcaacaacagtttttcagactttgtggttcactctggagaaaaacaagagcatgacatcttgaatttcttcactgggtaattaaaaaactcagttataatgtaacaccagctgcacatatcatgttagtggagttcagcatcaattaaaattataaacgaaacctgtcatatgttccctttcaaagctgttcaagacaactgtccaatatttactaccataaatcttttaactctttggttttaactcatttcaaatttttagttctactctattcaaataaattattatataatagctaatacataccaagagctagtagctgcagcttttagtgggcagtaccgaaacttacgtacagtaccgtcgttagtacagcacaggaaatacaaaccttgtgaggttttaattactaatgcaggtggaagagtcccgagccctgccttctcgcctggtagggtacgagcggccgccagcgtttcccgcgcggcgccgggggcggccccgggactgggggtggtgccctgggagctgtgtggccgcgtgcgcgctccgccggggtcctggaggcctctggg

SEQ ID NO: 10089 - DNA, 397 bp, Homo sapiens
  source 1..397: mol_type = other DNA
tccttaaaatggcttgtcacacctcgttaaatgaacatcaaatagggcattcaaggcaaggctttcattgcataattgatgtctgaattcaaataagaagaatcgtgttagtgagaatcatatataatttaagaatacttcattctggtttataaaagcagaatttaaaagcttattgtgaattactcaaataacccgaaaaaaatttctctcatcaattttttttcaatcctgactcagtttaccggtacagtctgagactgtcttttgatgaagacacaaggctacagttaatttattatatttttcaaatgtggacagtgcagcaaggttcatgataagaacaatgcaactgacaaggaaatttacttgtttctgcgccaaacaaagacaaaaa

SEQ ID NO: 10090 - DNA, 472 bp, Homo sapiens
  source 1..472: mol_type = other DNA
tttgaagtttaacctttcatctcacattaaatgtaattcctttttttgacagcttttacatctaaacaaaccaaaaaaacaactctggccagagccgtggctcacgcctgtgtggcacacacctgtggtcccagccacgctggaggctgaggtgggaaagatcgcgccactgcatcccagcctgggcgacagagcggtgacaccaaaaataaaaaaaatcctattccatttccttgaccctgcgggaccgcgcgcgggcagccggctgcggacagctttgcagccggagcccggcgccccctccgagctctcgagggcccgggggtcccggacctcgcctacagcgggcagggccgggacgagaggacgaggacgccgctcgctcctgcacctccccaagccggcttcgccgggcgggcggcggctgggtagtgaccgaccgccacgaagctcccggacgagggcgggtgac

SEQ ID NO: 10091 - DNA, 608 bp, Homo sapiens
  source 1..608: mol_type = other DNA
tgtaattcctttttttgacagcttttacatctaaacaaaccaaaaaaacaactctggccagagccgtggctcacgcctgtgtggcacacacctgtggtcccagccacgctggaggctgaggtgggaaagatcgcgccactgcatcccagcctgggcgacagagcggtgacaccaaaaataaaaaaaatcctattccatttccttgaccctgcgggaccgcgcgcgggcagccggctgcggacagctttgcagccggagcccggcgccccctccgagctctcgagggcccgggggtcccggacctcgcctacagcgggcagggccgggacgagaggacgaggacgccgctcgctcctgcacctccccaagccggcttcgccgggcgggcggcggctgggtagtgaccgaccgccacgaagctcccggacgagggcgggtgacgcaagccgggcggccgcggcagggctgggcctgcgactacccgaggaggctgacctccagcccgggcgcccggttcagcgccgccccggccggcgccggtgcctgccaggcactcagggaggcgggggcgcagtggaggaggcggcgccatcgcgaagcgagcgcct

SEQ ID NO: 10092 - DNA, 481 bp, Homo sapiens
  source 1..481: mol_type = other DNA
ttgaaatattttattcatgtggggaatagcccccgagtgtgttatacactgagacctttcttggtgggaagcactttgaaccaattgctatggagactgcgcctccactgcgtccacagggtgtcctgggcacgctgctctggtgggcgccacagtgttgggaggccacccgcttgggaccctagctcatccgcccacggtagacgctctgcgggcggcgggggggacattgagggtgtgcggcgccccctcccctgcctgtgcggggaccacgtgaaggagaggcgcgtgggggcccctggcgcgcagccgcggtgggtgacggccggcgtcccgggggccccgtgtacggggcgttctgggagggtgcaggggccccgcgcctccccggtctccttcctcggcccagcgccccgccgagtggtgcccgcggccgggcgagcgcgcgcgcgcccgtgcggggtgtagtgtgtgtcaggtg

SEQ ID NO: 10093 - DNA, 357 bp, Homo sapiens
  source 1..357: mol_type = other DNA
gggcaggaacactgccctgaccgcaccaccggctgagctgctggcacctgtaggagctggatcatcatgctgacggattgaaatattttattcatgtggggaatagcccccgagtgtgttatacactgagacctttcttggtgggaagcactttgaaccaattgctatggagactgcgcctccactgcgtccacagggtgtcctgggcacgctgctctggtgggcgccacagtgttgggaggccacccgcttgggaccctagctcatccgcccacggtagacgctctgcgggcggcgggggggacattgagggtgtgcggcgccccctcccctgcctgtgcggggaccacgtgaagg

SEQ ID NO: 10094 - DNA, 415 bp, Homo sapiens
  source 1..415: mol_type = other DNA
tcccagctactacttgggttgcagtgagcctatggtgccattgcactccagcttcgtctcaaaaaaaaattttccgcctttggagagcagatacctgtccatgcttcttcaaagggtggaatgagatcccatccaaatgcagctcatttccatatgggatgattccaacaagatacttatagtcaagctgttagaaataaaggctatattgaaatatccactagtgaaggtgggaggttcctcctgctcccactcttcagaaggcggtggccccacccaggagagggctgcagatcggggccagccccagggcctccgcggtgccacctctctctcgcgagggtccctgccgtgccccggctcgccgctgggaggcgctgcggcaccggcgtaggagccgccggcaggggtgggg

SEQ ID NO: 10095 - DNA, 481 bp, Homo sapiens
  source 1..481: mol_type = other DNA
tgccattgcactccagcttcgtctcaaaaaaaaattttccgcctttggagagcagatacctgtccatgcttcttcaaagggtggaatgagatcccatccaaatgcagctcatttccatatgggatgattccaacaagatacttatagtcaagctgttagaaataaaggctatattgaaatatccactagtgaaggtgggaggttcctcctgctcccactcttcagaaggcggtggccccacccaggagagggctgcagatcggggccagccccagggcctccgcggtgccacctctctctcgcgagggtccctgccgtgccccggctcgccgctgggaggcgctgcggcaccggcgtaggagccgccggcaggggtggggcggggccggcgggacggggcagagggccctgcggcggcggacgcggcgggctcggccacaggtaacccgcaggagccgagagcgctgcctggcgcgcgggc

SEQ ID NO: 10096 - DNA, 279 bp, Homo sapiens
  source 1..279: mol_type = other DNA
aaatatatatttattgcattttgacagctgaaacaacagactaaaactgtagtttaaaatactgtgctttggatttgccctgtacctggccatacacaagacaacttctccattgagtgggcagctctacagagaactcctggcagtagtgaccaggacttcagggctttgctccattgaccttatgcaggacaaacttaagtcaaaatgtgtttctcctaatcacagcaattagccgggaatggtggcacatgcctgtaatcccagttacttgtgcac

SEQ ID NO: 10097 - DNA, 501 bp, Homo sapiens
  source 1..501: mol_type = other DNA
attcaaagctttgtaaactgtaaaagaaattaacactttcaattttagtattttcaactatacacatttttaaaggctcgaaagaacatttaaatacgttttcacctctttcccccaaaaaaaccttaacttttttttcgagacagggtctcgctcagtggtgcgatctcggatcactgcaaagcgattctcctgcctcagcatcccgaggagctgggattacaggcaccttacaggcctcccagagtgcttgggactgcaggtgagagccaccgcgcccggcctccttcagctagggctcagtcccgaagcctcgcgctctcagtccgagagcaacccgcgggccgtccgctcctgcgcgctgaggctccggcggaccttacccccagcgacgctaacgttaaagcaggtaccggcggtggggtcctgatgcggcgtgcgcgccctctgagattggcccgatgcctgcggggcggtgcttcgctccgcggggcctgacgg

SEQ ID NO: 10098 - DNA, 429 bp, Homo sapiens
  source 1..429: mol_type = other DNA
aactagtaattgaacatttttcgttctattttaattcgatacaacaccacttggaaaattaaaaagcctgaggcttagggattcaaagctttgtaaactgtaaaagaaattaacactttcaattttagtattttcaactatacacatttttaaaggctcgaaagaacatttaaatacgttttcacctctttcccccaaaaaaaccttaacttttttttcgagacagggtctcgctcagtggtgcgatctcggatcactgcaaagcgattctcctgcctcagcatcccgaggagctgggattacaggcaccttacaggcctcccagagtgcttgggactgcaggtgagagccaccgcgcccggcctccttcagctagggctcagtcccgaagcctcgcgctctcagtccgagagcaacccgcgggccgtc

SEQ ID NO: 10099 - DNA, 408 bp, Homo sapiens
  source 1..408: mol_type = other DNA
caagctgcgcacttggtttctcaagtcgcctgcttggcagagctttttgataaactttggaattatttcttctgaggaggcaagaactaaggttactgctgacccctacctatacagggggtaccgctaacaagaaggggagaatcagcttttctttctttttttgagacagtaaaagtctgctggagtgcagctgcacgaagcgattctcctgcctcagcctcccgagtagctgggactacaggcgcggcgcccgcgcccggccgagaatcagcaaggcacggtgggctgagactcacacgcctttccctcccggaaaaggcgggacagcgaagactggcgtttccgccgctgaggggctgaggccgggagggcgcagcgtagccgtcccgagctgatgacgtcaac

SEQ ID NO: 10100 - DNA, 290 bp, Homo sapiens
  source 1..290: mol_type = other DNA
tttagggcctatttaggcatgttggtttgatgcctaaataaacatttcagaaacatccatccgaaagatttagacaattcctgggcgcgcccacccatagtccccgcccagaccctctcgaaggaccgggcgggggcggagggaacgtggctacctgcggccagacgtcaggcgcggcccttccctggtttcccaggggcagccgacctccactcgggggactacccggaccgggccccccctgcccggcccaagacaacccggttccttggaggcgggactgagtgcct

SEQ ID NO: 10101 - DNA, 137 bp, Homo sapiens
  source 1..137: mol_type = other DNA
gggtcgagatcgcgccattgcactccagccttcgcgtctatggtcccagctactctggaggcagaggtcaggctgagctcctgaggcaaagtattaaataaatgacagacctctcaaaggcactcagtcccgcctcc

SEQ ID NO: 10102 - DNA, 473 bp, Homo sapiens
  source 1..473: mol_type = other DNA
ttaggatgaatcctaacacttggccaaggttaaaatttaaggaattgttagaagattcatctgagaaatgtaccacaaacttttagtaagcagctagctgctagaagggattttgtttgtttaaaaaaaaaagaaaaagtctgtctttgacattggttatatctaaggattcttaagtccttgaaagcagtgactttgagagcatcccttcatgtcctctgtgtccatgtaataggaactcagtgtatattggattaatatttctgtggctcttcagtgacagatgaatgaatgtgctcaattcaggtaactacatttgaccactttgatcctcctttggagaaggagatgctaatgtggataatgagaatttggttctttattgacattgtctgaatttatcatataaattcaagaacacactaaaagtttgttggctttgtagttgaattgagattaactttctctaacct

SEQ ID NO: 10103 - DNA, 432 bp, Homo sapiens
  source 1..432: mol_type = other DNA
ttattgcaaatgtacattcagctcacacgacggcctttatcccacccaaaagggagtccggtcagctttgtgggggcctaaccctgggatccccggggtgcagcacctagggctctgccctcgtctttcgtggccgggaaggccaggccgagcggggcggtcagccgggccgggaggagggggctctccgggccgcgcggccgcacaaagcggggagatctgctgctgcggcggcatgaggcgcgccccctcccgcgagccagcggagcgcgcgcgcccgcccccgtcccccgccccccgccccagcccccggagcgccattcgcggagcggcttacgctagtcgccgggcgtaccgcgccccagcggccggggaggtgcgctgcccggctcccgtaaagcgccgaatgtcaagggcgttccggggagagcg

SEQ ID NO: 10104 - DNA, 500 bp, Homo sapiens
  source 1..500: mol_type = other DNA
ctagtgccccgcactcgtaaaaattataaatatcttatttacaaaatattaacttctgttcttgatcactcagcctttattcatgatgattagaatttctcatagcgtcaggtactagctcaaaataacaggagcaactgcttctttccattgaaaacacattttggtcttaaagaacttagtttagggatgaaacttaaaagtaagcttcgtgctgcaggcccttaagggaccaaccgttgctgaggccctgtaataaaggtctcgcgaaatttgttctagaggcctgtttccgatttcagcccggaaccggaagtcgcagcggagccagagccggacacggctgtggccgctgcctctacccccgccacggatcgccgggtagtaggactgcgcggctccaggctgagggtcggtccggaggcgggtgggcgcgggtctcacccggattgtccgggtggcaccgttcccggccccaccgggcgccgcgagggatcatg

SEQ ID NO: 10105 - DNA, 480 bp, Homo sapiens
  source 1..480: mol_type = other DNA
cagttaggctttatgtcaaacggactatataaaattcaacagttagtttaaaactaaaacttgtgctggtagtacaacatgagcaatactgaccatcttaatggtgacaaaaatattcgattttcaaggcgactgttgatgattcatttaccaatctaaagcactagtgccccgcactcgtaaaaattataaatatcttatttacaaaatattaacttctgttcttgatcactcagcctttattcatgatgattagaatttctcatagcgtcaggtactagctcaaaataacaggagcaactgcttctttccattgaaaacacattttggtcttaaagaacttagtttagggatgaaacttaaaagtaagcttcgtgctgcaggcccttaagggaccaaccgttgctgaggccctgtaataaaggtctcgcgaaatttgttctagaggcctgtttccgatttcagcccggaaccggaagt

SEQ ID NO: 10106 - DNA, 326 bp, Homo sapiens
  source 1..326: mol_type = other DNA
agaaaggtcttgctttatgaatttaatacgtagtggcattctttaaaattcagtgtaatttatgcagcgaagcttgttgcaaactcttggaaacattgtttaaacataatacactttacttatctggaccagcaacctgactccgctcggtggctcctgcctcggaccccgcccccgtggccggggcggccatttcgccgggacccgccccttggccctgggaatcgcctcctggcaggccggctgtgcctgccactcagcccgagtggcggaggctctcagctcggagccccgccccctccccccctaattgatattattggagt

SEQ ID NO: 10107 - DNA, 639 bp, Homo sapiens
  source 1..639: mol_type = other DNA
atataaaactaggaaaatagtatttttagggaatcgtacatatgtaactattttcagaaatacaacggaatgagtaatataaaattcagcataagagatgtttttagagagtcttctttctagaagactccaaaaatactggcatttttttttctttaagatatgcacatgagatatactcatatgtatatttcccaattaaaattggtgtacaaaatctttttaaggagagcccttatgaaactgttcacatcagcaagttctagcttgaataaggacttcctgttactatgtaaccaaacaaaagatagcattttcttgttttctgaagctaatgtaagatggaaaccttcgttgtaatcctatttcaaaaattatttctagtacttcagtacagatgtgattttatagaatacattcgcaaattataaagttctatttttacaaaaatcaaaacagttcctcaactttaaaagtttgaaaaccagtgtacttgtaaagcacttgttctgaatgtttcacataaagagcctcagaacgtttctaatagggcgggagtgcagtctgactccaatccaccgaccggaggctccggaagaccccgagccccgcccgcccctgaaagcgcccggaacgctg

SEQ ID NO: 10108 - DNA, 375 bp, Homo sapiens
  source 1..375: mol_type = other DNA
ttatttattctagagactatgatcctttaggcttttaaaaaaacgaatccaccaactgaaagattacttcatttttttttaaagaaaattataaaataaaattacggacagaaatcagttaataatgttccacttgtttttatatttactgaatgtgtgttaactcacaaagctctgtgataaagagattcagagatctttcaatccctaggtttttagaatgtttgggttaaaacgatatatgtataaatttctttttttacctcgttagctggtcaaccccggcggtaaacaccaggcaacagctccaaggggcaggcgatggttgccggcattgagctccctgctggcgccttctggcgggacagccagtgc

SEQ ID NO: 10109 - DNA, 384 bp, Homo sapiens
  source 1..384: mol_type = other DNA
aaagctctgtgataaagagattcagagatctttcaatccctaggtttttagaatgtttgggttaaaacgatatatgtataaatttctttttttacctcgttagctggtcaaccccggcggtaaacaccaggcaacagctccaaggggcaggcgatggttgccggcattgagctccctgctggcgccttctggcgggacagccagtgccaggctgcggatcctggtccaggagccgccgcaatggagcgggcggcagtgtgcgcgcacaggtgccacaggccggtggcggggagagctgtagaggctgcctcccggactcagcactcgcaccagcgcgctgaagccgcggctgctgccaagcttgggtaacccccagcctgagcc

SEQ ID NO: 10110 - DNA, 515 bp, Homo sapiens
  source 1..515: mol_type = other DNA
ttcatcaaatttcatgttgggcattatggctaagaggacagacctttgcaccaggctgtctggctttgaattacagctcaactagtttgttagatgtgtaaccatgggctagcgatctaacctctcttttacctcatcggtaaaaatagggattatgtcatagaactgttgtcatattacatgatgtgatgtttgtaaagagcataatgtccagcaatatatgtttttgctgatattacctataatctaatgactcataaaacctatctagctgggatttctgctacaaacttgatatatctacttggaagtctaatatatatctcaaatttattatatatagaatggaaagtcaactacatccagttgcagatgcaaaaagatgtcaaatctagattgttctgaattgaagttttctgtggactatattcaacatagcagagtggttattttaaaatataagtcagctcatacactgattaaaatctggagttcttacacaggtttataagaat

SEQ ID NO: 10111 - DNA, 426 bp, Homo sapiens
  source 1..426: mol_type = other DNA
gacagttgcattctcttatgagcctctccaaatgaggcaatcgacatgatttattttcaattcataagatataaaaaagatataaaaaagaagtaaatatctactcaacagggaagcaggatacatgttctctttgtatattcctcattatttgatgaagttaatcattgcaataagagaaaattatacagcctttatgacacgcaaatttattcactctgtaaaaaaaaagtaattactttcggtaaagtagttaatacaactattactctacggaaatattaggggtagcggcagccccgccagtctcgccgggaggaacccccagcgccgcggtacaaccacggcacttccgcccgccccccgcgcctcgggcgcaagcgtttggtgtgtctgcgtcgggggcggagcctcttgtccctctgc

SEQ ID NO: 10112 - DNA, 427 bp, Homo sapiens
  source 1..427: mol_type = other DNA
taatcaaggttgtatatgatcttaatgaagcttctttctgctttccttgcccataaaacaagcctaaggattaaaatctattactaatgaaatatacttatgttcattttcataatgtcttaatcattaaagtcaagtgaataacaaaacatacagttaactggcgaccttagaagatattaacatttcattcctttaagttatctgggattaaggcagaatttcttctctcatcctgccttccagagattctaagagaaaatgtcacttgctgaattggattggtttaatatccaaaaatttcttcagatccaactcttgacatccactttttgtgttttgaagatttcaaaagactcaatgagtttatgctttatgaagtcatagagccatggatgtgatgtcacaattgtggccagctcaccag

SEQ ID NO: 10113 - DNA, 457 bp, Homo sapiens
  source 1..457: mol_type = other DNA
gaccttagaagatattaacatttcattcctttaagttatctgggattaaggcagaatttcttctctcatcctgccttccagagattctaagagaaaatgtcacttgctgaattggattggtttaatatccaaaaatttcttcagatccaactcttgacatccactttttgtgttttgaagatttcaaaagactcaatgagtttatgctttatgaagtcatagagccatggatgtgatgtcacaattgtggccagctcaccagtgtctcttaaggtaccaataattttgcaggtaagagcatgggacacagaaaatacatcatccttttagagtattatttttataaatatgcccttaatttagcctagttagtggaaatttcttaatcctggcagaatttccctttaaggatgtcctgcagagaatttgttactcatagttttaagtaaaaattgac

SEQ ID NO: 10114 - DNA, 339 bp, Homo sapiens
  source 1..339: mol_type = other DNA
gctgctgatgctgggagcctcctgggcatcaccacctgaggctgtggcctcagtaatgatcacatatgttgataatagctgaaaatatcacttgtcactgaaagcagcattttccactgtctccccaactgggcagtagccactggcactctgggggcccgtgcagggttgccccagtgccgggtgggcgcacttgcggtaccccctttgcccaggcgggccggcgatccgccctggggcagctcgggcgtggcctccagtcccggtctaaaaccggggccggcgcctttaagagggagcggggggcgggaacccctcggcggctcgcgaggcggcggc

SEQ ID NO: 10115 - DNA, 426 bp, Homo sapiens
  source 1..426: mol_type = other DNA
ttattttagattaataacaatatttctaaagggtcttaaataaatctgttcctttcattaaattacacagaggcttaaaatcgaaagggaacatcctttcattattttcctttcacaaaagcaggaaagggcaacttcagtttgaccctgacttcaaggtcaacttcctttgattttgctgggcctcactccacaagaattaaatcagaaagtctggggtagggcccggcacagaactttacagagcttcccgggtgactccctcggagttcctgggtctggggacttaagccccgccacctcccgccggaagcggccctcgtgggagccgtcactcgccccgaagggaggggctcccctcccgagcgctagggggcgacgggcacgcatttaagcgcccgcggcggggcttcccctcacttgtgc

SEQ ID NO: 10116 - DNA, 540 bp, Homo sapiens
  source 1..540: mol_type = other DNA
aatagagtggaattttggtttataaaccaaaattctgttaagaaacagtatttttaaggctattagacaatttttaccaatttcatctatattttaaatttaaatgtttcttttattttgaaataatttttcgcaaggctttgcttttcaaatgtaaatgtttaatcttttaaacacattaatttgcaatagagcacttgtataaatgtactttgaaatgtttggaaagttgatgcgagatgttcctttgcttttttgaacataatttgtttactactttgaattttcatgctcatacctactaaagcatcagactgtttcatatttaagagcagtttaaaaagcacgtgagggtcttcttaatctgtcttaaaaaatgtatgtggagattatatgtttttgagacactgtcagtgagagggccccacacagaggcttctatgtctccagcctgcagcctggagaactatgaagacttctgtttagcctcacacagaggtactgggtttttccctagacttagggtaaggaaaaggattt

SEQ ID NO: 10117 - DNA, 502 bp, Homo sapiens
  source 1..502: mol_type = other DNA
gtattctgaaaatgctagttgaacctcctttattttaaatagaaaggataagagtagaagcttatatggcaaggagaaacatatgttctgtggtctactaaagagcaaaattctgaaatatactttgaaaaactaaaactcagttcttttgcattttataagattatatcacaaactgaattttaagagggttatgtttttctttgaaaatgtttatacccttctacaaaaaaataagttggctaaggaacagtgttaattgaaatagagtacgtaaagcagcaatttaaatatactatggtatatctacatattaagcagcattatatttttaagtgtaactgatagttttatttttgttaacaaacaaaacagattttgctgagcgggcagtcacctacagctgttggagatgtgagcttcaactggtctccaggacacaagctgagaagttcctaggagggcggctgcagctcttgcatccaatcacagaagcaggagt

SEQ ID NO: 10118 - DNA, 443 bp, Homo sapiens
  source 1..443: mol_type = other DNA
tattgctcttttagaaaaacaacttttctagttacttaagacaaaagtttattgaattgagttcttctttttaatgtaagcaggtactgttacaaattttagtgttttcattttaatttaattcaacgtattttcacaggttagttagaagtatgattcttaatttccaaatatttagagtatttcaagtatctactttatttctagtttaatgccattatgatcagactatacactttgtacgatttaaatctttttaaagttgatgacatccatctgttacagagaaaattaattgttgcactgcactcactggagtaaatatcttctctttggtccggccagaggataaaccttgtcccggactgacggactctcgcgagaattcgtggggctccgactgtttccgcgcagatatcgcgaggcgattggtagccggggga

SEQ ID NO: 10119 - DNA, 325 bp, Homo sapiens
  source 1..325: mol_type = other DNA
cattttattaaatattttccatcttagtggatattttgtaacaagataaatatgatgcaagcccttgtagtcccagctactcgggaggctgaggcaggagaatcgcgtgagccgagatcgcgccactgcactccagcctgcctgtaggtgaattataccttcagagtgcatataatgtatattatacttttcctctacggaagtccttgtaggacccagaaagctcctccccctggcctgggagcgggctgtccgtaggacccagagcacctcccatgggagaaacgcccggctttgccgccccgcctccccgggcccgccgctc

SEQ ID NO: 10120 - DNA, 606 bp, Homo sapiens
  source 1..606: mol_type = other DNA
ccttttgcgcctcaatctcttcttccaaacaatttaaaactatccatgctcttgttaaaatctgtgcatatattacaagcttctattctttgtacttatgaactttaataaatgaagttaaaggaaaaaagattttctaatccctggtcagagaaatctctctaggtagagtattttgttatttgccaaaccagataataagagtgtttttatacattatgcaaatacgcaggctcccagcccccgcctggtggcgtctcctgcccgcagctccgcgccgccccaggtgagtcctgcgcgttccctactctggggcccgcgggaggggctggagcgcaggcggagggccggccggggtaggggaggaccgggatccgggccccgactgcagcttcctcgcggtggggccgcatttccaggcacctccgccgcccttgcccgcgcgcggcgagcggtttttgggcgtgccgcccggaggcgcggagcctgcccggcgcgcctcagccctgcagatccggccccggcggaggcggccggaccgcggagatgcgggcgcggggtaggtgactttatcccgcctctgtttccctgccccggggagcaatg

SEQ ID NO: 10121 - DNA, 349 bp, Homo sapiens
  source 1..349: mol_type = other DNA
atggagaatccctggtgccgacaaggccaggcagccttctggcctctctcctgaggtgaccacaccccaggaggccgtggtgcctaggcatcagctgaatttattatttattaacaaccttttgcgcctcaatctcttcttccaaacaatttaaaactatccatgctcttgttaaaatctgtgcatatattacaagcttctattctttgtacttatgaactttaataaatgaagttaaaggaaaaaagattttctaatccctggtcagagaaatctctctaggtagagtattttgttatttgccaaaccagataataagagtgtttttatacattatgcaaatacgcag

SEQ ID NO: 10122 - DNA, 487 bp, Homo sapiens
  source 1..487: mol_type = other DNA
cggtaaatttcgctaactgaaagaaccctgttgaaaatacagaataattttttgtcttcaatgttggagattgtcattgttcttacccaaagaaagactttgtgcatttagacgtaaaatgttactgatcaacatgatgtatataccctgtacaagataatagtcatttgcagaaaataagttttacatttggccttctggccatctgatatttagtgccttgaaaggggaaacaattcttcccttgaggaagaagaggaatataaaagtccttgaagagagaggtcaacttcgaacatgaggtttgaggtgtcctatagcaataaagtatcttcaaagttgtttatgatagtaaaaacatcttgcagtttaattccatgtgcaatttgctaaatgagcgctgcaggccgggcgcggtggctcacgcctgtaatcccagccctttgggaggccaaggcgggcgatcactgtactccagcctggggaa

SEQ ID NO: 10123 - DNA, 212 bp, Homo sapiens
  source 1..212: mol_type = other DNA
taataaacactgtatctttggacttgaacgttgttcatataaaaacactgtgaaatcaacatacggggtcagctaaggtctccgctttcgctgtgagagtattccatccttggaatactccgcgcttccagcgagttgcgaactcaaccccttctccaaggcgtgtttctaggagggaacatacttccccttaaaggaagatccaatcacgt

SEQ ID NO: 10124 - DNA, 351 bp, Homo sapiens
  source 1..351: mol_type = other DNA
gtggcacgcgcctgtaatccctgtaatcccagctacctgggagggattgtgccactgcattccatcctgggtgacagacccagactccgtctccgcctgcagtcccagctactcgggaggctgaggcaggcaacttgatccctgagaacaaagtcatcttcatttatttctctttccaatcacaggaaaaataagtcacaaaaccttgtactttattacaatgccacattgttctgtttttgaagtaagacaggagaccgagcggcttgggcccccggccagaattctcaagacgctctcgcgagagccttccaaccgccgcgagctctcgtgaacaaaggagactagggg

SEQ ID NO: 10125 - DNA, 431 bp, Homo sapiens
  source 1..431: mol_type = other DNA
gaagagttcatttgcaatatccatgattgaaacaaaatattttcaaaccaactacttttagtactatctagctaggaagggcgcggtggctcaagcctgtgatcccagcactttgggaggccggggcgggcggatcacaaggtgatggcgggcgcctgtagtcccagctactcgggaggctaaggcagtagttgccattgcactgcagtgcgcacgctggcccaggatcctaacaaattgctagtcggtggctatgagtcttagattatcagggactctccgggctctgcggacacgcagaacgcaggcgccacgcaagccggcccctccccgcgctcccgggccccgggcgcgccgcctggaaccctcccggtcctggctgggggcgggcgaacgaggccccacctctgccgggagcgggacgagcgcgc

SEQ ID NO: 10126 - DNA, 341 bp, Homo sapiens
  source 1..341: mol_type = other DNA
gaagtacaacgtcttgttagttcacaaagtaggtgtaagaaatgttttttttttaatagaaaagtcctcttcaaccctgggctgcggaccggggcgcaggatccccattcgaaacaaagtgatgagcagttgacctccccttctcaacttggtctggaggcttcatcatattttcggacgaaagactggcctgaacccaatccaaatgtatggcactttgtttaatctcctttacaataaagccaaggggagagaattaaaattattaaaatttatggagaaattatacagtggatttgtcacttaaaactgaggattaatggtcccgccggacctttgag

SEQ ID NO: 10127 - DNA, 365 bp, Homo sapiens
  source 1..365: mol_type = other DNA
ctccttgatttttctgagagattttagagatgatgtctttttgcacaaacactaactctaagttctgaaatgtatacttttaaaaattctgatctgttgaattttgaaattttaaccaatttcactaacctttcaagtttttctcattttcctaacttaatgtgaaatacaggacatttaaggtgctctaatgactataattatcatagggaccacaatggcaggcctgatttgagggcttttgcatatgtcaagccagtttgtcaccttatttgctaagtagctactaaggccaataaacacttgttcatataaaatggaggtttctacaaatgttcacaggaactttagtgactaccagtcta

SEQ ID NO: 10128 - DNA, 630 bp, Homo sapiens
  source 1..630: mol_type = other DNA
tctaaaagataattagtcagcaagagtcctggtgagcgtttgtttaaacagactgtatcctttctgtaaggaataatcatgttggacttttgtttcctgaaacaaaacccgacaaagtttaagatagctccccataggaaaactccccggccgagtttccacggtgaatttcgaaaaagacgcacttctttgggattaatttaaagacagttattgtatttatttcctctggcaatgaattccgtgtcgccatggtttcagagaaggcctcgcgcacgccgtcggccagcgactgccagcgggatgggcctttgggcgaaccctgcctcctccgccggcagggacctccgctgcctccggacgttcccggttctgctgggccgccgcgctggactgagcgctcaaccacccgaccccagggagctcgaggagcgcgggtcgcgcacgacgtcgggaaggcccaggaggccgcgagcagcggcggcaaccggacagcgccgacccggcaccctgagcagagcccggagcctgggcgcgcggagggcggctcggggccgactcgtgtcactcagccctggccaatgagcgcctcgcccctggccgcgccaggccaatgggaggcgagggggc

SEQ ID NO: 10129 - DNA, 440 bp, Homo sapiens
  source 1..440: mol_type = other DNA
tctctaggtgagtcctggaaggtttaatcaatccttaaagtcttcaaatgctgaacacagcacttcagaggtggtctgaccagtaaaacatattaactcatactatctttgcattgttggcttttagtctagaactctttgcagataaaccacacaattctttaggttcttctgaccgaagagctagcagccagagggctttggctgaaaaggaattatttcctccactggcccgttgcgggcagccagggtggagcgtcccgctcccgccctggggcgcatcctcgccgccgccgggaccttccgcctctgctcctccgaacccagcggactagaggctggaggcgggaggcggagcggcgcgcgcacgcgggcggggcagagggcccggagtcgacgagtcgacgtgccgacgttggcgctgcagcggggcggtgacg

SEQ ID NO: 10130 - DNA, 530 bp, Homo sapiens
  source 1..530: mol_type = other DNA
aagttaatttataagaaacctatttgaaatttatttatttcaaaatgacattataggctccttgattgcgagttgggggaaaaatatgaggaagatttctttccccaaatctacgtgaagaaaacgaagttaacctcatctggtcacgttgtggcttatgtagcttaggttaagttttctatccccaaccccacctacaatgggcggtattgttgcgagaccccggactcgacccaggaagagaatctctggcgggtcgcgtagcccgcctcgccgtccccgcctccagccctggccgcggtcccacgccgggtgaggagctgagcgcagggccaaagatgcgagcgggcagctgtatcgccgcgccccgtccgccctccaagccgcgcttgccggggtcgcgcccagtcacagggacagagtggagctggcgccggcctacacgtcaccgccccgctgcagcgccaacgtcggcacgtcgactcgtcgactccgggccctctgccccgcccgcgtgcgcgcgccgctcc

SEQ ID NO: 10131 - DNA, 378 bp, Homo sapiens
  source 1..378: mol_type = other DNA
gctgcttcccagactcctgtctccaatcttggagtctgcgacctcaggttcggcgcccactagatctcgaatccaacttctttctgaaatgtggtggcagggagcagggcactgtgactcccagcgcagcagcgctaccagagcgcatttgctctatgcgcgaccgtagttggactaagaggtccactttggagactaccagcagccctccaagccctggcagtggagctctagctcctgtggtccaggggtgggagatgcccccgagtggccgcggcggccaggagcgtgcaggggccacggggcgccggcgaggaacccccgccaggaggcgtgtctgtctctgccgccgccgccgccgctgctgctcctcggtca

SEQ ID NO: 10132 - DNA, 569 bp, Homo sapiens
  source 1..569: mol_type = other DNA
acagctttgtctctttgaggaagagaagctgaaaaagacaagccttttgtttctcccttggtaatatatccaagatatattggtgttagccaggctcacatttacccctttgagttaattttttgaagttccaacaaacaatgtaggtatccaaattttttgtaacttacaaagtcaaatcctttggatttcccacttgtaccaaataaatgaaaaaattttttcaggttgtcatcatttaattaagctattgtcaagttatttacaatgaagacaaaagcacaatatgcttttggatttgtttgattttattactctttaagtttgacatatgaaaataccatacttaaaacagttcatgtagggtacctgaaacaactaaacaattgtgccaatttctaatctgttttatagtaaagttatagaattggactgctcctgtacaactccccctgcgcccgcgttggcgtggcctgggcgcccccaacgtgactccgcccagggcgctcgagctggaaactacagttcccagaaggccacgcgagcccgggagggacgcggcggcgggg

SEQ ID NO: 10133 - DNA, 596 bp, Homo sapiens
  source 1..596: mol_type = other DNA
tgccttttgtgatgtttaatcttttaaaaatgttgacaatatatatttattatacaagttagttttacttagtgtaaaatattaaaattgtatatttttaataaatagacagaatattacttattttaataataaaaatgtatttttatgttgaaagaaattctatttctgtactttatttcttgaataaactcctaacgaaagccaagagagtcactacctagtgtaagacagttttagaggaatctgtaactattctgcctctttaggaaaaagaaaaaatacgaagaaatttgggcataaattattgaaggctttagtttgctgcacccattcaaacatcattgtttttatatatgcacaattattttctttgagcttaaaaaatgggtggaaaatttaacttctccattttaatttgagatttctcccataaaagttcactgaagaaatctatattcattcctggtcaaaataaaagtataaataagactctttcaatctaaccacaagttagatttgcaccagacaaactgactttgatttagctagtaatttaatgaaattcatcagttgattgtaagaagtccgcttac

SEQ ID NO: 10134 - DNA, 490 bp, Homo sapiens
  source 1..490: mol_type = other DNA
tatcctgaatgggcaggtgagactctctttcacttggccaacagctttgtctctttgaggaagagaagctgaaaaagacaagccttttgtttctcccttggtaatatatccaagatatattggtgttagccaggctcacatttacccctttgagttaattttttgaagttccaacaaacaatgtaggtatccaaattttttgtaacttacaaagtcaaatcctttggatttcccacttgtaccaaataaatgaaaaaattttttcaggttgtcatcatttaattaagctattgtcaagttatttacaatgaagacaaaagcacaatatgcttttggatttgtttgattttattactctttaagtttgacatatgaaaataccatacttaaaacagttcatgtagggtacctgaaacaactaaacaattgtgccaatttctaatctgttttatagtaaagttatagaattggactgctcctgtacaactcc

SEQ ID NO: 10135 - DNA, 638 bp, Homo sapiens
  source 1..638: mol_type = other DNA
ccgctgtggcaacgcagtgcccacaccgggcgccgacccagcagcacacatcgactgcccgcgtcttagcggcagcaccgaaagacgcggcgcgccggcttccgaaccgcaacttgctgcgctcacgtgccagactcgggaccgcgagcggcgtccgcacccgcacgcacacccggccacgctcgcactcgcgcggccgcggggccggctgcttacctccggggcctcatggtcgcgtcgctcacttcctggcgcgcggcggggccggggcaaggggacgcggaacagccgggcggcgcgcggccaccgggcacggaatccgctgtcgccaccactccgccgccgcagcccggcgagtggcggggcgcggggaggagggggagcgcggggcgcggcggcggcaccaggcggttcgactggagccctgcgtcagccggcggcacgcgcacacctgcccgccgccgctaccggccgcgtcattggctgccggcgccgagcgcgcgagattgaccattcattccagggccgggcgggcgagcgcggccgcggtggagctttaccgcgggcgcccccgaacccccgaagcgcgtccccgcgcaggccgtgggcgcgcacggccgctgccgccgtttgtgcga

SEQ ID NO: 10136 - DNA, 433 bp, Homo sapiens
  source 1..433: mol_type = other DNA
tatgtcctccagctcttggggaacataggaagtcattaatcacatctaaattttccaaaatggtttacctaaacacaatttgactatatgaaggtgaaaacgatttttctagtaggattttattttaaatttgaaaaaatttcgggcataatcaggtaatttagggatgtaattaggtttaattagatcttttataaattatatattttcctctaagaattgaattaaatatgaaattagggtttactgccatgttaacatcggttgttttatttaaacgaccccctcaggcttgtgtgtaaggcacgcgtgtgcacatatatggaagcacgaaatcagcattctgatttatcctaaagaagcgttccaaattgtctttaagataacatgtttttcataaattattttgatgtcagcatagatgaaatggcga

SEQ ID NO: 10137 - DNA, 510 bp, Homo sapiens
  source 1..510: mol_type = other DNA
tgtaccttcggtggtttatattgagatcacatttcacatgcatgaacgatctcataatctaataactgatgccaattttaaccaataatgggacacttttggtggaaactgggtgttgtccagtgaacagtaaaagttgatcggagcatactctcatgtctggtacgcgtgtcagatcccgcgcggcctcttccccctcttcctccgcagcaggaggcctgacccccgcgtcctgcacccgtgtggacaatcggacgggaactcgcgcgctttccgggctatatgggcgaatctcccaaaaaggagatatacgagtgggtcgtccaactttgaggggaaacgaggattctctttccgagtcctcgggtgtgcagacccgcagcggagtcgcgggagcgaggtgggaaatcctggccgcggcgccgggctccgcccgccggggggcgcggggcggcgggcgcatgcgcgtgcgcggtgcggccccagccctggctgccgccgcctgccgcc

SEQ ID NO: 10138 - DNA, 597 bp, Homo sapiens
  source 1..597: mol_type = other DNA
aatatttaaatatagagaaatataaattatgtactatatatggagaacaatccatggcagtcttcaattttttgtgtggaatattttttattatgaaacaatctaaagaaaatatgacatttttttaaatgtttatatttaaaatttttttacattggtataaaatcaccatattgtttcccaaaatcattataagaatacaaataatgcagctgtttttaaaaaggtaaaaatagtttctatcccactatcaagatatattcatctttaacatgaagtgaaaatcattgcgtatgtctttctatttttacacaaatatggtgaaaccccgtgtcgcgtggttgcgtgcgcctgcagtcccagctacttgggagcttgcagtgagctgagatcgcgccaccgcactccgatatgtcaaaagattaaaaagaaatgcttttataaaaaatagaattgttaaataagcaggaggccattagcctgagtctttctccctacttgtgtgaaaaactaactttgtaaacgaacagaaaactaactcaacagtgtattttttgtaattttggttttttacttctgtcatcagtgtataaaaac

SEQ ID NO: 10139 - DNA, 436 bp, Homo sapiens
  source 1..436: mol_type = other DNA
ttattgtttcatcacaaaaacaaaacaaaactttgctcaaaggaagaaaaaatgcacctgatcattgctttaaaattgtatgcatttatgttcattgatttgaatatagatattttatttttcatgcaaatcctaaggcagtgagccgtgatcaccactgcactccagcctggaaaaaaaaaaatactatatttacgaaacttcggtccgtagcggccgctaggattctccgcagccccgcaccccggtggccgaaccgcctgccccggcccagacgcagccgccgcgcccgcccacccggctgcgccccggggcgcgcgcccgtgcccggcacccgcccgcgccgccgcgccgctccggagcccgctgcggtcacgctgcgcccggcgccgcagggtgggcggcgaggcactcacgagggggacgctgagggctt

SEQ ID NO: 10140 - DNA, 498 bp, Homo sapiens
  source 1..498: mol_type = other DNA
tttcttccaggactttttggaagccagggatagaaaacacccattatgacatgtaactattaaattttcatgggtttcccagttccaccaggggtcctgggatgacttcaagtccagagtcgcaggcagtggacataaggccacctccagccctctgcttccaaggctggggagaggcaaggtctcccttcgccgccgtaaccagcccgggaacaggaaggctggggatccatcagcaaggaaaccctggggcttcactctggcgcggggacccggcctcggtggaaggacttgtccccggcgcagaggacgggcgggcggccgggcgtgggcgagcgcgtagccggcgtgctcctccgtgcgcccgggcggcgcgggcgcggccggcgatcctgcagagggagctgtgcgccggccttagcgcacgctcggtgccgcccgctccctcttgccgccgccgccgccgctgggcccgcccgccggggaggggctcccggc

SEQ ID NO: 10141 - DNA, 333 bp, Homo sapiens
  source 1..333: mol_type = other DNA
ttcagtaaaataacactgttatataaatgtaagaacaaatgaattcagtgaccagccgcgataatgactgataagggcaccgctggctgggctcatccagagctggcgcgcagccctctccctgcactcgtactgaactgagtccagtccagtaagccatccgggtcctcgtcctcccgggagcgcggaccctgaacagcccccgtccgactcttttttgtactggccatctcaaaatcaaacaaaacactaatcccggctgctgcagcaccgccgagtgagcgccagggaggggcggggctccagggcacggcgcccggtcacgtgacgcgc

SEQ ID NO: 10142 - DNA, 429 bp, Homo sapiens
  source 1..429: mol_type = other DNA
tcactgattctctctaacaaaatgatacagagaggtaagaatatctttgtgcttcagaaactcaatgtagagttttccttaggcaaaagctaaacaaaaccaatgcatgagatagattcctcatgggtgatattattataaaatacactgtcacacttggccaaatatctgattatttaccttgagcaagacaaaaatgtcaccattgtttgaagaaatgaaagtattaccttggtaggatgctaatcaggcctattcagaaaagccctaattaatgtaattaaaatctgtcagatcaaactgattagcctgatactctggtctccaaggtgatcaaagcaacttgtctacagtgggctcctggctggagacctagtttcctgtgttcaggctgtgtcatgtgatcttcctgatagggctgttgacaca

SEQ ID NO: 10143 - DNA, 363 bp, Homo sapiens
  source 1..363: mol_type = other DNA
aatttacaggaagttactcttaaaagaaagtgctgtccggtgagcacaaaattcctgctacgaacagtgccttactgctgcttggagactgcaagtcgcagatattgactgattgtataaggaaatttcttaaagtctaaagtaaacagaagtagtattactctaggacaattaaggaacaacatatgttctttttccaaaaacacacgcctatggctctgtgtgtggtgttttatcccttccctcctttgcattgaaaggaaagtgcaacaagaacttctctaatagactgtcaagttccaagtattcatatgaacaagtgttactttaggaaagactcagtttgacgtcgtcagccggctt

SEQ ID NO: 10144 - DNA, 452 bp, Homo sapiens
  source 1..452: mol_type = other DNA
tgctataaacattgtttctctgaattaaaggattccttgctgaaggcacaaccatcatcacaggatgtccttccttcaacagaggactgaccagcagtgatcagttcaatattcctctgaactgtgaaacgaaacaaacaatctgtagaattataacttttgcctatttccctatttactaaatagttaaaagaggaaagttagttctgccaagtttgaaaaaaacaatttaacttgctctttttcagaaactgtgtaggtaaattttaagtttccttaatttaaggaacgtgcgccccctaattctgccgcgccagcgatctggtgtttagaatacaatagagcccaagttgaggttaagtgccttcaaagggtcgggggaaagccctgggctcggccaggtggtgttggccacgttggccacgcccccacttcgcgcagccgagtggcta

SEQ ID NO: 10145 - DNA, 358 bp, Homo sapiens
  source 1..358: mol_type = other DNA
cggaaagtactttgaaaactaatgttttattaatactttcagtattttaaaaactgtttttgtggaactgttaagttaatggcgcatgctcaagaggcagaacacggagggcggagttcggaccacgtggggtctcgtgacgtcatctccgggcgccgagggtgactgcgctgccagggctccgcagcgtgaagtgcagcagggttcagctccgacctccgcgccggtgcttttgcggctgcgcgggcttcctggagtcctgctaccgcgtccccgcaggacagtgtgtcaggcgggcagcttgccccgccgccccaccggagcgcggaatctgggcgtccccaccagtgcggggagc

SEQ ID NO: 10146 - DNA, 353 bp, Homo sapiens
  source 1..353: mol_type = other DNA
attctttattagtaagtttaccaattattactattttcccaggcgggactgcggtggcccagactctccagtagctgggactacagaagcccggaaagtactttgaaaactaatgttttattaatactttcagtattttaaaaactgtttttgtggaactgttaagttaatggcgcatgctcaagaggcagaacacggagggcggagttcggaccacgtggggtctcgtgacgtcatctccgggcgccgagggtgactgcgctgccagggctccgcagcgtgaagtgcagcagggttcagctccgacctccgcgccggtgcttttgcggctgcgcgggcttcctggagtcctg

SEQ ID NO: 10147 - DNA, 332 bp, Homo sapiens
  source 1..332: mol_type = other DNA
agtctcagcacagtacttacttaacatgcatggcgttaaggcacgtgtaattaagattcaaagattctttattagtaagtttaccaattattactattttcccaggcgggactgcggtggcccagactctccagtagctgggactacagaagcccggaaagtactttgaaaactaatgttttattaatactttcagtattttaaaaactgtttttgtggaactgttaagttaatggcgcatgctcaagaggcagaacacggagggcggagttcggaccacgtggggtctcgtgacgtcatctccgggcgccgagggtgactgcgctgccagg

SEQ ID NO: 10148 - DNA, 732 bp, Homo sapiens
  source 1..732: mol_type = other DNA
ttttactgtctataaattacatcttgataaaaatgtaaataaaaacaaataaaaatgaatgttccttgaatgagtgaataaacgaatgaatgagttgtgttttcaacattacgaaagaggatcttgtactgcattgaatttttaagtagtgcttagttcttgcactttctttgctctaatgatgcccaaaataattgttcgtttacttactttgcttaagtattaatttcctttgctatttagccacgactgtgaagttaagacaagaaagtcatcaacagtaatgcagatgatgtaaataccttgtgggactggcatttaatttactggggaattggggaatatgcctaattcccttctgtgagtacaaattaattattcattgccacccgtgttcacgaacaaattgctgggcggcccagccccgggatgtgcctctcccatccttctccaggcggggctcgtggctaagcagcgactcaccctgccagcctgtcacgcaggcgacaatggccgctgcaccccaggcgctgtggaagcccgacccggctctgggtcccatcttagagcctgggatgtcgctgtcccacggccgccgcgcgcccccggggtggggagccggggcgtgtctgcctcacctggggctcccggcgcgagcgcctcacctgggctagcgccccttgccgcccgcgccgcgcgggggcgctcttccgcggctgggtccccgcctcc

SEQ ID NO: 10149 - DNA, 399 bp, Homo sapiens
  source 1..399: mol_type = other DNA
tttataaattgcatctttattgaggaagaaggtaaaaaacaaggaactatttattttgtatatgtgattatttggaccgttcaaattttcctttaaaaaacaagaattataattcaaagaaaatgctattctgactaaattcaaaagtaaaaccagagtttattttgttggaatgaatgtaacataaacataactttatcattttcaattagctcttggtagcctctcctaagctcccagagagagagagtggaggagggctccccgcgggagaatccccgagaggcagagggcgagctccccgagagcggtggccccgcagccccccctgacgccgagctgtcacctcgctggagcagcagtgcagcggctgtggctgtgcagcagtgccgggcggga

SEQ ID NO: 10150 - DNA, 264 bp, Homo sapiens
  source 1..264: mol_type = other DNA
ttaaaagagtctattaagaattcagaagattacttcaacaccgattaaagtgaatttgagtaaatcactggtatcttagtctttgaaaaaagccaaaaattactcatttgaattttgcaaactacgagactgaagtggccccgcaagcccccttggtgagaagccgcttcaccaccctacagatccccgggggccaggctccggcccagcgtcctcgtgcccagcctgccacgatgttacatgggcgcagccatctttaattga

SEQ ID NO: 10151 - DNA, 503 bp, Homo sapiens
  source 1..503: mol_type = other DNA
tgttggaatgaatgtaacataaacataactttatcattttcaattagctcttggtagcctctcctaagctcccagagagagagagtggaggagggctccccgcgggagaatccccgagaggcagagggcgagctccccgagagcggtggccccgcagccccccctgacgccgagctgtcacctcgctggagcagcagtgcagcggctgtggctgtgcagcagtgccgggcgggagcccgcccgcagtccgggggaggacgcttcaccaggtgctggtgggtgtgaggggtgcgccagggtcgcccacccaggagcggcccgcgggaggactaggcgaggcccctaacggagcccccagtgtgtgtgccgaagaaggctccctggggccccgcaacgcccgcagccagccccccaagggcgcgtctgatttgccaggtgagcctccggccgagggcgcagcgcacacggccagctccgcgcaggcagactgcacagcccgcccc

SEQ ID NO: 10152 - DNA, 614 bp, Homo sapiens
  source 1..614: mol_type = other DNA
ttgcaatttcaaaaattttggaaatatttgcagaggtattgttaaaaacctaaatgattcatttatgtaaaccaaagaagcgtagtcaattttttaaaacggcataccttatgaaagtgatttttttaaaaaaggtaacaatgtcttttgaaaacttacttctcatattaacgtctatttacactggcagcgtgaactttgacaatgacatcatgttctgagtgaatcgaagcacttcattcacagtgctcctaggagaggtagtactaatccttctaactgaaggcttttggacaactttgcttctccagaagcaaaccgcagtgcatgcatttcttctaagtacacaagtcttcagaaattccattgtaaacactggttgaactgcgtgctcaaattcaaatacacttggactggaaagaatacggaactgttattccgctcttcgcatatgaaatgttcaccccctccactttaaaaaaaaaagggggggcggggcatccctgccctgtcctgggagccctcggcgggacaagcagaaccgctcgcggccgactgccgccgcgaccctggcccggaaagccgccgggatggctttgcggcgccaaccaatc

SEQ ID NO: 10153 - DNA, 297 bp, Homo sapiens
  source 1..297: mol_type = other DNA
tatttgcacatttttctggaaacaacgcctatatctcttggagatgttcatcccagcactttaagaggctgaggctggctggagtcccaggtactggggaggatcgcaccattgcactccgggcaacagagtgagaccacttcattaataattaagatgtcgcagtgagctgagattacgccgctgcactccagccacttcccgcgcagtcctccaagacgcggcctccagcaggggtcgctgcttcgctgccgccctggcctcgcgccccgcccgacccgctctcactgcgccggc

SEQ ID NO: 10154 - DNA, 364 bp, Homo sapiens
  source 1..364: mol_type = other DNA
gaggctgaggctggctggagtcccaggtactggggaggatcgcaccattgcactccgggcaacagagtgagaccacttcattaataattaagatgtcgcagtgagctgagattacgccgctgcactccagccacttcccgcgcagtcctccaagacgcggcctccagcaggggtcgctgcttcgctgccgccctggcctcgcgccccgcccgacccgctctcactgcgccggcgccggcggaaggggcggggcgcagataggggtagcctggaggcctgcagtccgcgcggccgcggggagggacgagagggcctgacgtacaggtgagtgcgcctctgctggcgcgccgcgccgggccccctg

SEQ ID NO: 10155 - DNA, 400 bp, Homo sapiens
  source 1..400: mol_type = other DNA
aatgacactgagcacgtatagattcttctataaaagcaccccctggatgcagggctttgcatagcaattagtactgacttcactaaaccagttaaaattcccgtgccacatggtcctcccttgcagccagtcagctgtgagcagcagatggctttgatcggcaaattaaaggatttttcttaaatttacattctcattgtttgcctaaaatacaaaccgaggggtagatttcgtatttatcaactgggaatctacaagcgcgggcgcttccgaagctctcgctccgcagcctcacaccccagaacttcgggttagagcagattttagctctgaggctcacaacagagggcggccaccgtgcagggggagtggccagagccagcttttcccagcgccaggg

SEQ ID NO: 10156 - DNA, 635 bp, Homo sapiens
  source 1..635: mol_type = other DNA
cggtgtaatctttcggttagaatacggattctgaaaccagattgtctgggctcagactacggagaatactaatattatctacttaatgaggttgttctgaggattaaataaagtaatacatgaactagtacgtgagtcttcaatcctggagttgagctccaggctaagtaggcaacgtttcattcttcctctccgcacccgcgggaaggaggtgtctggttgggccctgaggacacgagggctcagccccacgccccgagcaccactgagacgtggccccagctccaggaggcatgcagcccgagaggccgccttcacgcccggccacggccactgccactgccaggggctggtggcgatagcgacaaaaagcttccgggaggaactggtgcctccgcccgacgcccttccttgcgggcaagccgggggctgatgccactcagtgctgggcgccggggactctaatgaagtgcagagggaccactcgccgcccacaactgatccctgtcactgacgacctttgctggcccagagcggcggggtgggaggagctgaacctcccaacccgggttcacctccaaagcaccgcccctgcgggggcgttctcgggtacgccgtaaagtagagagtatact

SEQ ID NO: 10157 - DNA, 355 bp, Homo sapiens
  source 1..355: mol_type = other DNA
gaaatgcaacttctactttaaaaattctaattataactgtcacattaaattgaaggtgagaataaaactggtgtatctgttaactaagtcaagcgatgtactcagacctattttaaatgtagatagggcgacctaagtcaatgacactgagcacgtatagattcttctataaaagcaccccctggatgcagggctttgcatagcaattagtactgacttcactaaaccagttaaaattcccgtgccacatggtcctcccttgcagccagtcagctgtgagcagcagatggctttgatcggcaaattaaaggatttttcttaaatttacattctcattgtttgcctaaaatacaaa

SEQ ID NO: 10158 - DNA, 744 bp, Homo sapiens
  source 1..744: mol_type = other DNA
gctcgtccgggctgtggccccgagaccccagcgttgcacccccgaggcggcaggctcagtcaaccctccccgggggacggcggccctctagccaggcgacctcaggtctcgcgacctcccgcccagcccacctcgcggagctgagaagcagggctgggttccgagcgggcgccggcgcccctggcgtgtggcggggaggtggcggccgcggggggcgccgcgagccgcccgtgcccgccgcggatgaacaggcggctgcgagcagcccccggagccgcgcagcatccgcgtatccagtgacggtggaagccacgcccgctcgagagccggggggctgtcctcgccccccccacccctcccgcgccggcccccggcccgcccccggctcggctcgcgggaggcgctgggcgccggggctggcgcgctctcccgggctcacacacagccgcgcacgcacgcccggggccgctctccgcgccggcccttgctccccgcgcccatgcggacggaccgagcgacgactccacggggccccgaggatgcggcccggcggcggcggcggcgggagcggcagcggcagcgagggcggcaggggcagcggcagcagcggcggcgttggctgcggcggcggcggcggcggcagcaggagccggagcgacggcggcggcatccccgagactgctagaagagaccccgcttctcggcgcctgcccctcgcggctcggtccggccccgccagcaccg

SEQ ID NO: 10159 - DNA, 399 bp, Homo sapiens
  source 1..399: mol_type = other DNA
gatgggtccctttgcagagcatctcacagcacagcaacttgctcctgagcaatgctaggagtgctgtgaacctctctcaaagtcgagatgtccatttagaaaggaaacttattccaggaacttcagcattttcctgattaagtctatgaaagaccaaaaaattgtgggggctgtggaggaaacagcgtgaccacaggatgtcccaccccccagctctcgggaattctcataagcttggcgtggaggtttggtgctctcctcccgagaacagatgactttggtcaaaaatgcctttggtcaaaatttccaaaggaggaaactaggcaaatttaattgaagcaaatgaaatgctcagcctcataggtagtatggccctgtgccctttgaaccagaaaggct

SEQ ID NO: 10160 - DNA, 384 bp, Homo sapiens
  source 1..384: mol_type = other DNA
gatgggcacagctagattcaaatctagtggagagcgatccggtctcactgcaagtagctgggattacaggcgcgtgtcgatggaggcgcgcgcccaggcgtgagccactgtgcccggcctcccaccccctattctaaatgacacttgtttccaaaatatgggggctgcaggacaggctgagcctcagctcttctctgaatccctgcgcagccaggtgaaccgcccgcgaccgctgctccggcgggaagccttctctgggatcctgtacgccgacgcccggaatccggcgtggtgggcggggctaagggcgagacctcgccgagttccaccgttgcgctcgccacgtctcccttagcgagctcgctggggacacgcagggggagg

SEQ ID NO: 10161 - DNA, 553 bp, Homo sapiens
  source 1..553: mol_type = other DNA
acatttaagttaaatactttttacagtggcgcgatctcggctcactgcagcctcgaccgaggctgctaaattaaattaaaaattcagttcccacacatgtggccagtggctgccttaataacgcagttccctcatctcacagagttctgacaacgctgaggcagacagttgagagtttttttaaaaacaaaaacaaaaagctattattactctctccaaatgggatgaggaaaaggccagcggggtttctctgcgaacgcagccgacggccatttccacagcggaggccgtcgtcggtccgtaggacgcccggaactcccagagggttgggcgttcaagggtcaggacctcgtggtcaccggctggcgagcctcggctagccccgccccgcgcctaacgccggctggagagcgcgcggccgcagggtaggcgccctcccgcacgcgcgaaggcctgcggcccggaggcagccggcagccaatggggcggggcgccgcgcgcagggggcggggccgtgacgcgccctcctcgtgacccggctctcggcctgcgc

SEQ ID NO: 10162 - DNA, 409 bp, Homo sapiens
  source 1..409: mol_type = other DNA
tcaagctgccgagagagcttaaatagaattaatctcttagagatcggggagcatgcgctctcccagcgccgcgcacagagcaaggcgcgagtaggggatgagggcctctcttcactattcctccgcccggagagcgggagcccgcaacgcccgccgaggacgagcggcgggagggaacgctctgccctccagccgccccggtgcagggccagctctgcttggggaagctggcggcatcctcccctcggctggtgcccaaacccactgcgcgaaggcaaatgagtaaattactcacctcgggccgaatctatctggcactctggagagagggggaaaagcgttttgagaaagccccgtcaccttggaggttcattaatatcattagacgtcagagacgccctaccctccc

SEQ ID NO: 10163 - DNA, 396 bp, Homo sapiens
  source 1..396: mol_type = other DNA
agagatgggccatgtgggcaaggctagtatcgaactgaggtacgtttaatacttttcaaaaaaaaaaaaaacttgcagcttgcagccggtctactgttactttgttttaacctatcaatccagacgcgtgtctgtcacagtgagacggtgcacagtgcgggcaaatctctaagatctgccgctaaagccgtttccggcgctctaccccgccgcaggccgaggctggcgcagagagacaggaagcgccagctctgggcgtctgggtcctcgcctcctcggccgcagccccgcggcggcgcgctcgcggtgcattgtgggcgcagtgcccctccccagcctcggccgggcctcccgggagccgggcgtggcgttaggagcttcgcgtgcggggtgaac

SEQ ID NO: 10164 - DNA, 379 bp, Homo sapiens
  source 1..379: mol_type = other DNA
taactaggactacagggcacaggcctctcctgcctgggcctcccaggcaattcgcttattatagtatgtcaaagcatttattgtttaatcaaatttacactcaaaacatttgagtgcgtaccatttatattattcaaatacgaaaaggtgacaaacccgagggcccattgggtcacctccattttattcaggtttcggaatctcggtcatgtgagctaacttaaaaggggttcctcggccggccgccagcgccgggcggagaatcgccctccctccctgcccagactggagctgcctgccactgcatgctgggagtcgtagtcccggctggcagcgtccggaaggacgggagggcacgggagtgcagcccgcccatgtg

SEQ ID NO: 10165 - DNA, 498 bp, Homo sapiens
  source 1..498: mol_type = other DNA
tgcagatgtttttcgtttaacctaaaggatacgtctttttttaaaagtcaaaaatgcccacgtagcggttttgtcgtcatttacaaattagattaaaattattgaaattcctggtgtcgcgttctaacagggaaccggacaccggggctggcccagagcccggcgggcggacgcgcaggccagggaccccctggtaccaggcgccctgcccggagtcagggaggccacgccgctgcgctccttggagcgtcgggggctgtgcgctcctgccgctcccccagcggggacagcagcgggagcccgccgagtcccggcccacggcgcgcgcccggacacccacgcccgcagccccgcggagccgggccgcgcaggcgcgcgcgagctcacacacgcgcactcacacacgcacgcccgccgcgcgcccggcccgccgcccagcccgccgcccagccctccccctgggcggggacccgcccgccgtcagcctaggttgaggcg

SEQ ID NO: 10166 - DNA, 581 bp, Homo sapiens
  source 1..581: mol_type = other DNA
gcgtcgtcccgccgcgtccctgaagggaaggaagcgaggtaggcgccggagccgtgcagcgggcggccgccttcccggtgactccggatcgagccgcggtgtgcgcgccccccttctcgcccgctagtgtttttaaaggacactcgctccctcccccggatcccgactgggaagggggcggaggggacagtggccgtccccgccgggctcgaacctctgcgaagggcccatctgcgcccagacccccgttcgccctctggcccgcgggcgaagaggggagagggagctgcccgcgcagtccccgggctcgggccattcgaccgggtggggcggcggcgccgcgggaggcactagagcgggcacccgagctcgggctctgaccgcggctcggctgcgccagctccggccgctgcccgctttaaaggcgcggccgcccctcccccgggcgcccctcccccttctccccgccccgccgcctagcccgggagggacctgcggctgggcggcggggggagggggctgccccgcgcgaggccgtcgattcgctcgcggctccatcgcggcctggccggggggcggtg

SEQ ID NO: 10167 - DNA, 479 bp, Homo sapiens
  source 1..479: mol_type = other DNA
gttactgtgctatgttaccagatctaaggagactgggaatcattagattggaatcagatcctcagtcaatggaaatataaggaggaaagaccattggtttggggagctgtaaaaagaatcaaaacctctgagactgggatgtgagtgtttaaagtctcttgagggcctcttccagagaattgcctttgaaagatcctctcctgtggcacgcagacctctgggtctccctgtgagcagacgcgtatgttagaattcagtgaattgtcagacaagtcagacccacttgaaatgctggtcctgtaaagtgggtgagcactgtattgaaagacagtcctttccagtgctttcccctgaaattccttgtaaggaccaggagacgcctgaaaaaaagcaggggcttttaagagttaaattacacaactcgctttttatttttaaagtgagataaattgatacatgttgcttccagacaaaaacct

SEQ ID NO: 10168 - DNA, 302 bp, Homo sapiens
  source 1..302: mol_type = other DNA
aaatcctcttgagtattttgaagaatatttacattcctttagttcaggttagtagtatgtgctcaaaaatattttcaatttaattattctttacaagatgcttagcaccaagggaagtggcattttcccagtgttgatgacttttaacactgtactaaatggagtgctttttgccgttcaactgtgtgtggatggggacgccaggctgatacacttgtacataacagccaacagttgtactattattaatattggttctctgatctgccgtcgccacgcctcggagcttctacgcatgcgtt

SEQ ID NO: 10169 - DNA, 443 bp, Homo sapiens
  source 1..443: mol_type = other DNA
attgttttttaacctgagcacttaagctttgaaaacagcataaacatgcaaaaagagatctaatttaggaatttgtttcttttaaagagagagaaccgatttcagagattgaaattctgtctttataaccctttgtaattctatagcttttacgtagcttagcaaaatgaattttgcattgattggaaatttcaatagtttatcgaatttagagaacttcattactcgtcagaatcaggtagggggcagattcccctgtccctgaagccctgcaccggaacctgggcccccaaggtgacacctcgccgcgtcagaccgccagttcccagcctccgcgccggaggggcggtgctttgcggggacgcgagcccgcattggcttgcgtggccgccagggcggtgaaatgacgggcgcggggcggggccgcgcggcttgtttgtcgg

SEQ ID NO: 10170 - DNA, 435 bp, Homo sapiens
  source 1..435: mol_type = other DNA
ccttgggatcaggatcccaaaccgcttgggcagctggactagtgggccaccgctaaccgttggttcgcgggcacccacaggcaacgtcgcggtggcccctgggggttgtagtttctgtcgcaaaacttttagggtgatcttaaatgtagcctcagggcgcaagcttagcgcctccgggggcgcttggcccagttcgcagtcacgcatgcgtagcagccggcagtggctggcagccgcgcgcggcgcacttggggtccggagggtagcctgcctggcggggaagaaggcgctggggccggggcggctcccggtttgtgccgggcggagaaaggggaggggctgggggtgaggaccccgtctccactccctgctcccgccctctgggctgatccccaccgatggggctgggcgaagggcgggctttgcgcctcgggc

SEQ ID NO: 10171 - DNA, 558 bp, Homo sapiens
  source 1..558: mol_type = other DNA
acttttagggtgatcttaaatgtagcctcagggcgcaagcttagcgcctccgggggcgcttggcccagttcgcagtcacgcatgcgtagcagccggcagtggctggcagccgcgcgcggcgcacttggggtccggagggtagcctgcctggcggggaagaaggcgctggggccggggcggctcccggtttgtgccgggcggagaaaggggaggggctgggggtgaggaccccgtctccactccctgctcccgccctctgggctgatccccaccgatggggctgggcgaagggcgggctttgcgcctcgggccccgccgccccgccagctccgcggcccagcctggcgctcgaggattgccagggccgccctgtgccctctggctcggcggtggtgggcgaggggggacgctttttttcaccgccgcccgccgagactacggctgcccgagactgccgccctccgacagcgcccaagcctccggccgctgcggccagtgggccagggttcggcgagccttccctgccggcgccggccggctgctgaggcgctgggagga

SEQ ID NO: 10172 - DNA, 594 bp, Homo sapiens
  source 1..594: mol_type = other DNA
tttggaaccactggtgcacacgaaagggcagtcttctttctggaaaaacaaagtttgaaagttgcaaccttgcagcgctggagctcaaaaggctgttaacagctgaacgccctccagtcctcccagcgcctcagcagccggccggcgccggcagggaaggctcgccgaaccctggcccactggccgcagcggccggaggcttgggcgctgtcggagggcggcagtctcgggcagccgtagtctcggcgggcggcggtgaaaaaaagcgtcccccctcgcccaccaccgccgagccagagggcacagggcggccctggcaatcctcgagcgccaggctgggccgcggagctggcggggcggcggggcccgaggcgcaaagcccgcccttcgcccagccccatcggtggggatcagcccagagggcgggagcagggagtggagacggggtcctcacccccagcccctcccctttctccgcccggcacaaaccgggagccgccccggccccagcgccttcttccccgccaggcaggctaccctccggaccccaagtgcgccgcgcgcggctgccagccactgccggctgctacgcat

SEQ ID NO: 10173 - DNA, 422 bp, Homo sapiens
  source 1..422: mol_type = other DNA
tttactaaaagtctgtgggggtgggggcctccccaatgacagacaggtcggctgctgcaaccgccgtctgaagtagacgccctgcggctctgatccgggcggcgcctcagctgcccacactatgtgggcggcaacgcacaagtggtgcattcccgctccctgggaaacttagttcttgagagccgcacaaaaccacgccccagtggagttgcgtccggaaggcgcggccccggaggtcacgtgggcccgcggaattcgccacattatgtcgactgttccatgcaagtcagggtgggggccgtccctatcgcaggcatgagacaagtccagctgcgtcgtgtctggtaataaacaggggcctctcacgtgacccctgcgcgctcccgcgggggagcgtagtctcggaggcggcgccgcagggg

SEQ ID NO: 10174 - DNA, 558 bp, Homo sapiens
  source 1..558: mol_type = other DNA
tacatgccgacatttctacatttcctcaggttgtaagtgtgctgcagcatgactgatctggccaaattcttcgtttacaaagaaatgattttccaaagcacttgtgaagcataaaattagctagttatatagtaatcatttttccataaatttaaatatctctaattaaagaaaaaattgtccagacggagcccgcccggccaggacacgccagccccttcctcggccggtggggcctcgacccccgccgcctcgaggaggcgcggcgcctgcagtccacgcggccgagagcgggtagcggggagggccgcccacgacggaggtttctctgtggaaagttggggcagctgaagagccccaccaccttcacctgcagcggccgctccggcagcgacggcgagccgcacctagcgtgcgggggcccgcacggctgcggccttgccatggccgcgcccggggacgcccggtgaccccaaacactgcgcgtcgctccggcaaccgcgcggccccgcctccgccgctcgcaggaggcggggcccaggggcgggtcgagggcgg

SEQ ID NO: 10175 - DNA, 585 bp, Homo sapiens
  source 1..585: mol_type = other DNA
gtttacaaagaaatgattttccaaagcacttgtgaagcataaaattagctagttatatagtaatcatttttccataaatttaaatatctctaattaaagaaaaaattgtccagacggagcccgcccggccaggacacgccagccccttcctcggccggtggggcctcgacccccgccgcctcgaggaggcgcggcgcctgcagtccacgcggccgagagcgggtagcggggagggccgcccacgacggaggtttctctgtggaaagttggggcagctgaagagccccaccaccttcacctgcagcggccgctccggcagcgacggcgagccgcacctagcgtgcgggggcccgcacggctgcggccttgccatggccgcgcccggggacgcccggtgaccccaaacactgcgcgtcgctccggcaaccgcgcggccccgcctccgccgctcgcaggaggcggggcccaggggcgggtcgagggcggcccgtggcggctgggcctttcgcgcctgttgctgggccgccggcgcgcgggcggccgcgaccgccggggacgagctaaccgggagccgcccacccgggg

SEQ ID NO: 10176 - DNA, 352 bp, Homo sapiens
  source 1..352: mol_type = other DNA
ctgccttaccatgtaggggtagcaaaaacagggagagacacccagccttcttcccctactgctgggactagccctagaaccaaggcaagtcataggaccttacccttctccttctctcacatccagagggagaggaggctggagcctcctgggatgacaacaggcttcaggccagtgggcttctcacctccggaagtggtgtgcagctgggtagggactcactccacacctgagggaagcggtgagggtgggacggtctgtccctcgttccgcaccgtgctgcacggtgcttgctcaagtacgggaccaccggcgctggggtgcgaacggaaggtggcccccagaccgcact

SEQ ID NO: 10177 - DNA, 370 bp, Homo sapiens
  source 1..370: mol_type = other DNA
gaaaccccctcgggcacccttcaggtggcgtgggagggggcctttgtctccggagattcctgggagagcgcgcccgggcgcacagggggcggggggggggaacctgggaggggcgcacccggctgcggtcgacccccagccctacccacggcccacagaggctgtttctctgtgctgaggaaaactttgcccttgctctctgaggccatcaaggggcgccggcacagggacgcttgcatgcaaagaggctaagaattcctaccccagggcttggagatccctggacagggaggctgaactggaggctccctcacttccaaatttggcaaatttcatggtgaatcccgagctccctggggacaccagcctg

SEQ ID NO: 10178 - DNA, 593 bp, Homo sapiens
  source 1..593: mol_type = other DNA
atgttttttaatattaactagctaaaagactggacgcgtccttcagctgcagattgctgattaatccgcgccctttgccctcggcccgggcttaggggtcgacctctgtcacaggaggcgcactcccatcctggggcgcccgggccgtggatctccaggtgggagaccggaggagagcgcagacgttccggcgccaccctcggacccgccggcttttccaaacctcttgaggagcctgagcgccctctcggcccggcgctgggaggctgccagcggacctgggaccgcggcgggggcgggtggtcctcgccttgcggcggggaaagagctagccttgcacgcgcaagcaccggcaaggagcccaggccgagggtgcgcggtccagcactgggcgccctgaccctcgagcccagaggccccagagcggaacggggtgtccgcagcgccacgccctcgggcgccaccctgcaggcatgggcgggcccaagactgtccccgctggaggctaaagcccgggcggcgccccgcgcccctcgcggaagcccacactccgcgcgactccaggcgcacgccccgggccgccccgcatccca

SEQ ID NO: 10179 - DNA, 586 bp, Homo sapiens
  source 1..586: mol_type = other DNA
ctctgccacttgctgtgtgcagatcacagaacatctgtgactcagtttcctttttggtaaaatgggatgagatgttttttaatattaactagctaaaagactggacgcgtccttcagctgcagattgctgattaatccgcgccctttgccctcggcccgggcttaggggtcgacctctgtcacaggaggcgcactcccatcctggggcgcccgggccgtggatctccaggtgggagaccggaggagagcgcagacgttccggcgccaccctcggacccgccggcttttccaaacctcttgaggagcctgagcgccctctcggcccggcgctgggaggctgccagcggacctgggaccgcggcgggggcgggtggtcctcgccttgcggcggggaaagagctagccttgcacgcgcaagcaccggcaaggagcccaggccgagggtgcgcggtccagcactgggcgccctgaccctcgagcccagaggccccagagcggaacggggtgtccgcagcgccacgccctcgggcgccaccctgcaggcatgggcgggcccaagactgtccccgctggaggctaaagcccg

SEQ ID NO: 10180 - DNA, 540 bp, Homo sapiens
  source 1..540: mol_type = other DNA
ttcctaagcccattacatacttaattttgtttatgcaatagcaaccctaccaaagtggcactagtgttaacatctccattttacaggtaaggtaaagaagttgtgaggcccaagatctctcagaacccaggtttctctgactgcagtgctctcttcattcccttagactaaggcatcaggagtgtaagtaatagttattatattagcactagataatgacgatggtgatgatgatgacaatgatgatgacgtatacattcaagaacttaatacaagggagggtgggctccccggcagtgccacacgcaggacctcgggcgccgacaccgccccgcccctggccgcgccccgccccggccactgtcccgaagccgcgcccctccccgccctgccccggccccggccccggccccggccccaaagccccgggcctgccatctcgccccgccctgccccgccccgccgcggctctggcccccacctccaggggcgcctctgcgggccacgtggttcggcgtccgcgcgcaagcggctcttggc

SEQ ID NO: 10181 - DNA, 589 bp, Homo sapiens
  source 1..589: mol_type = other DNA
tacaaactgatctgcttattcactatttacatggccattcaaagtaataaaattttaaaagtaaatgttatgttgaaaaaagtcaagtgaaaagcaagatgttatccaaacaaattatctgtctttaaacaaagtaagttttcctttcctttcaaataagaaaaaaagagaaccaaagtgtaattcacatgaatcgcagtgatggtataccatggaataggaaaaaataagttacaagtcatagttcaaatttttttcgaactttaacagactttctgaaagctgaaaagaatccagtaactcgtacagagaacctcatgaacagttcctgaggtaccacaagcaccatggcttgtaagtggacctgcaaatgctgagggagctagcttaccccaaggctggaggaggcagagtacagcctctgtcctacgccgcctgcgccccgccgcgagggggtaatacagaaccagcttctggaccgagctgatgatgggggcggcggccgtgggcatggcggcggcaaatgggggccccacggccccgcctccaggcaagccccgcccctcacgtcgggagcggggctggagga

SEQ ID NO: 10182 - DNA, 472 bp, Homo sapiens
  source 1..472: mol_type = other DNA
ttttaaaaagtggatttacaaagagaccgttttgcagtccccgcttgcctccagggcggaccacgacccagcgggccgccggaaggctccttacctggccgcagccggaccctcctcagggaagcaactgcctccagggactccgcggggctgtcgggcggttgccggggagacctctggccgccacgcacctgctgcttggtggggcggggcctcgagaattcgaaatagtcacttttgtacctaatttggcatttataattataatacactcattttcacaactatggaagagagggtacgcgcatgcccattgcgctgtggcaactcagtgaggaccgtcagagggccgcttttttccaaagagagggaggagataaatagactcaattaatccgtcgactttttgtcccgggagcctcctccagccccgctcccgacgtgaggggcggggcttgcctggaggcggggc

SEQ ID NO: 10183 - DNA, 591 bp, Homo sapiens
  source 1..591: mol_type = other DNA
acggctttgatgaaggcgatttagtcaagtgcatgagggagtcggcggctggcagcggacaccgactgctctcactgtccgagtccgattcggaccctgaacccgaaccctgcaatcgcagccgacatgacggcaacaaatcttctgcggagaccctgccagggcggaagattgtggaacacatcattaactttctttgctaagaaataatgtcttacattttgaaacaataagctaattattattagaataactactgtcgagctattataatagtttataacatttaggacctagttgactaaagaatatagcctcgcggtcctgcactcccagcgtgcagcgcggcaggaagcgcggagggggcggaacgggggcgtgtccccctttgaccccgcccccgaatggatccattcccccaaactgaggattgggcaatgagcgagcttcggccccactaatgggggagtgggcggaggctggatttcccacctcggctgcacctgggcactggaggctgaccagagtctcgcggtcccccctgcttctggcgcgggtccctgcgcccggttgtggagcgtctcgcgcggg

SEQ ID NO: 10184 - DNA, 584 bp, Homo sapiens
  source 1..584: mol_type = other DNA
caatactctagtttgggaagtcctgatctaatttcacttatgtccttccacttgctttctgatggcgggaggcaagggagggctattccgaacttccaattctgcctctcccgaggatgcatgtgggaaggagttagcaacttatctctgagcactgagaaagaggtaacggctttgatgaaggcgatttagtcaagtgcatgagggagtcggcggctggcagcggacaccgactgctctcactgtccgagtccgattcggaccctgaacccgaaccctgcaatcgcagccgacatgacggcaacaaatcttctgcggagaccctgccagggcggaagattgtggaacacatcattaactttctttgctaagaaataatgtcttacattttgaaacaataagctaattattattagaataactactgtcgagctattataatagtttataacatttaggacctagttgactaaagaatatagcctcgcggtcctgcactcccagcgtgcagcgcggcaggaagcgcggagggggcggaacgggggcgtgtccccctttgaccccgcccccgaatggatccattc

SEQ ID NO: 10185 - DNA, 390 bp, Homo sapiens
  source 1..390: mol_type = other DNA
attgaatcccttctttgaatatgtgggctaaatcagggatcagaccactaccagtccgtggcctgttaggaactggcctcacagatcagctgtgtaaactgcgcacacaagggatccagtttgtgtgctctttatgagaattctacattatgttgagttgtataattatttcattatatattacaacgaataataataaaaataaagtgtgtggaaccagcccctggtgccgaatcatgtggttctatcctagattatctcctgaatagtgtttccagctccaatcacccagcagagccaggcacccggcaggctggcggccaggcgccatggagatgacaggttgaggtcacttgctcctttctccggggcaatgggtgacagagacag

SEQ ID NO: 10186 - DNA, 619 bp, Homo sapiens
  source 1..619: mol_type = other DNA
gcggtcgccggtccccctcggctcgcgggactccgcctagagcccccaggagggtcgggctctggggcggaacccgctcagggcagcggcccaggcgccaggccacagggaacgccgcctggggcgccaacccgccgccggacccaccgtgtgctcgacgcgcgagtgaacaacaccgcgagctgcgccccctccccgcgcgagacgctccacaaccgggcgcagggacccgcgccagaagcaggggggaccgcgagactctggtcagcctccagtgcccaggtgcagccgaggtgggaaatccagcctccgcccactcccccattagtggggccgaagctcgctcattgcccaatcctcagtttgggggaatggatccattcgggggcggggtcaaagggggacacgcccccgttccgccccctccgcgcttcctgccgcgctgcacgctgggagtgcaggaccgcgaggctatattctttagtcaactaggtcctaaatgttataaactattataatagctcgacagtagttattctaataataattagcttattgtttcaaaatgtaagacattatttcttagcaaagaaagttaatgatgtgttccacaatcttc

SEQ ID NO: 10187 - DNA, 384 bp, Homo sapiens
  source 1..384: mol_type = other DNA
ctgttccccaggcatcctgaatcatcagggatggagtctcaaaataaatgtacatttatttattttttatttttgtatagcctcggcctcccaaagcagtagctggggggattacaggcgtgagcaagtgcgcccggccttaaatgtaccttttaaaccaagttctgcagtagattcttaggcattaatttgagagccaagcaggcgtcggggcttccctcgagcgtggcgaccccgcagacatggtgccaagagccagcggcggcgctgggggcgagggcaccatgcgaccgcgggcgccgggaccacagcgcgccgggaaggaggctcgcgctggtcccgagcactgggacgcgcgggccgggcggggaggttcggggcggg

SEQ ID NO: 10188 - DNA, 421 bp, Homo sapiens
  source 1..421: mol_type = other DNA
gcggcacttcaaattttactaatgtcattgtggctgatcatcactttattcagaaatgtagagtttgactctctttaaataattcctgccaggaagctggttccaccagtcctgctgtagctgagaacattatccagctcttcttaagaggacaaccagtaaagcccaaggtgttcctagcccacagtcatctggcagaggatggactcttaagttgcgggccggccagcccgaagggcggagatcgctgctgggggcggcggtgcccagcgggtcagagccgtggggctggcgaggaccccaggccgcgttcgcccgacaggctccccggcgaggtttcaaaccgccgcccccgcgaggcgccgtcactacccagggccggagcggcaactccgcagcggagctctgcctgcccgctgcg

SEQ ID NO: 10189 - DNA, 408 bp, Homo sapiens
  source 1..408: mol_type = other DNA
gctgaaggttcagtttttgaaatacggtttttgcatcgtaaattctccagcccccgccaatgagcagcgggacggggggcggggcaataggcggaccctcagcaaggtgctttcccgcagaaagcacactggaacttcgagcacctgaggaggggcggccctggtacgcaggcgcgcatccggcaaaaccgcccaggccgctgaggccttcgcgacttcatttcccaggagcctccgcgaccatggggcggcgggactgggggtgcctgcgggagccgccgccgccgtcgcggaggaggaggaggaccgccggagtcccttgctgaaggcggaccgcggagcggcgggcggcgggcggcgcgcgcgcgcgcgcgagaggcggctgttggaggaggagggactgagcgg

SEQ ID NO: 10190 - DNA, 372 bp, Homo sapiens
  source 1..372: mol_type = other DNA
acttttaattgtccttagacagatggccaagctggggctcagaagttgagttctgctgaaggttcagtttttgaaatacggtttttgcatcgtaaattctccagcccccgccaatgagcagcgggacggggggcggggcaataggcggaccctcagcaaggtgctttcccgcagaaagcacactggaacttcgagcacctgaggaggggcggccctggtacgcaggcgcgcatccggcaaaaccgcccaggccgctgaggccttcgcgacttcatttcccaggagcctccgcgaccatggggcggcgggactgggggtgcctgcgggagccgccgccgccgtcgcggaggaggaggaggaccgccggagtcc

SEQ ID NO: 10191 - DNA, 334 bp, Homo sapiens
  source 1..334: mol_type = other DNA
aaggatcgtaaacgcggcttcctccaggcacttttaattgtccttagacagatggccaagctggggctcagaagttgagttctgctgaaggttcagtttttgaaatacggtttttgcatcgtaaattctccagcccccgccaatgagcagcgggacggggggcggggcaataggcggaccctcagcaaggtgctttcccgcagaaagcacactggaacttcgagcacctgaggaggggcggccctggtacgcaggcgcgcatccggcaaaaccgcccaggccgctgaggccttcgcgacttcatttcccaggagcctccgcgaccatggggcgg

SEQ ID NO: 10192 - DNA, 317 bp, Homo sapiens
  source 1..317: mol_type = other DNA
ttaatcaaagaaaaacatgatcaaataagttcagattatatttaacacattcagtttctagaagtagttttgctgaataaacagttgagctaatggagcaacggagctgccagtgcttcccggaggctgctgtgctcagcaagccggggccctccaaggctgggcgccacgttgcttgaaataggaagaccccagctggccactcaggagccggccagagcccgagccgcagcgcagtgggcagctccccgcgctctccgccaggccctcggccagccagccgccactcggccgcgagtgattgacaggcggcagca

SEQ ID NO: 10193 - DNA, 268 bp, Homo sapiens
  source 1..268: mol_type = other DNA
taaaaaatttatatattactactaataatagattaaatgcactttaaatgcttactataaatttattttatatgtatgggatcccagctactcgggaggctgaggcacgagattgcaccattgcactccagcctgtgggatacttctgaaaattctgcattagtattaaactgaagagcgctcacacaatattaagaatttctttccaagaaatgtgctcggacacaaggcctaaaccatggtttcccagtcctccccgccagcgggg

SEQ ID NO: 10194 - DNA, 361 bp, Homo sapiens
  source 1..361: mol_type = other DNA
atcccagctactcgggaggctgaggcacgagattgcaccattgcactccagcctgtgggatacttctgaaaattctgcattagtattaaactgaagagcgctcacacaatattaagaatttctttccaagaaatgtgctcggacacaaggcctaaaccatggtttcccagtcctccccgccagcggggccgagagcccggcgactcttgcgtgaccgagcgggctccgctgcctacggcagcccacccccgagaaacgaggaggcccgtggcgagtctccacgtgggtaccggcgctctcggcgcccgtagccacccgcccgccggaagccgacatctcgagttctggcagataagctgct

SEQ ID NO: 10195 - DNA, 352 bp, Homo sapiens
  source 1..352: mol_type = other DNA
tctggaattagtggtgatatttgcacatctttgtgaatacaccaaaaatcactgaattgtacactgtaaaggggtacattttatggtaacagcagtacattttctgcgcatctttaattctgtcactttctagcatcctgggattccttgaagaataaaatctggtttctgaatacctgactccaggtatgcacacggctggagtgcagtggcgccgagtagctggggttagaggcgcccgccaccgcctcccaaaatcctgggattacaggcgacttaaaagtattacctcagatggccgccagcgcctctagacgccctctacgaggccgtccccggaagtggcgttacg

SEQ ID NO: 10196 - DNA, 646 bp, Homo sapiens
  source 1..646: mol_type = other DNA
taccagtttatcaactgataagaggcagaaacgagatcaatcgcactcatctgtgtactctatcacagtggtgggcacagcatattttgactttgattgaagtgaaattaagaagcatcctcaatattgcatatccattttagtttttgtttaaagtgaaaacgactctttgaaaagtaatgctttctaggactgaaaataagcatctttggtgtgccaaatattcataaggaaattgtatacgaatgcataataaaataagggctctgatccttcagatgacttatttaagaagccaggtggcataacgaatcttacatattataattagtacatcgagacaatgttagtgtgactgtgacgctgtgatccagtgtggctctcctgaaggcccaccgcgcccgcacctaggagacgcgccccttctgctaggcggggtgacccacacatctgtgcccctctctgagcaggaggaggccccgtcgcagacgcgcgcgcagacagcgtctgccgcgggcacctggggccgcgcgccgcggggcgccccgcctccgctctccgaggcccaatcatctggaggctgtgggggcacgtcccgctcccggccacgcccccagccggcggggcggggggtgcttttaagaac

SEQ ID NO: 10197 - DNA, 364 bp, Homo sapiens
  source 1..364: mol_type = other DNA
aaagtatataacattttgacttaccaacatggcacatgtatacatatgtaactaacctgcacgttgtgcacatgtaccctaaaacttaaagtatatttctttacaacgatggaattatttcaggaattggaattatttcaggaattgtgtttgaaaccacagctttggatcccgatgttaattatatacgtgataacttacacaatgacgttcattcattgacagatctcagggatttcagaaagctgttcttcaggctcccttcgctccccaggagaccggggagccggcgcgaggcgctatgagctcagctaagtatgatgcctaggctagagagctacgtccacatttccgccacgtgacc

SEQ ID NO: 10198 - DNA, 696 bp, Homo sapiens
  source 1..696: mol_type = other DNA
gggggcaccgcggctcgcgcggcacgttcgggaagggggaacgccagggcggcccttttataggccgaagcccgcgcccgcgcgcccccacccttcgcaccgcccccgggccacgcgcggagccgcggcgttacctgagaagggccggctgcgtccgcacccggccccgcccgttccgccgcccgcccgcccttccctcccgcgaggccgcagcggcacgagatctgcgcctcgcctccctcctcacgcgggcggattttcttagcggctgcccccgcctcctctgctggatgtgaaatggcggtcggcgagagcatcgcagctcgcccatccatgagatcggtgcctcacccaggtgaccgtgcccgccagccgagtcatcgatcccgcgcgggcgctgccggccgccggccgcctccctcgccgcgtgcccggggagggggagaaagccccttctcggcccccgccctccggcccgggcgctgacatcatcatcatggcaacaagagctgcagccgaggagcccgtgtgattcccggcggtggcggcagtggcggcagcaccagcaccgacgaaagctcgagggcttctctcctgcggccccttgccgggtgctcctgaggaggcggcggcagcagcgcctacaccgccccgcccgccgctcctcgaggtgcctctgtgtgaggggagggggcc

SEQ ID NO: 10199 - DNA, 556 bp, Homo sapiens
  source 1..556: mol_type = other DNA
tgacaagtacttgcgcgtgcccgggacgcagcctgcggggcctgggaaatccctgtgcactggatctgccaacgggggcaccgcggctcgcgcggcacgttcgggaagggggaacgccagggcggcccttttataggccgaagcccgcgcccgcgcgcccccacccttcgcaccgcccccgggccacgcgcggagccgcggcgttacctgagaagggccggctgcgtccgcacccggccccgcccgttccgccgcccgcccgcccttccctcccgcgaggccgcagcggcacgagatctgcgcctcgcctccctcctcacgcgggcggattttcttagcggctgcccccgcctcctctgctggatgtgaaatggcggtcggcgagagcatcgcagctcgcccatccatgagatcggtgcctcacccaggtgaccgtgcccgccagccgagtcatcgatcccgcgcgggcgctgccggccgccggccgcctccctcgccgcgtgcccggggagggggagaaagccccttctcggcccccgccctccggcccgggcgc

SEQ ID NO: 10200 - DNA, 456 bp, Homo sapiens
  source 1..456: mol_type = other DNA
gtcctaattcaggggcaaatttcgaacttgaacccagaagaaacccttcaggattagtttttaagagaaaccttcccgttttacgagcccaaagaaacaaaattatttgtccaaggtcccataacgtgttagtgaaaaacacgaggaggccacgtctattggccaaaattttctcggaaagacttgacaagtacttgcgcgtgcccgggacgcagcctgcggggcctgggaaatccctgtgcactggatctgccaacgggggcaccgcggctcgcgcggcacgttcgggaagggggaacgccagggcggcccttttataggccgaagcccgcgcccgcgcgcccccacccttcgcaccgcccccgggccacgcgcggagccgcggcgttacctgagaagggccggctgcgtccgcacccggccccgcccgttccgccgcccgcccgcccttccctc

SEQ ID NO: 10201 - DNA, 338 bp, Homo sapiens
  source 1..338: mol_type = other DNA
ctgaagggtggtgtgtgtgcacaagccacaggcatgtgtatgctgtgtgtacacgtgtgtccaggagcatggtcagtgagcccccccccacccccccagtggttatgggcagcaaatccgagtagctgggacttagaggaggtggaagaagctcgactccctcttcttccccactttggagctgctaatgattactaattcttaacattgatgcccactcctgggcagcttctttctaatgaaggaggtttctgttttaagaaataaagtgactcctcagccgttgattcactgcccacagggagattttgagcagaggcttcctaggctccgtagaa

SEQ ID NO: 10202 - DNA, 308 bp, Homo sapiens
  source 1..308: mol_type = other DNA
actgtgttaaaaacaagctgcattttgagcaacctgcttcctgtatcctgcttgagcagaacctggtacaatctgaacagggatgacacttggaccccggcagacgcccagggcgcccagctggcccctgactgctgccccgaaaggcagttcatgcaataaattctgcaggctactgaagggtggtgtgtgtgcacaagccacaggcatgtgtatgctgtgtgtacacgtgtgtccaggagcatggtcagtgagcccccccccacccccccagtggttatgggcagcaaatccgagtagctgggact

SEQ ID NO: 10203 - DNA, 320 bp, Homo sapiens
  source 1..320: mol_type = other DNA
tataaagaaaatcaggaagccaaagtgtttctttttatgaagttacatcctgccatagaaaagaggtttgacttttgctagaaaaaaaagggactgataaaatgatcctaatctcctttgatcaaagaaaacgcctcggggaatggcaggtgccaatctgcagcagcagctgcaaccttccgcaaagcggaaactgcagttcagcaccctgggatgcccgctccaggcgccaatggttgcggctcgcagctcccaaggggctctttgatagggcagccgggcctgtcactctcgaggcgcgccccgccccctcctcgctc

SEQ ID NO: 10204 - DNA, 324 bp, Homo sapiens
  source 1..324: mol_type = other DNA
gaggagtacaaacctgtcaaaattttatttttaatctttttttttttcaggctggagtgcaatggtgcgatctcggctcactgcaactcccaagcagctgggattacaggcgcctgccacttatttttaatcttaattcattaaatgaatgattgctaccatttttaggcccggaaaaatggaggttaacttcattgtcatctgtcaccaggtactgtaggagtccgccccctcagtccacctggcatgagaactctgctctccaggaacaggtaacacagtcacttagagaacagtcactacttgccctgccctcctgagtcc

SEQ ID NO: 10205 - DNA, 312 bp, Homo sapiens
  source 1..312: mol_type = other DNA
caggctggagtgcaatggtgcgatctcggctcactgcaactcccaagcagctgggattacaggcgcctgccacttatttttaatcttaattcattaaatgaatgattgctaccatttttaggcccggaaaaatggaggttaacttcattgtcatctgtcaccaggtactgtaggagtccgccccctcagtccacctggcatgagaactctgctctccaggaacaggtaacacagtcacttagagaacagtcactacttgccctgccctcctgagtcccgggaggaaagtgctcgcccattcctgacctgtga

SEQ ID NO: 10206 - DNA, 229 bp, Homo sapiens
  source 1..229: mol_type = other DNA
gtaatcatccaagtgaacaatgatgactttattttggaaatatattggcacatattaaatttgctatacctattaaacatcaaagtggagatgttaagtaggcagtataggtgttattataatgattgtaactcaccacgttatactattacatagagaagctatttctaacatcacctttattatcaaatgaagttctgctgcagggtacagggcactggaccattag

SEQ ID NO: 10207 - DNA, 344 bp, Homo sapiens
  source 1..344: mol_type = other DNA
acaaagaagacttcttagagtttcgtagttcttcagaatttttgtggaaaatattaatttcattaaagaagtacttgagttcttaattaaaatctggtctaatttgatcaatagaagtttacatattttaatgtttgacaattttaagtagttggtaattgtcataatgccacacaattctttaagtatttctcaattatcaacgccattgttcattttctattagaataaagggtcccgtggaatctgaataaacggactgatccaccgccccgggtgttgaggctgtgaccagttaccccggcctccggagctgccgatgctacggcagctctctagcagag

SEQ ID NO: 10208 - DNA, 459 bp, Homo sapiens
  source 1..459: mol_type = other DNA
aatcaagttctttcaattttaattacataatactgtaatggctagactcttcccaatctccttagaagagtaagtaggacaggtccatcaaatttttaaaagctgactggttaaattaaggaatacaataaccacacgtgttatctattttacaaagtactgctggccagtgttcttttagtttagaacatgtttaaaaaccagtggaagatcccatgcatccaggcgagggggctcgcggcggcgggcgggtacctggttgaccgcggcgtgcttccgcactggccgactgcgtggccgctggattccgcggcgaccaggtctctacccgcccggcgtagcttaccctgtacgaccaccgactgggtcatggtggtgcgccgccggctccgggagcttgctagcccgcggccgcttctgcattcccccagcaacggcgctctgctagagagctgccgt

SEQ ID NO: 10209 - DNA, 343 bp, Homo sapiens
  source 1..343: mol_type = other DNA
aaaatgacttttgttctatgaaatggagctaatgattagtttaaaaggctttatttatttattttatgattaggttatacaaaaatgctttattgaccatttttaaaccatggttggatctttcaccctgaagtcttggaaaggttacatgattcagtacaaagcacctctttaggatgaaaacaagatggtctttgtaaataaaagttcataatgaagtcattttccagcgctgcagtgaaagatattcttctcccaagccctctgggtgaggactgataaaatatctatgtaaatatagataagacagcacaaaagctgaatattcttctggagcccttgg

SEQ ID NO: 10210 - DNA, 333 bp, Homo sapiens
  source 1..333: mol_type = other DNA
acatccatataggtaaaccagttagattatctttctgtctttgcaagacatctgatcaaaggaccgatgcagcccatcagacatcttgattgcagttgagtagaggagcctgcttaagccaggcccagaaaactgagattaaaaaatatatatgtgttgttttaatccactgagattgtagtcactttttatacagcaatagaaaactaatataaaaggaatgttgctctgggatagtatcatcttctacaagcagaagtgatgtgttaataaaacagctctccaaccagcagtttaacaaccagcttataacattcctgatatttaagtggc

SEQ ID NO: 10211 - DNA, 252 bp, Homo sapiens
  source 1..252: mol_type = other DNA
tgcgtgcgcactcacaacggaaaattatgtcatttaaaacagtgataaaacgcgaagcaaaatatttaaatacctttcaatttgggacgatttaaccattgcagcagttcaaaaagaaatgcattattattaattctcggtctgaggctgattttcaaaccgtttgcaaagcgccaggcgcgcagaccccgccccctgctttgtgtgcggcgcgcggattggccgacgcgcgcgggggccgcgtcagcgccc

SEQ ID NO: 10212 - DNA, 548 bp, Homo sapiens
  source 1..548: mol_type = other DNA
atgtggatttatttaacagaggaacacttgtattcataacctccaagagtttcgaaagtctttcttccagtgtctagccagcagcattgctgcagagtggaataagaatccttaatctgagtcttaaatgagattaaatattataaatagattatcaatggaatatattataaatgcaagtgcttagaactgtaccttataaatgagcttattaaaacccgagccattacgagtcaaaataataataataataataaataaggcactggggcgatgggccacagcccggcggggtagtgggcccggaaggggcgcgggagtgggctctccccgccgggctcgcggcacgtggggtccagaccgccaaggctacgaggcgccgactgcgcaggctcggggacaggcgcaaccactgcgcgcagacctgagggggagaacgtccacccggctgcacgctctgtgtatggcgccgccttgcgcaggttgccttcctcccccgtggaggccgcagtggatgcgctcacctccctgcggcctcctgaggtggt

SEQ ID NO: 10213 - DNA, 358 bp, Homo sapiens
  source 1..358: mol_type = other DNA
tcaggcctctatcccctgtatatgtatatgtatatgtatatgtatatgtatatgtatatgtatatgtatacctgcacgtatacatccagatgactgatgacattccaccattgtgatttgagcattaagaaggttcttaggtgaaataaacagccttgtttctcacacaaagcctggcagtggtggtttaaatgaatctcctttgtactcaaacagcatagctagcagagcaggcttaactaggaggtgcttcaaaggagtgtctttctccttgaacacaccttttcccaacaatagggcatacattgagtaaatgattttgtaactttacttcatcctttctagagggtatttaaat

SEQ ID NO: 10214 - DNA, 289 bp, Homo sapiens
  source 1..289: mol_type = other DNA
atttagaaagattgtttttaagaaagaaataaaaaaaaagtcttatatgacacttcataaacaagtttgcaatgctgtctactagtataaatgaccgtacgttgatctgccttcctgagttcttgccaagttagtaagaactagcataggcagtgtgcaaagagctcttgaagctattaaaatctattcttggtaacaagaaatacctaaatactttaatttgcctttttaaatttcttgtcagggaaaaaaatctctgccgtgaatttcagtgctggagcctgtttct

SEQ ID NO: 10215 - DNA, 617 bp, Homo sapiens
  source 1..617: mol_type = other DNA
aagtgcacggagcacgtagtcgatgcgcaataaatatgtattttcttctcttgtaaggtaaaagattgcagtttaaacactgatgggtggttgatcgtgcaggctgtgtccacaatcagctgacgacgtgagatcttcaaggacagcccacattagctaatggctgaggtaaatgtgccggtccccacggcaccggcgcggagcggaggctgcacacttccgccccttctcgccgctggaggccgcgctctgcggcaagactcggccgccgcaggccccgggcagcgtccgccgttgcccaaacaagccccagccgccatggaggttgcgcgcagtgcgccccggagcccgcgccactcaccggggcgctctcgggcaggtcgaatccgaccacgtcgcaggcggccagggagaagtgctgagccatggctgcgcggggagcaccagggagcgcctcggccgcgaagggtgcaaggagctggctggcgggacgctgcgggacaggaccgggccggacgcggcggggcggggctgcggctgccagggcacacggcgcggcagcctctcccgcctcccgcgcgcttagcccccgcccctcgcgcggcgggcgtcctgcg

SEQ ID NO: 10216 - DNA, 605 bp, Homo sapiens
  source 1..605: mol_type = other DNA
taaacataatagatttgtattttctttttaaaatgaggtactatgtaataaagatctcaaagtgctagtccttcactctgaagagaattaaatgccctaaggcatacattgtatgtaatggatttacagttcttgagagaacaaatgtcactcaaaacattttgtaaaccttaaacccggtttgcaaaagttttttgtagtatgctctatatatttctatgaagtttctgatgccctttcataaaaaattcattacaataacaaaataggattatcaagtaataaccaatattggtttccataacaagtatcatcttgcaaaatggttcttcacgatgtctgattgaaatagtgtataaagtttttggtttaaactaaaaggtcaggtctaacctcatgatctccggtctcagctgtgcagcagcggcaccgctcctggacccctactgccttctgggctcctaggcttgcggaacagatcaggacgcgagctgactacctgactccgggcggcgcaggacgcccgccgcgcgaggggcgggggctaagcgcgcgggaggcgggagaggctgccgcgccgtgtgccctggcagccgcagccccgc

SEQ ID NO: 10217 - DNA, 720 bp, Homo sapiens
  source 1..720: mol_type = other DNA
tgcatagtcaatttgattttgattcaaaacgatgaaattaaataagatgaaaaatttggactctcaacttcccacctttattagattttttaggatcctaaaaactgattttaaaggcttcctaatattgttaaacagagtctaactaccaaaattgacaacaatagtgtttacttccacctttgagggattgggatcctaactgcaagttaagccaataatattttttttaagctgaaagcaaagtttgaaaatttttttctcctgaaataaacacagcaatcttatgtaaattaacataatatgagattatcaaattaaggggtttttgcaaactctactgaaatttaagcaagaaaatctgaagtcatttactgaatatagcggatctaaatcctaaaagcctaaaagtaattaagaattggggtcagctattttcacaaaaatttatgaatattaatagacacattgataactttatgtaataactcaataatttagatgatggtctaaatccatatccgcttttatgtactaccacatattatataatatcaaccaattaacataagaatgtgcttttcaaaaagtattaattaataaaatagaatcacagacaaagacggtccttggttaaaactattaatatatatttaagacaatgggtttatttttaaataagaaaacaaggaattgaggggaggagcttaagctcagggt

SEQ ID NO: 10218 - DNA, 620 bp, Homo sapiens
  source 1..620: mol_type = other DNA
tttgggtaatgggttcactagaaacccaaaacttatatcccttgaatttaacagaactatagctacatcatacagattcagcaagtttgcaaatatggtgaaaaaagtctgcaacatttaagacattctataatgcatggtatactttaactcagataatcacatgtgtaaattctcaaataattaggataaagcatgtgaattaaaaaacagaaataatgacttgaaagtgtcttttttctctttatggaaaaagaaagttatgtttctctggtttttgataagaataaacctcatacggtgaaatcaatttttaaaaggagtaatgcagaataaaaatccataaaactacaaaaatcacataattgtatatttaaaaagcaatggcataagaagatatccttctgtggaattccataacattgctagttagtaagtagacaggaagtaatttccctaataaaatgtacatatcatttagatttattaattaaaactactgaagaacttgtatttgagctattctaatgcaagcattcatgccaaggtgtcattccattcttgcatttacacatgggatcaaataaatgaacagtattctcgctttgtataaaagtata

SEQ ID NO: 10219 - DNA, 600 bp, Homo sapiens
  source 1..600: mol_type = other DNA
ataaaattattctctgaagtcataacagagatgtccttgttttgttcataagatggagaaaatatttttgcccctaattattaaagggagacataattatacaaatagaaacatctttttattgaaataagtcaaggtattaaatcaaatgaagagttatgttaaacatactacaatggattataattgtctattaaattatatcccccaaagaaactataaacttctaaaggcaagaaatatatctttctgcttggcatggagcaagtattcaggaacatttatgtttccttacattcaaggcaagagtatgattagtaccatatagccaaactgaagtgataaaaataatattattcatgtatgattaaggcagcctatgaaaaaagtcatgtttaattatgatactaattaacactgattgaacatttaggtttgttcttaactcacaaagaagccaaaggaattctatttcagatgagatttaaaggaaattcttttaataagctgattctaaggaataaaagtttagctctcctatgttaaaaaaaacagtctgatatgcacatcagtatagtacaacctgaatattaaaaacag

SEQ ID NO: 10220 - DNA, 536 bp, Homo sapiens
  source 1..536: mol_type = other DNA
cagttccagctggatggcctccagagggtccatgcggagagcctcatgcaaaggccagggcccctcagccacggctgctgagacggtggcgcaccgcccccgccgtcagctcagacgcggatctctgggcgccacagcaggctgcggtcggctgccatcaccacagaagcggctgccaggccttcggcgggaggctggccctcttcccaactcggatctggggagtaccgccacggcccgcggcatcctggggtacgcccccctcctctgaaggcggtggaggcgggagcgcgacggtctccgagcctccctcacccggagcctcaggtactggtgtgcgtcctggtcgctcggggaggggagtggtcctcttgaccccatccagaccgcaggcgaacgcccgttttcctcagaggccgaactgggagctaacacagtctcactaacatttcagcggcggtgtcgtcaggactggagatctcacggtatcgcgagaacttgctgagcccggctttatttctgtgaatttacccata

SEQ ID NO: 10221 - DNA, 203 bp, Homo sapiens
  source 1..203: mol_type = other DNA
acaggttctgaacttgggtgcatgagggatctctctctctcacacacacacaccgtgtattttgttggtacagtaaaaaagagaactgctttctctttgagaagagaagttctcgaacccgaagcgtttgcacagctgcgagcggggttcggccgggggagggggtccccgtttccctctcctcatcggagcctcagcgcccg

SEQ ID NO: 10222 - DNA, 427 bp, Homo sapiens
  source 1..427: mol_type = other DNA
cctcagtgacatatcctcggggctatcccttgggacatgtgaatgtcaccttacctcttcatagggccatctatagatgttcagagcttcactgtccacggagactctcagcaactggatgtgttcatagccacacctgtggacaggtgaggcaggacagcacaaaattctgtttgaccggaattggactatgctgctattgtggaacagaacttgcagcattttaaaccagtgtttcagctgctggagaagcagatactgtcccgagtccggaacacagctagctttaggaagactgctgaacgcctgctgagtataaatttgtggatgctgtccctgatatttttgcacagattgaagtcaaaatgaaagaccttttagattttgcagatgtaacatatattttctttgtcatgttggcaatgca

SEQ ID NO: 10223 - DNA, 437 bp, Homo sapiens
  source 1..437: mol_type = other DNA
cacaaaattctgtttgaccggaattggactatgctgctattgtggaacagaacttgcagcattttaaaccagtgtttcagctgctggagaagcagatactgtcccgagtccggaacacagctagctttaggaagactgctgaacgcctgctgagtataaatttgtggatgctgtccctgatatttttgcacagattgaagtcaaaatgaaagaccttttagattttgcagatgtaacatatattttctttgtcatgttggcaatgcaactggccaaagatgtctttatgcagttaatcacagtgttagcactgaagctataaattacctggtcattttgtgatcacaagagtctatgcaaaaaaaaaaatttctttaccccagattatcagatttttttccctcagattcattttaacaaattaagggaagatattt

SEQ ID NO: 10224 - DNA, 620 bp, Homo sapiens
  source 1..620: mol_type = other DNA
aaaagacaagctagagaaacttttaagtacctttctgcagttctaatttgaaccttcttgcataaagaaaacacaagtttgacttttaactgtgcttaaaacgacttctgaggaagtaatttttttcccaggatgtcattacacactgtttaaaagaataatgttttcaaaagaataatgcttctttctcactcaaaaggattgaaagaaaaaaaaaaggaaaattattctttgaggttaccaagcaaacctgatctcagatccaaactgagacatactttctaacagagatgaaaagtgcaagtgagtgccaaactcgcttttctagcatgatccagtgtaacatattagttcattttaaagtagtctttttaaaatacgcatctttaaaacaaaatgaattaaaattatgtgttttttttttttcttctaatgaacctggtatttatttccttaaaaagaaacttcctcaggcagtgacttaagtggttaaatcacccctcttcataatgaaacatgttttttttaatcagggatagtgcatatttgagtaaaactagctttttgtaacttgaaaacaaaactgagtaatcagttatggaatctgtttcagttcattt

SEQ ID NO: 10225 - DNA, 597 bp, Homo sapiens
  source 1..597: mol_type = other DNA
tcattatatattaaaaaaaaacacctgcacatgtatatttattgcaacacaattcacaattgcaatacccatcaactgatgaatagataaagaaactgtggtgtatatataccatggaatactactcagtcataaaaaagaatgaaataatgtcttttgcagcaaaccaaaaactgtagttctcacttataagtggaaattgcactaaaatctcatatatatatgtatatatatatatatgtatatttatatgtatatttcatccatgtaaccaactccaaaagctattgatatatatatatatatataattttcatatgtttttatatatatgaaaaaagacagcaaatccctgtcttccagagaaaaacattcataaaattctaggtttgaaattcctagactatcttttctgattttcaatccaaaccacatggaaagaaggttaaaatggagcccgtgcactttgaatttattctcagcatttaggctgattatctaaacatgttgagaaatattcattcctaaggaatgacattgtttccttatattcagtctgagaaggactgttgtttctgatgaagaaagaacagctgc

SEQ ID NO: 10226 - DNA, 620 bp, Homo sapiens
  source 1..620: mol_type = other DNA
tatttagtgacttgcagaatttactaagaatcaacccctaagagattcttctctgtgatgaaagaaaaaataatattatgcaaatgcagtcataataaaagtttaagggtaattcctctgcaggccttctgggtttgatccaatcagtctcaaaatccacaaagcttgtggctgtacacatatgcttttccacaaaagaaaatttcctacatttttcctttttcacccctcccagaggtacaaagcggaagcagttcttgcctattcagtgaaacaagcctaagtggttatgcttgtttaaacaagtttcatgtttttaataatctatctatatttctggcccaaattgtaagatgtcttaaaataatttataaattgtttttgctgtgaatattcatcattttttaaatattgagaattttattaccacaaagaatttttctttccttttaaatggtctgacattcagctaactgtgatgcttccatggaattcaattcctgtcacttattttattttaatatagtatgttgaaaagagtggaaaaaagaaaagcaattcaataggctcttacaattaggttttgagcaaagaaagattttatttttaggcttatctga

SEQ ID NO: 10227 - DNA, 572 bp, Homo sapiens
  source 1..572: mol_type = other DNA
caggctggagtgcagtagttgttgggactacagctgtgcctccatctcctgagctcaagtgatttgcccacactaagctaatgtgacattctcaaaccaatctatcctcattatagagagactgtgtcttactaatctacatttatatattacaagtatttactttccattaaaacagctggtattcttgtagtattgcctatagaattagtttcattaaaaaatgttttattttatttttcaaactactgttttgggatcttacttatattctgacaatataaaaagggacttgaaataataccagtaataatatgagtaaatggaaaaatctttcatttggattgtatttttaatgtagaatttttccccacatatactattatttactgttcatcatattatttctggaacttaattttcttatctggaaaatggggatagtaactccaattctgcctatttcagagggttactgtgacagtgaaagacaaacatgatggtatagaatgacagccattcatgcacagagtgtttggtcatgtataagactgacttaattgatcagtttt

SEQ ID NO: 10228 - DNA, 340 bp, Homo sapiens
  source 1..340: mol_type = other DNA
aaattttctttgtaattgctgcaatgattttggagatcacagatgcatcaagtttattcttggaagtcgtattaccaaattaaaggttcactgcaatttttacattgcatatgataattgttattactgagatagaagttaagctaaagatctgaaccgagaagccggacctccggtcttcccctgcccagtggaatctagcagcgctgagaggcttctaaggctcaggccctgcaaagcccaggagccggctggtccttgcgcgcaccgtcccagcaagtcccgagcgaggtctggctttgggccctgggccttccagccggggactctgcgcctgcgc

SEQ ID NO: 10229 - DNA, 337 bp, Homo sapiens
  source 1..337: mol_type = other DNA
ggatcacgaggtcaggagatcgagaccatccgggattggcaccactgcactccagcctgggcgacagagcaagactccgtctcaaaaaatatatatatatacatacatacatacatacaaaccaagatatttgttatcttgtaaccttgcctagcagcattataaaccctttattgatactaaaatagagtgctactcagcaggccctagtgtagactgctatactcattcagattaagtatgaatgtttctctcctagcaattgagtggcaggaaactcgagtcccagctactcgggagtgagccgagatcgcgcactgccctccagcctgggcag

SEQ ID NO: 10230 - DNA, 453 bp, Homo sapiens
  source 1..453: mol_type = other DNA
aaactgtcaaatgccaagtatttgttggtatatttagaaagagaaagaaatacaaaacaattaacattaaagactttaattaatatatggtttatagttaagtccagatatggtccaatcttctataccttcttcatattggagactgtatactataaatgaatagtcataatcttgaacttaaatcattgcaaaattatgcatttacatttacattatcaaataaaaattatattatgccaatatagtttagtgttaatttgaatttcaattattagaaaacgggtaacccatgaattgcctatttataggttttaagtataatattctgcctaatcaccaggagattccttataagcaggaagaacaaaactcaggactgctttgtctgcacactgggtcccttccaagcaagactggtcgagtcacaggcgcggtgagtttttctgagag

SEQ ID NO: 10231 - DNA, 501 bp, Homo sapiens
  source 1..501: mol_type = other DNA
atctggaacacagtctgttttcaataccgtttgttgaactccagggtagattacagggctgtgtattataatctacagtactttaactgaagttactcgtttattggtgactacattgctgtcaaaaatacactcagaccccagctactgttgcagtgagccgagatcgcatcactgcactccagcctggtgagatgttatagaatataaaattataaatgacatttttgcactgttgtagccccaataatgtatctaaaatggtacttgacacagtttatatccttaagaatgtatgcatgcacgcacgcgtgaagaatgacggaggtctacgggccgcttgtcgcaggcacaggctcctccttcggtgggtgggacggcggcgcgcactctctacgccccgtgcggccaccactcctcctccgccgccgccgccgccgccgccgccgccgccgcgtcgagtgcaagggcttctgggagccgagcctcggggtctcggag

SEQ ID NO: 10232 - DNA, 273 bp, Homo sapiens
  source 1..273: mol_type = other DNA
tttcaagagcctgacagtctagttaggatatctagaagataagtaaattgcttgtacaaccctaatcattgaatatttaatgcgaaaatagtagattcttttaccttttgagaccagtttagcctgagtgacagagccagagactgtctctgaaatgaggagctaacttcaagaaatctcatccagaagttagtggagtgcccttaacacttaattggttcctggaagagaggatttagatttattctcctggggaacattctactcaataca

SEQ ID NO: 10233 - DNA, 346 bp, Homo sapiens
  source 1..346: mol_type = other DNA
agataagtaaattgcttgtacaaccctaatcattgaatatttaatgcgaaaatagtagattcttttaccttttgagaccagtttagcctgagtgacagagccagagactgtctctgaaatgaggagctaacttcaagaaatctcatccagaagttagtggagtgcccttaacacttaattggttcctggaagagaggatttagatttattctcctggggaacattctactcaatacacgcactgcctcaggcggtggtgagcctgtttcaaacagaggcaggctgcttcctgaggaaccagcccctcggggcttgacgccctgatcccgggtcgctggccgggggc

SEQ ID NO: 10234 - DNA, 415 bp, Homo sapiens
  source 1..415: mol_type = other DNA
gtctaaagagagcacagattaaacgtccgttgccgtacttttgccagatcctccagggctgggagacccaggagtgcgggccactgcttccctccggtccctgctgtgcaaagactgaaggcgtgcagagtccacgccgcgcggccaggtggccagttacagctgcactttccctgcagaagacagtgagccttcccgggatctttctgggagctccccagggcgtgacaggcgccatctaaacgcagtcccaccgcggcccaccgcggctcccgggcggcctgggctgtacctgtgcgcggcgtcctttctgcgctgagccagggcaccccggagcctgcggcctccttccccgcccctgcggccccgggtcccagccccgccccgccccgccccgggctggggctccgctggg

SEQ ID NO: 10235 - DNA, 391 bp, Homo sapiens
  source 1..391: mol_type = other DNA
tacatttttaggtgatgttttacataaagatgcgctactgcactggtctagaacagaccatttccattgtagaagatggctgccgcccctcttgctagtgataagcacatttttctgaacaatatcagatatatgtagcagtacatactacttcttcaaagagaatattatttcaaatcattttcatatttatgttttcaagcaaaagttatgtatgctctacaaatttctttctaagctttgatattattcttgttaaaaatctgcttttcctctcatatatatagtatagatatttaatctttagataaagcgtttctgtctctagcttcagacactgtggaaccaactatatactggtttattatgcagaaatagaattctggtaaga

SEQ ID NO: 10236 - DNA, 373 bp, Homo sapiens
  source 1..373: mol_type = other DNA
cacggtttcaccttttaaaagtgccaaattattacttataagcgtaaaggccttctagaaaagattcatagttgggttcagatgaactttaatctcagctgctctgtaacatgctaatgctaagccttaacattaaggcttattttatagggaaaatatttattttataaggaaaatataatgttggacatatatactattccttcagtctgcccatcacagctaagatgagtctagtcccaagatactatgtgtactaacatagaaaaattcaagtccttgaggtaaatgccaaataattgaatccataattttgctattttgaaggggagaatttctgagtgaattctgcacgctgatatctattgatcac

SEQ ID NO: 10237 - DNA, 276 bp, Homo sapiens
  source 1..276: mol_type = other DNA
agctggtattacagctcacaccgggagcagccggaagcgggcgttacaggtactgccatttccccgcagaggtagctcttctgcgccctggaggggtacccggccggactccctaggggattccgacaagggctttcctgcgaagcctcggatccgctgggaaccgcatagtctccggcacccttggccgcatgcttgtcagaggtgggccccgggaacccgctccgcagcccccgagtggcgtcagcacgcccgccgggcatgggctttaaatgc

SEQ ID NO: 10238 - DNA, 647 bp, Homo sapiens
  source 1..647: mol_type = other DNA
attcttactgtctaaatgtttattatctaaaaacaaaagccaataatcatccttcttcttttcgcttcaaattaaagaaaaaaacaggcaacatttgttctttggttcttgaccacacaatattaagccattggataatgttttcaagggactttgaattaatggatttactcctttaatgctcagtgagctcagtgatagaatgctgctctcttctctctagcaagcacagaacactatgtgggtacttatctgattatctgatggcccagattagtcttgtttatgaaggactctattcaaattatgaccagagagataacgagcaatttatagatctctgtccttagttcctatttcttttattttcctccagtataaaaaagttcttaaaatttgtatgtgagccataaaagagtaatcttatgttttactacataccaatttgcattttctccctgctcttaattttaaaaaggaaaagtctgaacacagttcacctttgacttgattaactgaccaatgccacaggattatttaattctgcatgagactcttgcaaagttcttaagacattatatctataatagtgatgaatttaatgcctctaaaacatttggctctttactttagagttacaaaaggaa

SEQ ID NO: 10239 - DNA, 412 bp, Homo sapiens
  source 1..412: mol_type = other DNA
tctcagctactcgggaggctgaggcaggagaatcgctgcagtgagctgggatcatgccactgcactgtagcctgggcggaagcttgtacaatgtttccttctcaaagcagacacttgaacattaggtttctggtaactagtttcagctgtctcgatagacctgataagttaatatgtagtaaagttctgagagtactctaaccaacttgctcttaaatttaaaaatatcaataattctttattataatagtgctactttccagtttcagactgcatgtgtcacacccttgctgaaatacaatgtgaagtgcacttctaagaactaacctttagtcactgggtgactttatggctgttatgaaatagctcttatggaactgttacaagctttcaagcattcaaaggtctaaat

SEQ ID NO: 10240 - DNA, 446 bp, Homo sapiens
  source 1..446: mol_type = other DNA
tgtgttactcatagagaaccttatatcattaagaaaaggttaagttacatttagtataatttatttaagaaaacagatcacgaggtcaagagatctctcagctactcgggaggctgaggcaggagaatcgctgcagtgagctgggatcatgccactgcactgtagcctgggcggaagcttgtacaatgtttccttctcaaagcagacacttgaacattaggtttctggtaactagtttcagctgtctcgatagacctgataagttaatatgtagtaaagttctgagagtactctaaccaacttgctcttaaatttaaaaatatcaataattctttattataatagtgctactttccagtttcagactgcatgtgtcacacccttgctgaaatacaatgtgaagtgcacttctaagaactaacctttagtcactgggtgactttatg

SEQ ID NO: 10241 - DNA, 308 bp, Homo sapiens
  source 1..308: mol_type = other DNA
aggcattctctagtgctccaaagcatgggcatttagcaaaggctttaagtttgagcagcaagccagtcacccagactggagtccagtggtgcgcagactagttttttaaatattctgttcagggccaggctggctgcctctaaggtgctggttatcacagtactggcacatttataataatcagcctttagacagaattctgtgcagtattcccctcatccagagtctctgagggggtgactttgttgacttagcatggcttaactatgatacctcactcattttttgttgcacttgaaccaaaagag

SEQ ID NO: 10242 - DNA, 543 bp, Homo sapiens
  source 1..543: mol_type = other DNA
taggaatctaagcttattattaaatatttatttaagaagtgttattattacgatggataataatagacttaaaatattgccataacttcgaagtcatagttatacataaaataaatttcctccttaaaaggagcaggaccattcgaatgagactaatgactcatttaaaacatcatctggctaatagcagcttaatattaaggttaaggttatgaactttagggtcacataaacttaggtttctaacaattattttattgagtcttaagagaatggaacaagataatgcttataaaccattctccagtgagtagtaaatactcattaagttactcatgtctgtttcaaaatggctatgattctgtgtcaaaggcagaagcaatcagaaccattttgaattacatgtatatttcaaaacaagggaattaaactttgatacattatgtaaaaatttaaatagctgatatggtttgtctgtgtccgcacagccaaatctccatgatagcgcataagtctcatgagatctgatggttttgaaaaggg

SEQ ID NO: 10243 - DNA, 416 bp, Homo sapiens
  source 1..416: mol_type = other DNA
ctcctcaagaggatcatcgggtggagtcctgaactgagtaacttttgaatgaatgaatgaatgagtgaataaatcagtgaaatccctggcatgcccatccccgcgggctggcaaaaccctggagggggcagcctcccaaggcaccgccgcgggctcagcccatgactcccgcaccacgcggcgaggggcgggtccggcggcgaggtgtcctgctgcctagcaggttcacgtgtactggtgcaggtgatacgtggaggggagcgcgggcggcgcctcgctcgcctccggcttcgccgtcggtcactgcctgggaacgcgacttcctcctctaggggccgacgtgcggggcggggcggggccgggcgggagacgcccccgcagggctgggctgaaagccgccccaatgggattcggtg

SEQ ID NO: 10244 - DNA, 721 bp, Homo sapiens
  source 1..721: mol_type = other DNA
tataaaatgtatatactttattttgtggttttgctatttataaatttaatgttttctgtatatcaccatgttaatttgtaatggaagtgcacttcgtagtgtatattgttactgacattaaaatactttatagcattgtctctgagcaaaagctagtatttaattgtacaaatgaataagcaagttacatgttattgtttgctcttgacagggtaggcctcttaaaagaaaaaaaacaacttgttttttctttatgaatcctccatgcatgacatgaaccgtatttatttagtcaaaaaaattgtaaaacctttttgctgtgacatgaaaccatgaacacagcctgggatggaatggccatggcatttttttcagagaacatcctttatctgctatgaaatccttaggaaatgtaagctatagattttcaagaaagaggtggttttttaaaacttcaagttggaatttttatgaggtcactgtcatgatataaattccttttaaggactgataaatagaatgaaaagtttccaggtagtttaaaactccacaggtcaggttgctcagatgctactgtttagaaagtaactagttaaaagttcattttagaatgtatggtttttggggatgaactaagaattagttattagttccaaaggactgagaaccaattttaatattttcacatttataggaaagaaattcatatgtccctgaaact

SEQ ID NO: 10245 - DNA, 482 bp, Homo sapiens
  source 1..482: mol_type = other DNA
cagaatggcaacatgctgtacaggtttacagcctaagagcaataggctacatcatatagcctgggtgtgtagtaggctatactatgtgtttaaatacactctaggatgttccctaagggatgattaacctaaggacacattcctaagcccatcttaagtgaagcactactgtagttgcttttgaaatgacgctaagcgttttaccttacaactgagttaagtaaaatttggaaacttggtttcgaggttaattgaatccaggtctacctgactcttaatcacaagacaaaaagtcttcctttaggcagtccacacctggaatttggggtctggtttaccaagagccagtgtgtacacccactccatcaccgcagcaactttctgggaggattttggaacgggccgctgacaggccgctcccaagctgaggcctttcataggccgcccagctcttcgctacgcatgcgcagcgggggcaggct

SEQ ID NO: 10246 - DNA, 664 bp, Homo sapiens
  source 1..664: mol_type = other DNA
agaggccgcggcaactcgtgccatgggcaccacccgccagaccagcggtctagcggtccaagacgcctcggccaccccccaccaccgcaccgggcctcaccttggtggtcgtagagactcgcgatgtccgagaagctgggcggtgaccgtccgcgcgccagcgcatccggtggtgtgcggctgccaggcacgaccccccgcgcgggtgccggtggtgacggcggttcctgccgactgccgggggcgtgaagccgagcggcgctaggaccgcggcagaggcggcgcggcagcagcgccgccagatccagttccaggtgccgaaccgaacgcggagccaggaggtgagcgtgcggtgcagacagagcagcgcgtgcagcacccgccacaccagctcgcgcagcgcgacggctatccgcccctgcggccggcgcgggccatcgctccgcgtccccccgccccccgctgacgcggcttctgggtccgagaacgtggcccgttccggcgcagtgagggaaggcgcacgcctgcgaactagccgggccgataccgcgggcgccccctggtcgcgtggagggcgatgagcgaacgacccgggacgggaccccagcaaggcacacgtggtcttcaatgcgatgggcgcttccaggggacccggcgtcccttg

SEQ ID NO: 10247 - DNA, 363 bp, Homo sapiens
  source 1..363: mol_type = other DNA
acatatatatgaagaggaccacgtcgaagtccacatggacatcattgaagtcaggcagctgtagagcctctaacatggctaaagagcctcgctcccagcctcagccgggaggctgggtggattcccgagggcttctgtcggggccgtgagattcctggacccaagggacgccgggtcccctggaagcgcccatcgcattgaagaccacgtgtgccttgctggggtcccgtcccgggtcgttcgctcatcgccctccacgcgaccagggggcgcccgcggtatcggcccggctagttcgcaggcgtgcgccttccctcactgcgccggaacgggccacgttctcggacccagaagccgcgtcag

SEQ ID NO: 10248 - DNA, 407 bp, Homo sapiens
  source 1..407: mol_type = other DNA
agaggaccacgtcgaagtccacatggacatcattgaagtcaggcagctgtagagcctctaacatggctaaagagcctcgctcccagcctcagccgggaggctgggtggattcccgagggcttctgtcggggccgtgagattcctggacccaagggacgccgggtcccctggaagcgcccatcgcattgaagaccacgtgtgccttgctggggtcccgtcccgggtcgttcgctcatcgccctccacgcgaccagggggcgcccgcggtatcggcccggctagttcgcaggcgtgcgccttccctcactgcgccggaacgggccacgttctcggacccagaagccgcgtcagcggggggcggggggacgcggagcgatggcccgcgccggccgcaggggcggatagcc

SEQ ID NO: 10249 - DNA, 614 bp, Homo sapiens
  source 1..614: mol_type = other DNA
ctcatttaagtcttacaactcccctgggagtgcacagagaagaatgtctcagaatttaattgcttagagtctctgcggataagtttcagatgtgccactgaaactcaaacattgcctcaaatggagacgttttggaattgattctttgtgagaagtagttttttctcctccggggccggcacctgtctcggcgtcctgccgctgtcccaggccggtggtgctggattccgcggcgcttgggcagaaacgaggaatccccgcctagaccgtgggcctctgcggacggggcagtagagggtcggaaggcacctcggcagcgccctctggcgagaggagagcgcgcaggtcccccgcccgcgccccgctctgccgccgccgccgccgccgccgccgccgccgccggcgcccccgcccggctctccgggttcaccctcggtctctcactccgtgagacacagacggtagctttccgaccgagcggggcacaggctgaggcggcgccagcacaactgccgccgcgcgccccgaggagacccgggcgaaccgaccggcagctccgcgcccccgcgcgacacccttcgcagccacttcgcggggcgggccaggacttgggg

SEQ ID NO: 10250 - DNA, 792 bp, Homo sapiens
  source 1..792: mol_type = other DNA
cacttactagcatctcatttttatagtaattttcaggaaagcaactgctagattaaatgaggcacatccttttataaagcctcattaactgagatgtaactgatttggaatctgtaattatttcttttttgccataaagttaatactgcatcagtttattaaaaatttggtaagattgtgtaataatttaatgcaattgtttttaaaaaatcttaaatacttaaagtagcatattgctatttttgttgtatgtatcagtttaaatataagtattactattcacaaatatattgttaaactgctaattgaagaaaacacaaatgaattaaatacatttattagttctttaactgtaagataaaaataattttttaaaacaaaaagcaattagcctgattttcacaaaataagaaaacaggtataaaattttattgtgtaaaaatatttcactttcactaaaagctaacattatacagcagcaagaattcaatgaaagttgttttgcttatacctgtgtttatttttctcataattaaaattcctgcagtaactattttagctcttcaacatcttcaccattaatattcaattatctctaagcctgaagatgcatgaatctttaacaaaagttttttcatttatctaccatatactgttttaaattaaaaacaaaagatgaagcacaaagtgttaatgacttttccatacctaaagtaagaagttctaaagtttggttgtgataagactgagactgtggctaaccaatcgaaacttcagaattcctatgtgaca

SEQ ID NO: 10251 - DNA, 291 bp, Homo sapiens
  source 1..291: mol_type = other DNA
acccccgggggaatacagatgaggatttaaatcccaatcctaattccaagggaggctggaagccccctcagccgcgccctggcttgggacgccaggggcaggtcttccacgtgtcttcacaggagggcgggacagcccagtcgccgccaaggaggcgaagcggggtcggggtagctcacccgccccccgcagtccccgccccccgcagtccccgccccgcgcggcgccgcgcacgcctgaagtcattgcccgaggccccgccccctcgcggccccagccccggctctggct

SEQ ID NO: 10252 - DNA, 252 bp, Homo sapiens
  source 1..252: mol_type = other DNA
gtatctttttatcatcagaaacagctgagaagtctatgtggtaagtgatagaacacacacctaaatctaatttaacttccaagaattttaagtagtatttcccaattaaaatgtctttaagggaaaaatgacccccgggggaatacagatgaggatttaaatcccaatcctaattccaagggaggctggaagccccctcagccgcgccctggcttgggacgccaggggcaggtcttccacgtgtcttcacag

SEQ ID NO: 10253 - DNA, 442 bp, Homo sapiens
  source 1..442: mol_type = other DNA
ataaaggtaaatctttctatcactttttgaattgaagaaaaaggtccaggccctttaatgacaggaagtgcccagggcagtacttggcacatcgtggcacttaataaatatttgttgagtgaatgaagaatactgaaaagcagttatgtttaccactaggcctttgggaagagaagcagtatacttccctttctccattagagtattagtaataaatgcccaatgctttattgaaaacaaataaccatattccatttttgcttcttagcatgtctttcaaactgcatcctgacagatacttcttgtcataaggccttagttgtcaatgaacaattatggttcttctgagccatgttaaggcattgtgccactaaatacagtcacactgtgcaggttgcctgtatgatggggctggatcatgctcttgccacttgagtttact

SEQ ID NO: 10254 - DNA, 460 bp, Homo sapiens
  source 1..460: mol_type = other DNA
aaagctcaagaaatgaaaaatgagttttaattttgtgtagttttataaaagactagaaaatgaggactaatgaatattaaatgtatgtttcccagagtactttttcatataaatatacaagattgtgtgggcattatagaaacatccttaaagctagttgaatgttttgttctagtaaaattatgttgttattaatagctcattcataaaatacaaatgggaagttagagaattacatttctcacctcaaatattcctaaaaaacaaatgtgttttgttttcttatattttgtgtacctaatttttatcctaattacaaactttcttttttttaaaaaaggacactttattaacatatcaaaagttattaaaatgctcatattctagacttagtaattcctggaaatatatggtaagaggaaacagtgtcctggagaggggtgtaaaccccaccccttca

SEQ ID NO: 10255 - DNA, 286 bp, Homo sapiens
  source 1..286: mol_type = other DNA
atttggccaagtttggtggtttcattcacaacatttaaggaaaaaaatgaaaaacaaacctttataccacttactaaatagaaacggtttaggctcacaaatatgttaaagctttctcttttgctttactaacggtttaggtcagaaatttttttgaagatcaaactgatcacacctcttgtgacccagatctggaaactggaggggcgggcgtcggccggatcgcgccctcccgccgcagccacgcctccccgccgcggccacgccccctccgcccctctccgcg

SEQ ID NO: 10256 - DNA, 212 bp, Homo sapiens
  source 1..212: mol_type = other DNA
tttgctttactaacggtttaggtcagaaatttttttgaagatcaaactgatcacacctcttgtgacccagatctggaaactggaggggcgggcgtcggccggatcgcgccctcccgccgcagccacgcctccccgccgcggccacgccccctccgcccctctccgcgccgccgccggcggcctccgcgcgggcctcccaggctgccgaggcc

SEQ ID NO: 10257 - DNA, 378 bp, Homo sapiens
  source 1..378: mol_type = other DNA
acttctccttcctgcagccctgtgaagaaggaggtttgaactgtaagtcaattaaactttataaattactaatgtctttattagcactgtgaaaaaggcttactttaagggtcattactaaatattgttaacatgtaaattattcttacatggatctatacaactttttaaagtgacaagctgattttaacattcatatgacatttttgaaaaataacaaaaaattggaggtggtatttttgtagagagaaatataataaattgctgattttaaacataggtttctattgtgtcagaaaaacctctgtggccttgggttaggcaaattccttggaagaccgatctgagccgccgcacaaccctgctctggccaggggg

SEQ ID NO: 10258 - DNA, 462 bp, Homo sapiens
  source 1..462: mol_type = other DNA
gatttttaaaaaaacaggtacaattctacgtttttaaagtattattgtcacatgcttcaatgcaggatacaaaaacttttttaaaaaatcatttgacttgcatgcacaagttatgacacattttggcccagctccgtggctgtcacggtcacaagagccactggccctgcacacacgaggacgcatgtggaaagggtctgtaaatcgacacccgttctgctaaccgaaggtgattaccgctgcacggggatcgccgccagggctgggctgctggatccccgccacacgggggaagcactggcggcacgatcccggatcgacctcgcgaggcgcccgcactggccgcggggctgcgggactggcggcggcggcggcggctgcgcggggctgggcggggcttggctgcggggaaatgacgtcgccgtccccgcgcgcgccctggtaacggcggctcccgcgtcc

SEQ ID NO: 10259 - DNA, 382 bp, Homo sapiens
  source 1..382: mol_type = other DNA
ataaagatgatatgctcagctttaatagtttgggaacctacttaatgcaaccatagtctgtatttttaaaatcctcacatttcaaatagggccttaatataaattcttagttttcgtcagatatcaagatttcataggcaaacaaaacatgctatatatgtaaaaaatgtatatacacacacagcctttttaattgtccttgcttacatttaaaggaagggaattaacaccttggtcaatgtgaaacaagcttgaactggttccatttttatttattgtaagctactttaaaaattttagacaatgttgtaataaaaatatacacctttttccccttcctcatcagcaaatttaaactacagtggcttgaaacttttaaaag

SEQ ID NO: 10260 - DNA, 428 bp, Homo sapiens
  source 1..428: mol_type = other DNA
atagtttgggaacctacttaatgcaaccatagtctgtatttttaaaatcctcacatttcaaatagggccttaatataaattcttagttttcgtcagatatcaagatttcataggcaaacaaaacatgctatatatgtaaaaaatgtatatacacacacagcctttttaattgtccttgcttacatttaaaggaagggaattaacaccttggtcaatgtgaaacaagcttgaactggttccatttttatttattgtaagctactttaaaaattttagacaatgttgtaataaaaatatacacctttttccccttcctcatcagcaaatttaaactacagtggcttgaaacttttaaaagctctgtgctccaagttacaaaaaagcttttacgaggtatcagcactttgagttttaaactttaaatagac

SEQ ID NO: 10261 - DNA, 599 bp, Homo sapiens
  source 1..599: mol_type = other DNA
cagattcattcagactggtgaagaccaggaatgtatgtttttaacaaactgtgatgcagttcaggaaaggggccagaggagcctcaggctggtcacacttagtgcctgtagctttgggcatctaacaagaagctcttagacagaccttggtctacatataaagtatatgtgatatgtccagctgcgttggtcttctcatgtatcaaataagaaatatactgaataaaagtgcagtttatagtctgtagatcaatgccagggattctgtaaacatataattatgcccttttattataagagggtattaacttaccatacattgccaaaatttgatactaccaaaaaaaaagggaacaatttttgttacctgtttttgggcagctgtcacattaaacattatttgatggtatctatgatagtggagatcgacaggtagctacatgttacaggatactcggtgtccaattcgataattcgtatcttattaagatgaaagagtataactcattaatgcaaatactttgcaattaagttactagagtattaaaaaagaactatgtagaatctcaaaattatatgaaagtcatgtatcatgaatt

SEQ ID NO: 10262 - DNA, 579 bp, Homo sapiens
  source 1..579: mol_type = other DNA
ttatagtattaaagacactcttagtgggtaaaaagatagatcttattcccagtcaagttctaaatgacagaaccagtgtattttaatatacagaaaaatgttatcttttccactataccaatctcttaggcaaaaaagactataaaagggaaaaactattttaattaactaaaatagtacaaatgagtctatttctttttattctggctggattaaaaacagcacatgatatatcaattgcagttcttaagtaatcgagagtgagttatttaaactgctctttttgataaacatattttaaagagggctttttctcccaatgaaaatgtaagaacaagtttcattatttttaagacaatttcaaactttgcctgccaaacttatgactcaaaggccctgaagggtttaaggcaaatgaggaggcagcgcccccttctgctccccagcccggctcctgggattggccagggacgggacaggcgcggaaccactgcgcgcacaggcggagcgcggagacttgtccgtcacgtgcggccgcccggcctctcggccttgccgcgcgcctggcggggttggggg

SEQ ID NO: 10263 - DNA, 350 bp, Homo sapiens
  source 1..350: mol_type = other DNA
ttagtggttacaataactaggagtagggattctcacactttcttattattagttattgtttcccagaatattttcaagaacaaataactctaaaaaaataactggaacttttataggaatgcattccctgcagatgtgcatcatcacctaatctcatgacattcgaaatcaatgtttgagtttgataatgtcttatctaactaattaaaaataattttaacgtgcaaatttcttgtaacatcttaatagcataagaaattaaaatataagtttttcttaatttggcaaactacggtgaaattctccaggaaagaagacagccgtgtcgtctagtgacgcgcagcgctgcg

SEQ ID NO: 10264 - DNA, 347 bp, Homo sapiens
  source 1..347: mol_type = other DNA
ctatactgaaaatagttttactctaacaactctttaatgaaaatgcaatgtacagctaattaagcatgaaatttcagatgacacacgcatgttttgtgcctaaagacaaaattgtcattaggcacaaggcatgcgtgtgtcatctgaaatttcaattttaagttgaaatctgaaattgacacttcaaacagtgctatgactatttgtttcaaaaacaatattactgggcactccctgttgggtggggcaccacattcccgccgggctcacccagccccggcccatggagcacacagacaagatggagacagcttctttctcgcctttccgagatactatctgcgaga

SEQ ID NO: 10265 - DNA, 478 bp, Homo sapiens
  source 1..478: mol_type = other DNA
agcacacactgaataaaatattagtctgattatattttcgtatttccatatttaggcttttgcctaaaaagggaaaccactttctcaggaagcagataaattaattttatcagcagtatcgtcgtccatgtaatatggcttttaaaaagcacagtgagaccttagtagtaacgactttatttttcttagtgagaacctgaaagtgaaacttgatatacattattttctgcttttattgcacaaaaagttgtttccattgcttcctaatctgttaaaataatctgttaacaaactcggggcgtagataagcgaattgaaattcatcaccgataattagttggtggttaacgccgtggcacgtgccccggggagtgatgcgacggagagcgggacaccgcctggggagccgcgctcgtagcctgggggcgggacgcggcggccgctccctccgcccccgagtagctgccaccgcctggct

SEQ ID NO: 10266 - DNA, 273 bp, Homo sapiens
  source 1..273: mol_type = other DNA
gaatttcagagacttcctttaaatactctaaggggccaacaaatgtacacagattgtatttgtgtagatgttgcaggtaatttaaagtcttactactcacatttttagaaaggacaacgggaggacccaaattagtgtgcttcctcattgacaaactatgagagaaaataacacacatcatttgtgaccagcttacggaaatcaatctgaatgccccagaggaactcgacctactccgctaacccagtaaagaggattggagcctcactcgag

SEQ ID NO: 10267 - DNA, 462 bp, Homo sapiens
  source 1..462: mol_type = other DNA
accaaaaatattgtttctaatgtcaaatgcaccatgttttgtgtgttctatctctgcaggcatatattttctctcccttttgagagtgcaagttccctaaagatggaaagtataccatacgtctgtactctctgagaggctagcattacatagcttttcaatacaatgcattcagagttgacttctcaggagagattcattcataaaaaggtcagttttagagtaagcaataactgttaccttcctcccttagtgaatgatctcttgagaattctttcttagagagagacgtgcttaggaaagaactagtaattaccatgtagaacagatcaaaatatttagtgctctctagggaaaaagcttttgagataaagtggaatttcttatttctaagaagtaggaaaagagtgttttgtttggtctctacaaattatagttatttggtttcagcctgaactggct

SEQ ID NO: 10268 - DNA, 305 bp, Homo sapiens
  source 1..305: mol_type = other DNA
ccaacaaatgtacacagattgtatttgtgtagatgttgcaggtaatttaaagtcttactactcacatttttagaaaggacaacgggaggacccaaattagtgtgcttcctcattgacaaactatgagagaaaataacacacatcatttgtgaccagcttacggaaatcaatctgaatgccccagaggaactcgacctactccgctaacccagtaaagaggattggagcctcactcgagcgctccttcccttctcctctctctgtgacagcctcttggaaagagggactctttccaaataagaagg

SEQ ID NO: 10269 - DNA, 225 bp, Homo sapiens
  source 1..225: mol_type = other DNA
acaaaacgtcgtatctttgagcattggttttcaaacatcatgacctgaaatgcttgtgaaaacacaaactgctgggctccagcaggtttgctgatttccaatccctacccattaattttttagtgactgaaataatgaaaattctgatctacctccaagggctttgcaaccagctgcagatgaagaaacagactttagcagaataaaagtgtttgacgatcagtc

SEQ ID NO: 10270 - DNA, 458 bp, Homo sapiens
  source 1..458: mol_type = other DNA
aagaaaatgacaaaatttgcttatcttcaactcagtaaatattagttgcattgaattaacttcaattcaagaccccattctacagtttataaagtcaaaagttgctcttagtaacacgctcagtaatatgtgctgtgttttgaaaatagaaaatatcccttttcctcaaatccatagattcatattaagcgcaaggacttctgtttatttataatgattctcatatacagatgcatacaacaatgcagggagactggttgaaaaactattcatataagttcctccggaggcttaatcatcagtacatcactctggtgttttctaaattaaatacagaatgtttccgtactccggggaggctggaaagcatggttgccccgcctggcccggcgacgcccgctcagcagcctgctgaggagtgccaaattgccgtcctagcggagcgcgcgcgcgagctg

SEQ ID NO: 10271 - DNA, 453 bp, Homo sapiens
  source 1..453: mol_type = other DNA
ttattgaggtttatgattatctgctcattaacactcagccaatttggttaatttttaagttgagataaggaaatactttacttaaatattggttttactgcatggataaatgcaggtatttagttcttagtaaagagaattaaaaagatagtaattcatcaatccaatgtttttcaagtatcacactataaattcacattacataattcttattggccagtgttcagaaaatattaatcttctacaatatgactactttaaaagaaagcttcaagatttaatagttgcaattttaagtgtagccctatataaataactgcacttgctaagatgttctgagcattaagagcactaagaataaatctgagctctcacggataagattatagaccccaggatctgtaattatcttagagatgtgtgttcctctagagtgccaaaaaagaaaaaaaa

SEQ ID NO: 10272 - DNA, 731 bp, Homo sapiens
  source 1..731: mol_type = other DNA
cgtagctctccgcgctccgacccttcagatcctcgggagcccaggggagccaggtgctgggcggtgcgtccggtgccgccgcgccccttctcgccaccccgagcgcgcgcgcacacacacactcggttcgctcccgcggagtggctctgggagcacgaccgacttcagctcacgcggtcagccgcccagactcctcgccccgaggccccggtccccgccgccgccgctttgcctagacaccgccgcctgcggccgcctgggcggcagcccctgcggtcctcaaagttggccccctgggagggggcggaggggcagcgccgctgctgggacgcggcgcggacccgcatcattgcgcgcagcagccgctgcagcagccgccggggaccgcggagccgggacgcccccgctcggcccgcgccccgctccccgccccacccccgcccgccgggcccagcaacgcagggtgcctaggagccgcgggctgcgcagggaggcgggcagcggccctcgcgcgcttctgccgcccccggagccggcgcgcggcgagcgcagggcgagcgcgcgtcgggcggcggccgcgctggggggcgtgaggcgagcggcgcggagagcggctcgcgggccagatgcccgagggcgcggcggcgctgccaggctgccgctgctgcccctgcgggccccgagcgcgcctccgcaggcggcactgcccgcggcgcggcgtgtgcaccgag

SEQ ID NO: 10273 - DNA, 781 bp, Homo sapiens
  source 1..781: mol_type = other DNA
cccgagcgcgcgcgcacacacacactcggttcgctcccgcggagtggctctgggagcacgaccgacttcagctcacgcggtcagccgcccagactcctcgccccgaggccccggtccccgccgccgccgctttgcctagacaccgccgcctgcggccgcctgggcggcagcccctgcggtcctcaaagttggccccctgggagggggcggaggggcagcgccgctgctgggacgcggcgcggacccgcatcattgcgcgcagcagccgctgcagcagccgccggggaccgcggagccgggacgcccccgctcggcccgcgccccgctccccgccccacccccgcccgccgggcccagcaacgcagggtgcctaggagccgcgggctgcgcagggaggcgggcagcggccctcgcgcgcttctgccgcccccggagccggcgcgcggcgagcgcagggcgagcgcgcgtcgggcggcggccgcgctggggggcgtgaggcgagcggcgcggagagcggctcgcgggccagatgcccgagggcgcggcggcgctgccaggctgccgctgctgcccctgcgggccccgagcgcgcctccgcaggcggcactgcccgcggcgcggcgtgtgcaccgagtgtgtggcgggcgcggctggagctgccgccgccgccgccgccgcgccagcaggtcctaatgcctttcccaggacgctggcagcagcagcagcccggagcccccgagccctcggcaggtgctcgacggtggccgacgtgggacagtct

SEQ ID NO: 10274 - DNA, 618 bp, Homo sapiens
  source 1..618: mol_type = other DNA
caacacataattaagtcctggctcacatataattgttgttttggaaacagttttgaggataaatatggttatgctaatgaactaatgatccagtttattaattaggtacatttttccaccttgtgctatccattttggaatgctgaaaagggttaaaaaaagagagaaattttaaattagttatcaactcttctaagcgaagattcttcctactccactaggcagaaattgtaatatacagcatttagaattcataatccttagcattatttctctgaactcgttagatcacacccactcagggtgtgcgtgtgtgtgtgcgcgggtgcctgcgcgcgtggcgcggggagagggaggtcgcccgctccggcctctcccccaggggccctgcggctggccagcgctccggctgcacctcctggtgcgcgccgcggcggcgccacaggcccctcgaccctttgaccaccgccctcgggccgcgcgtccggcagccgggaccggtgatggcgcgggactgacggccgtctcctcccagacccctctgtcccgcctggggctcgctggggctgcggcgccgccccgagctgcatgtggggcgggcgcgcccgagcccagagc

SEQ ID NO: 10275 - DNA, 752 bp, Homo sapiens
  source 1..752: mol_type = other DNA
aaaatagaagatatttcatagggtaatacaagatactttttcaatatttatctcactttccagatacttggatattttctatagcaaaaatgtggaaaaaaaaggattcctgcattgaattttgtttcagtaacacattttacataataacttataatcattgccgttttatagatcatttattaataatatatttacatatgagtctatgctagatcttgcctgaaaacaaagtattaataaacaattgctttatgtgcctaccctctaaaggcatttggtttctagatgatatgcaaacactggtttctcaagtcatctttggtatataattgatacatttataaagtaaaatatgtcaaaagttgatgactttatggtatgtgaaagtaatttactcacttcctggtgtcacgatgagtacattgaagagctgtgaagggaattcattcatctttcttgctgctggttcataaggatcacttcatagagtaatttgttttaaggaaaagctttctatatatttcttcttcaccacaaatagaggttcttaacttgagagtctatttatttatttattgtcttcagaagggtcataaatgctcagaaattttatgtaaaatcaatttttatcttatgagtgggcccataacatttattaagtctttggaccattacccaaaaaggtttagagccactggttttaaaaggcttttgtgacaatcagattctggtaattatttggttttcat

SEQ ID NO: 10276 - DNA, 550 bp, Homo sapiens
  source 1..550: mol_type = other DNA
gagtttggaaaaagttgattccaaccctcctgaatgactttgggagttcaggacttcaaaagttatgtgagtaaattgctcaatctcataagacttgaatggttgaggagttgctctactcctggtgaagttgaaatgacagcaaaagatttataattatataaacttagttgataaaattgactccaattttgaaaaaagttataatgtagataaaatgctatcaaccagcattgcatgctacagaaaaatctttcataaaaggaagagtcaattgatgcaccattcaaaagattcccattaggtgaagatgatctttagcattttttagaaataaaatatctttttaagttaaggtaggtacatgcaaacgtaacttttatatgcattaggaaactgaaaaattcgtgtgactcgttttgttgcagcaatatctctgcgttatgcccttatagcgccgggagtgggtgccttccgccggctgtacagagcgccggcaggtggcgcccagcggcgagcttgttcgaggtaaccagaagcggctagtggc

SEQ ID NO: 10277 - DNA, 233 bp, Homo sapiens
  source 1..233: mol_type = other DNA
ttttgtcagggtaaccaataatattgaatttactaagtctggaagtcaaaccttggtcctctgaaatatttttgtacatggtttcatggttttacactgtcaactgaagaataacgaggttcataaatttagaaaggagagctttatttttcataaagagtactgagtgtcaagtatgtgccagcaaggtgtctgccactgacggagcaatggaggaggacggggaggagctt

SEQ ID NO: 10278 - DNA, 251 bp, Homo sapiens
  source 1..251: mol_type = other DNA
atcttgtacaccagatgggaatatttttccttactcaagttttgtcagggtaaccaataatattgaatttactaagtctggaagtcaaaccttggtcctctgaaatatttttgtacatggtttcatggttttacactgtcaactgaagaataacgaggttcataaatttagaaaggagagctttatttttcataaagagtactgagtgtcaagtatgtgccagcaaggtgtctgccactgacggagcaatg

SEQ ID NO: 10279 - DNA, 182 bp, Homo sapiens
  source 1..182: mol_type = other DNA
tttaataaaggctttaatgagtcagttcatcttagactgtgctgcctgttggtaactaagagcagcagtgatgaagcatccatgctgcggtgcttgattggtaaaaagcaaattaacatttttgtctagagaacaggcagctcttttctctctgctagaaaagaggaggcggctcctgcact

SEQ ID NO: 10280 - DNA, 576 bp, Homo sapiens
  source 1..576: mol_type = other DNA
aatccaaaactcgaacttgaaaatatacgattatgtgcggggtctaggatccacagtccctgggggctgaagaccctcagattcaaaagcaattttgatttaaggttttcaaaagccccagagggcaaatgtgaccactcgggccagtcagcagtttggatccagacagaccaccgagtggggcggccgaggagccgcggcgcctcccgacgtcacacgcgcctgttcgcccgcgagaccgcggggcgcggaggagggccgaaacccaaggtccaggtccagggcccgcccccgcgcgcccgcgttggcgcccgcgcgctccctccgcaggggttagcaagattgcgctcagctgctctggggtaccaggtccgcggccgcgttcccacgcctcggctggagccttgcggcgggcattggcgagcgcggccccgccccctggcccagccaatcgcgagccacgccgaccagcgagggggaggtgccgggcggaaggcctgggccggtgcgcgggggcgggtgaggtggccccacccgctcgaggggggggcgtggccggcgccggctcttgcggcc

SEQ ID NO: 10281 - DNA, 257 bp, Homo sapiens
  source 1..257: mol_type = other DNA
ctcttgacttctattccctgaccgggaatcgaacccgggccgcggcggtgagatatttgtttccctgaatctatttcctgaaattgaagcaaattctcggaaaatatatcctggaaattctcttacgtaacacaagtgttgtctggacgaacattttactgcgtttctcggcgaagagccggagcgacgcgctgtcctgggtgcagagcgcgtgctcaacagttctccgcgttatatactagacacggccaggaaat

SEQ ID NO: 10282 - DNA, 518 bp, Homo sapiens
  source 1..518: mol_type = other DNA
tacagcttaagctgcgtcaacaacccagaggaggctttatctgtgtggaaggcctgtaacacactgttaacagagtagcggtttgctgtaatgactgcaatttgcaaagggctttaaagctggggaaaagctctaactcctgctctgctgtcaaagccttacttcccacaagagtaagaggaccctcctaggtgccgctgccaggcggcggttcgctggggcagcaaggcgcccgcactcgggaggcgccacaaagggccgaggcctgcggaggccgcacgcgcagctctccggggcggagccgccgggatcgcggcagcggaggctgcagcagccgcgggtagccggggtgcccagcctcccagctcggaggtcgcggggggcggggaggatgccgcaactgcagtccgagcggcagagcccggcgcgagctcccaggcccccgcaaccgctgtgaggcgcagcgcgcgccactggccgggaggagctagaggcgggcgtctgcacagcgtcgcgcc

SEQ ID NO: 10283 - DNA, 641 bp, Homo sapiens
  source 1..641: mol_type = other DNA
ttgctgtaatgactgcaatttgcaaagggctttaaagctggggaaaagctctaactcctgctctgctgtcaaagccttacttcccacaagagtaagaggaccctcctaggtgccgctgccaggcggcggttcgctggggcagcaaggcgcccgcactcgggaggcgccacaaagggccgaggcctgcggaggccgcacgcgcagctctccggggcggagccgccgggatcgcggcagcggaggctgcagcagccgcgggtagccggggtgcccagcctcccagctcggaggtcgcggggggcggggaggatgccgcaactgcagtccgagcggcagagcccggcgcgagctcccaggcccccgcaaccgctgtgaggcgcagcgcgcgccactggccgggaggagctagaggcgggcgtctgcacagcgtcgcgccacccgtgactgcccgccttcagccgggcccgggaccccgtagcggcccatgccctgacggggggcgcagctgcggggctggcgaggcgtcgcgcgtgggaagaggcctaagacaccccgactgcggcggctgcgcacacccgatccggacgcggggccccgcgggcgcgcgcctcggagctcccgccttccacccgccgagagga

SEQ ID NO: 10284 - DNA, 406 bp, Homo sapiens
  source 1..406: mol_type = other DNA
tccgctgtcctggagtcccaggggcccagagggtcttctttataacccccagtgtgagcaatacaaatatcactgaaaattgatccagtgctgtctaacctcctgacatgtgatctgaagtgtagaggaggactcatcctgcttattagtcattaaaactaattccaaaatgtaaaaagataagtattactctgccaactgttttataaaactacatgtaagatgacatctttcacaaccaaatgccgtttgagattcaagcttataccagggatcacacgtaccattttaaatgcaatggggttttatcatagtgttgggaaaccaccgtttcaaaggtgaaagtgtccttttacagtctcacagcgatgcctggcagagaaatgttgaaacttctcctgaggga

SEQ ID NO: 10285 - DNA, 221 bp, Homo sapiens
  source 1..221: mol_type = other DNA
ttttcagattaagaaagtcggaattgtgttgaataagttgagtatgaggatttcaatatatgtaatacatattactatataatactaaatatttaaatgtgtagaagttttctagcagcgccagtgctcagttgtcctttctttttagaccatttactaaaaagggctcacaattgtgaagtgtctttttcaaggactcgaaagccatttctttgcaatgt

SEQ ID NO: 10286 - DNA, 422 bp, Homo sapiens
  source 1..422: mol_type = other DNA
ggatatgccagatacatactcttttgcaccttgtacaatatgcaaaataaataatttttaatagggcctaccaggagttcaaggttacagtgagctatgtcacatatatacatagaatatgcaattaaaatatatttcataaactatctgctatgaatggctgtggatttagtcctgagtctaacaaataacacaacctaataattattgcctactttgaggaagatattcttttggtttttgttaagaatagagtgaaccataaaagattatatcagacctcaagagtttattataattgggttataggtgaaatttccaaggaaatggtgaaatttcagtccaattttgagcgctgggagaccccacaggtgaggaagcccctcccacagcggccggagtttcggactcggagcgcgaga

SEQ ID NO: 10287 - DNA, 580 bp, Homo sapiens
  source 1..580: mol_type = other DNA
taaatccaacaaattttttggtgttaaaaaaagggagttagacaaaccttgatcttaaactctgtcactattaattagctctagagcggtggttataaaaccaaccttgcgttttttgacaattagagaaatatatggcatgttttagatgctaggaactggtactttttctttgagcacatagttacagaaggttttgtcaaaatctgaatttctgggatatttcagagtattagtttgatctaactgtgctgttaacaacaataaaaagtcaacagagatgtaaaggtcagttttggacattttgagtttaaactcctacaattatcgtggctgaaaaagcagcaaacatgatgtctgttgagctttaggaattttgctcattctttaaaaacctacgaattttaaaaatcaaactttaaaaaactttttgtttttttttttaaaaaaacggcagcgtaatacacgctatactatggcgcgcctctgtgatgtcaccacgacgcgctgggcgctctgcgacttggcagacgtcgtgcgtcattaccaacgaggcgcaggggtcaggacgactctcggc

SEQ ID NO: 10288 - DNA, 403 bp, Homo sapiens
  source 1..403: mol_type = other DNA
atgcaaaataaataatttttaatagggcctaccaggagttcaaggttacagtgagctatgtcacatatatacatagaatatgcaattaaaatatatttcataaactatctgctatgaatggctgtggatttagtcctgagtctaacaaataacacaacctaataattattgcctactttgaggaagatattcttttggtttttgttaagaatagagtgaaccataaaagattatatcagacctcaagagtttattataattgggttataggtgaaatttccaaggaaatggtgaaatttcagtccaattttgagcgctgggagaccccacaggtgaggaagcccctcccacagcggccggagtttcggactcggagcgcgagagctctgtctctgcctagcgc

SEQ ID NO: 10289 - DNA, 393 bp, Homo sapiens
  source 1..393: mol_type = other DNA
gcgtgagatcacaataacataatattgaaatctcaatagagatagtattagagataattataattaaaatcacagcggatcactagcaattagaattgcaaattttgagtatctcctagatctagtgaatgagttgatgcacattaaggtttgataactattaatacttctataatagcacagataatagagaaatagcatgaaactatacctgaaagttattgcaaggttaagtgagaggaaccttaaaattaaaattacgtagaagtgtaaaattcttaactgttagtatctgaaaatcatgcattccttgctaggaaggcatggcattagtcccgggacccgcccaccgtgggcgttttccacctacaggcaggcgtctccgggggcggg

SEQ ID NO: 10290 - DNA, 247 bp, Homo sapiens
  source 1..247: mol_type = other DNA
gcacacacttctgggtcctccccgctcggagcaggtaaacctcagagtagctgaccggcagtgggggcgctggggcacaagggcgcaggggcgcacggccaccgacagccgggtgcgcctagcttgagggcctcaacactgcctgccagccaagtctccccgccagagctgcccttctggaggggctcttcgggccgtcactgcagtgtccagagatgctgcgctgtagacccggattgaaaggtgc

SEQ ID NO: 10291 - DNA, 272 bp, Homo sapiens
  source 1..272: mol_type = other DNA
ggagctccttttaaaacgtccctttaaaaatgcccagatgatctctgcacgaatcgaaatagagctcagctctttcctgtcagtagttaactgaatgaggtctacctttagtccaaaatgactcaatgtattggcacggaattttaagcttactgagctttataaaacctaaaaaaggtcgaccttcggttctcacgtttatctgagcgaaaacaagcctttgtgctggctccctcgtgacacgagggagcgcgaagcggagggcgcctcgc

SEQ ID NO: 10292 - DNA, 451 bp, Homo sapiens
  source 1..451: mol_type = other DNA
tccaagagaatgctagctcttctaaagaaggagccccctctagcacctagagcaacaactgctatacaggattaatgttgcctgaagtccttaacagcaccttcaacctaaacttgtgtaatatagcgttaaaaggattattgtagctcaaaaattctccaatgaaagaacctctaccagaaaggagttgctcatctttcgttcttgaaaagttggctgcacgatacaagtaagaaaagttttagttaggcaagacaacttatacataatatacattaccgcaagcctcctcatgctttttcgcgacctcgcggcgcgctctgggaagattccccggccggcgcacagccggcccgtggcgctcggcaccgcgtctccacgtccagcgcggggcaggcctgcgcggcgcttgcaagggacaagccgcggagccggggaggctcgccgtctg

SEQ ID NO: 10293 - DNA, 416 bp, Homo sapiens
  source 1..416: mol_type = other DNA
tctctgacatccctttcttagaacgtttactaaagggcttgcaattgtaaagacttatttcttgccactcagaagttctctctcaaggaccagagagtcattcctttgaaaaaggataaaatcctccgtaggaggatagaatcctgcgctccttttaaaacgtccctttaaaaatgcccagatgatctctgcacgaatcgaaatagagctcagctctttcctgtcagtagttaactgaatgaggtctacctttagtccaaaatgactcaatgtattggcacggaattttaagcttactgagctttataaaacctaaaaaaggtcgaccttcggttctcacgtttatctgagcgaaaacaagcctttgtgctggctccctcgtgacacgagggagcgcgaagcggagggcgcctcgc

SEQ ID NO: 10294 - DNA, 411 bp, Homo sapiens
  source 1..411: mol_type = other DNA
gcagcataaggccctgtgcccagggcgactgcctcgataggtctctgacatccctttcttagaacgtttactaaagggcttgcaattgtaaagacttatttcttgccactcagaagttctctctcaaggaccagagagtcattcctttgaaaaaggataaaatcctccgtaggaggatagaatcctgcgctccttttaaaacgtccctttaaaaatgcccagatgatctctgcacgaatcgaaatagagctcagctctttcctgtcagtagttaactgaatgaggtctacctttagtccaaaatgactcaatgtattggcacggaattttaagcttactgagctttataaaacctaaaaaaggtcgaccttcggttctcacgtttatctgagcgaaaacaagcctttgtgc

SEQ ID NO: 10295 - DNA, 669 bp, Homo sapiens
  source 1..669: mol_type = other DNA
gctttgtacttttgttttaattttaaggaccaaggaatgctttttttccattaaaataaaaggaaagaagggttttctctcatcagaaagatagcaattttgtattagtaattagaatgaagatgtatttaaaagtattttaatgataattttaaggttttgatagatgaaaaaaaaaagcatcagattaatcatttggtttgtgtgccttaaaagtgtcaatgaatttgacataaatgaacagtttcttctataaattatctttttatttttaaataacactgtaacatactaacagcgcactaagaaacatctgtatttccatgatattcaagttatttaacttgaaattttaaatcctgagctcatcattagttctacagagagattaactgtattaaaatttgtcagtgtaaggaaaggtacaaaattatcaaatatcatattccatattaaaattgaattgctttaaaacattcaaaaccacaaatattagacaactaccttctttagttttaaatttactaacggactaatcttatagttgagacccatcatatattaagtccatgtcagtggaaaaggattttcccgacctgctagaccagcaactccagatgggcatccagatctccatctgcatgccagaacccacttgtcaaacagagc

SEQ ID NO: 10296 - DNA, 254 bp, Homo sapiens
  source 1..254: mol_type = other DNA
aaccctcacttccctttgagacaacaagagatgtctatgttgtataaaagggaaaacttcgaaagatggtatcatcttttcctctttggtaccagaagtcaaaatccagatcaccctgctaaatctcatcctgatcttcatgtaagtaatgatagaaatttctcggaggatctcaagccctgtgatacctcatctactcacacagggtttggaaaaccaatgcccacatgcctgtgcctggaccaataatgctc

SEQ ID NO: 10297 - DNA, 459 bp, Homo sapiens
  source 1..459: mol_type = other DNA
ctcttcagacttgaagataagaccttattgtttaaacttgtgtatttgctaagttaggcaaaaaattgctctagagacttttttgactaaattaaaccaaatatcatcagatgcagaacaggctgatttgatcatgataagaaatctcatattttctctaactttatgttccatttctattttatttgaagatagaagtttgataactttcacagatcttttgagagtgcataatatatataattatgctacacatattgttctgccacatccagatgcaaacttctaaaggtgcagcagataattcttgcctataaaaaaatgagtttactttcctaataaaataaatctaaaattggccattgtcattgtatgatgttaacaaaaaatagttggcttgaaggccgcctccaagtaactgacgtcacagtagtctcagctgctgctgtgacactaagc

SEQ ID NO: 10298 - DNA, 422 bp, Homo sapiens
  source 1..422: mol_type = other DNA
aaaattatttctgtctaaagcactgaaaggggcatgactaggcataaatttctcctttaaaaatatttgttctatacagagagcagattactttactgccagttattttacttgcattattcttgttaacatctattgttagcatcacaacttagcatgcagtaattcctcattttataaagaaatattttccaactcactttgaaatataaaggtgaacaaagaagacatcgggggaaaattgcccaccaacttgttctctagtgggctatctaactaacttatattgccaatgcaaacttatttttgtttttaatcaggcagaataattccaaactcagcccgaacgaaagcttgtgttccagtaactaacttgctcacttctcagcagaggcgaggttgatagccgaggaaagttcaac

SEQ ID NO: 10299 - DNA, 666 bp, Homo sapiens
  source 1..666: mol_type = other DNA
actatgtgtgaataaaacttcaataacagtggttgaaacaggtgtttcttgctcaggtaaaactcagatatgaattgaataagaggaattgacatgtgcccttcattttaggacatgttccagaaattgtggatactatttctgtggtccacacttagtcacatggcttgtgtaaagcaaattggaaatttagccttaattctgggagaccatattcccagctaaaattctacgattcttttactaataaagaatgaaaaatagatattaagaattaactagcaggttttattattgaattgagctaattagatattctttaagcttctttcttgaagcagaacattgtattacaactggatcacacatatttttagtacacatttgaagattattataaatcctagtatttccatctccagctatttaatattttccatgaaatatgttaaagtatttttattagagggttttgtaatcacaaaggtttttgttgataaatagttttatctaatacattataaacaagcctaaccttgtcacagtattctgacgctgaagagtctgggaaatttaattgtcctaaatgttagctaatacaaatttcttccaggaaaacaaaaaagcaaagtgttgatatgctgtgaggttagcaaatatcatgac

SEQ ID NO: 10300 - DNA, 520 bp, Homo sapiens
  source 1..520: mol_type = other DNA
cacctttaattgtatatattttaaatattgtttcagttacatgcaaaaaatacctaaatttcaacaataagatcagaattgtggaattgtgaacttggaagaaattataaaatttattggactcttctacttcatctccatttagtaaataaaacaaatgaaaattttgacaagtaattttaatactttctactatagtgtagagattagaaaactcattttaatgtactttgttaatttactgtactttaagattcagcaaaatttttaatgtggaagaataaaaagtggtttcaatactctctccagagtatagtatcagaattctaaaaagagctgacgcaaagcacttttattaccaattttaatgtaaaggatttttaagattagactttagtcgtgggcaagccacaagcaactctgacctcagttttgctaccatagtagatgcacacctggattaacaaaggacagaatgcgctactgtgaacaaaaagagctataacattttttgtctcct

SEQ ID NO: 10301 - DNA, 396 bp, Homo sapiens
  source 1..396: mol_type = other DNA
cctttgcaaacggccaccacttcatttacatgaggtgaacaccaagtgagaagattccgtaaattctttgttcaagacgccaagaacctggacaacttgtatatttcaagaaagcctgacttatgcatgtatctattatttttaataattcaaaatctgtgtgggtctcaaatgggcttctttttcaaacagaaagtactgatagacatttatttttctgtgaaaatttaaagagaatagtgataaacaggagtaccatttattattaagattgtgagtaacattatatatatcaatataacatttccttctccagggaaaatctgtttagaatgtaacagtagtcttggtccaggggcctgtgattaccaaagagcctcattgtgagagtcactc

SEQ ID NO: 10302 - DNA, 492 bp, Homo sapiens
  source 1..492: mol_type = other DNA
caccatacagtcttgctgctgaagtagttaactgtgaaatattttactgtcataatatagcattattttctgccagatgaatcattccgaagaaaaagtccttttgttaaatacttatgtcttaactacctactagatattaaaaaatcaagttttatttattctatgaataagggacattattccttattacaagaataagggggggacctccaccttgggacggaaccccaggacgcctctcctcggacggcgggggttttgagttctggaacagggcagcgagctgcgccggctcccctttctcgctcgctccctccgagcagcggctggcggcggggcccaggctgcgaacaaaggcggcgcggggcgcgcggccggggctggcgcgcgtctctccggcaggaggcggtggcggcgccgcgcccgagcccgcattcctcagaagcgcccggagcccgcggggcgacgtcacccccggctccgcccccg

SEQ ID NO: 10303 - DNA, 383 bp, Homo sapiens
  source 1..383: mol_type = other DNA
tgtttcttaatctgcaaaacaaagaagcctagaattctgttatcttagtgaagttacttatccttgtgttatgtataacacagatgatagtgatacctataaacccccgtccatgagagcttggcatatagtaggtgctcaacaatttttggtgctgaaaaatattttgctaaaacaagacgtatatttgagattggctttatgtgaaagacgattaagaaatgcctttactcatgttacattaagtagcagaactcatggtttcccgttctggcagtttaatctgatcagactaacttgggggtgggtgcaacccgtcgcttccacccttgctccctccccgtgtgaatcgccagcctgcggggaggagctgaacttctttc

SEQ ID NO: 10304 - DNA, 468 bp, Homo sapiens
  source 1..468: mol_type = other DNA
gaaattatttttcatgactgttttaaataatgataaggtataagcaataagtttatgtagagagttgaatgaatcataaaaatctaaaaaaaccttcagacagtcatgcctgtaatctcaatactttgggagcttgagccaagaggacagcctgggtgacctgattcaaaaacaaaccaaaaaagtgatttttttttttggagggggaaagaacagagctgtcttttgtgtttatgataattttgatcttgtttcttaatctgcaaaacaaagaagagcagcctagaattctgttatcttagtgaagttacttatccttgtgttatgtataacacagatgatagtgatacctataaacccccgtccatgagagcttggcatatagtaggtgctcaacaatttttggtgctgaaaaatattttgctaaaacaagacgtatatttgagattggctttatgtgaaagacga

SEQ ID NO: 10305 - DNA, 473 bp, Homo sapiens
  source 1..473: mol_type = other DNA
ggaagacttaaattttaagatgtatgttataatataggttaacatttccatttcaaaactagcacaattactttataaaatatttaagaaagttgttgtctataattaatttgtggcacattgcctagatcttctcaagcttgatcccggaggcaacttaaagctgctggtaggtttcaaacatcagagcagtgtatccttactctacagttaactgataacagcagctgaagaagccgagcatgctcagtagctggggccgctttctgagcacatagcaagctttggtttgcaccaacaccggctagcactgccgggccgcacggtcagctgcagcggcgcagcagcgggggtccgaggagcccgtgggctgcagccgctctgccggctcagcgctcgcacgggtgcttcagcccggtccttccggcagctgctggatgaataagcgaaagtgcttagggaagattcttgca

SEQ ID NO: 10306 - DNA, 374 bp, Homo sapiens
  source 1..374: mol_type = other DNA
taaaagccatttgcttactttcctgtaagcgccactaacagatgatctaacccatcgtttatggagtactggccgtccaccaaatgaaggaagacttaaattttaagatgtatgttataatataggttaacatttccatttcaaaactagcacaattactttataaaatatttaagaaagttgttgtctataattaatttgtggcacattgcctagatcttctcaagcttgatcccggaggcaacttaaagctgctggtaggtttcaaacatcagagcagtgtatccttactctacagttaactgataacagcagctgaagaagccgagcatgctcagtagctggggccgctttctgagcacatagcaagcttt

SEQ ID NO: 10307 - DNA, 527 bp, Homo sapiens
  source 1..527: mol_type = other DNA
taagatctagtatttgatagcacaacagagtgactatagtcaataataatttaattgtacatttaaaaataactaaaagggtataattggattgcttgtaacacaaagaataaatgctttaccttgatgtgatcattacatattagatgcctatatcaaaatatatcatgtaccccataaactctatggggtatattactatattactatgtaatcacagcaattaaaaattaaaataaaaataatttctggagcctcaggacgcaagagctccaatactgcctcctggcatgaaaacattctacccacaatattgtggccattattttagagtatgggaacccttttgtttcctaacaaaaagtcataagttttacatttctttgccatgatgtgaaaggaactgatgatttctttctcagaactctgtggcccttgtgagtgaaacagagacttcaacatgaatgcagcagcatcctaaacccatgtttctaatttaagtatgagacagtaattactcatacagc

SEQ ID NO: 10308 - DNA, 459 bp, Homo sapiens
  source 1..459: mol_type = other DNA
gggaacttcctaaaatcacacatgcttttttttttcacacagcaaactctgctattgacatcaaaatgtttatcaaaactttaattactcgaattattttgtaagtactcctattaatcttgactgataagaggtattactcgacagaggcctaacatgttggagacactttctttattatgcaagagagggagattgtactctcccaaagcttacaactttgttactttatacatttcacagcacatggtggattcgctgctctgagaattgcctttaactggaaccttagcagtgtttcctatcggacaggatctgcgggcagctgcatttgccacccggctttattgctgctttccagcggcgaaggcgcagcagcagtaacagggaagccagagcgagcctccccggcagcggcggcggcggcggcggcaccggcaccagcgcagtttcccctct

SEQ ID NO: 10309 - DNA, 589 bp, Homo sapiens
  source 1..589: mol_type = other DNA
tgtgatttttaatttacaccagagtctcgcaaagaaattcagaaagatgttcttctatatttaacccattatggggcttaatactttgaagtctacttgttttctaggaaatgattcttgaagactatctttccaatgatgttggtaattgtaacttctttaaatatacaaaaatgagaaatacaacaatagttccatttaaaacttccatcaataaaatttaaattcacgactgataaccattttaatctttagaatagtcagtatcttaatttgcaagtaaatctatatcatttagattaagatttgaaattgccaagtaaagataaaaggttaaaacgttttaaatttatttcaattccatcagaggtcctttggattgaattacaaaaacaaggaataagcttccttagggaaatagttttaagttttctaaatagttaaagaatatatctcacgataattattaacataaataattactttccaattttgaatctgcccaattaagtaaaaagttttcagtcagtgtggtagtttatcctagttatcttaccaatcataacagtgtccaaaaaagttctagaac

SEQ ID NO: 10310 - DNA, 476 bp, Homo sapiens
  source 1..476: mol_type = other DNA
tgagtgaggatattaatttttcatgagtgatcagcctccatgatcatcttcaacattggtagaaacaggccctttaccattgtctcagtcctggactcaatgtattttttttaacaaaactttttattttgagataactgtgcactcatgtgcaaagttatacaaaactttagtacaatgctaaaaacaagatattgacattaacttaatccactgaaattgttcaatttttttttaaggattcttctctaactatatcatagatacagtcacatactgcataataatgttttgttcaacaatggactacatatagtgagagaatagagacagaccctctcatattgttttatactcagaaaaggacctaccaggcctgggcctgcctgacctaagcctggtggttaaaattcaaccccagacctagcaactgatgttatctatagattccagacattgtatagaaagacattgtg

SEQ ID NO: 10311 - DNA, 422 bp, Homo sapiens
  source 1..422: mol_type = other DNA
ttgagataactgtgcactcatgtgcaaagttatacaaaactttagtacaatgctaaaaacaagatattgacattaacttaatccactgaaattgttcaatttttttttaaggattcttctctaactatatcatagatacagtcacatactgcataataatgttttgttcaacaatggactacatatagtgagagaatagagacagaccctctcatattgttttatactcagaaaaggacctaccaggcctgggcctgcctgacctaagcctggtggttaaaattcaaccccagacctagcaactgatgttatctatagattccagacattgtatagaaagacattgtgtcacggacccccatagagttgtgagcccttaaaagggacactcttgagacaggagtcttccctgaccgggaagc

SEQ ID NO: 10312 - DNA, 731 bp, Homo sapiens
  source 1..731: mol_type = other DNA
gtcgggggcgtcagcgggaatctcggccgccgcgggcagccgcggtctccctccccatcccagggctcgggcggccaccgcgggcggatgagtcaggcgagggcggacggagggtgggggcgcccctatgcccgcgccgggggggcaccggaggcctcggggcaggggatgcgccgctgccggtgctcacagagggccgccgccatccgggcgcagagtccaggcgcgcctgccctcggagggcaccgggcgcagcaagccgggcaggggagagggagtcgccgctcaggcggcgccgccaccgcgtccagaggggaaaagttttctgctcggctccagatgcacgccataaagccccgaagaggcgggttgggggcgggggccggggcggacttccaggggcgtggctgcgcgcctgcgaccccggaccgtgccatcctggaggacgcagacaggatctgctctgcaggagcccaggccggccgatccgcgtcccggccttgcaggcgctcttcccgggctggaaggctggcgtgcgcccacccgtggggcccgcctctagctaccgcgggaccaccggttaccgagccagggacccggctcccccagttctccggagcggctggggagctccagccgactcggcaggcaccgcaggaccctggctccacgcccctcggacgctttctcctcagatgccgcccggcgggccggggtccccctggcgggct

SEQ ID NO: 10313 - DNA, 319 bp, Homo sapiens
  source 1..319: mol_type = other DNA
caaaatagtaggcaagaaggttatacctctgattttaaagacttttttcacacaccttgtgcatgcggctggcctgtaattagttttacatgaaactttacttacggaatatatacagtcgaattagagacgacatattttactctgtcgaacatccgcactgctcatcgaagacaagccgttctccggaaccccttgccgggccggcgggaagcgtggacggagcgggccttggccgcgtcttttccggtagctcgcgcagcgcccgcgcagcccgccagggggaccccggcccgccgggcggcatctgaggagaaag

SEQ ID NO: 10314 - DNA, 475 bp, Homo sapiens
  source 1..475: mol_type = other DNA
tctgattttaaagacttttttcacacaccttgtgcatgcggctggcctgtaattagttttacatgaaactttacttacggaatatatacagtcgaattagagacgacatattttactctgtcgaacatccgcactgctcatcgaagacaagccgttctccggaaccccttgccgggccggcgggaagcgtggacggagcgggccttggccgcgtcttttccggtagctcgcgcagcgcccgcgcagcccgccagggggaccccggcccgccgggcggcatctgaggagaaagcgtccgaggggcgtggagccagggtcctgcggtgcctgccgagtcggctggagctccccagccgctccggagaactgggggagccgggtccctggctcggtaaccggtggtcccgcggtagctagaggcgggccccacgggtgggcgcacgccagccttccagcccgggaagagcgcctgcaa

SEQ ID NO: 10315 - DNA, 610 bp, Homo sapiens
  source 1..610: mol_type = other DNA
acacaccttgtgcatgcggctggcctgtaattagttttacatgaaactttacttacggaatatatacagtcgaattagagacgacatattttactctgtcgaacatccgcactgctcatcgaagacaagccgttctccggaaccccttgccgggccggcgggaagcgtggacggagcgggccttggccgcgtcttttccggtagctcgcgcagcgcccgcgcagcccgccagggggaccccggcccgccgggcggcatctgaggagaaagcgtccgaggggcgtggagccagggtcctgcggtgcctgccgagtcggctggagctccccagccgctccggagaactgggggagccgggtccctggctcggtaaccggtggtcccgcggtagctagaggcgggccccacgggtgggcgcacgccagccttccagcccgggaagagcgcctgcaaggccgggacgcggatcggccggcctgggctcctgcagagcagatcctgtctgcgtcctccaggatggcacggtccggggtcgcaggcgcgcagccacgcccctggaagtccgccccggcccccgcccccaacccgcctcttcggggctttatggcgt

SEQ ID NO: 10316 - DNA, 492 bp, Homo sapiens
  source 1..492: mol_type = other DNA
tgaaaaatagatattacaattattactcctccagaattattgtgagaacaaatgtttttgtactaaagcacttagaacattgacagtatgggctgttattactattattattaaaacttagaagagtatgattcttacatttcccatgcctaaaaaaaaaaaaaaggtagatttaggctgtttttgcatatactgaacactttgtaccaattggcattacagtttgaagatgcagagcctgtagattcactcattctagattttatagtaatgcctcagcctcctgagtaactgaggctaaaaaaatgttttgtagaggtgctggtcttgaactgctggccacaagtgacactaaagccttggcctcccaaagctctggagttacagtacaagttcagattaattttttctaaaataacaacagcagtatttatgttgatgtgtataaattgcaagcatttaggaatagcatttgccaactcccaagacttg

SEQ ID NO: 10317 - DNA, 514 bp, Homo sapiens
  source 1..514: mol_type = other DNA
catttttagaccaatatttttggaaatttttcactaaagcagtcaatgacaactcaacatagtcaacaagtcaatgtcaactttgacattggtccactgtggccttcagaagttgggttctagtagaattaaatgtttgttgaataaatgaataaaccaatgcacttctcagagaagtattctgagtaggatatatgaggaagaatttctactctttccttggtattaattgtatcaactatgtataaaggaacattcacttttttctagacataagtacttaggtacagtggcataactattaagaaatttttaactctaaaatttaggaaatacagggaaaactcttctgtgtctgagaatacatagaaagaatatacataacaacaagttttgcttggttgggtaattttcattccaaataaacttatcacaaaagctgccagatacatacttatctctgaaagagcttggaagataattcctctacaattagtagctgagttacagagta

SEQ ID NO: 10318 - DNA, 341 bp, Homo sapiens
  source 1..341: mol_type = other DNA
agaaacagaactaaaaaaataaattcttttttttctggcagcactgtaccaaaaagtttgttccatgtaatataaagaatctctcaccatggaagtgtcaggacacttgagtgatagcatgtacgcactcatttacgctctcttctcttaaaataaaagagaagtgtctagttgtagtctttgtttattattcattatatttaagtaataatggagctgcactccagatcatttggaattatttttcatctgtttttgtttggctctggaaaaaaagaagtgaaataatttgggaattcatttcatgattggaaaagcaatgctgatccttggattgcacg

SEQ ID NO: 10319 - DNA, 473 bp, Homo sapiens
  source 1..473: mol_type = other DNA
atgataaaatatgtgatattttgcaaaagatgaaatatattgaatctgaaacatattgaccccaggcctctgcccagagaaatcctacttactctggggaggcctttcccaggaagaataaatggttccttttcaatggagacccagtctcagtgaaggtttagtcagcaaatgcactttgaataaataacttttaaaagttgagaggacattcgcagttgagaacgccttgcccaggcgcattagctgtcatccgggctgccctgagggcgaaagacgtcctccacccccgggtctccgcggccgcgcttgccgaatcccgcgggaaaggtcccccgcccgcgcaggggcggggcctgggcgtcgggggcgggaccgcccgcgggggtttccgcgccgggggctcgtccggcggggtcgcgggaggggcttccgccgcgagggggcggggccggccctcagagtcctctgac

SEQ ID NO: 10320 - DNA, 360 bp, Homo sapiens
  source 1..360: mol_type = other DNA
actatgaacaatttttctttcctagagtgtcataaactaaggctattcctataagataacagattttgaacaattacatgaaatctgttatttcatgtaatagagttcaaaatatagcctttcttaaattcagaaagatgcatatttgatggtataatttcaaaattaatattattgattactgctttactaggggaataaggcaatatatcatatgccggttttctattcataaaccacaatctcctaggtaaaagaaggctcttcctctttaagtagcagacagaaaatatggtttttatggccagcagtcccagagcagttgcattaggcagctgcctgtgctgcagtgaaaaaggc

SEQ ID NO: 10321 - DNA, 733 bp, Homo sapiens
  source 1..733: mol_type = other DNA
gatctttaaggtgcctttattttaaattcatacttttatgaggttgacaccttcccagcatttagactataagcactaaatcccgtattcatcagtataatggcaccaatgatgagacttcacataaaattggtataaatataaatatggtattttgaaacatggtaaaaactcaatgttagctatttttatttctatactttgattatgatatgattctacaattattttcctgtacaccatacttcaaaaatggtaacctctctgggttaccaatcaagtaactaattttttaaagtaatcatcaaaaaaggaagttatatactctttattatattataccctaaaagtttatgaaatgtgtctcatggattaaccatttaccctcatgtgtgaaatctcaactcaggattttagggctggaagggatgtgacagacgatcttgccaagcccggcccttcttctacaaggacgtcttcagagatctggaggaggaaagggccttgccctgattcgctgagccagaacaataggacttcttctgtagttgtgactggctttttaaaactcagagttaggttactccatgtatgaagtaaccccatatagttacttcatacatggagtaaccatatagttactccatgtatgaaaaattgcaagactgttgactgtcattctttggttttgtcctcattagataaaggttgtttattcaacccaagtataaat

SEQ ID NO: 10322 - DNA, 714 bp, Homo sapiens
  source 1..714: mol_type = other DNA
caagaaaagaaatttctgttgtttatgttatggcaaccctagcaaacaataccctaagtaacttttcaagtttttctccagcaggaaatctgaattattatattaaagttgttagaaaactaaatttatgccaggtcatcacttagcagctacaaaggagtagttcatgcttagcagtttgtggcatttcacaaccgtcaaagaagtgaaaggcctttggatgtctatgactctcatcaacaattttctttatgaggcaaagaaagctgatcattcaagacataacagatgtcaatataatagcaaatagaatctagcaatatattaaaaaggataatatattatgaccaagtagcatttataccatagaagcaaaattggtttggcattcaaaagtcaatcaattacatttgatagctgagaagacaccgtctctgtggcttcagctcctggctgcaggccgctgatggaggctgctcacagacatcaacttggtgtcggctgcggctccagcattttccgcaggctgcagcttctgggttccaaagcaactccttctccagccgggaggtggcggcctgcggtcgacgatgcctccggggtccttgggctcgcgctctcgtccggcttgcgggccgcccttctccacagacggaaccttctggtggcgccgctggtttctgcggggtttgcaaacggcgcgtaccgggccct

SEQ ID NO: 10323 - DNA, 387 bp, Homo sapiens
  source 1..387: mol_type = other DNA
aaacagctaattagttttgttttctcatcttcaggagtatccataaacatgctaaaaaaataaaaattacattatttgtcattcgttttaaaaaggtaattacacattctataacttccgttttctgtaaaaaaaaaaaaaacaaaatgtaaacaatgttaattttaaaaaggcgcctcccttagccaagtattacaatgatttcaaaggatacgttgcccaggccagtttccttggttccagggtgcccggcaaggcccggatcagctcgagctgcggagacctctggaggaaaccgtagctcctcggcgtcccgacgggaagggcccggtacgcgccgtttgcaaaccccgcagaaaccagcggcgccaccagaaggttccgtct

SEQ ID NO: 10324 - DNA, 465 bp, Homo sapiens
  source 1..465: mol_type = other DNA
ttttctcatcttcaggagtatccataaacatgctaaaaaaataaaaattacattatttgtcattcgttttaaaaaggtaattacacattctataacttccgttttctgtaaaaaaaaaaaaaacaaaatgtaaacaatgttaattttaaaaaggcgcctcccttagccaagtattacaatgatttcaaaggatacgttgcccaggccagtttccttggttccagggtgcccggcaaggcccggatcagctcgagctgcggagacctctggaggaaaccgtagctcctcggcgtcccgacgggaagggcccggtacgcgccgtttgcaaaccccgcagaaaccagcggcgccaccagaaggttccgtctgtggagaagggcggcccgcaagccggacgagagcgcgagcccaaggaccccggaggcatcgtcgaccgcaggccgccacctcccggctggagaagga

SEQ ID NO: 10325 - DNA, 656 bp, Homo sapiens
  source 1..656: mol_type = other DNA
ctgcagtctacaggattttgataatcttttcattagaggagtattcaagctttatttaacatagaactcatgttccatggaaccaaactttgagaatcactgccttagggtcactgaaactagaagagtttagcatccactatttgctaaaattctctttgaccaacactattattaatttcttttcagcatggagtacacatgaaaatagtgaatttaaattgattagtgaagttctagttctggcacctagtaaataattttgagcaataagtcatatataataacttaatttaaataatcagagccttaatttgctcatctaaaaacaagaataaaatgtttataagggatatttttaagtttgacttgagctaatgtgtataaaaacttgtcaaattgtgaacactgtaaaaagcaagatataattatcacagaactaagtactttatattgcagaatttctactgttgtcaaagcacatgttttgctaattttcagctgctatgaagtttatagaaaagcggatcggggttatttttaaagaaaacagaagatcggattgcattaaaatttgatgttcttgttatatatgtcttgactagtatttagtaaaagttataaggaaaaaaactttaatcttttgaagagctgtg

SEQ ID NO: 10326 - DNA, 481 bp, Homo sapiens
  source 1..481: mol_type = other DNA
ccaggcgcaagcgattctcaagcttcggcctcccaagtacctgagattagaggcacctgccaccattgttggccaggctggaccccaggtgatccacctgtctcatagtagacatggagtttcaccatgttgactaggctggtctggaactcctgactcaggtaagccttccaagcctttcaaagtgctgggattacagcggccgggatattttaaaaatactgctgccttagccaaaactacagaagatcataaaaagtggagaataaaaacttaaaaaaaaatacttctctgagtacttctaagtgcccaaattattcaaatttttttttattctggtttttaagcacataatactccatgtgattcctggaaagaaatctgcaagaacctgaatgataccaaagatgtgatcatgtggcaggccaggtccacaaacaggcaggcctctaatgtttcagcactgactgaatggttaggt

SEQ ID NO: 10327 - DNA, 263 bp, Homo sapiens
  source 1..263: mol_type = other DNA
tgattttgctaagtgatgagccagaaaatgttagcgtcctagttgaaaaataaggcttatcaaagtatttcagattgcattaacacttttgatatagctatgttcagtacatgtgaacccacgtatctcagagtagagaagccggaccggcatcggccagcccagcccgcgccgcgaggccacgcagggcgattcctgcgcgaggggcgggcgcggcggggaggggcggggcggggcgggcggcgcggggcctattaaaggcg

SEQ ID NO: 10328 - DNA, 427 bp, Homo sapiens
  source 1..427: mol_type = other DNA
tcagacttcttattttaacaagacaaaccaaatccaatccacatttgaagattataggttttaatataagaaaatgcactcatttctcaaactctgatagaacaatggatccctttttctggaaactaaaactcctacatatattaagagaaacaaatgatcaaatctcaaatatagaattcagggttttacaggtaggcgaggatttcaaatggttaaaagcattttctactctttggagagtttcaagagcctatagcctctaaaacgcaaatcattgctaagggttgggggggagaaaccttttcacctacttcctaaaaaggatgagaaataattgccagtgttttaaaaaaaattctatttggtgctggaaatactgcggctcattggcgagccgcggccgcccggagcgtataaaagcctc

SEQ ID NO: 10329 - DNA, 299 bp, Homo sapiens
  source 1..299: mol_type = other DNA
gggaaaagtcccttcccaggcaagtcgaagaatttgcattgtttgtatttttataaagacaaaatttcgaacttttttggaaacttggcagaataaataagcaaggtaaattttagtggccatatttgtatttagcataacaaacttttgacaaacatggttatggccagaacttggaatagcaagaaaagagaatgttaaattaaaatataactctcaaatgacaattgtagtttggctgcgtcagggctccaactcctgccgtgaggagcaagctctgcggccccgcagggtgggag

SEQ ID NO: 10330 - DNA, 428 bp, Homo sapiens
  source 1..428: mol_type = other DNA
ttttagtggccatatttgtatttagcataacaaacttttgacaaacatggttatggccagaacttggaatagcaagaaaagagaatgttaaattaaaatataactctcaaatgacaattgtagtttggctgcgtcagggctccaactcctgccgtgaggagcaagctctgcggccccgcagggtgggaggcaacggatacggagacgtgaaggttaccctggacgggcctttctcaccgagccccgacctcggggaccaagtcaggggtcgggggctgggacccgacgggacggaacgggacgggaccggacgggacgcggcgcgccctgcaggcggcccggggcggggagagcgggtcctgcccctcccgggcgggcgcgcggccggcccgaggggcggtccctgggctcccgctcgccgccgctgc

SEQ ID NO: 10331 - DNA, 393 bp, Homo sapiens
  source 1..393: mol_type = other DNA
ttatttacttgaactttgtgtaacaggtgacataatcattttagaaaatagtgttgccttaatataggcaaaggctaagccaatctatcttctaattaatttggagagtttctttcatttgtagcaattgatgcttttcatctaacaattacaatatatttgcatatttatcattggtgttttaaaccctgtgaaaactacgccctgcttttcaggaatgcttagaatgacttgtatgtactaggaaaacttgtttacaagtgagcacccagagatgactcttcactggcttcaccagataaagaagacaactgtcctccggaaccggaggggcggtgagggccgctgtcactcagccccgcgggccaatagaaaaggggtgaaccccgcctt

SEQ ID NO: 10332 - DNA, 430 bp, Homo sapiens
  source 1..430: mol_type = other DNA
aaaaatttatatgttgaagtcctaactgtcagtatcttagaatgtaacttttttggaaaaggggtcatttcagatctaattagttatcctatgattgagtctcagtctttcagtgagcctgtattcttctgcccttatttggcataaaaacaaagcaggtggatcgagggagccgagatttcgccactgcactctagcctcttcagagaggcctggaactctttccgcaaagcaataaattttttattttttacaccagtattttgttaggcagccctagcgaactaatgtacatagagttcttgagttaatcttcacaaattactgcaataaggtagggtcttttgttatgtaacaatgctatgaaatcatagcgttttcttaattaacttccgtagtttaaggtactaagttcgatttctataaatac

SEQ ID NO: 10333 - DNA, 529 bp, Homo sapiens
  source 1..529: mol_type = other DNA
aattataatgtgaccctgcccttaagggacttataaggatgatatgtttaaaaaataaaagaattaaaggagaacttaacactttttgaattattgattagtcttcatatggtttaaactgtagaagacaggtaaagtaaattgcatctcaataacaagaatgttcttaaaattggcaatcatctctgtctagatgtttattggacatggatgttctgaaagaaaacagcaagtttctttttaatctctttaagaagacaaaacatacatatataatattaagtattggtataatatttaaattaaaggtcaagacatttcaaatagaaatggccatacaaatatgtaagtagagtgctcaacaaattgttgctatgatgactaccttccaatattggccctattaatagaaatgttggcttaccaggaaaatttttttttattagaaaagacttcaactgactctgaacaatgtcaacaattctttctcaatgctgtgttgtgtaatatatgtgcaagaaaatataaa

SEQ ID NO: 10334 - DNA, 354 bp, Homo sapiens
  source 1..354: mol_type = other DNA
ctggggcccctgagctgagaggtgcctcgtgcttttctggaacatgtttttttatcaatattcttagtagtaagtatttaatattttcccccccgtctaaaaacagaaccaaaaaaattgttgtcaatttttaaatttaataaatgagatatttgtgttatgagtttctattaacaaaagctggaattgttctatatttgaattcgggtgtcttttggaaattcaatattaaatcttagtactaatagtacatgctgttcaaatgcaacttttctttctttaaaagtggtcagatatattgcgttcttaagattataaagtaggccaaggaccagcctgactggaaatactaca

SEQ ID NO: 10335 - DNA, 346 bp, Homo sapiens
  source 1..346: mol_type = other DNA
tgttttttaaaaaatattttatcaaacagaatttaagttcataattttaggttcagatcaggttgacctcacaggtggttatgtcaccaaaccctgggtaaaagctcctgggcatggctcttgtaagcctgtaggaatgaagcaatagtaataatagcaaaaattattctcaatcccaggcattctggctccatgtccatgttaattattattagataccaccatgattaacaatttagttctctctaatttgaagtcttacaggctttgtaggctagagaatctcctgtttctcctggtgtctgactgaagatgcagcatccttgaaccagcagctgctgggact

SEQ ID NO: 10336 - DNA, 291 bp, Homo sapiens
  source 1..291: mol_type = other DNA
agtagctgggattacaggtgccgctggtctagaactcctgacctcaggtgagctgcccacctcgtgaaaataagtgaaacctattttttatgcaagaaaactgtgctgatgtcatccatgccagcaagtgccctggcttgaatccctggcatgcccagtaattactcccactgtgaaaaataattcactctttcaaagttcctgtataacctaattttttctttcgtttcgtaggaataaattgaacttattttacatcttttttcactctctgtcacagaatgaaacccc

SEQ ID NO: 10337 - DNA, 259 bp, Homo sapiens
  source 1..259: mol_type = other DNA
gctttcactcttccaggctggagctcagcctcccgagtagccgggattgcaggcgcctgcctgggattagaggcgtgacccgccgcccccggccgtgcttgtgctcggaatacacagttccgcgcaactcagaattcctcaggtatgtgcctgacgcagggccaggtcctgggactacagacatgaaatatccagtctattttaaatttggaagtgattggccattccccaatcccctggtcagccgccaaaccagtga

SEQ ID NO: 10338 - DNA, 230 bp, Homo sapiens
  source 1..230: mol_type = other DNA
aggaattctgagttgcgcggaactgtgtattccgagcacaagcacggccgggggcggcgggtcacgcctctaatcccaggcaggcgcctgcaatcccggctactcgggaggctgagctccagcctggaagagtgaaagcctgggcctcggtgggccacgtgcccgcgtagtgcctgttgcacaccggcaggcccggcactgcggggagggtgggagtgcacatgcgcaca

SEQ ID NO: 10339 - DNA, 408 bp, Homo sapiens
  source 1..408: mol_type = other DNA
agcaacgactgcctttatcattttaaatttacaaaaaataaattgtaaccataagtattcagggttgatactgctcactaaagtagaggatgaaatcttttttctgaacctttttcagaacgtaacttagtgaatatattaaaactaaactttctttgaatgggagtaatttctacggattaatctgtaatctcttagaccacacctaaggtaatgtagaggttgtttaataatgacgttgtcatggaagttaaatgaactcatgtaccataagtgaccaatacaatgattgacactcagtgatttatcaataaattaaaacatttattatcaatatgacagtaaatggatgcaaaatttatggattgtttattcctacacacgtgtggggacacgaaatgtcatttc

SEQ ID NO: 10340 - DNA, 473 bp, Homo sapiens
  source 1..473: mol_type = other DNA
taaatggatgcaaaatttatggattgtttattcctacacacgtgtggggacacgaaatgtcatttcggaaggggcccaggcccttcgcaaaaagcgccccagtctgattccgggggctgccccaccaggtggggatcgacagtggctctccggcccagggaggagagcgcggtcgcgggtccctcccctcagcctggaggctgcagccgctcgagtcggcccgggtgggggcggggtgggggcggcgcggagggcacggagattacggcggcgccacccgggacatccagggccccgaggccctgggcggtccccacggagtgggtcccccgcgcgccgccgccccccgcgtccctggcggcctcccccgaggcccccggcggcctcacgagcccgcagtagccggtggcgacgtcgcccccgccccacctccctgcgcaagtgcgaggctgccggcagcgcggcgcacgctc

SEQ ID NO: 10341 - DNA, 433 bp, Homo sapiens
  source 1..433: mol_type = other DNA
ctgggcatttctccttcatgcaaagtgcacaacgaggtgcactgctcaaagttctgccaactgggaagatttcccttcagcgctgtccttcagagatgtcccagaaaggggctgtagtgctgcagctgtccactttagaggggtgcctccatatcatgcagagggaaccgatgagggcatcgacttcctcatgatgctatttcatttgatgatagaatggacttgatgactcgtagtcaaacccaaaatcctagaggcctttgctgtcattcacctatgggggcctggcaaaggcggcacctcaagcaccattggatctgctggatcatatggcccaagtggcagaacagcttgcacagcagcctggacctgttgcagagccttcttgggaaagatctcaacctattttcaaactttaaatgggttagaagcc

SEQ ID NO: 10342 - DNA, 241 bp, Homo sapiens
  source 1..241: mol_type = other DNA
aaagaacctttctcaaaaggatagtcttgctttcacctaaccatttctagaaaagaaagggaaagtttccatttattaggaaaagatgatacccactcccactaagctgtgtgtggttgggtttgagtgtggtttgtgtacacgtagtcgtttttctaaagttctcagtaacaaccagttgtgacgtcttctcggcccgctttgctggggcctggcaggcccctccctgggctgcaaggat

SEQ ID NO: 10343 - DNA, 415 bp, Homo sapiens
  source 1..415: mol_type = other DNA
gcactcgggccccagggcgacggttcaaacgggccattgtgcgcccccggggtcccccggcccctgcagggctacttgggcgcagagccgcggagggtctccgttcctagaggtccctctcggttcccgagggacagtcccgaagtgaggaatctcactaggggaatttatcgcgacatcataaattaacgggttcattttgactgaaaaagcgaaggacttttttcaggcagaaaacaagtctcgtctgaatttaactacacgtttagatatcaactaaaaatatacggtgttttcagaaccctttcaagcggttcttcctcttacctcccaccgagcccagcgggtgggcaggaggggcctggctagcgaggcacccaggagcgccctgtccggcggcgctctagccctttgt

SEQ ID NO: 10344 - DNA, 508 bp, Homo sapiens
  source 1..508: mol_type = other DNA
caatttctggcattccaaatgatttttaagatgatctcaatttcctctataaggcttttttttttaataaacatgatttgttgaatgaataactgaaggtaaaatgtcataaccctgtaagacttttttataaatatgttcacaaatcagaaaaagatcctctctcatgacctgattttgtttgagatacttagtctggcctctctgagtgaggagtatcctcctcctatgaaacctaacagaggattcagtgttaatttgtctcttaaagacaattctgcattaagaaatggattactttgctataacctcagcatataaaaagtctaaagaatctgtgcattctgagtttgtgtggagagaaagatataggccaaacaataaaggtattttatgctttgtgtaagctggtaaataccatgacttttggaataacagtcttgctgaaaaattgacatgttcctctttctgcaagattaactgataccatctgtgagaactaaaggca

SEQ ID NO: 10345 - DNA, 830 bp, Homo sapiens
  source 1..830: mol_type = other DNA
ttggttttggccaaaagcacaaaaaaggcgttttcggacgggcaggaaatcttgcccggcctgagtcacggcggctccttcaaggaaacgtcagtgctcgccggtcgctctcgtctgccgcgcgccccgccgcccgctgcccatgggggagatgcagggcgcgctggccagagcccggctcgagtccctgctgcggccccgccacaaaaagagggccgaggcgcagaaaaggagcgagtccttcctgctgagcggactgggtaagcgccgccgccggccccgctgggggcttggctcacttccccagagcggcttggaggcaggagttctcggggccggggtcccggcggcgggaacgggaggacctggcgggcgaggtcgcgcgcgcaggcctgcgccccagggataaaccccggagggtggcgcgcaccgccggctcggagtccggccgcaggacggcgcctggccggggagagggtatctgcagggacagtgagcgaagccaccgtggccgccgcgcacccgccgggaagcgcttcggcgctgcgaacccggctttctccggcggcggacgccggcgcgttctctctctcctgccccaggagccgatggagactgataacggccctgcgccaggccgtccccgggcggtcctcgcgcccccgcccggggctcgccctctcaatggggacagaaccgcccgccgcaggcagcgtagccgccagcaaaccgcgaggcggccggggcggggcgaggggcgaggcgaagggcggggccacttctcactgtcgcgcaggccccgcccccgcggcggtgccttttttataagg

SEQ ID NO: 10346 - DNA, 238 bp, Homo sapiens
  source 1..238: mol_type = other DNA
ttgtagagaaatatacgcgtatatggagcaagttctcccagagaactcgatcgccctcggaccacttcgccaccagggagtatgaggaaaggggccggattcctcccagtaggggacagaacagggggcgcctgctccacccatccgttcctcccggaatgcatgccacactgagaaaataaatcctgtgcatgtgttttgaattttttccggactgatttgtgaggataatcaacac

SEQ ID NO: 10347 - DNA, 426 bp, Homo sapiens
  source 1..426: mol_type = other DNA
cttgtgatgattatgaaaaggctccacatcctgaggagatttattaatggaatgaaatagcaaataatgaatgactaaataaatgaatgagtgaatgaatgaatgagtggctgcctccattttatcacacaccgatgttggtggctctaatctttaaaatcattcccataaaatatcaagcacatacaattaaatggcttttttaaaaggagctcatttttgggaaatttttcacctaataggaagaatgctttactcttttatttatcaaaccttcctcatcattaaatagtactttttcattgtgttctttttttaataagctgttttaatgaaaaagacacaatgagagatcttccattcacagatataaaataaaaacggtgtgcaatttatatgaaactctgatttaaatgcagtgagccg

SEQ ID NO: 10348 - DNA, 370 bp, Homo sapiens
  source 1..370: mol_type = other DNA
cagagtagatgttctcaatctttaaaaatgataacaacaaggctgaacattgttaatatattcattagccaattgtcttaccaatttgtagaaattctcagctacatcagggatctgaagcccttgctatatgtgtcacacatctgttcatccccgtgaccttggaaaaatggtccagtttcttctataaaagagaggaagtaatggttactcagtgttttttcacatgcacagatgccttctgatgatttaaagggctatgaacacataagtaagtagctgttacttttacacacaacactctcttagtggagactggaatgctctctgagagcgtcaggtgccctcccacattcactgattggtaaag

SEQ ID NO: 10349 - DNA, 426 bp, Homo sapiens
  source 1..426: mol_type = other DNA
ctgagtagaatatttaacatacatgcatttttaattcatcttaaaagtttttttgagctctgcactccagcccgacagagtgagactgtctcaaaaaaaaaaatgagtttttatttatggaatttctaacagaaaaatgcagaaaataatataataggttttaataagctaacattttgccatgtaaatttcagatctctatttaaataaactgttagattggaatctagctttaaagttgatatattactgttattttctggataatccacaattttaattttcatttcgtttttaagccaagagtccaagagagtttatactatcatttgtcaacaatactgttctgtttgcagaatacaaaatacaatacttttctgttagctattttttctttatagagtctctgtcacccaggctggagtg

SEQ ID NO: 10350 - DNA, 544 bp, Homo sapiens
  source 1..544: mol_type = other DNA
aaagctatatttaatactcgcaatgttacacacaattatgtcttcaatgaatgttcagtgaatccttctttatgatgctgataaatatcgtctatatagctaaaatcgtttacatagctaagggcaaatcgctgtttactagggaatacatgaagtcgtaaattatatgaatgcagggataagggtctcaatttaataatatatacccgtttaaaaatagccttatttctggaatggagagctcagctcactgcagcctcgaccgcctgggctcaggggatcctcccacctcagcctcttcagtcgagcctcgcactgggattacaggaaggaaccggcctgggctaaatctgattccaagagtttgttcccactgtgtgcttaatgaaagatcaaagtttgataaaacaaggtccctgctcttactgagcgctcgcccaacctttgggtggggccactcccaagccatgcacagcagtgcgcatgcgccctcagggaggcggacagtgaccctgaggcattgccgtcgcgcgctaagacgtcg

SEQ ID NO: 10351 - DNA, 402 bp, Homo sapiens
  source 1..402: mol_type = other DNA
tacagagctatgtatctatatggtactgttaacctatattttcatattttataatttcagacatgatttgatgcatgttcagtatatacatgtaaaaggttatatataaaacctcttcataaataacattagctgctctcttttatttatgattactgaattctgacaggcagccaactgggatgcccagtaggtattcctaggggtaaatttattttttgttaaataataagatgtttatgtgcacactgcatcagcaaattatattaaagtggaattttaagacaatatgataattatacttcgaaatatagacctatgatttgacatttttacaaaatgataacaaggtaatcatataggtacaacctctactattaaaggttgcattgataaaaggac

SEQ ID NO: 10352 - DNA, 551 bp, Homo sapiens
  source 1..551: mol_type = other DNA
gcgcgctctgtgccggtgggcaccgcctgggccgggcggggcggggtgggtgggcctggggcgctccattagtgagctcactaacaagttaaattagagatgttatttatttaagaagaaggagaatacatataatttccccccaccgcttgccgcccccgcgacagtgagtgggagctggaggagctctggtcccgctgcccgggagcacgcggagccgggcgaccgcggtgcggcagccagggaggaggggaggcggcgggactgggcgcgggtcggcgccgccgcgacccgggagcggggtttgctcaggaaaaggcgccgtcgcggcccccggccacccctccctggccccgggctccctgcccgcgcgcctcccgggcctcgcggcgcgctaggcgcaccgcggcggcgcgagcgccgaatgggagcggcgacccggccagcccggcagccccgcgggcggcagccagggcgaccgcggaggcggcgggcagggcgcgtgcgcactgcaggggcgcctgtttacagagtttacactttaatatcaa

SEQ ID NO: 10353 - DNA, 434 bp, Homo sapiens
  source 1..434: mol_type = other DNA
atctttctcgttgcttcctcacaggattagggaagcacaagacagcttacagcgggtggctgtaggtacaggagcctgtattcacgagtgtattcacgagtccacgaacagtggataattttttcttaaaattttgtctgtagtacaactaaaaccatgttttaggggcacccgcgcattcgctgaggagactgttcccgctcgcgtggccggggaggcgggagccccctaagttccctgaagctcgcgcccgcctgcggcctgagggcccccgggcaggcgccgcacggcccctcctcctggaagaaggcggtggaggcgcggggacggggccgcggtcttcgcctagagcgcgggacgcatcggtcgccatgggaacggcggcgtaggcaggcgctgacgtcagcaggcggcgcgctgtccgcactgcggca

SEQ ID NO: 10354 - DNA, 390 bp, Homo sapiens
  source 1..390: mol_type = other DNA
ctgttacccagggataagctggggtcctggaccttcatactctttgggaaagaagaatgactcctgctggcatcaggaggcatctccctggcaggaacaagcctgaggcttcaccacaggagttctatgtttcattgcaagtttaattaacaactcatttttaggtaagagtaaaaatgaattagagatggaaaaaatctacatcttgctgctatgaatcaccacaaggtattttaaattctttaaatgtattcccgaatatagaaaatgtttcctgagagtggggtgcccaggctgaccacagccatagtacagtactttaaaattaatagcacgctgccagagttgaagccgattggtctctgccacctcccagcctagcaggccggc

SEQ ID NO: 10355 - DNA, 464 bp, Homo sapiens
  source 1..464: mol_type = other DNA
ctggaccttcatactctttgggaaagaagaatgactcctgctggcatcaggaggcatctccctggcaggaacaagcctgaggcttcaccacaggagttctatgtttcattgcaagtttaattaacaactcatttttaggtaagagtaaaaatgaattagagatggaaaaaatctacatcttgctgctatgaatcaccacaaggtattttaaattctttaaatgtattcccgaatatagaaaatgtttcctgagagtggggtgcccaggctgaccacagccatagtacagtactttaaaattaatagcacgctgccagagttgaagccgattggtctctgccacctcccagcctagcaggccggcggctgctcacccagccagtcagttggtctgggcactgcagcatcccagcacttgtctgggagaaaagtggtgttactcacccagggagagtctctctttc

SEQ ID NO: 10356 - DNA, 371 bp, Homo sapiens
  source 1..371: mol_type = other DNA
gaatgagcctgagccacatatccaggctcccatacgcatgaggatcagttaactgtggaatgtgattcaatgttatttcccttccagctgaagggcagtggtcttggtgactgggcaagcaacccccagagagaagcagctgcagattggctctgcagactctcagcctgagcctgtactggcctccagcaaggggggagcccctctgtgaggttagcaaaggggaagccccgcttctttgcctgaagtccttaagagctaagccgacaaagaaaaagcaaatgctagaacctcgatggctttttttttacagtaacagtttctcaccagagagaaatccctgcctgggaagaatttcccctgtggtagca

SEQ ID NO: 10357 - DNA, 462 bp, Homo sapiens
  source 1..462: mol_type = other DNA
acttttgtacagatgagttttttaaaaaagtgtatttttgcctttactgtttatttacatgttatattcaaccagagtatttagaatggtagcatggaatactttatttttcttgcattgatgttctaggtctcgttccagaacatattcaaggtctcgtagtagagatcgtatgtattctagagattatcgtcgcgattacacgaggtggttatagacctgtctggaatagaaggcactctaggagtcctagacgaggtcgttcatggagtccaaaaagaagatccgtttcttctcaaagatccagaagcagatctcgccggtcatatagatcttctaggtctccaagatcatcctctcctgtttctaaaagacgaccatctgagtctatcgatgaatttaataagtcatcagactctgcattctgttggaaatggatctagtcgatacagtccttctcag

SEQ ID NO: 10358 - DNA, 501 bp, Homo sapiens
  source 1..501: mol_type = other DNA
atctgtaagctccaggaggcgtagtagatatctattattggttgaatgaataagtgatgttgaccatagataaattagttcaaaacttagattttcaaattatgtcagtagccatcttaaattgtgctgaaattcagaagaggaagctatttcgtatgaacagaaatgaaaactgggatatcacctgtcatatcacttgccatcctcggctaagccaggagagtggatacgtaggtgtatttagtgaacgaaacaaaaccctcgggggtagtgcttggcttctgccagttccacaagtattttaatattagctgaacaaatgaaatgaccaaaaaataaatcgcgattttgtgggtacgaactccggactgcgagtccagctcacgaggcgtcctaacgcgacctgccctgcccgtcagctcctattggctgactctcggaagacccgcctcttgagaaggaaaagcagtcgcttcccgaattgcctgaatcagaagcagc

SEQ ID NO: 10359 - DNA, 395 bp, Homo sapiens
  source 1..395: mol_type = other DNA
gctaattacaagtctgaaatccatcaaggtagttaacactacggctgttatttaaattctattcaaatcgaatgtggcttgcctatttataatctgacttataattctggacaaccaagctacgttgggctgtgttcctcggctgacgttgccgatgtggtaaagctgtcatcacgccgccagaagggcggccttctttggcacgagcagcctaagaggtttccggctgctgcggcttgagctccgatttgatcagacgccagcgaaatgttttttgcctggtctgagccggccccacagaaagaacagaccaccgcctctccggccaaggctgacgctacgggccagagggcggagccgtcacattgggcggggcttgcccgcatatttagcgg

SEQ ID NO: 10360 - DNA, 564 bp, Homo sapiens
  source 1..564: mol_type = other DNA
gctgcagtccttggaaggcttttaaactgttcagagcctcggccaataatctgtttctttaaaaaaagaaaaattcgttacctattgcctttttttctggtcttcctccggcacaagcctctctaacttgtgtgccctgaggctcacaggccggctcccagcgtggaatctgccggctgtcaccgtgacggagccgacactgacctggctacttcagagttcggactgctcctcggaccgccgctcgtcccagactccaggaggcgccaccaggcctcgctgaccccgcatctccgggagccctcagctggtcggccgcggcgaccggaagctccggactgaggtactggttccgcccgccgctcttccagccgagactcggcagcggcggtcggagcggctgccacgccgcacctgcccgcgagggggcgcgccaggcccaggccgcagccgactgccgcgctctctgtccccgccctccgccatccccggactgcgctcacctgtctgggccgctggcctgggaggcgggggccggcgggagccaagccgaggaaagggcgg

SEQ ID NO: 10361 - DNA, 459 bp, Homo sapiens
  source 1..459: mol_type = other DNA
ctctaaattcagctgagagtatttctgatgctcaaagaaaagtgtcttaaactctgatgttttaatgtagttaaaaaaaacacaaaaaatcttctttttagaagtctctgataagactgatttgaatgtgatttaggaatatcacattctaaatggtcagtttgcctattccattatagaaatgacactaagtgttctttagttaaagctggagtggcaagttttgcatgcaaagatcgtgaaaattgtaaccctaacaataaatccaatactgttctcgagtgctgctgcagtccttggaaggcttttaaactgttcagagcctcggccaataatctgtttctttaaaaaaagaaaaattcgttacctattgcctttttttctggtcttcctccggcacaagcctctctaacttgtgtgccctgaggctcacaggccggctcccagcgtggaatctgc

SEQ ID NO: 10362 - DNA, 358 bp, Homo sapiens
  source 1..358: mol_type = other DNA
caacattactgtaattccacttatgtgaaggtacctacagtagtaaaatttatgagagacagaaattaaaatgctttagtttttagtacaataatgtgaatgtatagccccttgaaaataatgaacagtaagaacagcctttatttttatttaaagtctcacattctcatttgacagactgcctttcacttaaataacttatttgctgatttgaagtagcaatttttactttgttttccaatgacataaagaattacaaagaattcaagttgaagaaactttttagttgttttgtaaatggaacttcatcaagtgcatcatctaggctatttgcaattaaaaattaaaaacatcaagc

SEQ ID NO: 10363 - DNA, 299 bp, Homo sapiens
  source 1..299: mol_type = other DNA
aaatttatcaacagtattttgattacacttaactaattactctcaaaagtatcttggtttggcagataaattatatttggtcattctccacatagtatatgcctggcaataaatgaatgttattaccatacaatatatacatgtatagtaatactttttaaaaaagttgtatatgatgatgtgttataatcatcaggaaaagttccaagctgtcgtaattattaataatacctaaccctcaggcgcaattcagtttggattcacccaaaacaaaaatggtctccgtcggagtcaactct

SEQ ID NO: 10364 - DNA, 642 bp, Homo sapiens
  source 1..642: mol_type = other DNA
cggcagttggcactaatcaattactcattactgataacggaatgagccactggaaattttttagccagccacttctggagtgccacagtcactaatgaagcaacctccagtgcaggccctggctccagggcgctatgtacaacgtgggtctcccggagccctgccagcgccgcgcacggtcccagtccaccaggccgccaaggcccggaggggggcgccctaggcggactccgaagaccgagtattgcctcgagccacgcgcagcactcagaggagggctggggtcccagggccgcagcgcggtcagttcagtccgggctcgagcttcctagcagcgccctccttgggggctggccctgaccctcggtgccgctacgagtgggtggccagagcgccgggaccacgcggagctgccgcctaagagggaggagggtcctttcggctgccgctgctgctgttccgggacgccgcctggggagccagcccgctcgtaaggtgcgcgccaggtagctccgcacccagggggcgcccttcctggcccctcccagagcggccgggacggaaggagctgcgcggcgcggcgcggcgcggcgcggcgggtggcgagggcgggctgcaccccgagcgcggcgcccttgagct

SEQ ID NO: 10365 - DNA, 684 bp, Homo sapiens
  source 1..684: mol_type = other DNA
ctgcgagcgcagccagcctcccctcccacgcttcgggaagcgtcgcccccgagctcctcggttccttccccgccaccaggccccgctgctgggcgagaccaagcttccccggagccgcgcgcataatcccgggaccctctctggaaggcgtgcggagagcggtgcgcgtggcctggcaccggaaggagccagcttccgggctccgaggcaccccctggacagcgccccgggccgcgggttcctcctccgatgcccgggcgtcgtcgccgggatcgggagcttcgggggcccgccggcaccgacggttttcgcttccctggcgggcagctggacgaggtcccgccgctgcaccgggagggacagtggaaagccgctgcagcgccggggcgagggggctgggggcgccgtcacttgttgcgaccaataaacggcgccaacccaagcccctcggccaggaggaaggggcaagcgagagccgctggctctgtggggggagaggggcgccgcgccccaagagcccccgtcccgccctgcggcagccgccccggggcgcccagccgcccgcttccctccgcagagcgtcttccctgacggtgaaaccgcgcgggacacaacccaccgcggcgtcactgcctccccggagctgcggggcagtcggacgcagagctgccagaacgcctggcc

SEQ ID NO: 10366 - DNA, 516 bp, Homo sapiens
  source 1..516: mol_type = other DNA
gagccgagatcgcaccactgcactccagcctgggctacagagcaaaaataaataaataaataaagtttaaaagatttaaaagtagaaagtaaaaaatcatagtaagctaaggttaatttattattattgaagaaataattttttaataaatttagcatagcctaagtgtaatacagtgtttatacagcctatagtagtacacagtgatgtcctagggcgacttccagtcctgcaagctccattcatggaaagtgcctatacaggtgtaccatttttaaaatctttcatactggttcagacatgtttagatacacaaatatttaccattgtgttacaataccatataggtgtgagtacactctaagatgttcacacaagaaactcgcctaagacatttctcaggaggtaatcctgtcatcttaaatgatgcatgactgtaagatctatcgagaaataacgctctaccccgagaggtggaaactctcagactctcaggactgacagccgagtggctgg

SEQ ID NO: 10367 - DNA, 490 bp, Homo sapiens
  source 1..490: mol_type = other DNA
ggtcaggagctcgagaccggcctggccgagccgagatcgcaccactgcactccagcctgggctacagagcaaaaataaataaataaataaagtttaaaagatttaaaagtagaaagtaaaaaatcatagtaagctaaggttaatttattattattgaagaaataattttttaataaatttagcatagcctaagtgtaatacagtgtttatacagcctatagtagtacacagtgatgtcctagggcgacttccagtcctgcaagctccattcatggaaagtgcctatacaggtgtaccatttttaaaatctttcatactggttcagacatgtttagatacacaaatatttaccattgtgttacaataccatataggtgtgagtacactctaagatgttcacacaagaaactcgcctaagacatttctcaggaggtaatcctgtcatcttaaatgatgcatgactgtaagatctatcgagaaataacgctct

SEQ ID NO: 10368 - DNA, 341 bp, Homo sapiens
  source 1..341: mol_type = other DNA
tgcacagacctgttcactatggaacatgactttttttcatgtataattttagtatctctaaacacgtgtagtaaaaaaaaatttcaatcagatttcaaagacaatgtgaaaaagatctaatgtagctcaaaaggagtgtcttccccattagagtgaatcaacgatagacccctcttgctttgaaccactgccaggggcccctccgcctcctggggccagaacataaaagtgacagcaaatgttttttgaagtgatttttatactttcatatttttcctaaaataaaataatataatgtagtatcaaaataaaattgtagttgcttcaaggaaccaaaggaa

SEQ ID NO: 10369 - DNA, 432 bp, Homo sapiens
  source 1..432: mol_type = other DNA
tttatatagtgtctttataaggattttccctctttaaaaattttccttaacactagtaatcatgcagtctttcactcaacaaatactaattgagtgccaatcagctctgtgtatattatagtgtgttgcaatttaaaatttttaacaaaagttcatgatactcattcgcatgtttgagccctcttaaatagtttttttctccaagaacaaagtagttcttggtcaagccgatttgatttgggctgctcaggttcctcaaatgaaaaagcagggactggaaatggcttttgaagtctcattcgcacgacgccgtgctcactgctgggtgctgcgcctgagtccgcctcctgcggcttcccggacttgaccccgcccacgccctggtcccgcctcctgccgacgccggcacagaccccggtgacggaagtgacg

SEQ ID NO: 10370 - DNA, 312 bp, Homo sapiens
  source 1..312: mol_type = other DNA
ccaaaagagtacctgtctcacaggatctttcctgagaggaatggtctaaatgcctcaagcttcttaaccttcatataaaaagcatatataagcatatagcaagtacttgataaatgtcattttcatttacaatggatagctgactatccattgtttgaatgttgattttgccaaaaagaggaggatacttttctaattaaaaacagtattcttaaatgtaattaaggggaccatctgcccagggggctgcacctgactcaccctccctgtgcaacgcatgggggtagggaggccctggggtgaactgattat

SEQ ID NO: 10371 - DNA, 650 bp, Homo sapiens
  source 1..650: mol_type = other DNA
tactgaaataaaaaaaatacatattttttaaatgttaccactcctttatgttttggttttcagaaataaattttaaaaaattttttaaagaataatcaaagcaaaatcaatttggagattttaaataatatattagtgatcacagtccaaaaactcagattagtcattgtgcttatcacctgtgtttaataacaatgtttctttttcttttctgaattcaagttcacaaaccattttgaatttttgcatgccaattatttccagaatgccgaactgcttaaaggacatgaatattactcggtggagctattaatgtcccagcaaataagaaagaacaagttgtttccctgttgttggctctacagctctatagttttccagagaggattatcattcatgatgaaacttttaaaagatgctcagctgcccaccaaatcatattgctctgacttcccttcgactgaacaccagtttttaaacacttctctgaaaaatttgctaccaagacctggttgaagaaaatgctggcatataacagttgctcaataaacatttgtttgactgaataaacgattcgagaagccaatggacaaatgttctttgacatcattctatccctttatggaatgtataatactcctcaggccctg

SEQ ID NO: 10372 - DNA, 521 bp, Homo sapiens
  source 1..521: mol_type = other DNA
aggccttagacatgtaagcatgcatttctacttttttagattttgaatcatgtagaaatctagccaaattaattgagaatactctattgaataaatcaacatgttaacctaagctaaagataaaaaagcagcaacaaagtgccactgttatctggttaaaactgacaactgtaagatgcaagtttagaaacaggaaacagtgcttgcgaggttgtgtttatgtgaatacaaaccctctcctcccaagtctggtgactacagctgtcactattaacatatcaaacagaggtcttgatattatctgcagctgatcatttgtttaggttttcaggaaaagtggtgccgtggcaacaaggctgcttgtcagactagatgataatgagccatgatctgctgtttgttattgtagtcgtcaaggacagaaaaaggaatagaggagatgtaaatatcccttctttcttgggggaaggaaatagatgaactgtatgctaagttagagcctctctttatctataaatgat

SEQ ID NO: 10373 - DNA, 301 bp, Homo sapiens
  source 1..301: mol_type = other DNA
catttacaatggatagctgactatccattgtttgaatgttgattttgccaaaaagaggaggatacttttctaattaaaaacagtattcttaaatgtaattaaggggaccatctgcccagggggctgcacctgactcaccctccctgtgcaacgcatgggggtagggaggccctggggtgaactgattattttctaagctgaaatgctgctttgaatgcaatgtcagcctaagactggggccacggggtcgggtgtcccctgggacctacgtctcatgcagcctggggtccagagctggcag

SEQ ID NO: 10374 - DNA, 313 bp, Homo sapiens
  source 1..313: mol_type = other DNA
ttcagggtgaaaagccaggcagacttgcctatggcagttgagttaaaatgattgagctccaatatctgttcttagaagtatagaatttattgttctattcctaggtctcaccgtcttttttattgattagaaaacattcggttttaactctttataaacatcagaataaacttcatgattaaacactttataaatacttctctttagcataaaattgcaagatttttcataaagtattttactgtccttcccttaactggcatccagacctgttgctgacagacagggttggtttaggctaatcttttaaagt

SEQ ID NO: 10375 - DNA, 637 bp, Homo sapiens
  source 1..637: mol_type = other DNA
tggccttgaaaggcaatttcgtcttcttggaagtctccttgcgagggagggagcctcccctttggcctcagcaccctggctagggggtgctggctccatggcattgccaatggtcccagtgcctgctgcctctgcggcggtcacgtcgccccggagagcctcggagctctggctgcccacgatgggagtcctctggggggcgccggagccgtgccgggtccccgccgcaggggacagtaacgcggagtcggcctggccggcggaaagggggtgctggggaacagagccgcaccccactcggctcactagtgtcggcctcggcactaactctccccgagtctcgttaagcctgagttcagaaaccagaacagttccagattctctccatgtgtcgagctgtctgggacctacctggctgagccccaggagtgcgggcaggggccgcgggggtcgggtcgccagccgccacctcctgctgcggtgcgctgggacaccctcgaggcggctcagcgcccgcggttcccagcgcgggcggggccgcggcagaggttcccaccggacagcgccaccccctactgcccgcggggccacctgtgtgtgcctttccgggccgaagcgaggtgcggctccctgtcgc

SEQ ID NO: 10376 - DNA, 548 bp, Homo sapiens
  source 1..548: mol_type = other DNA
cagggggctgtgactcaccctccctgtgcaacgcatgggggtagggaggccctggggtgaactgattattttctaagctgaaatgctgctttgaatgcaatgtcagcctaagactggggccacggggtcgggtgtcccctgggacctacgtctcatgcagcctggggtccagagctggcaggagccggcccgaggcctgcgggcccgggcgccagggtctccacagttgatgattttctgcagaaaaacaactgcgaaaaagaactccagttcccatcaccgcgatttccacatggatgtgacatgcccaggtgactcacgcggggacaccccggggcggggcgagggagtttctccgggcgcctgcagggaccgggcggggcggggcagcggggcgaaagggggcggggcggggcccgcaggcccggtcgggcggaggccgcgcgcgcccctcgccccctgcgccctctggcggccggctggacgcacttcgcagcccgacccagagagtcacgtgactttggaaagtcccgtggaaatccccgggc

SEQ ID NO: 10377 - DNA, 530 bp, Homo sapiens
  source 1..530: mol_type = other DNA
ggaaacacggggtgccctgtcaccccagcctctgggcctggtttccttggcaccgcccgccgcgtgttgaaagcttgactggagtttccctgcaggcaggggcacagtgtgtgcaacgctgcatcgcccgagcctggcacaggaacgcaagaattttccggagacgacgggatgcagcgggcgcggcgcctgcaccacgctgggggtcccggtgtccgggctgggccgctccgactccgcccgcggccaccgtcggctcagggggtgcgaagaccgcggcgaggcccctccccgcctgcctcccgccgcccgccgcggaccaggcgctccctcccggcggctggcgagccagctccggacatccgtccccacctttccgctaagcgcggcgcccgcggggcctgcctcggcggtcaggtcagcggcctccagcctcactctccggccccagcccgcagccgccgccgagcggagcgcacctgacccaggcgggcggggcggggcggcgggcggggcgcggggctgacgtg

SEQ ID NO: 10378 - DNA, 395 bp, Homo sapiens
  source 1..395: mol_type = other DNA
tgtcacatcttaggagtcagaactgcgacgaatgcaggttgcatgctggtatgatttttatttggaaaaacctcaaagccagatgaagcctttccgaaagagcatttgttaaattacatgttcattcatcatgggtgcacgcgtccaaaggagtgcagtatgcaccgccccacgatgcgacatcaggggtggagggttgtgggacgcgcgggaccctcgggccgccttccgccgccgcccggtgtcaccagaacccagccgtttaccagcggccccgcccgccccggcccggcagggcaggtcggggcgggcgcgctctgagtcaccggaatctaggtggggccgcccggagcggcgtcctcgggagccgcctccccgcggcctcttcgcgtggc

SEQ ID NO: 10379 - DNA, 249 bp, Homo sapiens
  source 1..249: mol_type = other DNA
cctctaaggacctgttgaaacgtgcatttcttcccaagatagatgtggaagtagaactatctttgacgacagagatttctgagcctcaaattccccatttgtaaaacagagataggtttagatacaccgttatgtgttattcatggtcgctgccttggagccaaaattagtttagccggccttcgggcatgctcgaacagcattctcaccgacggagtagcttccggaaagggtactgcatttcccgtt

SEQ ID NO: 10380 - DNA, 562 bp, Homo sapiens
  source 1..562: mol_type = other DNA
tccatggcagcccctgtgggcagccccgggcctacataacaaagaggacaactttgccagttttcccctcctacgtggaggcttcccggatagccaggatgttcatagcccggatgttcatagcccttcaaaggcatttatcttcatctgtaccgaaaaggtacagattgcaacccggatcttagttatctcggtctttccgggggtcttgctgctgagatctccgcgcagagggcggctcggtcatcccgccgccgggcgccggccaccagggggcgctgcggcctcctccctctcccgggagcggccaagccagcccggtggccggcctcacatccgggtctggagcgcggccgccgctgtcactgttggtgcgggcgcgtcggggccgggccggggcaccggcggagggaggcggagcggcggccacgctcagcccagatcccccgaaactttaggttcgaagccccacaactttccgggaagcgctgccgctccggaggcgtggacggaaggagactcgaacccgcggcgggggcggagtccgccagtgcctcgcgcc

SEQ ID NO: 10381 - DNA, 292 bp, Homo sapiens
  source 1..292: mol_type = other DNA
tggatccagtgcagccccagggaactgaacactcacatgcccctgggaagcaggcacgcgatcactcttaatttaaattctagaaatagtttgggtaactgtttcctttccaaaaggactctctgggtacggcgcatatattaaaataacatgaataaattgaattatgaagttaaatgtatgaaataatgtccaagtaaaatttctttgcagtctgacaaattggctttcaagattgcattttgttttgcgaattactagttttctggaggcccccggcatccggaaccca

SEQ ID NO: 10382 - DNA, 525 bp, Homo sapiens
  source 1..525: mol_type = other DNA
acaaaaaaaagtctttgggttttcagaattttgcaattacagataaatgactgggaacctgtaataatttcctcatatgtgtcatttaataaaaaccagaactctgggtaattctgccttaaagtattttatatttgctaagtataaattcttaagatattctacttgaaatagctgaagctccatgatggcagcccctgtgggcagccccgggcctacataacaaagaggacaactttgccagttttcccctcctacgtggaggcttcccggatagccaggatgttcatagcccggatgttcatagcccttcaaaggcatttatcttcatctgtaccgaaaaggtacagattgcaacccggatcttagttatctcggtctttccgggggtcttgctgctgagatctccgcgcagagggcggctcggtcatcccgccgccgggcgccggccaccagggggcgctgcggcctcctccctctcccgggagcggccaagccagcccggtggccggcctcacatccggg

SEQ ID NO: 10383 - DNA, 316 bp, Homo sapiens
  source 1..316: mol_type = other DNA
cacgcgatcactcttaatttaaattctagaaatagtttgggtaactgtttcctttccaaaaggactctctgggtacggcgcatatattaaaataacatgaataaattgaattatgaagttaaatgtatgaaataatgtccaagtaaaatttctttgcagtctgacaaattggctttcaagattgcattttgttttgcgaattactagttttctggaggcccccggcatccggaacccaaaaaaatcgacgcccaggatcagatgcagatcctgggatccttggctctgagaggctctgggcccgttttcctaggag

SEQ ID NO: 10384 - DNA, 373 bp, Homo sapiens
  source 1..373: mol_type = other DNA
ctatgcatagggatgggccaccagactgtgaaggcttcccattcaggaccctggcagagtctcgctctgttgctcaagctagctcctgcctcagcttcccgagtttctgggactacagttctttaattactgttactgaaaggcatagcctttgaatgagttattaatccaaaatcttttgtttcaattacattaaggtcatgaacgcccgggagtccaggaggcccgggtggggacgcctggatgacgtcactcgaggtgggcaggccccgcgcggggcgtgacgtcacgcgggcggtcccgtcagccgtgaggtcacctggtgggcgcggccaggccgaatccccagtgtcgtcacgggagggggcgggcc

SEQ ID NO: 10385 - DNA, 244 bp, Homo sapiens
  source 1..244: mol_type = other DNA
atgtaaattaatagacaggcattttatggtgaatcagaaggaatttctttttcggatttacaaaaaagactgtgctccaaggtcacatctacatgtttatttcaaactttgcaaacaaaccattccatgattcctgtaagaaacctgacactaatttttgcaacgggggtaatatactcagagtttaaatttccgaaactggcaacagctagggaagtgtgtgcgcgcgcgtgcgtgcacgtgt

SEQ ID NO: 10386 - DNA, 275 bp, Homo sapiens
  source 1..275: mol_type = other DNA
agactctgtctcaataaataacaaagtctcttttgtcatgtaaagaaacatattcacagatgtaaattaatagacaggcattttatggtgaatcagaaggaatttctttttcggatttacaaaaaagactgtgctccaaggtcacatctacatgtttatttcaaactttgcaaacaaaccattccatgattcctgtaagaaacctgacactaatttttgcaacgggggtaatatactcagagtttaaatttccgaaactggcaacagctagggaa

SEQ ID NO: 10387 - DNA, 292 bp, Homo sapiens
  source 1..292: mol_type = other DNA
ggcgcctgtaatcccagctgtgagctgagattgcaccactgcactccagcctgagtgacagagcgagactctgtctcaataaataaataaataaataacaaagtctcttttgtcatgtaaagaaacatattcacagatgtaaattaatagacaggcattttatggtgaatcagaaggaatttctttttcggatttacaaaaaagactgtgctccaaggtcacatctacatgtttatttcaaactttgcaaacaaaccattccatgattcctgtaagaaacctgacactaatt

SEQ ID NO: 10388 - DNA, 357 bp, Homo sapiens
  source 1..357: mol_type = other DNA
tctaggtggtgccactgcactcgagcctgggtgacagaatgaaataaaaggtaatctcttaaaaaaaattattctgcattcaagttaaaaccattggaaagccactgttcaatcagcagctgtttatgggagattattttgtaaaatgtcatcctgttaaaaaaaaaaattaaatgaaaaaaatatatatgtatgtatatatatatacacacacattgaatacggaggctcctctctgtccccagagcttggaaggaagctagaagcttccggcagaatgtttaacatttgttccaagtcaaagtggagttgaaagttaaacagacagtcatctgaataaacaggaacctgtttcta

SEQ ID NO: 10389 - DNA, 463 bp, Homo sapiens
  source 1..463: mol_type = other DNA
gatttattcaaatgtgcacctgaacacatgtaaaagaatgttcatagaaacgttactcaggttgactaaaattgtaaggaacccaaatgttaatcaatatagaatggataaacaaactgtggtatatttataaaatgatgtagtatacagtaatgaaaaagacacaagagtgtatgctgaatgattcttattcaataacaagccaaatggtggttatttaagaaatgtgtacgttatacacgttataattcaataaaatataaatttaaaaataatatgccaacaataggaaataattttcacatttaaggtaagaacctccttggaggcgggtaaggatggatgtatataggggcacacacacatgcatggaggactgacctggttgcaggtggccccgcctagttcccgggatttcagctgcggcccgctggacagcgcacggaacaaagacgcaaccgct

SEQ ID NO: 10390 - DNA, 477 bp, Homo sapiens
  source 1..477: mol_type = other DNA
aggctctgcaagtttgtacacacccccgcaggcgggcccgaaagcgcggactggaattccagggcgcgggagcgggggtggccgggccctcgagcgcgctccgtccacctgcagcggctgcccctctcgaggaagcacagccattcttcgctgcctgtggaagcttttgcaaaaccgggagggcggggggcgctgggcgagtccccttttccaggggggcggtgagctctcctcgtggctatcccggcaggctctaccttcgggcggggcggcaggggaggattttccccctgcctcgggggtggctgagccaacctcgcgtttctgggccgagagtcggggggcgacggggcgactgggcggcccccgggccccgcagcctctgcagcacgtgccgcgggcggcggggacgcggctccgggacccggtccagggtgttcgcggtgttccggaatccgcgtcttggcgccgcccgtg

SEQ ID NO: 10391 - DNA, 417 bp, Homo sapiens
  source 1..417: mol_type = other DNA
tacaagtttgagcagagttaacctatattttttttaatcaaactgtaaattcaacgtataacactcaaagtgaaaatactgctttactgcttatttagtagcagatacaaccaaatataaataatattcacttattactatgttttaaacctaactcaatttattttcaggattcctatttgagacaagaagctcttgtgtgtacacacacagagaaaaccttggaagattatattccacagttatcagactttttgggattcctactgccagggggtgggaacccagggagttccctgggtagggcatgccccaagaacctcagggagcgggggcagcggtgcaagcgcggccatctctactcacttccgcttccgtctgggcggtagcgcgcacgagcgttcagagcaaatgctg

SEQ ID NO: 10392 - DNA, 514 bp, Homo sapiens
  source 1..514: mol_type = other DNA
atttcgatttcagtgaaaactagttttaagatgaattgtcaaaactgatgtacaatggttaagagttaccagcgtctatcttacattaagacaagataataaatatgaaaatactttacaaattgttaatcactctccagaaagtgaaaagttcaatcttctttaagcttcatatgtttagcttaatttggcgcgaaatctgattattttatccagtatgtcaacatagaaaaatttaatttacaatttaaacacattatttctctctcatgcaagtattgaaattaaagtttctaaaatcaaaaaaggacactgctatatggaatattaatgtggcatattaacttttgccacaaacgagcgctagcgccatgcgcggcataagcgccaaaatgctcgggtcttctgtgggttctaaccgccgagagccaagcaccctgaggttgtcccagctggggatccgtcagcatttgctctgaacgctcgtgcgcgctaccgcccagacggaagcgga

SEQ ID NO: 10393 - DNA, 429 bp, Homo sapiens
  source 1..429: mol_type = other DNA
cataagctaatcagcttccagtgtgtacaccgtgcaagctgagctgcatacagtgggaagaaaacctctttccaagtgtgatctcattcccaaggaggtgtgtccagatccctagaagctggatttacgttggcaaaagcccgggagcgtggcggggggacccgcgcggggactcgggtaggggagatgccacaggagcgcctgccttccccggcgtttcggcgacctccgggtccgccctgtcccctcccagctggggagctgagcccggctctgcgcccatcgccgaccccgaaagcgcctgtcccgccccgcggggcgacttctccctttcggcggggcagctgcgccttcgggacagccccagccgcggagcgcccagaccagggcagccggagtcgggtcatacgccgcacgccgccggggccg

SEQ ID NO: 10394 - DNA, 559 bp, Homo sapiens
  source 1..559: mol_type = other DNA
ccagtgtgtacaccgtgcaagctgagctgcatacagtgggaagaaaacctctttccaagtgtgatctcattcccaaggaggtgtgtccagatccctagaagctggatttacgttggcaaaagcccgggagcgtggcggggggacccgcgcggggactcgggtaggggagatgccacaggagcgcctgccttccccggcgtttcggcgacctccgggtccgccctgtcccctcccagctggggagctgagcccggctctgcgcccatcgccgaccccgaaagcgcctgtcccgccccgcggggcgacttctccctttcggcggggcagctgcgccttcgggacagccccagccgcggagcgcccagaccagggcagccggagtcgggtcatacgccgcacgccgccggggccgccgcacctgagcccagctccagtcacgccggaagcgcgggcggagcgcacgggtccggggagagtcgcctgcgcccgcgagggggacccaagtacctagggtggtggccgagtcccgcctcccgccagcgggggcgaggacctgcga

SEQ ID NO: 10395 - DNA, 218 bp, Homo sapiens
  source 1..218: mol_type = other DNA
cagtctaacctacatcatgttctcagagagaatgcaatctaatattatgaaccaggaaaggtttttctggaaaatgttttcagacctctcaaactttgagtttctttgattttcataaatcgaaaagttattagactttagatatgtttaaagtggttctgctcctttaaggccatcaaagtatggtcctgagcgcaggtcctctctgttgaattgcc

SEQ ID NO: 10396 - DNA, 564 bp, Homo sapiens
  source 1..564: mol_type = other DNA
ctggcggtcgggatcttttcccgctcagccttggcgaggagcggccgccgcggcagcgagaacaagggcaccaggggggtttcctccccctcctccagcggtgactttccaggtgagcggccgccgcggctgcgaggatccccctcgcccgctggggctcgggccgccgcgtcgcgccctcctcccgcccctgtcacccggcggcggccgggagctgacagccgcccgaggggctcgcggcccggaggcgggcggccggcgggaggcgggctggagaggaggagagcggggcgccgccgagcgccgtcgttccccgcaggagggtctccgcacaaacatcttcggtgactgtggcacaagtctttgccaagttgtgtcttggaccttgacgctccacggagcccagagcaacttggagggtctcccgggtgctgggtgcagcctcggggtgcgcggagggcggaccggccaccgcgagagcggagcggcgggtccctcccccgctccccggcgtgtgcccccagccccttcccggtggcccgagggtgagggtcggaggggccc

SEQ ID NO: 10397 - DNA, 357 bp, Homo sapiens
  source 1..357: mol_type = other DNA
agttatcaagaagttccaaaaattgtgaactgacattctcataaaatagtatttgagtcaagttttatacaaacgcttcatttttttaaagcacaaaactatgttctaaatacttaattaagagttatagttatttatttaaaagaaactagtcccagctacttgtgagctgagatcatggtgacagagctagactctgtctcacattaaaaatggctttatgaaaatattatttcattttgtaacaattaggaagggtatatcaaactttgcaaatatcacattaactcataaaactttattaaggctctattgagagggtaaaatgcaccaatcagcgctctgtaaaaagcattt

SEQ ID NO: 10398 - DNA, 449 bp, Homo sapiens
  source 1..449: mol_type = other DNA
ccttggaaatgcactttgaacatctctgtatgcaaagaagacaactttattaggtgctttctctcccggatttggttctttcaggtgaagttccaaatcactagtcccacggtgggtgctcaccttgagggcgaaggtgtccccctccaaagtgccaggtaagggtacccagctaccaggtaacggtgagtggtaggtgccgctgcgggggcagccaggccttcacaggatgctggaggcgcgcacgtgcgcaggtgctcgcgcatccacacacacacacctggcaggggacgcgccatgttcgccatgagggaggcgccgggcgcgcgggggcgggcgccgtgggaacccgggcgcgggcgcgggcgcggggcggggcggggcgggggcgggggcgggggcggggcgcgcgcccccggggactggcgcggccgcgagcgcccgggtga

SEQ ID NO: 10399 - DNA, 593 bp, Homo sapiens
  source 1..593: mol_type = other DNA
ttattaaattacaggggttttacatccaaaattggaattttttaaagctgaatgcaatcttgtggcagaaagttatttgaaaatcctttctttatagctttttatctataaacctcttgtattctagctgatgttatatactgatatgacattattcaatctgtcattgattgacagtcgtttgtcaacgcctgtggggggggggaatgtggacactggggtccactcccctcgcccggcccggcgcccactagccacagggcccgcttccccctggagatcagcgcgcacttcccgagccctcgtagcactcagaggtcgcatccacacctgggatgcctagggggcgcctcctggccgggtgtcccgggaccctgcgaacgcacacgccgcctgccaggccgcggccggcagtggagagcgtccgcaaaccgcgcccggccagtacaggtcacccgggcgctcgcggccgcgccagtccccgggggcgcgcgccccgcccccgcccccgcccccgccccgccccgccccgcgcccgcgcccgcgcccgggttcccacggcgcccgcccccgcgcgcccggcgcctccctca

SEQ ID NO: 10400 - DNA, 443 bp, Homo sapiens
  source 1..443: mol_type = other DNA
aatggcagaaacagagctaaaatattgatttgtttttctttatctaataggacaactgcgctgttttcaaaaattcaaatcgactttaacctaggtaacttccctagattattattaaactcctgagaaagcagaattttttttaaaaagttcctgtaagagaatggcatttctcaactgcagagatgggagaaccctggaggttggccacctccacctccaaggaccgtgctttttgtggcgtttcagaaaattccatacagacctcagcatctttaggccctagggggactgcttcaccaggaaactgtttcttcgtcacctggcccagatgacccaggtgactttccgcagagactgcagctacgctttctgccgctgccgccgcgcagccgccgccgctcactggttacccccggaaacggggtcccgggcccgccgcg

SEQ ID NO: 10401 - DNA, 350 bp, Homo sapiens
  source 1..350: mol_type = other DNA
gctaagcactccaggataacgacctttaccgacagcgtggctgtatgtagttattaaaatgtaaatacatatatttacaaacaaactttttttcccagttaacaaaacctcaaataatgtgactttgtaaagtctgcagcagcaatgaaacaaataatttgtgtatttcctcccagagccactgtgaacatctgggctggagaaaggtcccaccccgcagcgacaccgagcacgcgccgcttgcagctggcttgggtgccgccttcgcaccactcagctacagagcccgcggcagaggaggagcgcgggcagcggaacgcggcgggcccgggaccccgtttccgggggta

SEQ ID NO: 10402 - DNA, 370 bp, Homo sapiens
  source 1..370: mol_type = other DNA
gtggctgtatgtagttattaaaatgtaaatacatatatttacaaacaaactttttttcccagttaacaaaacctcaaataatgtgactttgtaaagtctgcagcagcaatgaaacaaataatttgtgtatttcctcccagagccactgtgaacatctgggctggagaaaggtcccaccccgcagcgacaccgagcacgcgccgcttgcagctggcttgggtgccgccttcgcaccactcagctacagagcccgcggcagaggaggagcgcgggcagcggaacgcggcgggcccgggaccccgtttccgggggtaaccagtgagcggcggcggctgcgcggcggcagcggcagaaagcgtagctgcagtct

SEQ ID NO: 10403 - DNA, 346 bp, Homo sapiens
  source 1..346: mol_type = other DNA
cttgcaggtttcttaagaccaatcagaaacatcacaattttgttttctttctcagcccaggctggagtgcagtggcaccgtctccgagtaactgggcccaaagtgttgggattgctgaatctgaagctcttggaatttcatctgatacaaattcaaggttctaacatgcaggatcttgggagcccgagaatcgtgcacgcttcggacgtgtggagcagccgagggcagaggcgctggccacaaggccctgactgagcgatgcagccctcctgaggtcattcggaacgcccgggagagtggccactcccgccccagagggggaagggtggccggtttccaagtccga

SEQ ID NO: 10404 - DNA, 531 bp, Homo sapiens
  source 1..531: mol_type = other DNA
ctgtggattcatttcatcgtaggtcctatgaggtcattgcaaatctttgtactatatttgagaaaacagtaatgtcatgacagccacgaggccattggtgacagatgataacggactgtagaatcccctaacctcttttgacagttctttcttgaattattagtgacattcggtgaaaatatttgaatttctctgttaggataggtgagcagaaatgctgatcagaaatagaagaactagtcatgatgaacataacttcctaatatttatttggaacagagatattaaagatagtctttatttttcaatgttcaaaacactttaaaattttaaattgaaaagttgcccagtcagaaaggataatgtattgtatttttaaatattcctttttattttgcatagcatgtgcactttttttcctgaaatgtgcaacacattcaacattgatgatttttttccccctccttagcttagagcagaggtggaaaccccaggggattcaagtacccacttgagtctctccagcctgta

SEQ ID NO: 10405 - DNA, 631 bp, Homo sapiens
  source 1..631: mol_type = other DNA
agttcagagttgattgtctaggataaattaaaaaatgaaaatgacctaaatatattgcactttctgatattttttacattttaatgaaatatatgccttcagcaaagtgcacacatcatctcaatgaattttcataaagcaccatatacagatgttccatatactgtatatatatatacacacattatatatatatagcatgaagattacttatactaattaatcattaactgtaaatatgaagaatatttatttgtattcatatttttaagaagattgagatttaacaggatattatagaagggtttaattcacctttcaagtttttaatcactttatttcacagtaattcttttgaaataaaggagataggtgggagacagcaaaaagtatattttgttgatctcacacgtagaagtgccgtttttaaaaaattatatttgttaaaaggaagataatttttaaaacgagaaggaaataacttttaagaaacaaattttgttaaattaagtaccgtgactaaatactttaattccgactttgaaccttttaagtcaaagactccctaccaccctgagggggtgcgggtgcggcggggccggctgggggcttcccccaccccctgctcctg

SEQ ID NO: 10406 - DNA, 315 bp, Homo sapiens
  source 1..315: mol_type = other DNA
gttgcagtgggcccagatcgtgccactccactcatctcaaaataataataatagtaataatgaataaaataatttctcaggtttcataagctatgtatgaaatgcaaagcaccattagcatttctaggcttttttgaagacagtatcatcccaaatttaaaaatcctattgtatatgttgtaaaatttctggcaaagaaaggatgggttttgcacagctgcacatatgagcaaagcactgttggtctttgctgtacagaatcatcccatggctgactaaatgtcagtagcattctcagtcattgtaaacaccaag

SEQ ID NO: 10407 - DNA, 340 bp, Homo sapiens
  source 1..340: mol_type = other DNA
ggtcggcctcccaaagtgcggcctatttctataatttttactgtaataaaagaataatactccacaaatacttaaagtgactgttaccacaccttacattcaaacaccagagattctgaatatattttattagggccccagcctccgttgctacggcaaccgactccgcccccgaccccagcaccccagcggggtggtcgcctcccttccggatgctagattcgtcccctctggtctccgtagagggacgcctcaaccccgcccaggggtgggagccgagctagccccacctcccggtggcttctcgcgatcgtggagacgcagcgagctcggcgcccgg

SEQ ID NO: 10408 - DNA, 347 bp, Homo sapiens
  source 1..347: mol_type = other DNA
tctaacagtccaccagcagaggctgcagaacagcaaagattgccagaggggtacccgccagatgccccagagctctcctctatgaggtgtctattgacccctgatgggaggtgtctcctaggcaggaggcacaggggtcagggacccactctgtcccttagcactgtgccgggagatccgctgctctcttcagagccggcaggcaggaacgtttgagtctgctgaagctgtgcccacagccgccccttcaatatattaatagactcttgctatcataggtccttatgatgatgattttgactttgatgatccagataatctgcttgaggatgactttattcttcagg

SEQ ID NO: 10409 - DNA, 327 bp, Homo sapiens
  source 1..327: mol_type = other DNA
ctcctaggcaggaggcacaggggtcagggacccactctgtcccttagcactgtgccgggagatccgctgctctcttcagagccggcaggcaggaacgtttgagtctgctgaagctgtgcccacagccgccccttcaatatattaatagactcttgctatcataggtccttatgatgatgattttgactttgatgatccagataatctgcttgaggatgactttattcttcaggtattttagagcagaaaatgtgagattcattgcttttcctacctttacttgtgtaaatgacctttactttaggaaatctgagaacttgcaggcct

SEQ ID NO: 10410 - DNA, 490 bp, Homo sapiens
  source 1..490: mol_type = other DNA
tgtattttgcggatacatccaaaagctgttccataaatgataaatgaatattttccctcttctcttgagggagaaacaaactgttgcaggagatatatcttaacagtgtcaacaccatttgcataatatagtaattattgtctaaacaagaacaaatatatacattagtaggtgaattttcagttgcacaatcttttagtttgcataactaaggaatatgaaaatatctttagtctgaccctgtttctatttaaaaaaataaataaaatgggagtttgaggctgcagtgaactatgataaaagtatcttcaaaaatgttctgacggtggaataatgcctttcatttacatgttaaatggaagcctatttttaggctaaatgtaagtcttaaagtatccctactgatattttaatggtaattgtgatagtacctgaataactattgtgtaagaataaagttaatgtaaaaaaatttttaagtgtgtagtct

SEQ ID NO: 10411 - DNA, 534 bp, Homo sapiens
  source 1..534: mol_type = other DNA
tttatttattttgcttaaaagttttgttttgatagaaagaattgtacaccttgcagtgagctgagatagcaccactgcttccagcctgggtgacagggcgaattccccttggaaaataagtcgtgggtgttctgagaagtaggtatttacatctcgtggaaagacaagaatttgtctctccagctggattagcggaactgaccagccagttattttggcaaatcagcctctgagatgttccatgatcactataatatatagatcccatagcagaagctatatagttgagtgaaatattcgaatacatgcttttttaggctttaaaaacctgttttcttaggaagctgccttggaaagacacagctagatgttaccttcctatcagccatatgtgcatttaaaacattggtttttccacagctaaaaattgcagttttagtgacatagtataataatagttcacttttaaaaactcgtctaaaagttgtgtaaaattgaatacccttgaacccttggaggatcaagacctgccaa

SEQ ID NO: 10412 - DNA, 618 bp, Homo sapiens
  source 1..618: mol_type = other DNA
acttcagaaagacaaaactgtttgccatttttactggcagataagaggaaaatacaatatttgtattatttttatactagtaatcttgtaaatattgtaatactttaatttttaatattataagcttacatttgctctgaagtaaatgacttcatgaatgtgaaatgtttgataaattaaaggaaaatatcttcataacgtgaatgcagatgttttcaaatatttctttgaatcctctccttttcaggaattacatggtttaatttgctgtaaatagaaaagtggcctggttaaactcaattttgaaatgctgactttattctgtttcaaaagtgtggcaaaactgaatattaaggttcttaagattcatatttcctgttataaggaaataagaaaacttatttggcttcagtgagtccctagttcaaaatcagaaatatttatttcagtttaaactggggagtttaatgcttggaaccattcatacttgattaaaatacatcgttgaaaactttccctgtttttgatgagttgattttgttttaactgatttaaactttttcaaggtttaggcaatgacatcatcacaattgttgattatttggtaaactatgacaa

SEQ ID NO: 10413 - DNA, 558 bp, Homo sapiens
  source 1..558: mol_type = other DNA
tgtggctgctgcctcgtgtcacatctgaaactcatctgtacctcacttagaaaggtatggtagaggggcttatgtcccagaaaagactttacttaatgaaagcctgtttttcactctaaaaacaagaggacacgctaagaacgatcattgctatttatctgtcttaaattagaaatcatgggcattgtacagttgatttttacttatcatgacttgctcactaattcgtgatctctttctgttatattttaaaaagatgtttttaaatggttttatcttaaagaaatattaggaaaaaaaaaactatctagaatgtaacgtatgttacaattcagagtctctcctaaaatcataatatgagatgattctcagcttgccaaattttctagagttgtgaaataggttatgtcactcaaccagtgtttatttgagggaattatacatcagaagtttttatttcttattttcttttgtttgaactgcctatttcaagataatgattccaaatcccagccttaaatttcatatctaactttgcagctgcagtgctgttgctta

SEQ ID NO: 10414 - DNA, 622 bp, Homo sapiens
  source 1..622: mol_type = other DNA
gcagagcaattgcaaatgttctcattgaggtgtatgatgctaattaacctcatctttcagagctatgtattacgtaatgcttataggccttttaaaaagcacgtggaagaaagcaatagagattcccttcagtttatttttcttaaattccagtaacatgaaaaatttgaaattatatgaatgataccgtaattagaaaattactatgcaaagtgcttaggacagtgcctggctcacggtcagtgctcacgtttgggcagctgcacttgggcgctgctgcccatcctggcggagacttcggctagcaggccccgctgcagaccccaggccggctcgggtctacctgcgccagcgctgtacctggaccggtgacccggcccgcaggacgtgtgggtgccgctcagctccccccgcctcggccgccgacccccagctccccggcggggcctcctcctgccacgtgacgcccccgccaggggccccagcgccctcctcgcggccgcgccgttccggctcccgagccccgcctgcgcgcggcctcctcggcgcagccatcctcttggctgccgcgggcggcaaagcccacggcatctgccatccgccccgagccttgatttagaca

SEQ ID NO: 10415 - DNA, 580 bp, Homo sapiens
  source 1..580: mol_type = other DNA
tagataagttacagtgaatatcaaattcatttaaagatagaattaaaaaaataaagttgcagagcaattgcaaatgttctcattggaggtgtatgatgctaattaacctcatctttcagagctatgtattacgtaatgcttataggccttttaaaaagcacgtggaagaaagcaatagagattcccttcagtttatttttcttaaattccagtaacatgaaaaatttgaaattatatgaatgataccgtaattagaaaattactatgcaaagtgcttaggacagtgcctggctcacggtcagtgctcacgtttgggcagctgcacttgggcgctgctgcccatcctggcggagacttcggctagcaggccccgctgcagaccccaggccggctcgggtctacctgcgccagcgctgtacctggaccggtgacccggcccgcaggacgtgtgggtgccgctcagctccccccgcctcggccgccgacccccagctccccggcggggcctcctcctgccacgtgacgcccccgccaggggccccagcgccctcctcgcggccgcgccgttccggctcccgag

SEQ ID NO: 10416 - DNA, 481 bp, Homo sapiens
  source 1..481: mol_type = other DNA
aatttgttgattttccaggtatttcgctggggaaattttgcactgaaaattcattaacaattcactcatgggggaatttcttctcttgcccaaacaacaagttatggtaacatagttacatattcatatttgtgagagaactgtggaaaaagcgtctttgcaacgtggcttcgcacgcgttggcatatgaattgagtttaacacgtattctaagtgcgccccgcactatgctaggccccgttcgtcatttaattctcgcacttaattaatctcatgaagaacgaagctaatgaagcttaagcttcgggcctggataggaattattgttattattattattaatttccctccttttgcagaggggtagagtaggttacctcagatcacacactccaactcttaaccgcgggcggcgatgacaacccaaggcggctaccgcgggccggctggggtcggagggggatcgccccgccgaggctcc

SEQ ID NO: 10417 - DNA, 565 bp, Homo sapiens
  source 1..565: mol_type = other DNA
tcggctcaatcctcccaccttagcctcccgagcagctgggatccccccttcggcctcccaaagtgttaggaatacgcgcgtgagccccgcgccccccgttaaagtgccgggacctggagggaaggcggtgctcggcctccgtgtgaccgcaggctcctcgcccgcgtcctcgagggtcccagggatgcaggacctgccgcagcttccgcagccacaccccggcttccagcgtcctcgccgcggcaacgcaccggacgtcaccagcgcagcggggattcccgggggaagtccagcgcgctccctgccctggggaccagaggacgagcggaggaagtgtcttgggcggcaaacatcccactccccgcgccggtccgcgcagcccgcgggaacgcccctgggcttgcgggaggggctggagcgcgtccccggctccgggcggtcccgagcgcatggactctgggtggggcgggaacccgcgctctgtgagccggctgccgccgcgccccagcgctgtcatcccggggcggggcctggtccccagctgtggtcgcttcctaagcggcgg

SEQ ID NO: 10418 - DNA, 584 bp, Homo sapiens
  source 1..584: mol_type = other DNA
tatacgtattttggatttgggccagacagctaaaaaacctgtttcaacttaaaacccaaaaaggttttaagttgaaaaaataatgctgacttttgctgaaagtaaattttaaacaaaggtttttttttttaatttactccattaaaaatgcatacatttggacagagcgagactctgtctcaaaaaaaaaaaaaaaagcatacatttgtagtcacagaattagtttttgttttgaccttgaaaaggacttgaaagtatttactccaaacttactttacacatactaaaaatatagtttttgaaaaaagaaagttgatgtggcttttcagatcttgggtggagatccttcagagctcgatagaaagatcattattctagaaggcggttatgcagcgcccacaggtggaaatcaaccgcccgcggggttgcggggcacaaagaggcagctagcggctccgctgaccccttcccgccggcctggacgaagtctgggctcgagcacgtgttctccccggtgcccggggctcccacaccaccgcccaatcgctgcggccgcctagtgctcgggccgcgcctgccggccg

SEQ ID NO: 10419 - DNA, 616 bp, Homo sapiens
  source 1..616: mol_type = other DNA
aaaaaaaaaagcatacatttgtagtcacagaattagtttttgttttgaccttgaaaaggacttgaaagtatttactccaaacttactttacacatactaaaaatatagtttttgaaaaaagaaagttgatgtggcttttcagatcttgggtggagatccttcagagctcgatagaaagatcattattctagaaggcggttatgcagcgcccacaggtggaaatcaaccgcccgcggggttgcggggcacaaagaggcagctagcggctccgctgaccccttcccgccggcctggacgaagtctgggctcgagcacgtgttctccccggtgcccggggctcccacaccaccgcccaatcgctgcggccgcctagtgctcgggccgcgcctgccggccgcggggactccgggcccgggtattcgcgccgccgccgcccgccatgcgcttccgctttggggtggtggtgccacccgccgtggccggcgcccggccggagctgctggtggtggggtcgcggcccgagctggggcgttgggagccgcgcggtgccgtccgcctgaggccggccggcaccgcggcgggcgacggggccctggccctgcaggagccgggcctg

SEQ ID NO: 10420 - DNA, 541 bp, Homo sapiens
  source 1..541: mol_type = other DNA
aaatgcctttgtgtgtctttaattcacgtaacagatttgtgttatgttaaatgttagtgaatatataaacctaagaatacaaggataattttgttaaagaatcaaaaatcaggacattcgtttgtcttatggcagagacaaattgaagttctatacgtattttggatttgggccagacagctaaaaaacctgtttcaacttaaaacccaaaaaggttttaagttgaaaaaataatgctgacttttgctgaaagtaaattttaaacaaaggtttttttttttaatttactccattaaaaatgcatacatttggacagagcgagactctgtctcaaaaaaaaaaaaaaaagcatacatttgtagtcacagaattagtttttgttttgaccttgaaaaggacttgaaagtatttactccaaacttactttacacatactaaaaatatagtttttgaaaaaagaaagttgatgtggcttttcagatcttgggtggagatccttcagagctcgatagaaagatcattattctagaaggcggttatg

SEQ ID NO: 10421 - DNA, 663 bp, Homo sapiens
  source 1..663: mol_type = other DNA
ttattttcctaaacttactctaagaatatcttttaacagcaatttgaaatgccactgtgagaatcagtgtttatccttaagcttagcaaccaacatggaatatcaacattcaagagtaaaatgtattattagttttctaataaatgcctttgtgtgtctttaattcacgtaacagatttgtgttatgttaaatgttagtgaatatataaacctaagaatacaaggataattttgttaaagaatcaaaaatcaggacattcgtttgtcttatggcagagacaaattgaagttctatacgtattttggatttgggccagacagctaaaaaacctgtttcaacttaaaacccaaaaaggttttaagttgaaaaaataatgctgacttttgctgaaagtaaattttaaacaaaggtttttttttttaatttactccattaaaaatgcatacatttggacagagcgagactctgtctcaaaaaaaaaaaaaaaagcatacatttgtagtcacagaattagtttttgttttgaccttgaaaaggacttgaaagtatttactccaaacttactttacacatactaaaaatatagtttttgaaaaaagaaagttgatgtggcttttcagatcttgggtggagatccttcagagctcgatagaaagatcatt

SEQ ID NO: 10422 - DNA, 500 bp, Homo sapiens
  source 1..500: mol_type = other DNA
aaaaggatgacaacagtgttttcctggctcaggggtgggggcgggtgagcggctcccaacacccagagctcctgtccctcggccgtagaccaaggcttggtggtagaccctggtgggctgtcccgtccgggctccagagaggctccgccgcccgccgggatccagggctgagctctcccggggggaggtaaaacccgacaggggataacgggtcacagcaccgtcctggcactaagtcacgggacttgggcacgctgagttccagtgccccagagtcaagggatcggggctgctgctccttcccctctgggaatgtacgattctaaaatcgaacagcaccgccggggcggagccttacggggcgccgcgggaatccgccacgacgctgcggggtcagagggcggcgtgcgcgtccccgccgggactgcgtgcgcgtccccgcccagctgtcggcagaagccgggccgggtgggcggggcgcagcggggcggggcgcgcgc

SEQ ID NO: 10423 - DNA, 266 bp, Homo sapiens
  source 1..266: mol_type = other DNA
tccctttaaaggtggctgctttatagcagtaaaatagatgcttttgcagaatacggagtctcatcctgcttcagcctcccgagcagctgggactacaggcgggtactaaagtggtgggattacaggcggggggagtacagtgggggcggggtgctctgacgagcgcgttcgccttgaccccacgctacagcgcgcgcccggcagctaggcgctgtggtttctgggtctcccgggggacccctacacgttccccactcaagaggctc

SEQ ID NO: 10424 - DNA, 287 bp, Homo sapiens
  source 1..287: mol_type = other DNA
ttggacaagaacttagttcaagtgcttctgtggtgctgctattaggtactcactaactaagtactgagtccccagtgtttcctgagggttatttcacaggctcctgaccctgaagcctctcagagttccctttaaaggtggctgctttatagcagtaaaatagatgcttttgcagaatacggagtctcatcctgcttcagcctcccgagcagctgggactacaggcgggtactaaagtggtgggattacaggcggggggagtacagtgggggcggggtgctctgacg

SEQ ID NO: 10425 - DNA, 485 bp, Homo sapiens
  source 1..485: mol_type = other DNA
aagtttcatggaacacactgaagagtatttgaacatggcaccattccataatataataatgacctgagctctgctcagtagaaagacacactgtcacttgtcttttcccctgaggccacattctgctcagccaacatgttcccagaggaatgtgatttaacttccgcttttcacacagtcagaagtagttacatcttgacctgaaaatgcagccacaatatgtagaatgtctgcactctgtttccctctgtagggactttactcgcagaaagagaaaatatatttgagtccctgagatatatatacaaagatatctaccccaaagcagcctaggcagttctccacttctttggcctggcagcttctatacgatcatatactgatttttatacatgagataatagacaagccttgggtgacctgttttcctctttttcccttgcggtaaaatagtgctgaagaaagagggcactagtgtacagccc

SEQ ID NO: 10426 - DNA, 343 bp, Homo sapiens
  source 1..343: mol_type = other DNA
tcaaagcgtcccttgcaggccctgccagggaatgtctggctggaccgagcactgtccagggtcctgaaggcggcagggctcaggctgccgcggcgagagcaacccggaagctcaaaattaaagtaaaaggtgcatcctttgtttacgtttattttaaagtttccaaattttcttctgaaaaaaagttgatcttttccaatccggaaaggcgagttggcggggctctgcgccgcctggacccgtgaggacagagggggcaggacaccccgccttcctcagtgaccacagctgcgctccaagctgttcctgcagcgagttttaacacaggtcctctgatgacaag

SEQ ID NO: 10427 - DNA, 434 bp, Homo sapiens
  source 1..434: mol_type = other DNA
acgatttttgcaatatcacagaaaatatttgtgagccatatatctgataaggggttggactttttttttttttccagaggaagtacaaattgctttcccatctaaaggggactgctcgcgacccaagccaaggcccgcaagtgtggctctccctgcggggaccaggccagaggcttccaggctgggcccggaccccacgccgaccccggccccggggggggctcagcgacctcggcgcctcctcaggcccccagtgaacctccggggcccataaaggctccaggccggctccccggaggcccaccagcgggcgtctgggcctccctccgcgccgcgaccgccaggaggcgccgcccgggagaggaagtccagctgggcccggccgggcttcggaggcgccgcccgggagaggaagtccagttgggcccggccgg

SEQ ID NO: 10428 - DNA, 478 bp, Homo sapiens
  source 1..478: mol_type = other DNA
cacaatattttgttttgttttgataaatttgcaagctcttgcagtctaagcatgtctcagttaagcatagtatccactactctgtagtcctcaaaacagaactgtgagttaggtataactcctatttataagtgagtaataggcatctcctatttataagtgagtactgatgactgagccttaagcctgcgccctaatgaccttttctggaaagtctgcaaaggaccacaacaacaagacaccttattggttttattaaggttttcaagccattgataatgtctccttagtaattattgaaggtacttgttatatttagccaacgttcaaatagttggatattcaagtaggtcctgcagaactccaaagggaccaactccaagttcctccacggggatgtgggatttccctctgcagccacaggccgcagagcccgcccccagggccccgcccccgctctccgggcgctggacgcggg

SEQ ID NO: 10429 - DNA, 600 bp, Homo sapiens
  source 1..600: mol_type = other DNA
tggactttttttttttttccagaggaagtacaaattgctttcccatctaaaggggactgctcgcgacccaagccaaggcccgcaagtgtggctctccctgcggggaccaggccagaggcttccaggctgggcccggaccccacgccgaccccggccccggggggggctcagcgacctcggcgcctcctcaggcccccagtgaacctccggggcccataaaggctccaggccggctccccggaggcccaccagcgggcgtctgggcctccctccgcgccgcgaccgccaggaggcgccgcccgggagaggaagtccagctgggcccggccgggcttcggaggcgccgcccgggagaggaagtccagttgggcccggccgggcttcagaggcgcagggcgggagccgcctcgcgcagggtcctccccaagccggcgccaggccctgccctcgtccggccctgccctcgtctggccccgcccgggccgcgagcactggcgggttctgggtcctgtgaccggtcaggcggcgtcagcgggcgcggcggagggctggccggcctcgggggagtttccgcggccgccgggggcgcggcggcagagc

SEQ ID NO: 10430 - DNA, 761 bp, Homo sapiens
  source 1..761: mol_type = other DNA
gcaagagaagcagctggagaaatttagccagcgtctgggattttcgcagaaagccccagcttcgctcgggctggggggctgggggcctgctgggccagggtgggggaaccgggctgcggcgcgcatgcgcaggtaccgcagcccggctcctgggaggccctgctgccgccaccgccgcggcccgcgctgtaaccgcggctgccgctgctgctccgggcgggcgttggtgccgtgtgccgaggcgccctgtcaggcgatggggagcggctgggcggggagagccgacggccgcggcggcgcctgaggaacgcagccgggctcgggagcggcgagggcgggccggtccagcggcggaggagcgaggcggggcgaggcaggcggcgcggggacccacaccaggcgccttgtgtgcgaggccgagcggcggccgcggacagagagccggcgacccccggcaggacgcgccgagggactgcggggccggggcgggcgagcagcggcgcggccgcgggccatggacgcagcggcgacggtggcggcgccgggggcgagccggggcggcggcgcggcgcagagtccgcccgcggccaggtgaggctgggctgagcgggctcgggcgccgccgccactgctgctgctgctgctgccgggccgcggagcgaggcggcggcggcggcggctgaatcggcaccacagcagccgcgccaagcagcggcggcctcggaggaagaggggtcgccgcccaggtttcttgcggccgc

SEQ ID NO: 10431 - DNA, 674 bp, Homo sapiens
  source 1..674: mol_type = other DNA
gttttgtgaatgtcatcaataaaatcaacagttatggattgtagattaatatactatattagctgcaattatttaatttgctgtgttattttgtgttatataacacaaatatatttgtatattaacttcatttttactgtcatttttcctgttgtatacaaaatgaactaatcttgtaattattttcaaatatagaagtatatacattagatggatttccaagattttgtaagaaaatcttaaatcagtgttttgagttatttaatttttaaattaatctacaaattatgcacaacaaaagactcttaaagtatgtttgagtggaaataagcttctcagagttatacttgattctgtctgtagataagagacagtctacagtaataacagggaatttactgtaatttgagaggtaacatctctatttttttctttttaaatacagaaagtaatagtcaagaaaaatgaaagatttttgttccttgactctaaaatcactgaagtattcatgattagtagtttgtaagttttctgtatgtaccatatatccagttcatttcagttttcaaactaaaatccatatgtatttgctgagaaagttatttgaaatcttatattctgacaaattctgtacattacatttgcatttcaattgtacaaagtgtttccaaaaa

SEQ ID NO: 10432 - DNA, 301 bp, Homo sapiens
  source 1..301: mol_type = other DNA
caaataatttcttggaaatatctctctctatatatagggtatatatttatagcattaactgggaaaagctatggcaaatacgtcctaataggccatggcaatcacgatgctattaggatatgcggaaatgccccggctccttttgctaattggaactgtatatatgtgaatgtctaaattatttcatctcctatatctcttcatattctaccatttattacatggaagtgcttgaagttcaccagcagtgttgggccctgccaaaatctaccctcgctgttctcgcgatagtgagagagtt

SEQ ID NO: 10433 - DNA, 330 bp, Homo sapiens
  source 1..330: mol_type = other DNA
taaagggtaaaagcagtttttgcatttgagtttccaaatgtccgagaaacgttcattgaaagtgtaaattaatcaatgagttgtgcctgagatgataaccacagatccagctctctcctgcctcttttcagaaaaaagtgagaatattataagcacctatatttttatatggctgtttaaaatcctaattgaagccaactttggttaattttgcctgcaggattataagcgcctgtgcacatggcagtgtcagttgccttgtcataagttttgatttatattattatcttcttgaatgagacatatctcgattttgaatcataactgtga

SEQ ID NO: 10434 - DNA, 369 bp, Homo sapiens
  source 1..369: mol_type = other DNA
tccagtgattcattcaacagtttataaaagccttttgaagggctctaaaaacctgaggtcataatataaaaattatccaggtgtggtggcacgtgcctgtaatcccagctacttggactgcactccagccgtaccagttatttattggggcatttatataggttagtccctatttcatacacagccaggtgccatgatgtgggtggcctgtgacggctgctccctgtcgtgactgccaccatgcgctggaagcatctgttatatggatgctggaacccccacgttccttctttcaggtgggactgaggaatgtcccctctcagcaaccagcgtcactgggagacactttgatagctccccgagggtaca

SEQ ID NO: 10435 - DNA, 577 bp, Homo sapiens
  source 1..577: mol_type = other DNA
tcacactcacaatattaattttaaagaatagactgttttccaaatatatgtatttaatgtgactatcttctgactattcactgatgttaccaacacctaaacttacttgtgtagggaagtgccatgcacattaacttttaatattttttaagactgtataaaacttttgttttattttattaaaagggaaatgtttctatgtttcctttagatgtcttcaaaattcatgtttttgtaacttcttttcagggttattaaatcaggttaaactagattaagcccagagtttgaagcctggcatatcagccaactctacaaagtggtctcagaacagaggacattctgagatgtacagtccattgatgaacactaatcctagaacattaaacttaccgtgttaaatggatttctgtttcttgagcacaattcgatttcaatttgtggattagttactaaaatatctggatttctatttaaatgttctgagatacattgaacccgaagaatgaaaaggcctcaggaagcagttactgcctctcttatcgtcctgaaggaattgaaaacagacgatctgagt

SEQ ID NO: 10436 - DNA, 431 bp, Homo sapiens
  source 1..431: mol_type = other DNA
gtttataaatttagttacttttgaaaatgtttttacattttgaactttcctgtaaggacccattgcattgattggtgctcacagcacttcttgaaggttcaaggacatgctcttatcccctttcaagcagggctctctcttagcaaactccatgtggtttcttaactgtttcaaaagtgatcaatcaccaaatcgtgtcaccttccaaggaaacagggctagttcccttataaaataaatctgtcctggggcttccccttggaaaaacacacacagggccccaagtgtgtgtaggctgactggctacacaatcatttcccttaattagccgaaagccctagcaatgcatggcattgtgggcattcaggctcgtgcccaagctttcacacttgcttaaagattaacggagaccgcggcgcggctgctctttc

SEQ ID NO: 10437 - DNA, 400 bp, Homo sapiens
  source 1..400: mol_type = other DNA
tgtcaccttccaaggaaacagggctagttcccttataaaataaatctgtcctggggcttccccttggaaaaacacacacagggccccaagtgtgtgtaggctgactggctacacaatcatttcccttaattagccgaaagccctagcaatgcatggcattgtgggcattcaggctcgtgcccaagctttcacacttgcttaaagattaacggagaccgcggcgcggctgctctttctgcaaagagcctgacatcagatttgttgctaaacgctttctttagcctaagagaggggtcccggggagctccctccaagatccccctgccgggtcctgccaagacttgctagaaggaacgagtcgcgtggaagaaacagcgaattccccgccgtacaactcagt

SEQ ID NO: 10438 - DNA, 450 bp, Homo sapiens
  source 1..450: mol_type = other DNA
cctcttcggctaccctacccgggagttcaggcgctgtttctgaactgaaaaaaatagggaagtcagcggggcccccaagaggtcgctggtggcgaaaacacccagaaactttcttccttgttgtggagcgaggggatggtgtccgcctcctgttcctcccgccggggggtccacgctggcgctggaggcgagccccggcggccgcaagcgagcccgaggcgcggcggggcgcggggcgtggggacgctagcgggcgccggacgggcgcggcgccccgtcacgggcagcgccccgaaccggggccggacacctcggccgctcgggccgcggcggcggggaccatgccgaagaaagtctcctgagcccggctgccctccgcgcggccctccccatgtgcagccggccagccgggctctcctcctcgcggcggatgggtgaccttttcctggc

SEQ ID NO: 10439 - DNA, 637 bp, Homo sapiens
  source 1..637: mol_type = other DNA
cgaaaccctcgcagcatttagatttcagtctcgagttgtgaggcggtccctcccgttagccggcggtgcgatccggctccaagggggtgtgtcccggaccgcagcgacccggcgccagcctccgccgcgggcccacctgctcctctcggccgccgcagcgccccggggtccggccgggcccccggaccccacccgcgcggcgccgccggccgcccggcaagtcccgccaccccggacccggccagcccctccgctaggtgcagctgggacgcgagctctagcggcccccgtggcgggaggtggaacccgcaacctacccccaaggatggggggcccaggcggagaaagggggtcccagccctccccgggctgcccgcaccggcacccccctcgcacggccccagcggcggcccgcgtcctccctccagccctagcaagacaggcgtagagacgaggaagagcatccccgggccgcagccgcagccgccgccgccgccgccgcctgctgctcccccgccgttcggctaggggaggcctcgtcacagccgccgcctcagccgcggctgcagatctcgcggtgtttgccggccgccgcgccgccatattgtgctggcggagccgcggcgaaggattgggg

SEQ ID NO: 10440 - DNA, 730 bp, Homo sapiens
  source 1..730: mol_type = other DNA
tccctcccgttagccggcggtgcgatccggctccaagggggtgtgtcccggaccgcagcgacccggcgccagcctccgccgcgggcccacctgctcctctcggccgccgcagcgccccggggtccggccgggcccccggaccccacccgcgcggcgccgccggccgcccggcaagtcccgccaccccggacccggccagcccctccgctaggtgcagctgggacgcgagctctagcggcccccgtggcgggaggtggaacccgcaacctacccccaaggatggggggcccaggcggagaaagggggtcccagccctccccgggctgcccgcaccggcacccccctcgcacggccccagcggcggcccgcgtcctccctccagccctagcaagacaggcgtagagacgaggaagagcatccccgggccgcagccgcagccgccgccgccgccgccgcctgctgctcccccgccgttcggctaggggaggcctcgtcacagccgccgcctcagccgcggctgcagatctcgcggtgtttgccggccgccgcgccgccatattgtgctggcggagccgcggcgaaggattggggagcggcgacgccgcccagccgtcgttctgctgcagccgccggcggggcgacccagcccgaccccctcccctccccctcagccaggagcggtggcggcggcggcggccggagggagttggcggcggcagggagggctgag

SEQ ID NO: 10441 - DNA, 404 bp, Homo sapiens
  source 1..404: mol_type = other DNA
ttgctgcctgaatcaccaaatttaggaaataatttcagagttctgggagaccaggcagtctgcagaatgctgtggtcaggtgggttcagacttcccctgccacagtgggagagaagccagttatctctgacacaggctagtgccttggtccctagtcagaaggacttcgtgactcggacaggagcagctagaatctgatcatcttctcagctggaggcaggagaacttctgttccaagttcccacttggaacagggctgtgcagccaatcccagccgtcctcacggacttgtactcatgctgagaaactttcttcctttcctttttttttttcttaaaaaaaaaaaaaccaaaaaaacccgtggctgcttggcgcacgccagctgccctcctctgactccagtg

SEQ ID NO: 10442 - DNA, 359 bp, Homo sapiens
  source 1..359: mol_type = other DNA
ttgctgcctgaatcaccaaatttaggaaataatttcagagttctgggagaccaggcagtctgcagaatgctgtggtcaggtgggttcagacttcccctgccacagtgggagagaagccagttatctctgacacaggctagtgccttggtccctagtcagaaggacttcgtgactcggacaggagcagctagaatctgatcatcttctcagctggaggcaggagaacttctgttccaagttcccacttggaacagggctgtgcagccaatcccagccgtcctcacggacttgtactcatgctgagaaactttcttcctttcctttttttttttcttaaaaaaaaaaaaaccaaaaaaacc

SEQ ID NO: 10443 - DNA, 398 bp, Homo sapiens
  source 1..398: mol_type = other DNA
atttcaaagctagaattagtgttctaatgctaaggatttctgattgaactttcaaaaaaatttatttatttgtttttgagacaggatctcactctgtcacccaggctagagtgcagtggtgcaatcatagctcactgcaccagagtggctgggacaggtatgtgtcttgaactcctgggctcaagcaatcctctcgccttggcctcccagagtgctgggattgctgcctgaatcaccaaatttaggaaataatttcagagttctgggagaccaggcagtctgcagaatgctgtggtcaggtgggttcagacttcccctgccacagtgggagagaagccagttatctctgacacaggctagtgccttggtccctagtcagaaggacttcgtgactcgga

SEQ ID NO: 10444 - DNA, 395 bp, Homo sapiens
  source 1..395: mol_type = other DNA
aaaaaaaaaaaaaaaaaaagctttggcttttcgtcagatgtgagcttgcccagaagagtgtcaaacttgcatggcaaaatgttagttttggccaggcgccagcgggaagagttcgaactccttgagctcaggagtttgagactgcactccacccgccgcgggcgccccctggtggataaaagggccgcgcggagggccgctctgctcttgaccgttctaaacggccgcgccgggggcgggaccaacccgatccgtaagtcagctgggcagcccggcgcccgcacgccgaccggaaggaactgctcggaaccgggggcggcgccggcgagatgacgcggggtcgcgccgagggtgacgcgtggcgtagacgacgccgtcggcctgcgcctgtcacc

SEQ ID NO: 10445 - DNA, 658 bp, Homo sapiens
  source 1..658: mol_type = other DNA
aaagagagaaatagattcttgtttcctttttcatgtcaaaagttttatttcatgtcaaaagttttatttcaaaggaagactaaatattactcttattctgcctcaatcaacatgcaatcctgttaatctaaaatgcttgaatttctttttttttttaaatctgcaaggtggaagaaaagtctaacactttcactttagagttcagctgagcgctgtccccgcgccgcctccaggggtcggcagaatgctgaacagtaagcatggcgcggcccgagccgcagcccaggctggaaagtggggtgttcaggaagaccccagtactttttaaagctgcccgggagagtataaaaacttcccctgtaaatgcgatgtttcatttttaatgtataacagttttctgaaatattcgtataggtacatgtacatgtgcacacacagacacatgcatgtgtgtaaatactaattttaaaaataatggttacgaggacatttacttcactccgcccctcgacgccgcgcggcgctgcgcgtgcgcaaacgcctttccctggcgagccggatctcggagcgtccccgcgcctctccgcggccgcccggggaggggagggcccgtcccgcccctccccgtctctccccgccgccgaagctccgtcccgcc

SEQ ID NO: 10446 - DNA, 393 bp, Homo sapiens
  source 1..393: mol_type = other DNA
atagggcctcactttgtctcccagactggagtgcaatggcgccatcatggcccactgcagccaggctggtcttttaatgttagaaacttaattaccttgcgtttttaaaggacatatctgtaagtcatgaaatagcatcattttccttgtctggtcatattaaaacggtgattaaaaaatcaagaaaataaaatccccatgaaatactaggttctaaaacaggatttgtcataaagtacagaggcgcgcgaggtagtaccataataccatctacaccctatccctggtctccgctgcgtccgccgggaggaggcggtgcaagaatgcgcacgcgcggccccgggcccggccacaccctcttccgccgctcccgcccagcgacctcgctcccgg

SEQ ID NO: 10447 - DNA, 380 bp, Homo sapiens
  source 1..380: mol_type = other DNA
tctagatacagtaagtagccagttattactttaacgtcagaaaaagatgtctttaatttttttgtactctgtagtagaaaaattacgaaagaattcagcttaaccagaagtaaaacagataagatatttcttatctgccggattcagaaaatacagaataaaattttatttcatggaattctgaggtccacagggaggtttcccagagcaactcagttgttcccttctgagaacgtagctccgtgaaatgcacccacgggcgcgggcgagtcgtatggggcgacgctcctgcgggcgacgcaacgaagcccggaggccgcaggctgcgcgctccctcgcagcagccgggcgggcaaaagcccccagtcctcggcccccgc

SEQ ID NO: 10448 - DNA, 327 bp, Homo sapiens
  source 1..327: mol_type = other DNA
caggctggagtgcggtggcgcgatctcggctcaattagctaggccgggcaatctagatacagtaagtagccagttattactttaacgtcagaaaaagatgtctttaatttttttgtactctgtagtagaaaaattacgaaagaattcagcttaaccagaagtaaaacagataagatatttcttatctgccggattcagaaaatacagaataaaattttatttcatggaattctgaggtccacagggaggtttcccagagcaactcagttgttcccttctgagaacgtagctccgtgaaatgcacccacgggcgcgggcgagtcgtat

SEQ ID NO: 10449 - DNA, 329 bp, Homo sapiens
  source 1..329: mol_type = other DNA
acctgtagtcccagctaccctggaagctgaggtgggagatgtcttaaaagaaaaaaaatggtgttgatttagatcaacatttcattcttaatcatgcacgtaattgaattgatcatctttcagaattccaactccaggctctgacagtgtgtattaactttgaagcaaagtatccacgagtatttaaggatttttgaatcttttgcacttaaattttacactgcacaattattgaacacattaggagcaagtcctactgctcaaaggccaaagcgctcttgcctttgctcagagctgcagtctaggtactgactgtgcccacactggct

SEQ ID NO: 10450 - DNA, 263 bp, Homo sapiens
  source 1..263: mol_type = other DNA
ctagaatttgaaaattgtgctgatatagtggcacagatgtcccagctactcgggaggctgaggcaggaggcgccactgccagtcctcaggtctctcagtgagcttctcactcatggtcttaaaggacacagtggtattttttaaccaacaactctgtacgttggaaggactctgagagctttagaaccggggttccaaagtctctgcttaggctccaccgacccaaatattagtcaactgggttgggcgggagcagatccgcc

SEQ ID NO: 10451 - DNA, 623 bp, Homo sapiens
  source 1..623: mol_type = other DNA
ggctggagtacagtggtgtgatcacagctcattgcagtcgtgtttttaaacagactgaacacacatcttgggaaccgcgtgcccccctctggagtagtcccgggggtcacgaggaagacaggccctcccttccccccgaatgccaagcccctgtgggcaggcgccctgggcaggtgtgggcccagacatgaaccctgccctagctgggcagcggcgcgggagcaaagttgttctgaggctgccctccccggggcctgctctcccagccctggaggagccggcgcgagacgcgcgggggcggggccgcgcgggggggcggggctcaccaaggctccaccccgccgcggccagtgctcaacgccgaggccgactcgtcgccacccagcgcgccgcaggccggggcggagaggcgcagggcgctgggcagtctccggcgagggcaaggagcggtgcccggctgggccggctatgtctcccgctactgcggttcccgccggcgcccgcgacctcgggggagcagccgggttcgggggcgccgcgctgtgaggccggggcctagagccagccgcggccgcgcaggaggggcccagggcccgcgctcgcccgcgtccccgccttcctcc

SEQ ID NO: 10452 - DNA, 318 bp, Homo sapiens
  source 1..318: mol_type = other DNA
tacccccaaaacttaaagtataataaaaaaaaatttttttttgtagagatggcagtttcgttaattagcatctatgatagtgcctgatacatgtagtagacactctgtgtttattgagtgactcaatatgttttattacaattacacacacacacacagagctcacataacctccaaccgagtttattcaaagttaattttgtttttaaatgtcttcttttatttttcaataaatgattatattctgaatacttggaaaacactctcttcacaaaattgttctcttcaccataccagtgagggtgaatgtgtacacgc

SEQ ID NO: 10453 - DNA, 385 bp, Homo sapiens
  source 1..385: mol_type = other DNA
agtgagccgtgctcatgccactgcactccactatgtaaccattacttcagtttgcagttggaaaatggctattccttcccatcttcaggttggctcaggccaagctgagatgcaacaaaggtggaagggcccctttcccctttctgccacccccgctggtgtccccacagcagcagtattggcagggcagtctgtgtactctcagggcctggatgtgtacagaacaggctccactcaggacgattgaggttctttaggggacatgtaaaaaatgtgatctagttaagaaaggacagtggtaaagacccacttaccttaccaggcatcataagggccctagcatctgagtcacaggatgtcaccctctgggtctgacatgcacttg

SEQ ID NO: 10454 - DNA, 357 bp, Homo sapiens
  source 1..357: mol_type = other DNA
gaaacctggtggcctagaaccagggtcgagtactagatgacagtgaaatcatagatattttatttctagtccaaagaagagataagaaagaggaaataggtgattttttttttaaattattcacagccttataacataaagctcgtagggccgctgtcacagctatgccagaaaggtgggggcccccacctacatatcaaggaaaacatatgtatgccatcacatgctggtctccaacaactgctaaaattacattaaatcctttctagaatttcgtgtgaatccagtactgaattggatccaattctggacgagttaccctgtcctagaatcactcacacgtgccggcctctccac

SEQ ID NO: 10455 - DNA, 332 bp, Homo sapiens
  source 1..332: mol_type = other DNA
agacacatatttttaagataatttttaaagctgtttaattttggtaaaaaagtagaacataaaatttactatcttaaccaattgtttagtgtacaatatcttctttgaagcttctgaagaccccccgggccaggcctgggtgcgcgcacctgtggtcccagctacacccagatcgcgccgctgcactccagcctgggcggcagagcgagacggtacaggcgaggacagggagaccctgtcgcggctcacattggattaatacaaaatgaaaaagtcccgggcaggcagccagcaaagtctgactggctacacctgattggctagcggctcag

SEQ ID NO: 10456 - DNA, 535 bp, Homo sapiens
  source 1..535: mol_type = other DNA
atctaggaacaagacataattttttaatatatatttttaaagctgtttaattttggtaaaaacatagaagataaaatttaccatcttgaccagttgtttagtgcacaatatgttgttttatagcccgggccaggcgcggtggctaacgcctgtatcccagcactttgcagctactccggaagctgaggccagagaatcccttgaacccgggaagcggcgattgcggtgagccgagatcacgccactgcactcctctctaaataaataaataaataaataaataaataataaggggacgcgatcaggcccgtggctgcgcccagagcatgataagccagggacctcgcggcgcaggcggagcgtcgcggacccaggcggggacagggagacgccgccgccgctgaatattcctctgcaagtttcttcaccttcaataaaaaaatgttgtgatgattaaatgtcttggcaggagccgggcggacacccagacaccaacccgatgacccgcttgacgctatgacagcggaaacggggg

SEQ ID NO: 10457 - DNA, 430 bp, Homo sapiens
  source 1..430: mol_type = other DNA
ggctaagctgcggccaagagccactgggccctcccttttgaggatggctgcagggaccatccaggttgttagacacagaagggtgtgtagcaaagtgagccccacgcatgcgtagactctttcttttctttttttttttttccagaagtcataaagggatatagaatatactcaaagaccacctggctgcgccctggacggagtgtcgctggcgcaggcggtgacagggagacaccgccgccaagtgtttacactggggtaatgataaatgcaacggcgtcctggcccgctcggggcccgcgcacgccgccaccaagccgcgggggcgggtcggaggggagaccaggccgctgtcagatgacgagcccggggcgtgacggcccgcccagtgtatccctgcgcgcggcgggccgggctgggcagctttata

SEQ ID NO: 10458 - DNA, 259 bp, Homo sapiens
  source 1..259: mol_type = other DNA
atacaatattcccagctacgctgcggcgagccgacatcgggccgttgcactcaggcccatggctgtgcccagggcggggtgagccagggaccccgcggcgcaagggacaaggagacgccgaggccgctgaatattcctctgctttcttcaccattaataaaaaatgctataatgattaaatgagtctgtcgtggaaggaatcgtgtcctggcaggagtggggcccgggcacgaggccaccaagctggcagcagccgcca

SEQ ID NO: 10459 - DNA, 344 bp, Homo sapiens
  source 1..344: mol_type = other DNA
gacataaattgttaagataatttttaaagctgcttaattttggtaaaaacatagaacatagaatttaccatcttcaccaattgtttactatacaatatgttgttttgaatcccagctacgctgcggcgagccgacatcgggccgttgcactcaggcccatggctgtgcccagggcggggtgagccagggaccccgcggcgcaagggacaaggagacgccgaggccgctgaatattcctctgctttcttcaccattaataaaaaatgctataatgattaaatgagtctgtcgtggaaggaatcgtgtcctggcaggagtggggcccgggcacgaggccaccaagc

SEQ ID NO: 10460 - DNA, 548 bp, Homo sapiens
  source 1..548: mol_type = other DNA
tgcggccaagggccactgggcccatccgctttgaggatggctgcagtcaccatccagggacagggcagagatgcgcgtgcagccatggatttgcgtgtagctggccacagatgggtgtacagcaaagtgagccccacgcatgcgtagatcatttgatcactgatctttcttttttttcccagaagtcataaagggatatagaatatactttattctatatatattctatatattcctcatggactgggaagcagctgcgccctggacggagaggggcggggactccttggcgcaggctgtcgctggcggaggcagtgacggggggacacagccgccactggatatccctgcccgcgccagagggggccgctgtcaggccacgagcccggggcgggacgaagcggagccacagcaggcataggctccccgggtcccagcctggggtggggcggggaagggcgggagatagggcggagcatccctccaaacgtgggcaggcgtaggctcccctggatcccggggcgggacgggaccggacggggccgagc

SEQ ID NO: 10461 - DNA, 548 bp, Homo sapiens
  source 1..548: mol_type = other DNA
aggcctgagtctgttggccagatgcctgcagcaggggtgagtcaggagggcccaggtgtgcacaaaagcccctcctcccagtcactggcccaggtcacctggcctcggggtggtgctgccagggccttcccagaggcctcctcccaggactaacctgggctcctgcccccagccctgtacatgctctgcccctcccaaatctgagaactgccccctcctgcacaggggctctagtgcatcaggccagaatcttctaggctcctgtgtccctgctcagtcacagaggtggctgccctcccatgactctgtcctgaagcagaaacaggccctgggctttgtccaggcctcgccctcgggattgatgatcaccaggtgcaggtgattcattcaataggctgagtgtgcggccaagggccactgggcccatccgctttgaggatggctgcagtcaccatccagggacagggcagagatgcgcgtgcagccatggatttgcgtgtagctggccacagatgggtgtacagcaaagtgagccccacgcatgcgta

SEQ ID NO: 10462 - DNA, 369 bp, Homo sapiens
  source 1..369: mol_type = other DNA
cagacgccttgcctgagcgccgtcacgctttggatacgagatatccgaatgctgtgcccatgattaagcctggaaataatttctcaagcgccgtgaacatcgcctcttcgatgtttctcacaatccagagaggaagttcgctgcgggtcctgcccggggccgcgccaggtggaggccccgagaggcggcgcgtttcctgcgctccgggattgcgggagaagcgtgagtccctgtctccgagactagaggccacggacacccgcgcaggaccccgcggagactcccacgccccgggccctctctgccgcaggcgccagatcccgcctctgggggctggaccgagagggtcctcggcggcaggctgcggtc

SEQ ID NO: 10463 - DNA, 221 bp, Homo sapiens
  source 1..221: mol_type = other DNA
ggtaagtgggtcactcaactgaccctcagaggttttctgttaaatttaaaaagaaggaaaagagatcttctctctttgtcattccacactgtcttggatccagcctggaatgtaagctgcctcctcgtctcctagagtccagggggttccattgaatcaacttgaaccccatcagacttcagcagggaaagaggaaggctgagctcatctctttcctctga

SEQ ID NO: 10464 - DNA, 422 bp, Homo sapiens
  source 1..422: mol_type = other DNA
caggctggagtgcaatggcgctgagaaataaatttatattgtttattcagccataactgactaagtactgaagtaattacataatcaagttgtcactttaattttttgtgtcgatcaaagtttttctctgatgcaaaacatgatattctctttactccatatattggctcatgccatttaaaatgccagatctgagttggtgtgtggaaatctatttaaaaaaaacaaaaacaaaaattcaggtgatctagctagatctagcacatgcaagttcttactcagattctattgttgtctaagaatatatcgacagagtacatacttttaaaaagttaatggactcacatgtgactgtgatctttgctcctttgcaaagtcctcacagagttgaagagttctgcatttaaaaaccggtgtgggaa

SEQ ID NO: 10465 - DNA, 414 bp, Homo sapiens
  source 1..414: mol_type = other DNA
agcgattctcgagtagctgagaacgccatgttggccaagctggtcttccttaaatatatgcatggctcacacttatttcaatgtttaatattagaaaccacagatatgttgtaacttcaatcaattagtcaaactgttttccttaacgtgggtcccctggaggggccctggaaccaatcaggactataaaatccttttaaggttttaagaagagcacaagctcaccgagattaaggcgccctgagtaccaagggtcacctcggcctttcaggctgaagggagggaggctgagtctcagggcagagtctgagtcccactccgcacccctctggtagccgtgacatcccggccggcggctcgcaggcccccgccctccgcacgtcacggccgccgggtgcagtgccccctaggggc

SEQ ID NO: 10466 - DNA, 425 bp, Homo sapiens
  source 1..425: mol_type = other DNA
aagccttaatgctttgcgccaagcaatccagctacaaatttaatttagttcaaatacttattgattggctgccatgctcatgtaatacatattatattcaataaagtcttcatcttttgagaaaggctgacggcaaaggaacagatctatgctgtcatgtgtcggcagcctcatttccccccgttccccgggggaaggggggcggctagcactgctgatggcatcgcctgtggccttgccacgtgaggtgcccaaaagcttgcctttctcctgctctcgctcctgggcgagctgaaagtcggctgcagcagaagctcctgccttgggggggaggcgcccgagggccgggtgggcggctgcctggacctgggctggcgcgtcgcagcgcctctggtcccggcagcctgggggcagatgctgctgca

SEQ ID NO: 10467 - DNA, 495 bp, Homo sapiens
  source 1..495: mol_type = other DNA
gtgtattaaaattggaattgaagtattctagggctgcctgaaatcttctgaacttttaagagatatgatagtgtctaaaaattggaacatggcatagtttgatctaaaaagttagctaacttatttagaaaaagacatgctcaagtctgcttttgaaaagttgccttggtcaagtgttgaagacagcacttgttagaaggaacaagttcacttctgagagcccttctccactactgagagttgccagtctttggaggtgttggcaccacaatgcagttttccttgaaatgacttaaaaagctgagatacagaagtattagtaaatcggctcccgggactctgcagaacccgctgaccactcacagagcccagctcgggggagggctttaagggcacgtgaccccctgcttgtgcggcccgggcggggaagtttgcgctcccgaagtcctggagctcagcaagggaggggccagcgccagcccgcgtgtgggtggc

SEQ ID NO: 10468 - DNA, 399 bp, Homo sapiens
  source 1..399: mol_type = other DNA
ggccattgccagacaaaaccccattgtgttttaaacattttgatcagcagagctgcaaagatgaattcttgtccttctgagtgcctcacagattatcgaggataagccaggctggaatgcagtggcacgagtagctgggcgggattacaggcgtgagccaccgcgccaggcctcgaggccctttttcttttaaattaagtggggtttgaagagaccccactggggcggtccgcaggacccccgggggtttcctgggaggtcgagggctggcgccgggcgcgggggcttcccgggcccaggctttcgcgagctatggcagccggcaggggcgcgctgggcctcacgggcggctgttgggctgcccctgccggcgggctgcgcgcgccatgccctggtgga

SEQ ID NO: 10469 - DNA, 398 bp, Homo sapiens
  source 1..398: mol_type = other DNA
aaaagtaaactttaaaatgttaaaaatgaccatcaggaaattctattcatttttgggggggccaaaacttcaaaaacgaaatctgtacttcagcatgactttcagttaccattggtgacacaaagatactgctaagtcttaaagattatacctaaacactttatgtaaacaaggggcttgtgactcaggtcctcgcctcggctgcacatggtctgcagaagtttggctggagcggcagtggagtgctgcaggcggcggcggcggcggcagagcagcaggaggcggggggggggggcggagggggctcttgccgccactgctctctcgccgcctctcccccccggcgggagccgctcgccggtcatgtgaccttaacgtaaccggacaggaaaagcccc

SEQ ID NO: 10470 - DNA, 479 bp, Homo sapiens
  source 1..479: mol_type = other DNA
cagttcttactgtgagatgatcaacagaatacgagcagccgccgcgggcaggctccctccccggggccgcctcccttcgcctccgagccagtccgcgaaacccgcaaaggcgccccggaaagccgcgcccggcggcgggactcgaacgcagcccaccggggagcgggcgccctccgcttagtccccacaggctcccggcgaggcccggagagacgccgggacgacagccatcggctgttcaatcgccgcagaaacagaggcggtaccgccgcctttaaaaaaaaagtgcttttgaataaagaaactttatttggtgcccacagtggctcgccagaagacccaatcttccggggacgaaggcgccgggaggtcccagggcctacgacgcggctcacgtggtcagacagtcacgtggcccgagtttctcccgctaagtgtgcggctgcgcagtagcgagcgcctgcagtcctgccgaggaa

SEQ ID NO: 10471 - DNA, 429 bp, Homo sapiens
  source 1..429: mol_type = other DNA
ttcgatcgaatttttaaaatggctaagtcatctttttcctcaaactcaaaattattttatcgattggctcaaaaaaagggttcattaattgagtgctttttactcccagcgcgtaacccgtaactgtacacgttccgggcggccaggagccagggcgcagctccgccggaagagaagaaggaagcgccagggacgcacgcttcctcggcaggactgcaggcgctcgctactgcgcagccgcacacttagcgggagaaactcgggccacgtgactgtctgaccacgtgagccgcgtcgtaggccctgggacctcccggcgccttcgtccccggaagattgggtcttctggcgagccactgtgggcaccaaataaagtttctttattcaaaagcactttttttttaaaggcggcggtaccgcctctgtttc

SEQ ID NO: 10472 - DNA, 196 bp, Homo sapiens
  source 1..196: mol_type = other DNA
catagctaagaaataattgcctaatccaatgtcatgaagatttatgtctttcatctcagcctcctgagtagctgggactacaggcatatgacactgtgcctggattaacttctaaattcctgagtttatttctgaattctcaattagaacatctccagtaatggtttacataagcttagaaatatccaaatctcat

SEQ ID NO: 10473 - DNA, 325 bp, Homo sapiens
  source 1..325: mol_type = other DNA
gccaggcgagtgttgggattacaccattttcagattctgctacaaattgtgggactgatctggagcctgatcttcattctacccataatatgagcagctgtggctgttactaacactggtattactagtacccgtacttccaggcctacataatttgtggaccccggggacctgcacaggttttgcacacagtgtgtgctcagagtcccaccgggaggaccgaccgttatccccgccgactccccccaggtcgccctggcatcggccgctcagttgcaggccctcgccacggaggccacgctcgggggttcggggtccaccccgg

SEQ ID NO: 10474 - DNA, 745 bp, Homo sapiens
  source 1..745: mol_type = other DNA
cttcaggcaaattattagaaattatataaaattaatatacaaaagtcaatgtcatttcactataccctaacataagatgtagaaaaacttcttagaggaaaaattttcttgggaaatattaaagaagatctaaataagtagaattacataatattcatgcataagaaggcaacattttgaagacgtcttgttatacataggcctaggaataatatagttttaagctatattattttgaactgtagatgaagaaaagctctttttttccttgagtattttaagattttgaataaagtcatattgctctaggaatattttatacttctgccagcagtgtttatgtttaaaacctgatagcacacagtttaaaaaatttgtaattctccaattaacagtgacctttaaaaattatgtttactgatcatgttcacatgttccgttttaaaatagacttttaagagctctttgtattaagaatattaaggctttgtccatataattagtatttttcagaatacccttttttcagttccagtgcacagaatggaaatttcactagtatgtgatgtattcatcacaaacaacagtattggccaacattttccctcactgtgaagtgcacttctttcagtcagcataattttcccgaaagcagagatgactcttccagacttgctaccaatgcttgaacaaactgtgtaagcttagtccaaaaaaaatatttgattaatagattttattttgg

SEQ ID NO: 10475 - DNA, 534 bp, Homo sapiens
  source 1..534: mol_type = other DNA
gacagttaagatcattgatttcaaaatgttttaaagtgttgatttgagatgcacctcttacttggcaggtgttcctctgtactgggtactgggtctcactgccagaaagccagccttttttcaaggcttgtagagaagaaaaagagaaaatatttttaaaaattcatttaaagtaccatgatgagatattaaaatgtcaatattattaaaaatttttaatatgattttacagcccctttgctactttaaaatgtttatcttagtgttaaacaaacaatcaataacctcataaacttaaaaattgctgcaggctctgcaggttaccgaagtcaagaacctttagtttagctgtagctaactttggattaacaaaatttatgtgctgaatgactagacttcaagctttattacgaataaagagaaaatcggctggatggcataaaaaatatttcaggcagattaacacatgatttacctcttcttgaacatccatcttaatggacgggcctggcttggcaaaagcaaggccacccc

SEQ ID NO: 10476 - DNA, 388 bp, Homo sapiens
  source 1..388: mol_type = other DNA
cctccattgggtgtcatgtgtcctgggaccctgagcgtgggcactctaactggtttaaaacaaaggtatctacctttatcttatgttcatatcctaggcttttaataatacgtatttttcacatgtttacagaaagcagtcaactgagctattcatggaaagggaggcatggcaatgcctctgttcgtatcccagaaggcttttattgttaaattatattctttcggaaaaaccacctggcattctattttagccgtaagactatgattcacagcaagcctgtttttcctcttgcttggggtgggaaaggctccctgtgagcagacagcaagtccgctgtgcagtagcccagctgcgtgtctgccgggaggggctgccaagtgccctg

SEQ ID NO: 10477 - DNA, 235 bp, Homo sapiens
  source 1..235: mol_type = other DNA
cagaaatgcattttaaaaatctgttaagctttggttcgtgacctgaggttattatgaaaaggtcacattttttctgaatcatccttcacatgagaattcctaatgggaccaagtacagtaaatctcagaatatagctgtctgtggctggctgcgtatgcaaccgcacacatatatggcaaggcaacagtccctggccgtcctccagcacgagctcgggagaccagtacttaaagt

SEQ ID NO: 10478 - DNA, 581 bp, Homo sapiens
  source 1..581: mol_type = other DNA
gtatttcttttattaagaaaatgtgtttcctgtagtgttctgttttaaaaacagtcaactcacatgcagatgctttgttttattttagttacaaatcatcatgtagtcctttttggaaagaacttagcaaattttcattatttatttaatatttattatttatttgtgtgtagtttttaatcccctaaaggatgtaaagcatccagcattaatcatattttattgaattataggaattaataatttggggacttattttctttaaaagtataaattattaaattatcatctgcttagtgcagaaagtttggaaactcttgaaattcacaaaagcaaatgaatatagttatttttttaattgtcttaaaatgaaaatgttatttttgtcatctacatgattatttttaaaggacaaaagttttgcatatgtaagggagaataatatttcttccttatttttcctcccaaaagaaggaagttactccttttgcctgtccttacagaacagcagagtttccaggaaatgaatgtaggttttatttagaaacatgaccacttgtcactgcccagtgtcatgttat

SEQ ID NO: 10479 - DNA, 445 bp, Homo sapiens
  source 1..445: mol_type = other DNA
aggtctacggtcagaccggcctcccctacggccccgggtctgaggctgcggcgttcggctccaacggcctggggggttagcccgctgatgctactgcacccgccgccgcagctgtcgcctttcctgcagccccacggccagcaggtgccctactacctggagaacgagcccagcggctacacggtgcgcgaggccggcccgccggcattctacaggtacccgcgcccgcgccgcccgtcggggtggccgccgcgcccggcaggagggagggaggagctgcgggagccgcgggacgcgcgacccgagggtgcgcgcagggagcccggggcgcgcggcccagcccgggggttctgcgtgcagcccgcgctgcgttcagagtgggcaggcccgggctttcatctagactatttgattggaaatatgtcagctcccacgtcctggggct

SEQ ID NO: 10480 - DNA, 365 bp, Homo sapiens
  source 1..365: mol_type = other DNA
aatgtctcccactttataatagcaaatcctagactctaaaaagatgtatgactatcattcattttagtcctagtttctccttaaggcggcagcaaatgactcagtttctcagaatggagacattctcattgaagaaaaggtatggaatgcatggctacttaggttttcattcttcatacaaaggagcagtatattttaaacattttatctttttaatataaaataaacttgcagcaggagatcaagaccacctgtagtaccagctactctagagaggcctgctttacacataaaatatatagaatacttgcaatttgtgatgaaatagagcatctactattcagttcagtatttgggggtcttaa

SEQ ID NO: 10481 - DNA, 434 bp, Homo sapiens
  source 1..434: mol_type = other DNA
accatctataatgagtattctgtaaatatttaataagtgaatttctctacacacattgcttgtatcttccaaagcagttaaaatgtgtcttgtcaacatcatttgagatttttagtatctattattcacttttaatgttcttactgatttttttagatccaagacaaaataaaagaactattctaactaagctgaaagcgaagtatttaaagggtactactgaatgaattaaatagtttttgtaaaaaccttttaggaaccttttttaaaaccaaatagtaacagcaggtggtaaagaaattttgtaactgaagcacacagatcctcttacataattgatcattataattgaacagtattaataaatatacatgcatgagtgtatacaagtatataaattccaaactgaattgaaggaaaatgttagccttaat

SEQ ID NO: 10482 - DNA, 574 bp, Homo sapiens
  source 1..574: mol_type = other DNA
gtcttgaaaatgtgttctatgtgcacaaaaaaaaaaaaaaaaaagaataatagttttgtacttttaggaatcatgttttgaaatatgtattttcgttttttaaagatgcaataaagtataattttaatatttgatacttaaaatatttaagcaagaaagtaaaactttaatattttagaattaccatactcctaaaatgaatctatagttacctttttaagggttatgtgctatccagattatatttccaataagctcttaataaaatatttaaaacctctatctctcataatatattttttcattcttgtctgctcaaaaacaaaaacaaaaaaacaattattttttcaaaagcaagtgaaattaaaagacactaaatccgaattgcatttcaagtttaaagttctagttaaagccagaaaaaatttgatgaatatacaaaatttttttggggggtcaatctgcattaaaaattgggatttccatatgcaatatctagcctatctaaaaaaaattcttagagacataggaacagcctatgtaaaagactgtccatctggtaaatttcagatgc

SEQ ID NO: 10483 - DNA, 482 bp, Homo sapiens
  source 1..482: mol_type = other DNA
tttaatccggtagtaaagtcataattttgtaataatattaacaaaatcctgcctttagcaatagatatgtaaatatataaacatcggatgattatttcaccaagaaaaattttagtaagagaatctattctcagaaatgctgcaattatatcaatttaacaatgtgatttaattttatcttgttcgagctaaattgttaacttggctatagctaaactgttaaatttctagtgacttttttaaggtaaaaaaatactaataaatgtactcagtctagaggttactttaaacttttgagtaagtcagtctatgaatgaattattcattttatatgctacaaaaatgtttacttagtattgagtagtagaatggaagtgtgatttaagtgagtcactaaacattttcacgtgaagccttaggaggacagggtccccctgtgtacacagttgaaaacttgcagtccaagtgactcacaggctctt

SEQ ID NO: 10484 - DNA, 638 bp, Homo sapiens
  source 1..638: mol_type = other DNA
aaaatatatcaggttagaaatagtttggccctaaggtttttctaccatgttaaaatgtcatatgtgggcaagcatatacaaacctgaacattttaatttataatagaaaagttttcacttgtccactaatttctctaatttgctaaattttagtatgagataaaaatattaattttaatgtattattttggtggttaatatgtcttactttttcaatgagtgacacatttttaagtactgtatttattctgcaatcaagacatgtaaaatacatgtacatctttttagaaattagtttgtaaatgatgaaaaactgtggagttctatacagtctataattaatatttattaacatcacatttaatcttttgaaattttctaatcaaaagggtatttcaaaatatattgtaatatgattgatttactttagatggcaagcaaataccactttataatagtctgcatgcattcaaagtaaaataacagtagaaagcctaatctcttttgccattaaaggtttcaatttgtcatgctcagttttaagcttttaaaaaccaacataaaaaaatactaaaatcatttcatagcagtaattacattttccttgtgtttaaaagatgcataattattatgtttta

SEQ ID NO: 10485 - DNA, 663 bp, Homo sapiens
  source 1..663: mol_type = other DNA
gtttgactttgcctggataagaaggacttgtggcatgtacagggtgcatacagtgcacctgaagaacctaaaagtggtttttagaatcatcataataaacagtcatttctcaagaagtctaaactttatacataacattaaaaaagatctataaagcctgaccagtctccctcaaattaagttatttgctactgacttggcagccaaaacgatttagggaacctcccagcctttcaggatagggcaggacagcgcagctcctccaggcagcggaggcagcgcgtcccggctctcagggacatttccttcccacctcgacccccgggaggtggtcccggtataaagctgagcgggtgggtcacagcacagctttgcagctgcggagaaacgcccaaggccgtgcatctccaggaggtagggaagcctgcgagcctccgggtccccgcccccagctcttccaggcaccggcgcatcccggagccgggcgcggggcgcggggcacggagccggggagggggtgtggcgggccagggcggtgcagggaccctgcccagaggctgaaccggcctgtgggggagggcgaagggggaggcctcaccccccagcgagcagccgggaggaggaaccggtcgcggagggcggggagcgcggctgagcagcccg

SEQ ID NO: 10486 - DNA, 435 bp, Homo sapiens
  source 1..435: mol_type = other DNA
gggggtgccccaggattgccctcaggcagaggcagggcaacactccaaatagagatccattgtttggtttctctctctaaaaaaaaacaaaagtcacacatcagattggtttaccagatttgtttcagatgttattattttgacacgatccattattgcaacatggcttcgattattttagctgcaatcagtgtttgactttgcctggataagaaggacttgtggcatgtacagggtgcatacagtgcacctgaagaacctaaaagtggtttttagaatcatcataataaacagtcatttctcaagaagtctaaactttatacataacattaaaaaagatctataaagcctgaccagtctccctcaaattaagttatttgctactgacttggcagccaaaacgatttagggaacctcccagcctttcaggatagg

SEQ ID NO: 10487 - DNA, 81 bp, Homo sapiens
  source 1..81: mol_type = other DNA
cgaagccgtctctcagtcgccggctaataaaggactcttaatttttctaactcgctcgagtacaacactttccaggcctct

SEQ ID NO: 10488 - DNA, 502 bp, Homo sapiens
  source 1..502: mol_type = other DNA
tatagcacttaacaaactttgtaatgaaaaattttgcatttatgttttccctccttgattttaaatatatttcttcaatgtagaaactgttttttcatactaaatactaagtaaagagtaacacaaattttatataaattacacttagatatttatgaaatgaattaaataactttcaaaatttgtataccaaatagagaaatgttcatgaccagcctggccaacatggttggcacgcgcctgtaatcccagctactaggagaatcgcaggttgcagtgagccgagatcgtaccactgcactccagcaatttagtaagtatctgagttttgaatagtcctttcccccaatttactatataaatttaattttcaagcattggaactgttatcctaaaagcagttttggagttccaagataagaaaaacagttgctaatttgagtataaaagcaggaaacatgatacacttatttccttttatgcgaacacaagtatatgaggg

SEQ ID NO: 10489 - DNA, 387 bp, Homo sapiens
  source 1..387: mol_type = other DNA
gtctttcagatttgaaaagaggatttgtctcctcttttccctcagagtagcatctaagcttctgacagagcctgggtgtggacacccacgctggctttgtcttatgtcaaccagatgtgaaatgaagccaagttagcctcaggctcttccctggctcactcagaaaatattcttgccaaatcttcattctaacatctagactgcagctttcttaaggttaaaagccagaaattagacatggttgtttttcatttgatcctgtacagtcatcaaattggctcacatcccaggctggactgggcaggatggcagaagatttcatcatgctattagtttaaagcaaataaatggtttatttctggaattttccattaatgttctgctgtt

SEQ ID NO: 10490 - DNA, 770 bp, Homo sapiens
  source 1..770: mol_type = other DNA
atgtgtgctagactacctttagttacaaatccacaaatagaagtgaagtatttatcaaagtactatataaatgcttttcaactatttgaagccacctgtcaagtgattgaatcagaaatgttcaaaactggtttgatctacattatgcaaagacttataaaagtgatgaggaaatctttaaaaagaagacaattaaattccttgaggtatatagcctgacaacaatttattttttggatcatttgacacagtgtatgtaaaagtgcattgggaattgtgccattttatacaaatatgaaatagcactacttgtactgctttgtacaatatcttagagactttctgaaacacttatcttggaattagtttcaacaaagacgaattatctctagagcttttaaagttaggatagatttcaagaaagattaaatctggaactatatgaatagcataaaaattaaaaatattaagagaattgatactttgtaataaagtataattatacttttataagcgtaatgaacataagtgtttgttgcttattataacactacaatcattttcttattttacaattaattaaaggttaaaacatttcacatactttgtttgtttaaagaaaagtaaatttcctcttatcttacattttgaagttgctcactataaacttatataaattaggcataatgacaattaagtaccgtcatactgtgacgtctttcagagcactttgtgattgctcagtcctaagtataagccctataaaatga

SEQ ID NO: 10491 - DNA, 535 bp, Homo sapiens
  source 1..535: mol_type = other DNA
tcggtcctaccctcggccccgccggaaggccctgggagatgcagccgcaggtctcctgctacagccgctggggaaggccgcacagcctcctcgcccccagtgcgcaggcgccgacccgccaactccgcagccacagcccgccaaggcgcctgcgcagaggcgtgcgcgcgcgtaaatccgtcttccggaaagtctggattcccggacgactaccatttgtacccattccagatggaagccagcgctgaatttgggctgcgggcgcacgcatgcgtgatagaccctccacacgtgtggccgggccgcggcctccccgtgctcggaggtcccgcccccggccgtagcatctttccggacgtggggagccgggctggaagggggctgggcttcgcggctcggccccgcctcggcagcctccaattgggcgcggacgagggcgcccccacccactgccctcctattggtgcgcgcatgcaagcgacgcgtctcattggaccgcgcggatttaggcaattcaaagattttaaaagtacca

SEQ ID NO: 10492 - DNA, 446 bp, Homo sapiens
  source 1..446: mol_type = other DNA
aaaatttaagtcatcaagagtgacactattttaacatttttaaaaatgaaaaaggcaaaaaaccctaattatcaaaattttaggtaaagacaggatccacccagcacttgtatgattcatccttatcaaaattttaggtaaagacaggatccacccagcacttgtatgattcatcctcaaaggaggattcgccgttttggctgagttcagggaatgcactgccctacttaagtgcatattcaaattgtgaaaagttaactcccttggccacgggggtccagctcggtcctaccctcggccccgccggaaggccctgggagatgcagccgcaggtctcctgctacagccgctggggaaggccgcacagcctcctcgcccccagtgcgcaggcgccgacccgccaactccgcagccacagcccgccaaggcgcctgcgcagaggcgtg

SEQ ID NO: 10493 - DNA, 275 bp, Homo sapiens
  source 1..275: mol_type = other DNA
ttgagctgtgaacaggtcttttgaaaagtgcaaagcattgtgccaataaatgtcggtattgctggcacctatccgctaccagtcgcggctgtgacctccgccctgcagcggaccctcgactgccctgcactgcggctctggaggccccgaaggaggcgcccaaggtctcccagtccgggaagttcgcagcgttctcacgcttggcaggaagttcccgccaaggcttccggaaaatctgggtgcgcgaggggtgtccggaacttccggttccggtc

SEQ ID NO: 10494 - DNA, 602 bp, Homo sapiens
  source 1..602: mol_type = other DNA
actccctcctcttcccacagatgtggtatctgaagagcaagacactgcttctccaagctgggctccacttgggcacacgggcgcctgaggcagctggcatgggcccagagagcacctgcactttcttgaaaaggtcctctttctggacttcataaagtccttcgggaagcaaaacttgctggaatgcttcctccgggacccggagcaggcaggctgctgtgcctggcaggccggctcctgggtgcaaggctcccgcgcagcccaggacagcagcgcgcgggctacgggcgagtggagttgcaggggcccgggcggagagccgctgtcacccagggaagctctcgggactccgggcctcccgcgaagctccggacgggcgtcaccgaagccgagagtcccggccgagcccctccgcacggtgggcgccgcgcccaggcgagcgcgcgaggtcgggcggggccgggggccgcccggggagggggcggggccgggactctcgcggccgcgcgcaggggctgggaagctgcccctccggccgcgccgggcgaggggctgcgccggcccgcgaggcgcatgcgcgctgccgagcggctctcgctccc

SEQ ID NO: 10495 - DNA, 361 bp, Homo sapiens
  source 1..361: mol_type = other DNA
agaactgtaagaaatcagtttctgttgtttataagtatggtattttgttatagcagcctggaagacaaagacaatttacaagtaatctgttttaattaggtgtaagaaaaaaggaactccctcctcttcccacagatgtggtatctgaagagcaagacactgcttctccaagctgggctccacttgggcacacgggcgcctgaggcagctggcatgggcccagagagcacctgcactttcttgaaaaggtcctctttctggacttcataaagtccttcgggaagcaaaacttgctggaatgcttcctccgggacccggagcaggcaggctgctgtgcctggcaggccggctcctgggtgca

SEQ ID NO: 10496 - DNA, 357 bp, Homo sapiens
  source 1..357: mol_type = other DNA
aaaaacgtatccatgtttttatgtggcttttcctagaatttttacactagaaaacagactgaatgcaaattttgttttgttttaacaaccttcttctcagaagcatatgtctatcgaggaagtcttcagtctatgagatttaagatgtgaaagatcaacattatctttagggaacaggttttctgcacaaaagtttatttgtttctcatttctttttcagaaaataaaggatcgctgttgttcccaacaggggaagaaaattggagaaacattattaccttttcttagatgttggcaacggaggcaacaaccattcctggcccacgctcccctcctgcagcggtgcggggcaggtga

SEQ ID NO: 10497 - DNA, 440 bp, Homo sapiens
  source 1..440: mol_type = other DNA
atgcacagatatatacatgtacagaaatgagaattacttcagaattggtgttaactttagaaaaaaaaagaccaagaacttactcttggtatttacaaatttatttctaaaatagaagcactaaaaacgtatccatgtttttatgtggcttttcctagaatttttacactagaaaacagactgaatgcaaattttgttttgttttaacaaccttcttctcagaagcatatgtctatcgaggaagtcttcagtctatgagatttaagatgtgaaagatcaacattatctttagggaacaggttttctgcacaaaagtttatttgtttctcatttctttttcagaaaataaaggatcgctgttgttcccaacaggggaagaaaattggagaaacattattaccttttcttagatgttggcaacggaggcaacaaccattcct

SEQ ID NO: 10498 - DNA, 307 bp, Homo sapiens
  source 1..307: mol_type = other DNA
tctatgagatttaagatgtgaaagatcaacattatctttagggaacaggttttctgcacaaaagtttatttgtttctcatttctttttcagaaaataaaggatcgctgttgttcccaacaggggaagaaaattggagaaacattattaccttttcttagatgttggcaacggaggcaacaaccattcctggcccacgctcccctcctgcagcggtgcggggcaggtgaaggagaatgtcagatgctcagcttctgtctcagccaggactggtttctgtaagaaacagcagtcgcacagcggtgcccg

SEQ ID NO: 10499 - DNA, 538 bp, Homo sapiens
  source 1..538: mol_type = other DNA
ttgatcttgctacagcaaggaatacaaaacacccagggatttcagtttatatttggtggaaatctgatgaatgagcatcagtaattttttgtcaatgacaataagaagcagtggttacttaatgttaaccaggcatggttacaaagttaactatcacatcatggagagtcctcatctgatgtttatattctatggaattttgttccacagaggaacacagatgatggttagcaaccaggctgcttcccaaaagctgccttctccttctttggcaataggagagggataaatctcctaagaatgtgagatgatcatgtcataattaaacaaatatataaatgcatcatgttgcttggtctctgaactccagaagcttataagataaaacagatactactactataatcatcacatatgttgcaaaaggttgaaatgtattttcaaattcattgatagcacaagatttgcttttattcaatactaaaactaagtacttgcttaaagtgaatgcaatctttcattttcaagatagctaatt

SEQ ID NO: 10500 - DNA, 398 bp, Homo sapiens
  source 1..398: mol_type = other DNA
aatgtgtttgaggacttaaaaaacttgtaggaagttttcacaattttgatctttatttaaagaccaatgaccattgtagggatataaggacgctccctgggtgctgctgcagctacccaaaccacagctgagcaggctgtagctgcctgcactcttgggggcctgggaaggcccctgctgtccttgcaggctcaggagtgcctgcttctgcagtgcctgctctgatgggagcaggtccctggtgagaccccaccttcaggccagggagggcctgaagactggggaccaggctgccagtcccaccaactggagtgggaacttgtggtgcctttctgggccctcccatggccacccatggaccaatctgtgtgcatttcctcacctctgaggccataaaa

SEQ ID NO: 10501 - DNA, 456 bp, Homo sapiens
  source 1..456: mol_type = other DNA
tatattatatatattttatatatataatatatatattttatatattatatatatataatatatataatatatatattatatatataatatatatataatatatatattatatataatatatatataatatatatataatatatatattatatatatatattatatatatatatacacatacatatttatttatttatttattttgagttggtttccctagaaggtatagacctgccattttccttttccaatgtgggaaagaaaagtttctaagacttatttttatcctaaaatacgttttacaaatgtgtctgtaccctctctttattagagcattatgaacgattaagaggttgaagtggcatttcacccaaaaatgctgagaatgactctgcatacactgggcagtgcttagtgatcaatgaactcgagatgatacttcctcttctttcgaaa

SEQ ID NO: 10502 - DNA, 508 bp, Homo sapiens
  source 1..508: mol_type = other DNA
tgtggaagggccctcccctgccaggactctgtaaatatgaaattataatatagcaaaatataacgctaatctaattttagtcgcaaagttgaaatttcatagcaatagcattaaaagagttacattgttacgatttcagtcaacatataaatgaaataaaattgaatcctagcacttcgggaggccgagcgagaccagtctggccaacatggtgagtaatcccagctactccggaggctgaggcgggagaatcgctggaacagaggctgcagtgagctgagatcgcgccactgcactccagcctgagagcgaggctccatctaaaaaaaaaaattgttctactttaagaaaagcatttaaaatgaacagaacatgcagatcttacttttttttttcttttaaccagcgggctctccagggtgcgcgcgcgatctacaacccgcccgggacgctgcgggtgtgagccggaccggcttcgagtccgccgcttcgggcggacccgccccct

SEQ ID NO: 10503 - DNA, 448 bp, Homo sapiens
  source 1..448: mol_type = other DNA
ccctttttgcaaagaagcatgggaagaaccaggtactgtttggctcatgtcacttgtgcagtgactgaacgcatgctgttacaccctgggggaaatatgatatatactgaaatattttgtgacccaaacttatcatatattgtcattttctgaacaaaatccatacaataaatagagattagacaggtaagattctaatacaatacagctgtttctgtgtctatggattgcaaaaaaacagtaatttttctggttataacagagaagcacgtaacgaaatgctttcttttctctgatggcatttgcattttagagaagggaaaacagtttgaaaatttttatttccctttgctcagctaaacacttagacaagtgttagtggaatttcgagcatccctatcttagtcaggtttcctaggagacatgcagcttgtcccacagcgagctg

SEQ ID NO: 10504 - DNA, 312 bp, Homo sapiens
  source 1..312: mol_type = other DNA
tatatctaaagcaagcagcctggagtgcagtggtgtgatctcgactcactgctgccttgactcaaatgatcctcccacctcagcctcctaagtagctgggaccacaggtgcctgccagtctgctgggctggagcaatactcccgcctcagctcagaaggtggtctcttctcagggagaagatctgctttcagattagaccctggttgaacctgggctgttggggatattttactaacaactattctagacattagaataaagaataatttcccttgaaaatcaaatgaagcctggtttgatctgtcagcctc

SEQ ID NO: 10505 - DNA, 361 bp, Homo sapiens
  source 1..361: mol_type = other DNA
ccagtctgctgggctggagcaatactcccgcctcagctcagaaggtggtctcttctcagggagaagatctgctttcagattagaccctggttgaacctgggctgttggggatattttactaacaactattctagacattagaataaagaataatttcccttgaaaatcaaatgaagcctggtttgatctgtcagcctccctgcactccacctgctgagctggctctgaggctcaggagacgtggccctctgtggtcccattgtctccacccggtgcctttctagagcaggcaggctcccggcatgggtggaaacagagcagggggccagcttcccccaatcaccggtgctgctgtggtcct

SEQ ID NO: 10506 - DNA, 457 bp, Homo sapiens
  source 1..457: mol_type = other DNA
gaatttcaattcgttttccattagcttttttaaaaacttactaattgaggaacagaaactttaaaattcatttgtcagcaaaattctcccacctatcagagaaactttaattttttttttttttataacggaaagacagaactcatatttcagtcttctctctgttcttcaaatgaatgacctctttacactggccaattattcatctgccaaataataagttctgaacgtgcacagtgctcacaattttgaggtagacattagctccatttaactgatatcatgcagcatctgcagagcggcggttctaaaaacgcctctaacaaacagtccctagcccgcccaggagaagcctagtccacccggctctcccccggctctcacaggcggaagccgacttagcgcatgcgctctcagcacgccgggaatcctaggtctgaccaatggggctgactcc

SEQ ID NO: 10507 - DNA, 395 bp, Homo sapiens
  source 1..395: mol_type = other DNA
tattgaagttatatttattaaatataatgtctataatattttagtttcgttccacatctctttgaaatgaataggtgtcatatagtattctggcaccaagagttaaatgttcatgacctacatacgtgtttaaggtgccttcaaaaagagttatgtaaacataagcatttattgagtacctactgggtacaggccatatcgttccttttagacgtgaaaacaaacatcccggggggaaagtgcaggttccggccgccccacgccgccgcgctccgagcggccgccgagccgccccggccccggccccggccccagccttagcccaagcccggctgggtcccgcgaggctgcgccggggcgggcggcggcggcccggggacgagtccagtccgcgt

SEQ ID NO: 10508 - DNA, 567 bp, Homo sapiens
  source 1..567: mol_type = other DNA
atcgttccttttagacgtgaaaacaaacatcccggggggaaagtgcaggttccggccgccccacgccgccgcgctccgagcggccgccgagccgccccggccccggccccggccccagccttagcccaagcccggctgggtcccgcgaggctgcgccggggcgggcggcggcggcccggggacgagtccagtccgcgttccaagccatgctgggcccgataggctcagctagtcgtgtatttacccatatccgggctagagaggaaaagagaaaagtttcatttaaacctgaactaaaaactttcaaggcccagagcgtaaggcgtgcccggcccggcgctccggcggggcctgcggagggggagggggtcgcggcttcccggcgggccgcgtggatgcgcacaggaggggccgcggcctgccccgccccccgcccggcctcgccacgccgcggcgatcatggccgcgcgggcagcagcggcggcggcggcggcggcggcgcgggcgcgggcgcgggcaggcagcggcgaacggcgggcgccccccgggccgcggccggcgcccgga

SEQ ID NO: 10509 - DNA, 743 bp, Homo sapiens
  source 1..743: mol_type = other DNA
atcgttccttttagacgtgaaaacaaacatcccggggggaaagtgcaggttccggccgccccacgccgccgcgctccgagcggccgccgagccgccccggccccggccccggccccagccttagcccaagcccggctgggtcccgcgaggctgcgccggggcgggcggcggcggcccggggacgagtccagtccgcgttccaagccatgctgggcccgataggctcagctagtcgtgtatttacccatatccgggctagagaggaaaagagaaaagtttcatttaaacctgaactaaaaactttcaaggcccagagcgtaaggcgtgcccggcccggcgctccggcggggcctgcggagggggagggggtcgcggcttcccggcgggccgcgtggatgcgcacaggaggggccgcggcctgccccgccccccgcccggcctcgccacgccgcggcgatcatggccgcgcgggcagcagcggcggcggcggcggcggcggcgcgggcgcgggcgcgggcaggcagcggcgaacggcgggcgccccccgggccgcggccggcgcccggagcccgggacctggaggcgggggcgcgcggcgcggcggcggcggcggcggcaccgggacccatgctggggggcggcggcgacggcggcggcggcctgaacagtgtgcaccaccacctggcccataacgcgggcgccgcggccgccgccggcacccacagcgccaagagcggcggctc

SEQ ID NO: 10510 - DNA, 530 bp, Homo sapiens
  source 1..530: mol_type = other DNA
tgacgcaaaaatggatgcattcatttactcattcatccaacatgcatttgttggtaaccagttaatatcttacaagatgtcattgttctctgagaggctgaaaagattttgctagcggtcaacgttgccggcagctctgcaagcgcttccagcgggcgtcgcgtgttccacttcccgacggaggccgagcactcacaccgcggcggaggtacccgtcaccgcagaaccgggtggctggctctcctccagggagaaagccactgttgggaagttacctagaaagtctcacaggcggggcctggaatcttggcgcaatctgcgaccctctaagcaatgatctccttggagtccctaagagacggccttggagggcatcgcccctggggctgggcacagcacgtcttcccggccccggcgcgggaggagggtttggggacagcggccgcactccggacccttcttcagattgcacaggaggaggcggtagcggaacctttctcctccgcctggttctcgcttccacccgggcc

SEQ ID NO: 10511 - DNA, 608 bp, Homo sapiens
  source 1..608: mol_type = other DNA
tgagaattaaaatgaacagttatctttaatgttaccaactcaggactgatccagtcccttaggtctggcttgcatctgtcagccacagagtctcagctgactggaagttttatcttcccagagagcaggggttctcaaaccttgcccacgtgagaacaacccgggtcattctgatttaataaatctggaacagggttcacaccttgggggagttttaaaagctcccatgtgatcctaatgtgaaatcagaataagataaaatggaaatttaaaaactccacgtttgtattgtcattgacatttttagaactggttctaaaaattaaaggtgctattgagatgataaaatgtagaaatgattttcaaaatatacatttaatgattttttaaaatgtattttttacaatctgaggtagccaatgggcatttggagtccagcattcgcaaggctagcagtaacacctgtgcaggcgggaagaggtcagggtggccctcctctgtgcagtcaggcgactccccagctgtgtctccgcctggggcctctcctgccgcctacagggaggggagggggaactccacagggagggcctggctgggtggggccattg

SEQ ID NO: 10512 - DNA, 767 bp, Homo sapiens
  source 1..767: mol_type = other DNA
ggccccggggctatgcccacctctgcgggggctcggacccgcggcaacgcctgggagggcgcgagcgagcagaagccccaggctccggccgtcccagggccgcgcccgcagctcctcctgggctgtcgggtgggaaggggggagagaggagaagcacgcgacccctccgctgccgagggggctccacgggggaatggcctccaagggcttatactccgggagggaggccggggccggaggggaccctgaccgcttcctctgcccttctttctcggcccggaagccggccgagccgggccccgagaccctcgcccgcagcccggtcccgaagtcaggccggcctagggccgccccaccccagagtccccgggcgacgcgaccacgcgcccagctgggggaggcgcaggccggggagggtcacctccgcgccgcggctcctcaggtcccggggagtcgccaggagtggcttggtgtcccgaggcggcagctgctgcgcgggataaacccgggaagccgcgagacggactgaagtcggccaggagcgcactgcgcggcggggccgcgggcgcccgaccccatccctacttgggcgatgccacagggagccccgcgccttccacaccccagggcgcccgcccgagggggctggggctggaatctcgctgcgccggtgccctggcttcgcgggcgaggaggagccgcgggtgaggcgcgaggccaccgcccacccggcccggaggaggcggacccactcggagcgccgcgcg

SEQ ID NO: 10513 - DNA, 678 bp, Homo sapiens
  source 1..678: mol_type = other DNA
tttgatagttgtctcttcttacaaatatatccctcataataataaaaaagcatgttttgtccttgagtgaaaaatcttatatatatctctccggtatttttaagcttatcaagattccagacgtcccaggggcttcaagccaggaccccggcctgagggagcctccgggcaggaggaagtactcggccaagggcacggcgaccccgcaacaccccaggcgtggggcaaagacagcggggttgcggggctcctgtctgcccggggcgtcgagagttcctgccgccccctcccggaaagcgccgagccacggcgtgcggcgccggccgagcgtgaaccggagtcggggttcggctaccccgagcggctctgtgggccgcggatcgcttcccctggggcggccacgcagggttgcgggccatggcctggggcgcccgtccggaccccgccgctgcgcgggacgccgctcccagcctcgaccaagggcgcccgggggcggcggcggcggcggcggcggtgactgcccggggcggcggcgcggcgcgggggcggccaggaggcgaggaggccgggccgcggccgagggcccagggcgcgcttccggcgggcgtcgcgcgcgccgcggtaaatgggaggctcggccgacaggggcgggggccgcgcagccggggactttcagga

SEQ ID NO: 10514 - DNA, 389 bp, Homo sapiens
  source 1..389: mol_type = other DNA
ctgggtgcagtggcgtgctgggatttgcccggcatattttgttctgtgcacttaaaacattattctgagaaggggtctaaaggcctgccccgtcgtcaccagatcattggagaggttagggctctccctaaccattagggcgtacatgccttggcttgagcatggacaatcactgccaaagacccggcaggcaaggcacgcagctttccttgggatgggttggacccaggccctgggcactcagaggtactcaggcctccaggatgtagcctctagtggatgaggccaggccccaggtgcctgcccccagctggacgccagaacccagctccagcccccaggaagctgtcagcacttccagagagcaagcttcgcgaatcataaaacct

SEQ ID NO: 10515 - DNA, 596 bp, Homo sapiens
  source 1..596: mol_type = other DNA
cctgggcggggccacacactccagcgtacacgcgcggacacgtgccggtgtccagaggagaggcgctgtcaccatctgtggtctggggatcacggctccaggtctcttcgcgacaacgcaccgttgacccccaacacctctccctggcggggtcggtgaccgcaacagcctccggagcgccctccgcgccgaagtaggcgcagttatgaccccgcttccccgcagggagaccgaggcacggtcggagccgaccacacagggaggcgcagcgcccccggcgggaacagtcagcgggtccagcctggcggactcccgggccgggctgcccatataaggctgcgggcggccggcatcgcagccaggctcccggggtcgccccgcgcggggcatcctcctccgcagcgaggaatgcgtggcatccgggaggctcttccgctccacgcccgcctgcggggagcctcagccccggggcgcggcctcgcgcagctgcctggccgctggggggagcgcggggccgggcgggaggcggcggcgcgccctcacctgccccaggctggggaggcgcgagtggggagcctggcgcggcgggagcggcg

SEQ ID NO: 10516 - DNA, 337 bp, Homo sapiens
  source 1..337: mol_type = other DNA
tcaaaaaataaataaataaataatacatgcatacatacatacatacgtacatacatacatacatacttaaagtgaaacctacattttggctccaacacagactagctgtgtgcttgggcctctggggccagacttggcttgagaaacttgcccaggcaagctccccactggacccaggagccccagtgctctgtggccagcctcccccaggccgtggtcctgcccaggaaatgcacctgggactgttgccagtcagctcatgactctcacggagtgatgtcatgcaaaattttccatagctctggcagccacaggggccatcctcctgcctctccga

SEQ ID NO: 10517 - DNA, 323 bp, Homo sapiens
  source 1..323: mol_type = other DNA
gtagcgcacgcctgtaatcccaggccgttcgaagtgactggtgaggccccgggaagacggaccggccagagagagaggccctcacgcccagccgagcgtcagctggtcggtccggtccgcgcgccagacggcggtgctcggccgtgcccggtccctgccctcccctgcgccgcgtcctacctgccggcaggcggactcagcccgtgccggccgcggctcccggccgggaccctccacccggcggctggcggctcgtgaccccgccccctcggcccgctctgggcccgcctcccgccggctggctccacccgcgtccctagcgc

SEQ ID NO: 10518 - DNA, 360 bp, Homo sapiens
  source 1..360: mol_type = other DNA
atatatatatatgtatatatacacttcgagacagagtctcactctgtcgcccaggctggagcgcagtgtcaggctccaggctgggggattgcaggcgtgagccaccgcgcccggcctcagccacctctcagcgtacgcccatctgggcgcagggcgagccctagccccacaggacgagggggggactgccgtgcggccccgccaggaagggcccggagagagtgggggacaccgccctgtgcccccagcacccggtggacaggcttctcagaagcgcctcggcgttgccggcagagtgcgcctgcgccgatacgccatcgcgctagggacgcgggtggagccagccggcgggaggcgggc

SEQ ID NO: 10519 - DNA, 703 bp, Homo sapiens
  source 1..703: mol_type = other DNA
gaatttcagaatttaacaaactcggtccaactttttttttgacaaaattcacagaatcagtaattcttaagtctgaaacggattcgaaaacttttgcatgcttcaaatcaaggaaaaaagaatgcttttttttttaaactacacgtgtgaagagtcacacaatcagctatgctatttctttgcacaagctggaaaaagaagagattactttctccatggaaagagatcctctttaccatcgcggccactcgggtgaccgttttcccggggagctgcgcgggtcccctgtaagacataatgggactgggacgtccacttccggctcaaacgattcagacggcgcgcaagccgcgcggtgcccgggtgctgaggccgtcccgagccaggagactggaggcctaggcccggcactgtgggcatcttgggcaccgtggcgcggtgcgggccgggggcgggggtctcccggggtggcgacgccgggggtgcgagcaggtggcccgggcaggcggcggctccggtggcgggcggcgcggcggcccgcggggtggcgttggggacgcgagccctgggccggggagggagggcggccggggggcgccaacggccggcggtgggggccggggcggtagcgccggccggggaggcgccgctcgccgcgccgggtcacgtggcgcggtcacgtggcgcgcagccgggccggcgg

SEQ ID NO: 10520 - DNA, 412 bp, Homo sapiens
  source 1..412: mol_type = other DNA
taaaagcttagaaaactttgagttttaaaggcccttactgcggaatatcttttattaatcgtgaaaaaatcaatccagataacttgcctgagtcatttcagtctcctttttgaggatgcctgcttaaacagcgaccatggctagttcagtctcttagaaagtgatgatttcattcagatgtgcccagctgctgacatttcagcaattattcttaaaacctttattttccagtgttttaaagtttttaaattttatatctttttttttttttaaacagatttgtaacagacgcttctttaaaaccttctttctgtacttacacattgtgcacacttgagagttttacaactgatgaaaattaatttaagaatcagttttgcgcagattaaaccacaaaaatattctccagttt

SEQ ID NO: 10521 - DNA, 512 bp, Homo sapiens
  source 1..512: mol_type = other DNA
agcctggctagaccactggcacctgagtggtcattacagattcctgggatcgatattccacaattatttaggttcacaggcaggatcaaccttgcgcactaacatcgtctggaaagactgtttttccacctattattggaaaaatgttaactggttaactatagtttgcacactagtgttgagctacacacttcatttaaaaataatatttattatgactataaccctaatgggcttagttttaaatgtttctgcattcggccaagtgatcgcccgcgggagctgtccgcggtgctgaacgcggtagccggcttcagcctttgacctccccagcaggaaagggccttcggtccgcccccaagcaccattcccttcccagcgctgccaatggcgagggcggcactgagggcggcagacgatcctcccccgccttctgcctctcccggggcggcggcggatgggcgcggaggcggatgggcgcggctccctcccccactcaggcctcttcacgg

SEQ ID NO: 10522 - DNA, 309 bp, Homo sapiens
  source 1..309: mol_type = other DNA
agaccctggacagtccgatggtcataatccagatgagagatatcaatctttaactgggtactatggtcaggaagtgtgccacattttacaaaattttccacccaaaatgtttttttttaatggtgcttaaaggaaaaattctcatttacctggaaaacttaactccccaaagggaagtttcgtaaccggaggaggggccgggaccacgcttcccctccccacccacgggccccgcccagggatggggtcactgagggtccggcgaagggcggggcccgggagcaggtccggggcggggcctgagtgcgc

SEQ ID NO: 10523 - DNA, 370 bp, Homo sapiens
  source 1..370: mol_type = other DNA
tcatttgttccaatgggtaaatattcatgctatagtagttattaaatagtgctcagttctgtgtttgtgaaaacactacacactagtggttgatgacagcaaacatttatttgccactcacactccatgaccatcaaggatcttccatggctctgcttcctggctcggtaggtgccaagcctacgtggcacgtggcaccttcttggccatgcagcaatttacactgaagtcaatgtgaaacccttcacaaatgtgagaacatttgaatatttgaatccttaggaagggtgaaacaagtagccaccgaggcatgtaaggctggccacacagggtgcactgcgtcagccttcaagaagaattgacttccttc

SEQ ID NO: 10524 - DNA, 650 bp, Homo sapiens
  source 1..650: mol_type = other DNA
cacaccttcctcaaggaggcataaaagatgattttttcccccgggatggccgggacgccagcccggggcggaggggctggcggcgggagcgtcacccgcacctccgcggggagacgtccaagcctcggcgctcccagcccggccgccgcgccccgctccaggctggggctggggctggggtcagccccgcagagcaaggggcggtgatgtcatcctctcggcgagcttggctgcgggccggaggcgaggccctgcgggaaggtttctcggcaccgctcaccggggcgctctctccgagtcacgcccggtgcctccccgcgcgggaagaagctcaatccccttcccgccccccgcgccggggaaacggcggcaatgtccgggcagaatggggccgggcggagcgccggcgaccgggaagctcaggccgtgggctgccggaggtgggcagccaggcctttccgggcaggaccgcgtgtccttccgcggccagggctctaggcctcgccgacccggcggttacgcgtcccctccggctccctgagtggcgcggactgcgcaggcgcactcaggccccgccccggacctgctcccgggccccgcccttcgccggaccctcagtgaccccatccctgggcggggcccgtgggtgg

SEQ ID NO: 10525 - DNA, 654 bp, Homo sapiens
  source 1..654: mol_type = other DNA
tttaaagcattgaaaggacgtcttatcactaagggattcccatagatttaataacaaaaatggtactataggaagtatattgatttgatcttctgcattttctggataaaaggatgtatgcagaacctttcatgctcatgaaacttattcaagactgtaaataattgatagtacatccttaattgattaaacattttttgagtgttgaagttaatggtaaaaataatagccaacagttgggaatgtcatttttccagtatttcttcaattagggtaatgtacattaaacacagactgaatccatattaggaaaattcaagtttggaagtttgaggcttttagaaatatgagaagtgttatttaagcaaatttaaaattttacattatcaccgcgagcatttttggaagtaatgctgcagagatacttaagccaagaaaaatgttgccattttttgttttctttggaagagcttctatgagtcactgatacaaattacttctgctttgcagaaattatctgcttgcagctgtggataattaacctcagaaaagagatatgcttttgtcttagatggatgtcagcagctgctgcagaacccggtgaaaacaccttcttgaggctttcttcttctaaggagtatgacacagttaaaa

SEQ ID NO: 10526 - DNA, 659 bp, Homo sapiens
  source 1..659: mol_type = other DNA
gcggcgggcagcctagggggcgcggcgcggggttctcgcccggcacccccggggcaggtggagctgagccggcccgcggccccgcgaccttcccctcggcgccgggtcccctcaggtctctcccgaaggaaacgcggagcctgggtgcctgggcgccgtccctcggcggctcccgagcggaaagagtttctcagcagccgcggggcaacggttgctacttctcacgggcttcctggcagccccgggaagttcctcggcggaccccgagcccgcgccccctctccacggatccctccccagcgagtgccgggtgccccgcgggctcgcgctggctgtcccgggccgccgggtatccctgggcgcccggccggcgctctctcctcctggccgagtgttccccggggcccgcgccccctcccccccaccagccccttcatgctgggggtcccctgggtgcgcaccccctctcctcggacccacccccaactggggggcacctccagtgcccgccggctgccccttgggcgcgcgcccccgctctcgggcgcctcctcgccgggggcccggcccggccccgccccgcccgtgccccctccccatgcccgcagtgctgggcggggcgctgactcacccgggcccgggctggccggttcttaagc

SEQ ID NO: 10527 - DNA, 510 bp, Homo sapiens
  source 1..510: mol_type = other DNA
agtgtcaggtactgttccaggcatcgtacatgtactaacgtgccataattatgccgcctcagccctagagtttctgaatcctaaggctagacttctagagtgagctctcccgcagcaaattctactggcccccaaagtatgtgttttgtgtgtcttaaaaatttgttgagaaccattagcaaaaaaacattaattcctagaatttcagagaaatcccatggagctttttgccagtcacggcggcggctgggccggccacgtgcaccgagactcggggccaggtgcagccgccccagggccgaggcctcggaactggcccccggtcccggccccaagcacagcctccccacttgcatctgcgaggggagtagcgcgcacttccgccaagttccgcccccacccagcccgaggcccggctgccgccatcttgcggggggcgcacctcacaggtcgggagctgggcgggaaggggcgtggtcccgggacccgccccgccggggcttttgggag

SEQ ID NO: 10528 - DNA, 426 bp, Homo sapiens
  source 1..426: mol_type = other DNA
cagcctgtctatatatatttctacaacctctttgatcaagaatgatcagacctaaaatatgttgggagtgttaatttaccatacaccttgtttagtcttaatataaaggcttgccatttactctaagtattaacggttttaatcctcaagacaaaacctaaagagataaattcttctattgccactttgtggattaggaaaatgaagcacaatctagaacctggattcaaatcaagacagcaattagctgaatgaaggtgtaactgcaaatgcataaaaccaaagcgtctgcgtttttaagcttgtattttttaagactcaataaactgtcgctccgtgtgccaagggtcctccgattgctagcacacctgactcagctgcagagggcggcggcagcccgcccctggggcgggagaagggcaggag

SEQ ID NO: 10529 - DNA, 451 bp, Homo sapiens
  source 1..451: mol_type = other DNA
atgattatcagtgctatacaacattcattccctatgtgaatggatcacaatttatgcatccattctcgtgttagtggtttcatatatagcccttgatctacagaaaagatcagaaattctcttatgcagaagagtgatccacaaatgaaattcacctttcctactttaagttggtctgatcaaaggaagacagtgctctgactgtaaattaagtatcaatactttgactcgagggagttttctttctacttccaaaggaaactaacctgacacttgaaattaccactttagaaaataaagtgatgtttatgcacagaataacacaatttcttgttcagagccttcacctatgggctgaatgtcatgttttccagtagtttacagattttttactttgaagtggaagacacaaaaaaaaaaaaaaagagagctctcctgtcgcttataatgc

SEQ ID NO: 10530 - DNA, 547 bp, Homo sapiens
  source 1..547: mol_type = other DNA
ctttgctgggaagcaggagagtttcctggaaaggaagggtttacaccaaagagatactgtatttctgtttcctctctgcagaacacaaatccggtcacggtgagttcagccaggttatctctgcgaggacaccggtcggcggcggacagcagcacgcggcgtccaggacccggccttcctagtcactgtagcctccaggggcgctccgagtccatctggagggccgcgaggcttccaggctggttggcctgggcaaccctgacgtgggcgcgccgggtgcgggtagctgcggaccgggtgaggggtcccggcccgagtccccacttggggcgcagagcactcctcggcgcgatgggcgacttcccggaacttcctcagccacttggcccggcacagcgaccgcctccggggcgctccggccccttcgtcccgcgccccgcccgcctccagcccgggccccgccgcccccgtcgcccctgtcgcccgggtcgcccccgccggccctggccccggccccgcacaccggcagggggcgcccgagcgcagc

SEQ ID NO: 10531 - DNA, 461 bp, Homo sapiens
  source 1..461: mol_type = other DNA
gattatctaaaagttgtagtggtatagagtactgcagaatacagtaagctgctctattgtagcatgttgcttagtcacttatttcataaacaacttaatgttctgaataatttcttactaaacattttgttattgggcaagtgattgaaaatagtaaatgctttatctgattggacattttcttcagagagctaaattacaattgtcatttataaaaccatcaaaaatattccatccatatactttggggacttgtagggatgagaaaatctaataaaatattaacactttcccaagggaaacactcggctttctatagaaaattgcactttttgtcgagtggtagatgtcacccaatagagctgtatactgtttaaatgtagcggtgaactgaacgtttgctcacctgccaaaaaggtggttttttcatgcttgagacccaatctcccactacatgaagc

SEQ ID NO: 10532 - DNA, 397 bp, Homo sapiens
  source 1..397: mol_type = other DNA
gaaagtagtatttctttcctaacaaagatagtacagtgagtggggaaatccctctaacacgattcacttgcaagtggtcatatgattgtaccctctgaatttaaaataaaatttgaaccgggccagcactttgggaggccaaggcgggtggcacgtgcctgtaatcgcagcaggttgcagtgacccgagatcatggcattgcactccagcctgttataaaaaacaaaaacgtgaattaaaattgtgaaacttagatccaggtgtaatttcttgggccctatgacaaaaatattttaatacatgtaatataacattttactgtaattattgaaatctgtgaagccatcaaacgtgactttggttcctttgacaagtttaaggagaagctgacggctgc

SEQ ID NO: 10533 - DNA, 247 bp, Homo sapiens
  source 1..247: mol_type = other DNA
aggctgcagctgcgtgagcacgtgctcaatgacgtgcaggggagcctttggagggggcaaggcccacccccaccccccaaaactgagggtcctttctgtacagtctgtattctcttctatctaagagatccctgagttatagataagctggtcccattatctaatagcttacaatgtaagttacaaaaaaatgtgtttgcattttaacttttcaggagatgttacagcccatagctcttcagcctgc

SEQ ID NO: 10534 - DNA, 398 bp, Homo sapiens
  source 1..398: mol_type = other DNA
acaaaaaaccgtccttttaaaaactgaagagattttcttaccgttgcatccataaggttaaactagtattttgaaaagttctgaatatcgcctggcctgtagtcccagctacctggggggctgaggtgggagtatcgctctgcagtgaactgagatgacaccactggtctccagcctgggcaacaagttctgaaaataaaatccttcaagacccttatatttttattgtagtttataaaagtttttctggaaatgaataatgacttttaaatttttgctttattgtaagtgtcacagaaaaacctagttttgctggcaccctaaggtggttttaaatataaggacatatctgttttacctaataaaaagtccttggtgagtctggaagattaacaagg

SEQ ID NO: 10535 - DNA, 632 bp, Homo sapiens
  source 1..632: mol_type = other DNA
agcttactaggctacaagacagcgcaggaaagaatcctctgttgtccttttagttcacagagttactgtaaatgactcagtactaagatttcactattactagaatcaataataccaaccctaggggtgatacttgcaaagcaagaggccggctgggcggcgctgaccagcagctaggccccgtcttccctaggaacggccacgggggccctgggagggtgtgaggcctctggaccccgcggccccccggcagcgcaaggggcaggcgccgcagccgcctagtgcagccagatccccgccggcaccctcaggggcggagccggaggcagggccttcgggccgtaccaactccacgggggcaggggccgcctcccttcggccgcgcgccactcaagtacggcagacaggcagcgaggttgccgaggccgaggctagcctgcagcctcctttctcccgtgccctgggcgcggggtgtacggcaagcgcgggcgggcgggacaggcacgcagggcacccccggggttgggcgcggcgggcgcggggcggggcccgcggggggggggggcggggcggcggtgcccttgcggcgcagctggggtcgcggccctgctccccgcgctttcttaaggccc

SEQ ID NO: 10536 - DNA, 689 bp, Homo sapiens
  source 1..689: mol_type = other DNA
cctctcaacccgggccttggggacggaggacggctcacgagagaccggtgccgcaccaggcccgtgtggcctttcgggccctgcccgccccttacccgccgggggcggctgcgcatcagccctcaggccccggaggtcccccgcgtccgctcccgccagccggcccgcgcctacctctccaggcagaagccgcgccggcgccaccggtcgcataggccgaggccgcgctgcttgccctgccgcccgggccccccgggccaccgcgcagccggacagctctgccgccggccccgccgcgctcctagtcccgtgggtctcgctgccacaaaatggcgctgagggaggaaaccaggccccgccgcccggccccgccccgccgcacggctccgctccgccctgccccgccccacagccggtccgaacgcgccgcaggccagcgccactgcctcccgcccactcacaggagagtcgcctttcaggcgtggccgcagtcactcgcccgccgccgaaccccgccaggccgtcggcctagcccgatcggggcctcgaggcacaatggagcagctgctccccgtcccaggagcctggcgcgagctccgcgggccccggagctcagcaagctcagtactcgccggggccacctgcggctgcggggctgcctcgtgcggagggatctgggcgaaggcggc

SEQ ID NO: 10537 - DNA, 365 bp, Homo sapiens
  source 1..365: mol_type = other DNA
accaggaaaggtaatttcaacgtgtatttccattgtaagtttaaagaccattacggtattttttctgagagagagctcttgtgatacgagttgcaaagattttctccagatgtactttaatcttatcctaataaaagtgtttagactccaggtaacaccgccatttgttccagttagcaaggggccctcaacgccgcgtgcgcctcacgactgatgagagggaagggagtaaacgcccgcggctcgccgcccacggcctctctcttgaggtggcacctggtcctccgacacgcggaagcatcagccgccttcgcccagatccctccgcacgaggcagccccgcagccgcaggtggccccggcgag

SEQ ID NO: 10538 - DNA, 483 bp, Homo sapiens
  source 1..483: mol_type = other DNA
ctccaggtaacaccgccatttgttccagttagcaaggggccctcaacgccgcgtgcgcctcacgactgatgagagggaagggagtaaacgcccgcggctcgccgcccacggcctctctcttgaggtggcacctggtcctccgacacgcggaagcatcagccgccttcgcccagatccctccgcacgaggcagccccgcagccgcaggtggccccggcgagtactgagcttgctgagctccggggcccgcggagctcgcgccaggctcctgggacggggagcagctgctccattgtgcctcgaggccccgatcgggctaggccgacggcctggcggggttcggcggcgggcgagtgactgcggccacgcctgaaaggcgactctcctgtgagtgggcgggaggcagtggcgctggcctgcggcgcgttcggaccggctgtggggcggggcagggcggagcggagccgtgcggcggggcggggcc

SEQ ID NO: 10539 - DNA, 698 bp, Homo sapiens
  source 1..698: mol_type = other DNA
tattacgtgtacacagacttatgaaaaacggtgaaaaacaacgatttacaaaaatctgcaataattcagtttctttcctcagaatgcttatactcatttaaaaatgaaatgtagggaacgaatgtttctttttttccttgctgctcgttagtgccgccaggtcctcaggagaggcccgccgctcagcccggggagggcatcctccggcctccgtgagtggccggtctctccggccgccagagcacccctctcaacccgggccttggggacggaggacggctcacgagagaccggtgccgcaccaggcccgtgtggcctttcgggccctgcccgccccttacccgccgggggcggctgcgcatcagccctcaggccccggaggtcccccgcgtccgctcccgccagccggcccgcgcctacctctccaggcagaagccgcgccggcgccaccggtcgcataggccgaggccgcgctgcttgccctgccgcccgggccccccgggccaccgcgcagccggacagctctgccgccggccccgccgcgctcctagtcccgtgggtctcgctgccacaaaatggcgctgagggaggaaaccaggccccgccgcccggccccgccccgccgcacggctccgctccgccctgccccgccccacagccggtccgaacgcgccgcaggccagcgccactgcctcccg

SEQ ID NO: 10540 - DNA, 589 bp, Homo sapiens
  source 1..589: mol_type = other DNA
ggtttccaggatttaatgattctttcaatcaactttaaagttcttcaggaagattctccaggaaaggcttgcctggaaaccctagaaagctcagaaaaatgttttaaacaaaacaaaggaacttttgttggggctcgcaccgagacgctcctagcaagcccctcacgcgagcgaatgactggcgccaggaggacccatcagagctgtgctgagacccgccgcgggccgggctcgcactcgagattctcgcccgtgggattccagtcctactgtttcgagaaaccctaagattttttaaaaaaaagcccaagggaactccaacattggggtgtccagaaacactggggtttcaggcgctcgaggtccgcggttctgcccgcaagcccagaccccggcctcacccgccccgcgccccgcgccccggcctcacttccgccccgcgccccgcgccccgcgccccgcgcgcctccgcccgcccctgctccggccttgcgcctgcgcacagtgggatgcgcggggggcgaggggcggggctacctcaggtcccgcccgcggcaggcctgtgggctgcgaggaggagctttgccta

SEQ ID NO: 10541 - DNA, 297 bp, Homo sapiens
  source 1..297: mol_type = other DNA
tgagacgatctcggaaaagcctcgcctctttttcctcacggacgatagcaagtcccctgccactgagtggccacgtcgaggggcacgcaggccctggagcccaccaaccacctcgtgctcggaaggcacacaccccacaaaaccatgtttgggtttattttcccgtatggcctggagcaaagccggccgatctgcctcacgctaacttggagaagggcccgccccttttctagaaggcgcgaaggttcaactccttcccgccgtgccccgcggccgggccggggcagccgggaagcg

SEQ ID NO: 10542 - DNA, 595 bp, Homo sapiens
  source 1..595: mol_type = other DNA
cccggatacggctggacgccggacgcccgacctcgactgcagctgcgggcggacagggcaccgggctcatccgagggcgcgcggacactcagggggtcgccctgaaacaaaagggggtgcgaggcgtggcccgcacgtgcgagcccgggaggcccgctttcccgcggagggcgcgtttccaacgccgccccggacacaaaaccctgccgcgcgcggcggggctcctcctcgctgtgggaaaagtggggccacagcgccctgccccagagaacggcgggtgggctgggtccggctgcggggccccgaggccctttcagggcagccggggtccggtcgcggtgggactcggccctccccggccgcaaacccgacccaggcccggcccgcccttaccgttttgggagcggatcgtttccccagtgctgcggtcaccgagtacacgtcgaattctgcttacaccgcgggcaaccagtatcgcggcccctcggccgaccggcgaccacagcagtggctgcgacggcgtggggagccccacccgcttcccggctgccccggcccggccgcggggcacggcgggaaggagttgaaccttcgc

SEQ ID NO: 10543 - DNA, 313 bp, Homo sapiens
  source 1..313: mol_type = other DNA
cgcggcccctcggccgaccggcgaccacagcagtggctgcgacggcgtggggagccccacccgcttcccggctgccccggcccggccgcggggcacggcgggaaggagttgaaccttcgcgccttctagaaaaggggcgggcccttctccaagttagcgtgaggcagatcggccggctttgctccaggccatacgggaaaataaacccaaacatggttttgtggggtgtgtgccttccgagcacgaggtggttggtgggctccagggcctgcgtgcccctcgacgtggccactcagtggcaggggacttgcta

SEQ ID NO: 10544 - DNA, 258 bp, Homo sapiens
  source 1..258: mol_type = other DNA
caccactttaggaggctgaagcaggtgccgagatggcaccactgcactccagcctgggtgacagagtgagactgtctcaaaaggaaaaaataaagtataacggtaatgttttctccgctaaccttaaagattgatttgagcacctcactttgaggaccatagttccaaaacgctgttcaagtataatccctggggacatgtaaatgacattctcaacaggctttgattgcaattgcaatcaggcaggtgtgggcgacg

SEQ ID NO: 10545 - DNA, 331 bp, Homo sapiens
  source 1..331: mol_type = other DNA
gccgagatggcaccactgcactccagcctgggtgacagagtgagactgtctcaaaaggaaaaaataaagtataacggtaatgttttctccgctaaccttaaagattgatttgagcacctcactttgaggaccatagttccaaaacgctgttcaagtataatccctggggacatgtaaatgacattctcaacaggctttgattgcaattgcaatcaggcaggtgtgggcgacgccagcagcacacggggaagctgggcacgtggggcggaggcagctgcctggtttcctaagacccggcggcgcgacggaagcgcgtgggcagcacgtgggc

SEQ ID NO: 10546 - DNA, 589 bp, Homo sapiens
  source 1..589: mol_type = other DNA
attacttgctcaagaaatgttagctattattgggtcatgattttgagtaagtcactgagtatcctttcataggtttttaaagattcatgcttacatgcttagcagtgtctggtatggaataagcactaaaaaagatgagcttttatgatgatgatgattactattttcagtcatgattattttgtatatttactctaaaagaaagtgaatttttttagttcaagacttttcttgctgtaggaagcccacgcttgggaaataacattcccacagaaggtctgagaggctctgacgggccaaggttgtaaacccccatgatttgactccacgggcagttaatcgaggttgggaacagcatccagcagggcgcggtgggaggggaaactgaggcccggctaggcacccccgccgcgcccagcccgccgagaggctcaggccccgggaggcacctggagcctgcgccccgcccgcgccgcttcctgtcccgcgcgctgcgctcacgtgacccgggcctgggaggagccggggcgggcgggggtcacctgaacaagggagtcacgtgagtgccgggcggctgtcacgtgacgcg

SEQ ID NO: 10547 - DNA, 582 bp, Homo sapiens
  source 1..582: mol_type = other DNA
ttgtttgaaccttaagctttatcttatataatttaaaacaatcatttaacatattattttactaattgttttcagtagtcatcactacatgttataatggtagctcttagtaattgttaattttggtgaaatacccagtaagttattttagttacgtactcagcatagctagggcaggccctaccaaactttatgaccttaaagcatttagtcaacctagtttctgacttgcataatttagaccatgtctatattttgaagacatttctattttcattttactgataatttaaaagacagcctatttagcaaagtcatacttaagtgaatttgaaaattgcttagacttatttacttaatttatgaacactcttttacttataagccaatttataacagtaagtgtacatacaagtaaacacatctagacatgtatacacacacacaaacacccaaattgggtgcagtgtatactgcttgggagatggatgcaagaactaattagccgaatacagtatctagtacctggctagaaaacaagtagatattctttttggaagagcgctactaggaggtttgcac

SEQ ID NO: 10548 - DNA, 506 bp, Homo sapiens
  source 1..506: mol_type = other DNA
taatgaaatacccagtaagttattttagttacgtactcagcatagctagggcaggccctaccaaactttatgaccttaaagcatttagtcaacctagtttctgacttgcataatttagaccatgtctatattttgaagacatttctattttcattttactgataatttaaaagacagcctatttagcaaagtcatacttaagtgaatttgaaaattgcttagacttatttacttaatttatgaacactcttttacttataagccaatttataacagtaagtgtacatacaagtaaacacatctagacatgtatacacacacacaaacacccaaattgggtgcagtgtatactgcttgggagatggatgcaagaactaattagccgaatacagtatctagtacctggctagaaaacaagtagatattctttttggaagagcgctactaggaggtttgcacgatttgatcagactgatttcaaaccactccttttcaaagatctctga

SEQ ID NO: 10549 - DNA, 333 bp, Homo sapiens
  source 1..333: mol_type = other DNA
aagagtctggtttccacgaacctctttccctccagatgggttaaggggaaggcactttttaaaagcagagttataaaatgcagccccagcatgcatcccgacggctcttgttgttcccacttcgaatctggaccagggttctgacacggatcctggttcacatcacgctgggccttgtggccaaacacgtgtgttttctccatagggccttgggccagcactcagattccctgcggtgggacacagagggcgggttgtttgtgcacatgcacccccgctggaggggtgcaccttcaaggaaaggccctgccctgaaggctggtcacttgcaga

SEQ ID NO: 10550 - DNA, 738 bp, Homo sapiens
  source 1..738: mol_type = other DNA
tgaggccagtttgaatccaagcagcctggcttcaaactccttgttccggaggaggaaccgcaagtcctcccaaggccttggagggggcgtggggggaccgcgacccagcccggggaaggcgtcccagcatggacccagcagcctgggcagcctgggcgggaagttctgactggcgttcagaccgaaggtgggtgggaaggccctggcgaaggaggtctgcatcaggcctggccttgaggcgatcccttgtgtgggttgcccggctgccctctggggagtcgagggcgatggccagcgctgtgctgggaacgggcagccctgccctgccctgccctgccctgccctgccctgccctgccctgccccacatgggcgcaggaggcctccgcacgcgcaagggccaagggctggagggggctctcccgggcacaggcaccggacccggggcgcgcgcgcgcgtccttagtccccgggctgcactccgggccgctgagagatcgggtcccagaagttccgggagtggtcgggtgaccctacggagcccgacctggggctgactgcagagcaggctgctggcaggaaggagctccgcgccaggccggaggctgcgcccgtcactcgcggtcccggccgggtccctggcgcgtagtcaggccgcaccgcccgagccccaccgcgcgcccaccccggccgggtgcgtccggctcgcggccgtccctcccgcgacctgtggcccggg

SEQ ID NO: 10551 - DNA, 745 bp, Homo sapiens
  source 1..745: mol_type = other DNA
gggcgtggggggaccgcgacccagcccggggaaggcgtcccagcatggacccagcagcctgggcagcctgggcgggaagttctgactggcgttcagaccgaaggtgggtgggaaggccctggcgaaggaggtctgcatcaggcctggccttgaggcgatcccttgtgtgggttgcccggctgccctctggggagtcgagggcgatggccagcgctgtgctgggaacgggcagccctgccctgccctgccctgccctgccctgccctgccctgccctgccccacatgggcgcaggaggcctccgcacgcgcaagggccaagggctggagggggctctcccgggcacaggcaccggacccggggcgcgcgcgcgcgtccttagtccccgggctgcactccgggccgctgagagatcgggtcccagaagttccgggagtggtcgggtgaccctacggagcccgacctggggctgactgcagagcaggctgctggcaggaaggagctccgcgccaggccggaggctgcgcccgtcactcgcggtcccggccgggtccctggcgcgtagtcaggccgcaccgcccgagccccaccgcgcgcccaccccggccgggtgcgtccggctcgcggccgtccctcccgcgacctgtggcccggggctgctgcgggcgcccggggaagagaggcgggggccgcggggggcaggaggagcggctgcggccggcacagcgccagggcgaagagaggcc

SEQ ID NO: 10552 - DNA, 342 bp, Homo sapiens
  source 1..342: mol_type = other DNA
tgggtgcagtagtgcctcagcctacttagtagctgggatgactgggccttggaaggattgatatcttataacataatttataattacagaaaacatgtgagttcactaggaataaataaattttgaagataataaaagattttcacttatgttgtcatttgtggagatgttaacatgtgtgtgcacccctgggtagtatgagctacttttatgattttattttatccaaaagaaagagaatgaaactgaggggggaaatggctttcaccacttcccagcatgcactctcaaatattttataagactctatattctctgagagaatcattaacttaatttgac

SEQ ID NO: 10553 - DNA, 576 bp, Homo sapiens
  source 1..576: mol_type = other DNA
gccagttaatgaataggcaggaatttcactgcctggaaagaggaacaatgctttctggtccttatttcacatctaaaatagagaggtcaattgatttattcctaaatatctttgaacactaaaatagaagttttacagcatatatactacctggttgctctagacttaagccagggaaaagtacagattcaacatttaaaattgagatagacgctttccacttaatgctaccagtcttgctttatttcatgagaatgagaatataataatatggcatagattgatgtcttataacataatttataattacagaaaacatgtgagttcactgggaataaataaattttgaagataataagatactttcacttatgtcgtaatttctatgtcatttggtgtaggatgtagagatattaacgtttacacctaacttaagtttgtctgcacccctgggtagagacacaaccaggaatgagaacagccctgcctccagcaaatgtgagatacttttatgatttcattttctccaaaagaaagggaataagctgagagaatcattaacttaatttgactatc

SEQ ID NO: 10554 - DNA, 602 bp, Homo sapiens
  source 1..602: mol_type = other DNA
cttatatagctaatttcacaactggtctttaaatataacatacctataatcaatttaatgtttttctttgttacttcacctatcaaagctcaactaaatgaggtttaagaaatctgcacatttgaatgtacttaattttaaaagattctggtatttcaccctatgggaaattttgtaaatatttccaacttaaaaaaaaacttggaatttcaacaggatttctgtaactctgaaataatcttcatcttatgatggaattccggagactttatgtcaagtcttaaaaattcgagcgtccgtcctcctggaaggtgggatccgggtggcaggtccctgggcggcgactccggccgggctcatagcgtcgcgcccgccccgctcaagcgtccctcccagaccgacgaccgcctgggaagcctcgagctcccagcccgctgcacagcagtcccccactgccaccggccggggcgacaccgggcgagctggcgagacccggctccaggaccgaatcgcgccgacacttgagccgcccccgtccggtcgcattccggcgcccgccgccgccgccgccaccgccgccgatctgggaggcttgtccctcg

SEQ ID NO: 10555 - DNA, 386 bp, Homo sapiens
  source 1..386: mol_type = other DNA
acatgtatttttcctttatagattataaacatctaaagaacaaggttaacccaggagtcaagtaaatagttaaatattattttgacaatggctgtaatagtggacatttgaaaggaatacacctcagtattttgaaattgaaataattttctagatcctagcccaccctttttaaaaattgtgaagacacttttactataaaggtctgcccagaccctctctgatacacctgtgtaaatgccacgtgcatgtgagcatgcgacagtacgtgtgtgcacgcctgtgcagtggtaatcaaccatggttttgaatccttaaaatgagcctgcaaaagcaaggccacttccagggggctttcattttttttttcaaaggaaggggaaggg

SEQ ID NO: 10556 - DNA, 619 bp, Homo sapiens
  source 1..619: mol_type = other DNA
cataacttataactgagtaatgttctttagatcttaagtgcttgtctttatatagctttacaataaatttgtttctcttaaaattatctgtgcactagattaagttaaattaaaataaaatgtatttaactgtcttcaaaataaggtataggctattttcacagcacagatattggaaaatctcttctacaagtgaatcttacgtaaaaaaagagctcaagaagactcataaaaaatatttttttcgtaatttgattaactttcaagtcattcaccaaaagtcgaaaagttggacaacattcttgttttaccacactgatggggagaatgtttacattttaacaataacttcacaaataaacagatgtaagaagtgttttcagtgcataaagatcatatactttataaatccacctcagaccattcaaacatatggtgcatttccattaattttcagggatagcccctaaagtaaagtgttcatgaacaactctgtttcgttcacttgcacctcggtcgttcttttacaaaaaaaaaaaagaaaggttattttgcaaaaggcaatagatttaatcttggctacttcatctcagccctccaatgagaagtttaaaaggaa

SEQ ID NO: 10557 - DNA, 385 bp, Homo sapiens
  source 1..385: mol_type = other DNA
ccttctataaggccctttgctgaggctagttaattttgggcggtccagaaaccataagttatcagccccccacacactgtggggcaccgtttgctacttgccaagtaactgccttttttggctcccctgattcagagcgagtgcatttaattcaggaagatcaccgactgagtttttcatcatggctttgactgtgaaaccctctggtgcaccgggagcggctgttgtgccagcagcttgcttcctagaaaatgtcttgttctcataaaaagtgcctcccggttgctaagcgactggtcaacacggcgggcgcatagccccgccccccgactcccagcaggccctgggccgcgccctccgcgcgtgcgcattcctagggccgggc

SEQ ID NO: 10558 - DNA, 666 bp, Homo sapiens
  source 1..666: mol_type = other DNA
tcggtcgttcttttacaaaaaaaaaaaagaaaggttattttgcaaaaggcaatagatttaatcttggctacttcatctcagccctccaatgagaagtttaaaaggaaacatccttcctgaaagagccccacagagagtgggtctcgatgggtcctgaaccgcaccacaaccggccagaaggcttcgggaccccacacggtccgggggaccgcgaacgaggagcgggggtgcggggccgcctggcgtccccgtcgaggcggtcttcatgagaacgctcagagcaggggcgggcaggcgagggcttcgaacgcacacactggggccccggacccgcgtcgctgagctggggagcccggcggcgcgggccggggacggcacgggcactttggccccgtgcaccgggggtcctggtcggccgaggcggggcgtggcgccataccggggcgtggggcggcgcagctgtacctggcaggtacccacgtacctatcatggtcactgggtaggtggcggctgcgggccaggaacaggcccatgcgcgcagcggcgccagccgcgcctcccaccagcggctctcctgctccccgcccccgcgcccggccctaggaatgcgcacgcgcggagggcgcggcccagggcctgctgggagtcggggggcggggctatgc

SEQ ID NO: 10559 - DNA, 501 bp, Homo sapiens
  source 1..501: mol_type = other DNA
tcccttggcacatgggatcgcctgaggagagagacaggtgcgcacttacacatctgtaaattccacgtctgctaactgaccttgggcaaattaccccacaggatcacttcgtgcctactctgtgctggacctccaggtgcagttgggtgggttacgcactgtccaacctgcaagaccagttatcttttgccccctggctttgaaagtgtttcacttatttcataaagctgatgtacctttaaaaacaaatgttttatttacagtattgtatgggatgggactggttccaggaccacccccttatataaaatgatgcagtatttccatataacctatcatctctagattacttgtaatacttaagacaacgtaaacgctatctaagtaattgttatactatagttttatttgtatttttgtattgttatttttaatttaaaacttttttccaaatattttaaatctgttattaaaattaaaaaaattattactgttccagaa

SEQ ID NO: 10560 - DNA, 824 bp, Homo sapiens
  source 1..824: mol_type = other DNA
tcccgcagaggcggacgccgcggcacgcgcctcgactccgccccgcagccaagacccgcgccgtggcgggcccgacggccaaggaaagcccaccagccctccgcaccgtgggcgacgggccaagacccggccctaaacggccagacccagcccctagtcggctgccgcccccgccccacgcaggcgcgctccggggccctcccctcccccaccgcgcgctcgcggggcccgacgggggcggagcgaccctcggaaggggcgtggcgaccgggctcgacgcgcgcacgcgctctggagccccacggctacgtgtcgggccacgtgaaaaaaaaatttctcttctgcggggcgaggcggaggcagcgctggcgcgtcccgctggaattcctctcgcctgccgcgccagccccgaccgcgcccgcagccccacccgccccgtgccgtggaaagccccgcgccccccccgcggccgtcggccccgcagcccacacccacccgccccgggcgccccgcacggcggcgacccagtccttgcgcccaggcccgccgagcgccgcagtccacactcccgttgcccccgtcgcccgccccgccggggaggcagggaggagggggcgcggcgccggcggctgccccggtcgcggggcggcgggcagcaggcagcgggagcgcgccggccgggacccgctaacggccgccctgcgcggccccgcccgccgcccgcccccggccctccccgcgccgctgcccctccccccgccgccgccgctgctgccgccgccgctggcagcgccgcctgaactgaggcgaactccgccgccaag

SEQ ID NO: 10561 - DNA, 874 bp, Homo sapiens
  source 1..874: mol_type = other DNA
cgaggcggaggcagcgctggcgcgtcccgctggaattcctctcgcctgccgcgccagccccgaccgcgcccgcagccccacccgccccgtgccgtggaaagccccgcgccccccccgcggccgtcggccccgcagcccacacccacccgccccgggcgccccgcacggcggcgacccagtccttgcgcccaggcccgccgagcgccgcagtccacactcccgttgcccccgtcgcccgccccgccggggaggcagggaggagggggcgcggcgccggcggctgccccggtcgcggggcggcgggcagcaggcagcgggagcgcgccggccgggacccgctaacggccgccctgcgcggccccgcccgccgcccgcccccggccctccccgcgccgctgcccctccccccgccgccgccgctgctgccgccgccgctggcagcgccgcctgaactgaggcgaactccgccgccaagagtcggagcgcggcggcagcggcagaggcgccgcggcggggaccagcccagagagaccccccgagcccgcggcacaggcggcggcggcgctgagcgggctcgaccagccgagcgagcggcggccccggctcctcctcgtccggcgccagcagcccgcgccccgcgcccgcactcggccagccgagacccgcctcccgcccgcccgccggcctcgtgagggacgcgccgagccgggcggccgagagcggcggcggctgggagcgcgtcgggcccgggcggaaagtgcctgcggggggcgggcgagcgcgcggtgccggccgccccggggctcggcgcgggagccagagcgggagccggcgcggagcgggacgccgggtcccgagcggcccgcggccgggg

SEQ ID NO: 10562 - DNA, 487 bp, Homo sapiens
  source 1..487: mol_type = other DNA
gtggtgcggagactgagcgcatcccttctccggggcagaaaagacccccctcttaagggtcttttggggtccccccacactgcgcctaggcgagggcgcctgtccccacgcgggaggagcgcccctagcgccggcgacatctctgcggacctggtggtcccagcgcgcgggcatccatccattcattgcgactcccggcgcggcggccctaggactaagaggaaagagaaccaatgtctgtttgcactccctgcttctccctccaggcagagcgagcccgacacgtagtgatggttgatttcgtgaccaccccccgggggggcgggctggcaggtgcgggggtgggagccgtctccgcgggagcagccttgccaaaggtccggctgctgacgtccgagcgcccgctcctgtcaatgaacggcagcggtagcctgacgtcacgcttaaagggaaactctctaagttccgggcagccgggagagtcgtt

SEQ ID NO: 10563 - DNA, 752 bp, Homo sapiens
  source 1..752: mol_type = other DNA
gggtagccaggcgccgtcgccggggcctggcccccaggcccgggtcctcccgcttcgggcggccggcaggggtgggcaggtcctgcgggggcggagcccaccgagccccggcccgccgcgcccctcccgcccgcggcctgcccctccgcggcccggggaggaaccatggccagcctcgaggagcctcttgctccccgcccccagggtcccctgccagcggccggggacgagccgggctgcggccccggcaaactccgcccggaaccccggctcagcgcggccggcggggggagcgcggcgggcccgggcccggcccccgagtggcctggccgtggccgggcggagcgcgccgcgcccccgcgcccgcccctctcctccgcaggccgccccagccccgctgggggccccggcgccctctctgcgcgcggcggcggctgcggctgggtcgcggcccgcgctcccttggcgctcgcctccccgtgcgtctcccaggaagggagggcgcagcggcggcggcggcggcgggaggaggcggcgatgcgagcgtccccaccagcagtagtcaccgcggcggcggtggcagcggcggcgggcggcggcggctcttcctctcgcctgcgctccagggcttgctgcttccagcccgtgccggtccccggccgccgccgccgccccggctcccccttggccaggccgcccgccgcgcgggctcccccggcttccccggcgccggcccaggcggcggcggccaa

SEQ ID NO: 10564 - DNA, 609 bp, Homo sapiens
  source 1..609: mol_type = other DNA
ggccgggcggggaaagcgccccgagtcccactagtccgaagagagcgagagccgcggggacacccgacgccggggcaggctgatccacgatcctgggtgtgcgtaacgccgcctggggctccgtggcacctgcggcgagacgagcgcggcgcatcccaaagcccggccaaatgcgctcgtccctgggaggggagggaggcgcgcctggagcggggacaggtgaggccgcgcgaacgttccagcctggcgcggctgcgggatccgggcgcgctgggaaagcgaggaggaccccgcgcgggaatcagggagcatcgcaggctgccgggcagcccctcgcggaagtgcgggctggggcgggctggggcgggctggggcaggccggggcgtccagcttaccttcctccggggcttgccccgccgctgccggggctcgcagggctggggccccggatttacatgaaacaggcgtgcgggagcccattgttggcccccggcctcccagacccgcccggctgggtctgatatggccgctctcggcggctgcccggcacttgcgtgcgcggcccaatccgccgagcaccccagcgctgccgccgcggctctggggag

SEQ ID NO: 10565 - DNA, 651 bp, Homo sapiens
  source 1..651: mol_type = other DNA
taatttttaatctcctttcttagcatggtggaaaatgagagagagaaaaatgccacttccccatttcttagtgtcagcacgagccggagaacagtaaacgcttgttcaatggtttcactgttcggaaaaatgggttgcattagctattccttttataaataagatttcagaggcagcctcttgtctgaaatacagctcctcgctttaatcctgaggcaggtgtttgtgtctccggatgaggacacccagctgggaaggctagcgacgcccccagggccacctcatgggtggcagggcgctcttcggagcacggccacctgcccgcaggagccctccgctctccgattccaggcgaggggaggcgcattcggggcctcgacttctgggaacccggggtgccgcggacccgcccagcaaggcccctcgcggggcccggaggacgccaagtgcagggtcgtgccccagtcgggtctacactcaatggctgtgcgccagctgtgggcagggggtccacacccgcgctgtgtccccgcgcgttaccacggcgcacctcgcggacagtgggaagggatagccccacgagcatgcgcgcattgctacggcggccgcgctgacgcacaggaagcgggcgggaccggacttccggctggt

SEQ ID NO: 10566 - DNA, 732 bp, Homo sapiens
  source 1..732: mol_type = other DNA
gcaaaagccttcaatgtgttctcgtgctgcggtttatatactcctaggcgcggtgggacttacagacggctccctcctgagcccgtagctgcagcgcgttggtgaggagcgccggccctgggtgccgcccgccaccctggagggaccggtccgggggtcgggagaagccaggggccccggctgcggtcgctggcccggggctctgcgcactccccagtgcccggaaaccgcaggctggcccagcttgcgggccgggtccgcccacgtgggtgtgggaagcgcaggggacgcgggccgcccggccaaggtgcccttgccaggaaccggcgcagacacaggccctgggcggcgcgggaacccggccagtcccaccgcgcgctgcgccgcaggggccccactgcaggtcgccccaagaccgcgcgacgctcggcagggcgcccacagtcctgtgggtcagagaaatgtcacctccacgtccccgctggccgggagccgctggagcctagcaaccgcctgccagccccggcccagccccagccgttttacggcagcgggccccgcccccgtgcgccaccgagggcgggaaggaggcgtgcggcacgagccagccagtccgcgccaccatctctggccctgcgccctgtcattggccgagagccgggcggcgcggcgcggccgtaaggcgtggccgggtgtcgtgaggcgggccttcgggctggctcgccgtcggct

SEQ ID NO: 10567 - DNA, 487 bp, Homo sapiens
  source 1..487: mol_type = other DNA
tcagctccaaataatccttatgccaaagcagcatattttggggtggagggtctaaaatcatttttaccaactttagccaaaaaaatactttggccttaatcaaaagaaattaagaattttcgttacttgcaacgggtaaagaattcattaaccgaggcagggatgacggtgatgcctgaggttcacgtgggcctcaccgtgatcggccagtggggttggactcccactctctggttccaggcagtgctcttggtcccagccctggcctcacagggaggcagctgcaagcaggaaatactgtcttagctgtgtgcgtagtcctgagttttcagaatgcagtcatctcactggggtcttttctgtgtgcagtcaaactcaggggaagcccttaatggaagtaaagccacagtctttgattgccttgccatcaggacctctgtaaaccaggcctgactgctggggatttcattaggacaattgagatgtt

SEQ ID NO: 10568 - DNA, 528 bp, Homo sapiens
  source 1..528: mol_type = other DNA
aaaaagaaaaaagtgtttccctttaaggcggatcccgagcggcgctgccgccagcagcgggtctgagggccttgccctagacccaggtcaccccgcccgggtattcccagcgcgggccctgcgggaccggctgcggagggcggatgcgtctttgttctgcagccgcgggagggaggcgccccgagggctgcctgagcccccgccctcgggcgcctttgtccgctccggcggagggaaggcgccggttccgcggagggcggctcctggccgagctgcagggcccgctggcaggcggcggtccctcgctcgctgctgatcaacaattaaagtttggttcggggaacgcccgcgactgcgcggctccggagcagctgcacaactcgcccgggccgggagctgtcccgggccgaggctcacggctgcgggcactgattggcgggcagtgctgtgggcggggccgtgggcggaaccgcgtgggggcggggctgcacagaggcgggctctcccggggccggggcgcggagcggc

SEQ ID NO: 10569 - DNA, 622 bp, Homo sapiens
  source 1..622: mol_type = other DNA
ctgtatgcgcatgagtatacatgtgcgcatgtgctgtgtgtgcaagtgtgtacattagtgtgcatgtacatgcatgtgtgcatgtgctggcatgtgtgtgcactgtgtgaacatgcatgtgggcatgtgtgtgcatgtgtgaatgtgtgcatgcatgtgaacgctgtgtgaatgtgcatatgaacatgttcatgtactgtgtgtatgtgtgcacatatgggcatgttctgcatgtgtgcacaggcctgcacatctgtgtatgtgagcatgcataagcatggtttcttgacagcacttatctttaacaagaatatacctgttcttttagcaatagggtactgttgcccttttggcctacaaaagccatttcttctcctaatatcttgatagaaactttgttaattttctctaacataaaagcagaggcttttcaccagggcaccaggctggcctctggtggtgaccaggggatccaacccccaagcccagctccactgcccacaggcgagtcacctggggacagcagccttctgctcaatgaaggggtccgttctttttgttatcttctaaaagttctaaaagttcatgatcttaagaccttgatgataatccaagatctgaa

SEQ ID NO: 10570 - DNA, 638 bp, Homo sapiens
  source 1..638: mol_type = other DNA
ctaagtctttgtgagaattttctaccaaggcttattcttatgattcagaattttacagtgtacctttatactttaataagtgaattctatatatggtagtttggagtgcactctgatacagcccacgacacacatatgctttgtggtatagcctgttgaggctacaaacctgtacagtgtgtgactctactgagtactgtaggcacctgtatgtaacacaataaggatttgtgtatctaaacatatctcaacataggtggtcatatccctcgtacatgcaggccttcactgactgaatgtcgtaatgtgaaatgcagtttaccaggataagcctggaatccgatttcaattgctgtcttttaaagcaggtgtggcaaacgggtggtgatgtgtgtgccagctccactcggtggtggccccagcgctcccatgctccgaaggagtcaggaactggtgtatttgcagtccatgttgacacatttgttgcataaagtcatagaaaacactttcctttaagagtgtcttaatttttaccatgaaatatgatacctgaaaagaaattatacagctaacttttttaaatttaaattttagtgtgcttctaaaattggggataaaaccatccatcaattactacc

SEQ ID NO: 10571 - DNA, 272 bp, Homo sapiens
  source 1..272: mol_type = other DNA
aagatttttgtaaacctttaatctgcagtaaaatatcattgaatacaaattgctgttcactcctctatgtagaatggatgcttaaactataatttgtagaactctgcgaaattatttaatcggattgaaataattgcctatgttgcaaataaggaattttatccttcctactttgtaaaagaaatgattgcccaggctatagtgcaatggcatgatctcagcctcctgagtagctgggatctcaggcacctgcgaagatccaccttcctaat

SEQ ID NO: 10572 - DNA, 793 bp, Homo sapiens
  source 1..793: mol_type = other DNA
cgggtgcacagcccgtgggcggggccgcgggtgcaggggaacccgtgcctctgaagggctggcctatgggactggccctggctacgccaaggtggggctgacatgaagtccccttcatccgtggggggtggcccgtccctctgggaggggatccctcacaagatgacttcccaggtcgcgccccgaggcggctctttgctgcccccacagagatgacttccgggctcctggggcccgcggggaggggcaggtgaggcccagggctgggtgagggccaggccctttgttggtgctcccagcacctagcaccgggagattccaggagagtgacccgagtaggtcccctcctaagagccgtccctcgggctgcgcagtggagcgccgaggtggcgggaggctgcggggagcctgggcggccaagcaccatctgccaggagctcccgggcagcttgcagcgggtgctgcgtgcggaccgcgggcctgcagggtgcgcgggtcgggctgggggctagtggccctggggcccgcacgcccacttgctggcgggggatggcgcagacacgggcggtccccccgagggcggtcctcacgggtggtggggcgcctgcgtggcgaaggaacacagccgcctgacacgccctcaaggcccgcggagctgctcctgcctcggcctctctgagccaaccacggggcggggcgtgaacgccgggcggggacgtgccgttctggggggcgtgtccaccggcgggggcgtgccgtcctgggggcgtggctctctgctccggtgcaggcc

SEQ ID NO: 10573 - DNA, 753 bp, Homo sapiens
  source 1..753: mol_type = other DNA
aacaggaaattataatttcaagacaattttcagcttcggctggacgcgctgctttcccgccgcggatcatgcccgagcctgaggaagagacgctggggccgcactccagggcccagctgcgggccgcccgtgtggcccccaagccccgcggtcccgcccccacggaatgaggcaggggatgggccaggcacccccagtccgcggtgccctccgggaccacacgaacgaacgagccgaccccctctgtggggcgggcaggacggaggccatgccggggcgcgcccccagtgcccgccggccccggtccctcgccagggaggcggcctcctcgccgcgaccgttgtgacgcccgctgtccacgcaagccctgcggatccgccaggcccggccccagcctccggcctcaccttgatgcggttcaggaccccgctgttctccagcgtctgcaccagcaggtcccgcagctccgtgtcctcctcggccaccactgcggccgccgtcgccgccatcttgcttacggccgcagcagggtacgctccgcgcgcgggctacgcggccgacgcagccaaagccccgccccgacgcgcagcgcgctggccctgccccctggcgtcgggaggcggggcatagagacctcgggcgctggacaccgagccttggggagcgccggaccactgagcgccgaaacttagggtgggcacgcaaggggcggggcgtcggcggggcctccagccggcaacccgttggctgccg

SEQ ID NO: 10574 - DNA, 689 bp, Homo sapiens
  source 1..689: mol_type = other DNA
cactctccaaggcagggctcggtccgggggctggttttgccaagggcccaggcggccggagagggcgcgtcagctccggcgggacggggcttccagggcccgggaggggtccaggactccccgccggcgcctggctgtcggcggagggccgcggggcaggagggagtggagactgcggccccagttcgggcagcgcggagcccacccaacgccctcctcggcccttagcctcggaggccgtggccgagcgccgggtgacaacctgcagggcctcctcgcgacctctcgggagtcccttccccggcgcccccccggggctgcaggggctgcaggttcggtctcggggcctccttaccgcagtccgcccggcgtgggcggtggagtccaggcggagtccgctctccacacgcgagggcgcctcctcccggcttcaaagctcgcgcctcaggcgacggcagccaacgggttgccggctggaggccccgccgacgccccgccccttgcgtgcccaccctaagtttcggcgctcagtggtccggcgctccccaaggctcggtgtccagcgcccgaggtctctatgccccgcctcccgacgccagggggcagggccagcgcgctgcgcgtcggggcggggctttggctgcgtcggccgcgtagcccgcgcgcggagcgtaccctgctgcggccgt

SEQ ID NO: 10575 - DNA, 424 bp, Homo sapiens
  source 1..424: mol_type = other DNA
tttgtgctttctttccatctgcaaaatgaaggtcacaatgtaggattaaatgaagtaataaacatgaaaagtactttctaaattgtattacacatgcattaattaacatttaacaatgctatttataatcatttgaaaaagaagggagaaggtaacctagatttccccttaaattcaaattggtcaagttgtgacacgtggccacatactgattctctattcactgtgtctttactcataaagcatatatcatatggtattttcaggtttttttattctcttaagaaaactgtagagcctttcagagaactttacaatcatttgaattaatttgtaatttccaagaagaatcaagaaatattccacagatcaataattctgaaacaaagaaaaatttacgtctgaaattgaaattaccaagtga

SEQ ID NO: 10576 - DNA, 376 bp, Homo sapiens
  source 1..376: mol_type = other DNA
acagaaaaggcccttcttttatccagtaagccactggggccagcagagtctcaggacacaggtcctgcctccagcttctcaggctcactcaggcgtgaggacgtggagctcaggagacgtggttcacagcaacccaggtgcgaacagcgcatctacaaataaatttctaaagacagggtcacccagagattctgtctctgtgccacatgaagaagctcctctgttgctctcaaagtatcttgtaataatagctgagatgcatggagaaccacctctccttcaggcgctgctcctcggcttccgtggacgtcatggtctttcttctgaaagaggaaaccgaggcttgctggggctcagtggcctggggccaggactg

SEQ ID NO: 10577 - DNA, 365 bp, Homo sapiens
  source 1..365: mol_type = other DNA
gagacgtggttcacagcaacccaggtgcgaacagcgcatctacaaataaatttctaaagacagggtcacccagagattctgtctctgtgccacatgaagaagctcctctgttgctctcaaagtatcttgtaataatagctgagatgcatggagaaccacctctccttcaggcgctgctcctcggcttccgtggacgtcatggtctttcttctgaaagaggaaaccgaggcttgctggggctcagtggcctggggccaggactgctcattctttccagggatcctaaataccctacaggatatacatggttaaccatttgcatttgggcaaatatacttttcaataggaagtggcaatccagaact

SEQ ID NO: 10578 - DNA, 203 bp, Homo sapiens
  source 1..203: mol_type = other DNA
caggggagccccaggtgtgctctccacaggagatggagatgcattctgtgaaatgatgaaaatttgaatcctgtctcctatttaaactcacatatattattttcccttcataaaaatgttttttctagtaaataatttgacatccaaagagagtttatatttcttcaagaatgtatgctcagagaaatgagcatggactccac

SEQ ID NO: 10579 - DNA, 581 bp, Homo sapiens
  source 1..581: mol_type = other DNA
gatttgccttatagatctaatctagacagaaatggctgacagacatcaagttttacttataattgaataaaaataatttttcttgcttattagctatgacatttgtggtaagttgcttaaagctccagaacagttgtctctagccacatgtggttaaattttaattgtaattaactaaaaggagatgcttttaagttgcacttgccacatttcagaactcaatagtcacatgtggcgagtggctatcatttatataatgggtctaagatttctaatgatcattagcatagcactattgttggtaacatgaaataatgcatgaaattctttgcatattgtaaagtactatactcatgtaattgtgaaactgtacagtctttgcaatactaagacctttaagactgaagtcctcattctgcaccactgacaacttctgacagtttctcttactgtggaaggttctattctatatacacataaaaagttattagaatttaattccattgtggatcacaaacagagctcccgtatgctttcagtgataaccaagttcattaacgagtgacagtcttaatgactaa

SEQ ID NO: 10580 - DNA, 286 bp, Homo sapiens
  source 1..286: mol_type = other DNA
caagccacttgctctgagacgcctggcaaggcctctccagttcctgcagtcctgaacctcaggggtggtggccggacacgtaattcattttggaatctcaactgcttttgtgctctgtcgcccggctagagtgcagcggcgcaatcatgatttcaactcccgccaggcagcccacaaggcctgccccctgtgtgctggccgctgaggcctgaggcatggggactcctgggtccctgtccctaaggggtcctgacagtctgggccccaccctgagtctatgactggc

SEQ ID NO: 10581 - DNA, 486 bp, Homo sapiens
  source 1..486: mol_type = other DNA
ggagcgaatgaggggcagtgccctcctcccgcgtccccctcgtgggctcctcccaggccgaggaagctcgctgcccaggcttggacgagacgtctgggtgcagctgcctcaggccctctccacagtgctgtgcagacttcagctccaagaagttgcaagtgatggagccaagccaaggcttcggagtgagccctgagacacctctcagctggccgggtggccagagatccaccctgcaggagccgccccgaggcaggtgggccacatctcccaacaggcccctcgcaagaggaggcatctgtggtcttcccagagcaaaggcagcagccccgggagcccagccagtcactggccacctgcacgcctctacacagcagacctggccaggcgggcagtgcccctggccccttgctgcactctggccagccagtccgtggatgctcctgccaggcaggactgagccactgccagtctggccggtgccag

SEQ ID NO: 10582 - DNA, 457 bp, Homo sapiens
  source 1..457: mol_type = other DNA
cggaccgaacctagcaccgcccgtccggacccagcagcgcccatttggatactgcaccgcccgtccagacccagaacgcccatgggacccatcgcccgttcggacccagcagtccagcaccgcccgtccagacccggacccgccagtccggaccgaacgcccgtccggaccgaacgcggatccagcaccgcccgtccggactctgcaccgcgcgtccggaccgcgcgtccgaaccgaacctagcaccgctggggacccggtaccgccggttgggacccaccaccgcggaaccctagcaccgcgcggggcccgccctccgacacctccctccctggcggccgcggcagcagcacctagtggagcggcccggaggtgcggcggcgccgcgcggggcggcggcgcgcacggcgggcggcggcgcgcacggcggcgggcggggcgcgggcgggtgcgggcg

SEQ ID NO: 10583 - DNA, 589 bp, Homo sapiens
  source 1..589: mol_type = other DNA
agcaccgcccgtccagacccggacccgccagtccggaccgaacgcccgtccggaccgaacgcggatccagcaccgcccgtccggactctgcaccgcgcgtccggaccgcgcgtccgaaccgaacctagcaccgctggggacccggtaccgccggttgggacccaccaccgcggaaccctagcaccgcgcggggcccgccctccgacacctccctccctggcggccgcggcagcagcacctagtggagcggcccggaggtgcggcggcgccgcgcggggcggcggcgcgcacggcgggcggcggcgcgcacggcggcgggcggggcgcgggcgggtgcgggcggcgggcggcgggcgccgggcgcacaccggccggcggggctgaggcggcgcggcgcggcgcggactgagccccaggcggaggccaagtcggaggacgcggcgcggccgcggaggcggaggcagccgcggaggcggaggcggccggcggggggtggcgaggggcgccgggcccccgcggacctgtcgtcctcggcccgtcctccggccccggccccgcgcggctgaggaggcgcggccaggaccatgtc

SEQ ID NO: 10584 - DNA, 651 bp, Homo sapiens
  source 1..651: mol_type = other DNA
cctgatgctgggcggcctggaacctggttccccagagtctcagaacacagccaaggctgggttctgggagctcagcctcagcgtgcctggggcctctgcacttgctggtcctcaatttgggacccaccctcagacggggcaaatcgccctgggccagtgaagcttcaactgccctcctgggcgggctctcggggctggaactgtgtgccccagggcaggtctcccctccgcgctccgcactgccgacaacgcaggcagcgatggcttcaaatgcatgccgccgtggtccggggagaaacccggcagcggggtcgccagcagcctgcaaggcgccgaacccggtgcgtccgcgcagggagcggcccgtctggggtgggtggcgcgatcgcctctgcaaggctgggatgctgcagccctgggccgggcaatcgggggacgtgtgacccggggatggagcgaccctccggactgggcgacccctgggacaggcaactctggggccgtgtgacctccaggacgggacccccgagaccctgcacggcccgcgctcctgccggggagggtcggctgggcggggagggggcgggcggcgccggccaatccggaccccgggccgcgtcaccctccggggtcaccgctgcctccccacgt

SEQ ID NO: 10585 - DNA, 864 bp, Homo sapiens
  source 1..864: mol_type = other DNA
ctggggacccggtaccgccggttgggacccaccaccgcggaaccctagcaccgcgcggggcccgccctccgacacctccctccctggcggccgcggcagcagcacctagtggagcggcccggaggtgcggcggcgccgcgcggggcggcggcgcgcacggcgggcggcggcgcgcacggcggcgggcggggcgcgggcgggtgcgggcggcgggcggcgggcgccgggcgcacaccggccggcggggctgaggcggcgcggcgcggcgcggactgagccccaggcggaggccaagtcggaggacgcggcgcggccgcggaggcggaggcagccgcggaggcggaggcggccggcggggggtggcgaggggcgccgggcccccgcggacctgtcgtcctcggcccgtcctccggccccggccccgcgcggctgaggaggcgcggccaggaccatgtcggcgggcggccgtgacgaggagcggcggaagctggccgacatcatccaccaaccggctggacctgttcgagatcagccagccgaccgaggtgagcaccgccgggcgcggggcctgcgcgacccccgcccgctgcgccgcgccccgcccctcccccccgccgccgcccgccagccgcggaccccaggcccaccgcgggccccggcgtcccccgcagcccccgtccccctgccgcggtgtatcccggggtcgcgcgggccgagcgggggctggcggggcgcggcagtcacctgttcccctctccggccgctcacctggtggctcacctgggccgccgcccccacccccgcgagcgcggcgcggccccggcctcatccccggcggcgcggggggcgcggcggcgcgcgggg

SEQ ID NO: 10586 - DNA, 531 bp, Homo sapiens
  source 1..531: mol_type = other DNA
gaacttccagaacctgcggggtaacacaacttcgttaatatactaaaaacgaactgtacaccttaaattaggtgagttttatggtataactgcatcttaagcaattattttaaaaatttaaaaagcaagctgagcagcctggccaacccagctactcgggaggctgaggcaggagaatcgcttgtttccaaactgcagatacccattgggaaacgtgggtaacacggttttgaaatctgataatgtcccaatagtttatctttataaacattttaaaacattaacaagcctcccggctggccctccccgctgaagtcacggaggcgctcagctggccccggggtctgggtgcgcccgccctgcccgcagccggcgaggggccctggggggtcggcggggcgggtccgggggaggccgcggtgacctcggggcgcgtgcagaccccgccctccgcgcctggcccagcccaccttggcgacctgcggagccgggggcggagagaggaggcgcaggaggacccgcgacacagct

SEQ ID NO: 10587 - DNA, 480 bp, Homo sapiens
  source 1..480: mol_type = other DNA
agaattagggctttttcctgtaaagttataagccaaattatccagaacgtagtcttcgtgggtgagtttacaactttgacagagctgtttaaaaacagccacatgtgtctgtgaatgatgcccaaccacatgctcccctagaggatcaaggctacagcccaggtcagaccccggatctgatgccaaaggcgggctgcccccggcgcagcctttcccgcttcagcacctgaaccccggagtctggggaccggccaaggcttggcgttaacctagtcccgctgggctgatcctgcgcggaccgggcctggaccctggggcgtgaggcggaagccccccgagggtgcgcgcgcgtgggaggcacagagacagcccggacaggccactgcgcagccctggtggccctcgctccgcagacccgcgccagggaggcctctgggccgcagcgggcaccggagcggagcgggcgcggcagcgggcgct

SEQ ID NO: 10588 - DNA, 403 bp, Homo sapiens
  source 1..403: mol_type = other DNA
ggagaagttaacggcctttgatattctaaatatgggaagaattggggtctcagtcttcccttcattgctggaagggacctggggagccctgggaccctcaggctcatgctcgcccggatcgcccagccgggctttggaccattttgtaagtataattcaccaaattaagtttatttgtaacttttttttacagttgatattcattctatttaattaggttatgcataactgttttttgctggatatttacacaaaatgcgaactttctacttgcccatcttccatttgctcatctgtaaaatgaggagccggcaaatgctagctcaacaaatcttatagttagaagaatcctgcttgaagagtaaattggtcatgtgagtcactgggccagtctcgctcacag

SEQ ID NO: 10589 - DNA, 572 bp, Homo sapiens
  source 1..572: mol_type = other DNA
ccccacccccatgcagagtgcaccctgattgcgggtgggccacgtgcaagtgtgcaccaaggggacttggccgggtactgtacgtccactgcacgtccactgggagacgtccttctaggggatcctcactgagcagcagaatttgggtaaaaatgaattttcccaaagctgcagtacattccaacttccttttatattaaatttcatttttgtcacataatacacttgattattgaccataataactttattaatatacagactgattattgatactcaccgatgtatttcatgtgttattgagagtcactcatttggtttagccaataattcgaaacatatttaaggcatagaacttgcatttttttctcttaagcaaaatgaggagttctagcttgctcttatttcctgagagaagacaggaaaagtgagtccctgccttccctctctccgtctggctcctcccaggcctgtctggcaggggccggggtgcaggagatccagtacagaggggctggacttggacccctgcagcagggatgtcattccttcgaaggaatgaattaaaagcc

SEQ ID NO: 10590 - DNA, 502 bp, Homo sapiens
  source 1..502: mol_type = other DNA
agcagctccctggcctgggagaagtggcacctcgggagaagcaccccacccccatgcagagtgcaccctgattgcgggtgggccacgtgcaagtgtgcaccaaggggacttggccgggtactgtacgtccactgcacgtccactgggagacgtccttctaggggatcctcactgagcagcagaatttgggtaaaaatgaattttcccaaagctgcagtacattccaacttccttttatattaaatttcatttttgtcacataatacacttgattattgaccataataactttattaatatacagactgattattgatactcaccgatgtatttcatgtgttattgagagtcactcatttggtttagccaataattcgaaacatatttaaggcatagaacttgcatttttttctcttaagcaaaatgaggagttctagcttgctcttatttcctgagagaagacaggaaaagtgagtccctgccttccctctctccgtctggc

SEQ ID NO: 10591 - DNA, 747 bp, Homo sapiens
  source 1..747: mol_type = other DNA
gccctggacgacgtgcaggagcacccactcctcggggacctcctcctcgtccgcgcagcttcccggagacaggacctgcgaggctaggagcagcagcagggccgtcgtccagggcgcggccctcccgcggggagcggccatggctggcggctcagctccggggcctgcaagtgggtcagtgctgctggggacaccggaggcgctcagcaccggagcctgtccccgccgtccgcacgcgggtccacggcgcgtccaggcgcctggtctgtcgctgggactgtcccttcccacccgcgtgaggccccggggaggaggggtgggttaacccctcccccgtagcgcggcgcccactcagggcaggggcaggggcaggggcagggccgctgtggcaccctcggactcaccaccactccccgcagggggccgcgctttatacatccggacccgaggccggagcctcgccggaggcggaagcttctccagctgtcgcgagatagcgaaactagtaaccatagcggctcgcgtggcctgggagctgggtgctgtgagtcctcccctagcgggctggtctcggcgcggagtcggcgccgaacccgagctgctgctctggggcgtgtgcctagggcgcagggctggagcgcgggggctgcgcggttgctcgcggctccgctgacgccgtgaccgcttccaacggcggacacgcgcgctctggaccagagccgttgcccgctcctcctgagcacaagt

SEQ ID NO: 10592 - DNA, 777 bp, Homo sapiens
  source 1..777: mol_type = other DNA
gacgtacagatccgcatctcccttgaggctgcgcatcctgaggattcagccgcaggtagctgtagttcccggcgcctatctggccctggacgacgtgcaggagcacccactcctcggggacctcctcctcgtccgcgcagcttcccggagacaggacctgcgaggctaggagcagcagcagggccgtcgtccagggcgcggccctcccgcggggagcggccatggctggcggctcagctccggggcctgcaagtgggtcagtgctgctggggacaccggaggcgctcagcaccggagcctgtccccgccgtccgcacgcgggtccacggcgcgtccaggcgcctggtctgtcgctgggactgtcccttcccacccgcgtgaggccccggggaggaggggtgggttaacccctcccccgtagcgcggcgcccactcagggcaggggcaggggcaggggcagggccgctgtggcaccctcggactcaccaccactccccgcagggggccgcgctttatacatccggacccgaggccggagcctcgccggaggcggaagcttctccagctgtcgcgagatagcgaaactagtaaccatagcggctcgcgtggcctgggagctgggtgctgtgagtcctcccctagcgggctggtctcggcgcggagtcggcgccgaacccgagctgctgctctggggcgtgtgcctagggcgcagggctggagcgcgggggctgcgcggttgctcgcggctccgctgacgccgtgaccgcttccaacggc

SEQ ID NO: 10593 - DNA, 799 bp, Homo sapiens
  source 1..799: mol_type = other DNA
gcttctggccggcatctgcgccgtcggcggggtaggcggcctcgccgaacgggtgctgctcgaccgtgccgtcgtagtacaccttcatctcgaactcgctctccaggtgggaggggtgtccatagacgccgatgcccactgggcgccggaagtgcgcggggatggacacggcgtccgggccgcaggtggccgattgcagctaggctgctggcggagacgtacagatccgcatctcccttgaggctgcgcatcctgaggattcagccgcaggtagctgtagttcccggcgcctatctggccctggacgacgtgcaggagcacccactcctcggggacctcctcctcgtccgcgcagcttcccggagacaggacctgcgaggctaggagcagcagcagggccgtcgtccagggcgcggccctcccgcggggagcggccatggctggcggctcagctccggggcctgcaagtgggtcagtgctgctggggacaccggaggcgctcagcaccggagcctgtccccgccgtccgcacgcgggtccacggcgcgtccaggcgcctggtctgtcgctgggactgtcccttcccacccgcgtgaggccccggggaggaggggtgggttaacccctcccccgtagcgcggcgcccactcagggcaggggcaggggcaggggcagggccgctgtggcaccctcggactcaccaccactccccgcagggggccgcgctttatacatccggacccgaggccggagcctcgccggaggcggaagcttctccagctgtcgcgagatagcgaaa

SEQ ID NO: 10594 - DNA, 553 bp, Homo sapiens
  source 1..553: mol_type = other DNA
taattttcatgaaacttcctgtagcactgacaaagttatttaataactgaagaattttcataggtatgactgtaaatacctgcctgccaggaaatcctttttgtatagaaatcatttccaacttgattttagtaactcttgaaaacttacaccaacttgtaaaattacaaagttatcaaccttttgatttgtgtcacaatgaaaggttgctctattttatataaacctgttactgcaatcatttttagtcaacctgcctaatgaaaatggagtctaaacactttgtgcacagtccttttataggaattatgatctttaaaatataaactaaaggtacctagaacttcaaccaagtacaagaccagtttcaaaatgctaattagcttctggccggcatctgcgccgtcggcggggtaggcggcctcgccgaacgggtgctgctcgaccgtgccgtcgtagtacaccttcatctcgaactcgctctccaggtgggaggggtgtccatagacgccgatgcccactgggcgccggaagtgcgcggggatggacacgg

SEQ ID NO: 10595 - DNA, 852 bp, Homo sapiens
  source 1..852: mol_type = other DNA
cgctgtgcctcccgcacgctccggggcgggcgccgacagcccccgggtgcagctgcggatgctcggggaagcgtggcctgggcaggtggctccgctgctctctcggagcgccaccagcgagaggggcgaccccgaccgcgagcgcgtagaggcggaggccgcgcagtctccgcgcgactgctccgggcagggcgacccccggcagagagggggcggggcggggacccccgggaggggcgggcgcggaggggccgggccgggggccgcggggagggggcggctgcgagcgcgccaagtggcgacgtgccgggccggggcgggccggagggcgggcgggaggtggggcgcgccgggggctggggggagccgcggccgagtacaacgccgggccgtggggagccaggcggcggcggggctgaggcggccgcggggctgaggggagcggcggggctgaggcgagcggcggggctgaggcgagcggcggggctgaggcggccgcggggctgaggcgagcgagcggcggggctgaggcgagtggcggggctgaagggagtcgcggcggcgctgaggccagcggcggagctgtggggggcaacggtgctgaggcggtggccgcggccgggcgggttgggctgacgtgagaagcgccgccgccgctgggcctcctccattccggcccgcagccccgcgccctcccagcctttggcgccctcccgcgcgggcggcgcgctggcgacggccatggcggtggcggcggcgctggcgggccgcggggcgcgcggcggcaggggccggcccccgggcgggcgggcggagggggcggggccggggcggcggggggcccgcgcggcg

SEQ ID NO: 10596 - DNA, 913 bp, Homo sapiens
  source 1..913: mol_type = other DNA
tcagggtcgggtcgcaccggccgcttcctcaccttcggcgctccgggggtggctgggtcgctgtcgcacggccgcggggacagcgcagccccgggcccggccgccgccgccatcagcccgagcgccccgcgccgccgccgccgccgtcgcctccgccttgtcccggccgccgccgccgctgccgccgccgccgccgccgccgccgcgcgggccccccgccgccccggccccgccccctccgcccgcccgcccgggggccggcccctgccgccgcgcgccccgcggcccgccagcgccgccgccaccgccatggccgtcgccagcgcgccgcccgcgcgggagggcgccaaaggctgggagggcgcggggctgcgggccggaatggaggaggcccagcggcggcggcgcttctcacgtcagcccaacccgcccggccgcggccaccgcctcagcaccgttgccccccacagctccgccgctggcctcagcgccgccgcgactcccttcagccccgccactcgcctcagccccgccgctcgctcgcctcagccccgcggccgcctcagccccgccgctcgcctcagccccgccgctcgcctcagccccgccgctcccctcagccccgcggccgcctcagccccgccgccgcctggctccccacggcccggcgttgtactcggccgcggctccccccagcccccggcgcgccccacctcccgcccgccctccggcccgccccggcccggcacgtcgccacttggcgcgctcgcagccgccccctccccgcggcccccggcccggcccctccgcgcccgcccctcccgggggtccccgccccgccccctctctgccgggggtcgccctgcccggagcagtcgcgcggagactgcgcggcctccgcctctacgcgctc

SEQ ID NO: 10597 - DNA, 553 bp, Homo sapiens
  source 1..553: mol_type = other DNA
tcatcactaaagaaatctacatcaactatttgttgattggtacaaaaatggtagttatcgttatcatcattttggagacggggtctcgccgtcgcccagacaggggtgcagtggcgcgatctcggcgatccttccacctcagcctacggagtagatgggaccacacgccgtccgagtgtggaccctacgtgagagcccgacctgcggctttccgcccccgcgccaccgcgccctgaccgtccgccgcgttccagctcagggccaggaggcgacggagaaaccgagcctggcccagggaggccggcagggcccgccaggcgtcttgcagggccgagcgtccgataccgccacagaggccagggccgcgacgtcgccagcgccctccagcgcgggaccgccggccaccgcaggcgcgtgctcgctcgcccactccgcgtagccgagcaccacccagcctggcgccgactccctgcctagctcgggatcgaaccgggcggtgccccgctgcggcgcgcgtgaatgacgcaggcgcctgcgcgcccctcctccaggc

SEQ ID NO: 10598 - DNA, 427 bp, Homo sapiens
  source 1..427: mol_type = other DNA
aaactaattttctgttaaagtatcaataaaatatagagtctttaatacattaacggttttcaaagcctaatcatataatttggacattcttcaaatatccagactgctgatgttttaaaaacccaaaacatggcactattctgcctggtttatcaaattatttttttaatacaacacactcatttttcgctagcaaaactgcttataatggcactaaatacactaacatactgtgttttagtacaaagcaataatactcagagtactctcatgaaagaagatctttagggttctatggctaggcgtcaccggagcctgctgaggggtctggccggcggtcaagccagtcccgcgagggcggaagtctcccacctgcgcctcgtacggtaggaagtgcccgccagggctccaaagcgcctggaggagg

SEQ ID NO: 10599 - DNA, 393 bp, Homo sapiens
  source 1..393: mol_type = other DNA
aatcaccccgaggctcagtgttatcccacgggtctgcccccaagagctggggccctgattcagggattcagaggatgcctctctcttctagagacgacgcggcagcggggacgcgaggatcccatgatgtcgcagccgcggtgacaaggacagaggcacgagccgaggggctgacgcgcgcgagggtcggacgcgggtaacggacggtcacgcaggccgggagcggcccggaagacccgcgggtgccctcgggcccggccctacccgcagacgcgcccgctgcaccctaggcccagccgcctcagccacgcttccgctcgggacttggccgggttcgcagaggcggggtctaggcgcgcaggcgcggacagcggacgcggcgcgcaggcgccg

SEQ ID NO: 10600 - DNA, 526 bp, Homo sapiens
  source 1..526: mol_type = other DNA
cctccccaagcccccgggacgctgtcggcgcaaggagacccctcggctgccgccgcggcccggagtttcggaggccgcgtcccgccgctcaagtggggcccgcagcgccgccccccgcgtgtggccgagggtctctgggcgtctgtggcggggacggggcggcggcaccagctccagaagaaaagtgaagctgatttgcatctcattagccatgcgggcggccggctgaatataagggcggcaggcgccggcgagagccagatcctctgcgcgcacccgcggagacccgacccggccgagggcagagcgcaggggaacccgggcagccgcggcgcagagcctcctcccacggcccggcccctccggtcctgcgcgtatctttgctgtgacaccggagatcggagcccggagtgctcccggaacgaccgccgccgccgagtgacaccgggccgcgatccgcaggggccgccgcgcacacccgccgccgccgaccgtcccctcagcgcgcgccgctggccccgggcgg

SEQ ID NO: 10601 - DNA, 603 bp, Homo sapiens
  source 1..603: mol_type = other DNA
cacccggagcccacctgatctcctagccttcgccatcttagagcagctgcagaaataagactgagattgtggactgcagagtccaaactcctgacagggacctgcacgatcaggtggcacctgttcgaagaacacccggccgagaagtgctcagcgctgactggggccgcgccgtcccgatacggaggcgagggtcgaacgccaggacgtccccgctccctccccaaacgtggcggggaagcgcgcggcgggtcccctgtgcaggagccccccgctgtccccgtttccggcccaggcgaggctcccggcctcagggccacccgcctgggccgcgctcgcacaacttcggcctgaggccccgggagccgccagtcctcagtgcctccggcaggcggctgcccgtccgggccggggcggcacccgcccgacgccagcgggcagctacctgactgcgcgacccgaggtccgccagcaccagagcagttgctgtggcaacaggccgcggcgtcccacgccgccggcgcctgcgcgccgcgtccgctgtccgcgcctgcgcgcctagaccccgcctctgcgaacccggccaagtcccgagcggaagcg

SEQ ID NO: 10602 - DNA, 368 bp, Homo sapiens
  source 1..368: mol_type = other DNA
agttccggggcggggccgccgtgccacagccatctctaattggcccttgctggttgtttaaagcaactagcggcgttacctttttctgtaaaattgaataataatcagtgcctgagcagtgcttggcactcagtaagcgcgtcctccttacctgtcagcaagaacgctagctgatcttcaagcgtgtacaaacagcttgtgtttacacatgcatttattaaggataggaaatgttatatacattttttattagccaggacaattaacgttccatttttttgtatggtcagacttaaatttttgtccataattccaatgttttcttcgagggggaaaaacatccctgtcagcgctttttgagaagccgg

SEQ ID NO: 10603 - DNA, 357 bp, Homo sapiens
  source 1..357: mol_type = other DNA
ggcagggagaccggccttgtgcggaccccctcagctcagggttctgaggcctgcaggagcccggggcagcgccatcacggcggtgactcctaaattctctggggtttttaccctccgttgaaaacgtagggcgaaaatcgcagctgcaaagggcccgcggctctgtgcggttccatccccacggacgttacgccacttccggcttctcaaaaagcgctgacagggatgtttttccccctcgaagaaaacattggaattatggacaaaaatttaagtctgaccatacaaaaaaatggaacgttaattgtcctggctaataaaaaatgtatataacatttcctatccttaataaatgca

SEQ ID NO: 10604 - DNA, 359 bp, Homo sapiens
  source 1..359: mol_type = other DNA
caaaaagcgctgacagggatgtttttccccctcgaagaaaacattggaattatggacaaaaatttaagtctgaccatacaaaaaaatggaacgttaattgtcctggctaataaaaaatgtatataacatttcctatccttaataaatgcatgtgtaaacacaagctgtttgtacacgcttgaagatcagctagcgttcttgctgacaggtaaggaggacgcgcttactgagtgccaagcactgctcaggcactgattattattcaattttacagaaaaaggtaacgccgctagttgctttaaacaaccagcaagggccaattagagatggctgtggcacggcggccccgccccggaact

SEQ ID NO: 10605 - DNA, 390 bp, Homo sapiens
  source 1..390: mol_type = other DNA
tgaaggttcactgaaaagtcaaaagccccaaatggggttcagaaacttatataccatcttgaggttaaagtagaactccttaaagagaacagtggtacatgtttctttcagacctttatggaccctctgcttgcccaagggcattctgaagttaacctgaaaaactagttcatgcctgaaaagactcttctgcagaggcttcttcattccacaccctgaggtggacaccagcagggaaggtttgcgggagggctctgcctccctggcggccacccgcaggcccacagcaggtggcagaggcgccaggggcggggctgatgccgagaggtttcctctgccccgtcagacgcgtttccgcctcctgtcctccggaaaggtgcccgcctctcg

SEQ ID NO: 10606 - DNA, 916 bp, Homo sapiens
  source 1..916: mol_type = other DNA
caccagcccctctcagcgcccccagcgggcccggcgcctggagggttaaggcgggcgcgtcccgcgggtgggcggggggggggggacgggaccggtgccgggagctccgctgccctggcgtcccctgggtccaggcccagtcgctccttgggcctctctcgcggggccgcctccgcctcctccttgccgagacgggcgtggggcacggggtcgccgcccggcggggagctcatccggcggcgcagacgccccgcggctccggggagggacttggcctgggccccggccccgcgctcctctggggaggagccgagaggctgcagctggcggcggcggccccgggcgggagggggtcccaggaagcggccaggccggagccccccactcggccgcagctgctggcctggccagaaccgagcgcgccctcccggtctccgccgcttccctctgcaaaccgcgggcaggaggagccctctccttagcgggcccggagctcagaggcgtcgcggggcgcggccggcgggagcgcagccggcccgggcccagccgtgactcgtggggcggcggctccgccaatctgtgggcgctgacgcggggggcggctccgcggcgctcgatatctgcccgcccgggacgcggggcgccgagaggctcggccaggcgggagctgcgctcggggcggccgctgcacctgcccgggaccccgccggccgctccccgcgccccttccccccagccccggtctcccgggcgcggcgtgagagcagagcccggcccggaggagccgccccttccccgcccgcccgcccggcgcctggagaggagcgcgctgaggatcgggacgcctgcggccgccgccaccgcccaggcccgtcgcgccccggccgggatggacccacacgcccgatgagccccg

SEQ ID NO: 10607 - DNA, 888 bp, Homo sapiens
  source 1..888: mol_type = other DNA
gggcccgagagaggcgagccggcgacggcggcgcttctgcggcggcctcctccctccccacccggtgccgcaggattgcagctggcactggagggtgggcaagctcgagggaggggcgcggagccccggcgcggagccgggcgcggggctttgcgcgagcgcgtgtgtgctccctgccgcggcggcggcgcccgggccctgccgggtccgcacgaaccccgagcgcttccgaggtgcgggtcccaggcccggaatccgggggaggcgggggggggcgggggaggggcgcggcggcggcgctataaccctctccccgccgccggccggctccacacgcgcgccctgcggagcccgcccaactccggcgagccgggcctgcgcctactcctcctcctcctctcccggcggcggctgcggcggaggcgccgactcggccttgcgcccgccctcaggcccgcgcgggcggcgcagcgaggccccgggcggcgggtggtggctgccaggcggctcggccgcgggcgctgcccggccccggcgagcggagggcggagcgcggcgccggagccgagggcgcgccgcggagggggtgctgggccgcgctgtgcccggccgggcggcggctgcaagaggaggccggaggcgagcgcggggccggcggtgggcgcgcagggcggctcgcagctcgcagccggggccgggccaggcgtccaggcaggtgatcggtgtggcggcggcggcggcggcggccccagactccctccggagtggctgatgtccgcaaatatgcagaattaccggccgggtcgctcctgaagccagcgcggggagcgagcgcggcggcggccagcaccgggaacgcaccgagccctacccggcggcccaggaggc

SEQ ID NO: 10608 - DNA, 418 bp, Homo sapiens
  source 1..418: mol_type = other DNA
cccgggggctggggagggtgccgccgccaccctggcaggatgggggctgggcttgtgggttaggaccgtcaccaagaggctcctcctacgtcacctggggaagcggggctgggcccacctggccaccctctctggccgctaaggcagagtgagaccccagggaacgcttgctgggtaccggcagctcaggcagggtggggggtgcccaggccatcagaggcggccccgcggcctgcaccggctggagtgggcgactcagaggggtcctggcagcgatggcctgaacctgcgccggtgggccccgcggggaggcggtcggggggagacgggctgcaggcccgcgcgggcggcgttgggggtgcagcagctgcgcgcggcgcgggggcgggcgtggagggcggcgccgctgcagtgcggg

SEQ ID NO: 10609 - DNA, 239 bp, Homo sapiens
  source 1..239: mol_type = other DNA
gaagcgagacgtcgccttggttaggttgatggtactgctggtcagcagcagctccaggcaggccagggctggagttctaattcagagaccaggcctggatccctaagaaagtctcaggacaaatgcaggtctgcctgagacggggcctgaggaccaaggaccttcgtgtttgacccccgtttacgttcaccctggcaggaagaggctgaggcaatgtcagccctgctggcccgggggct

SEQ ID NO: 10610 - DNA, 895 bp, Homo sapiens
  source 1..895: mol_type = other DNA
ggaaatgtgggtggagggtcctcattcagatgccccaggcctcggatcctgggcgggggcgcgtggcagccgccaggtgagtgccccaaacccgccccgactgactccccctccttttatggagagaggaaggctggggccctggatccgaaccgtggagagcggccggagcgccggggcgggggcggggaccggctctctggcccgcgcagcagctctgggcgctgcccgctgccgccgctggggcccgagagaggcgagccggcgacggcggcgcttctgcggcggcctcctccctccccacccggtgccgcaggattgcagctggcactggagggtgggcaagctcgagggaggggcgcggagccccggcgcggagccgggcgcggggctttgcgcgagcgcgtgtgtgctccctgccgcggcggcggcgcccgggccctgccgggtccgcacgaaccccgagcgcttccgaggtgcgggtcccaggcccggaatccgggggaggcgggggggggcgggggaggggcgcggcggcggcgctataaccctctccccgccgccggccggctccacacgcgcgccctgcggagcccgcccaactccggcgagccgggcctgcgcctactcctcctcctcctctcccggcggcggctgcggcggaggcgccgactcggccttgcgcccgccctcaggcccgcgcgggcggcgcagcgaggccccgggcggcgggtggtggctgccaggcggctcggccgcgggcgctgcccggccccggcgagcggagggcggagcgcggcgccggagccgagggcgcgccgcggagggggtgctgggccgcgctgtgcccggccgggcggcggctgcaagaggaggccggaggcgagcgcggggc

SEQ ID NO: 10611 - DNA, 542 bp, Homo sapiens
  source 1..542: mol_type = other DNA
gtcatgcagctagaggccacaagatatcatcaactctaagattggtgctcattctgatgcaccaggtgccacagttctgtgatgaagacagcaagagaatcaactttgactctccactcaggattttcagaacctggtttgagcaagccagtttctgcatgcagccagtttctgcatgcagccagtttctgcatgcattaaattggctctacctgggcagcacgcctgagatctaatgacaggctgcacgtgaagcccaccctcctggaacggaccttcccaaagccagagggggcttcccggctaccctggtcccaggcgggaccaagccccctaggctgcagggcaggcttccctaggggcaggcccaggcctatagcccgggacccgcatcccgggcgagctgcaccctcccgagcccatgtacatggggacaggacaaggcccagcaggcaggctggcgggggttccgcccacgtgcgcaccggcggggaggaagtagcccggcgccccgcccgcagcgcggaccggaagtgctgccg

SEQ ID NO: 10612 - DNA, 169 bp, Homo sapiens
  source 1..169: mol_type = other DNA
ggaaatctcgggacatcactgggacggcctgagctggccagcggaaagccttcccgccagcaggaagcaggcgcctgctatcattccacatcccagccaggggagggaaagggggagaagcggcctccttccacttaggacagtggtccaggaatttctgcggtggttt

SEQ ID NO: 10613 - DNA, 477 bp, Homo sapiens
  source 1..477: mol_type = other DNA
aatgcataattttttccatagaatatcctaagcctttgtgtccgtgctgcaagcatccgggcggaagtgtccgtgctgccagcaggagctcccgctgggagggcagacacgtggtccgggtggaagtgtccctgctgcgagcaggagctcacgctggaagtgtccctgctgcaagcaggagcgctagtgctgggagggcggacacgtggctccgggcagaagtgtccgccagcaggagcgctcgtccttgcgcgagcgcgctgggagggcagacacgtccgggcggaagtgtccgtgcagcgagcgggagctcgcgctgggagcgtccatgctgcgagcgctcgcggctgggagcgcagacacgtggtccaggcggaagtgtccatgctgcagcaggagcttgtccgtgctgcgagcaggagctctcgctgggagggcagacacggtctgtgctgtgagccgcagctcacactggga

SEQ ID NO: 10614 - DNA, 539 bp, Homo sapiens
  source 1..539: mol_type = other DNA
gttatgtatcttttgataataaggtctgggccccaccactggactgggaggtgcagcgcatccaagcagaggctgcctgctgctctcgcaggcaggggctctgctgcttacagcagtgcccccgtgcggcctgaggagctccagctttccctgccagcggtgctctgggagtgggggcatgatgggggcaccccagacccttccctcccgtggggggaggggtgtggcacggcggggacactggccccgtgggggaagaaggtgctgtcacagccgttactgtcccccgtgggaccccagcctggagccccccaaaccggtgagctgctccaggggtatttggacacagataggcccttagtgtccagaggcgccccatgcagccctcatggtcagcaggcccctccacgcagcacctgggccctgggagcggctgcttttagggcacgtgggcgtggctcacggtctcctctctgtggcaggtacatgtcccagagcaagcacacggaggcccgggagctcatgtactcgggagccct

SEQ ID NO: 10615 - DNA, 726 bp, Homo sapiens
  source 1..726: mol_type = other DNA
ccttccagcaggacccgatcctggaggagtgagccgtccaccccgcaggtccccagccacggccagggaaggaccgcaggtggcctttcaaagaggaggaacgcccctcagcgtggagacacagtctggctctgttacccaggctggagggcagtggtgggatcccggctcactgcaactcctgcctcagcctcccgagtagctggaattagaggcgcccccagccacctcgggtttacaagcgtgagccgcggcgcccggccctataaaagtatttttaatttataagcattttacacattgaactgtatacaccgcgcgcgtggggagggtcccaccccgggacgcttcctgctcggggtcagccgccgccgcagcctgtttacgcgcagcgccccgccaggcagtttcgtgccacccgccattgtggcgcgagccagtcccggccccgggtcacgtgccgctcccgggcccgccctgggccacgtgttgcctgcggacccgcctctgggccacgtgttgcctgcggacccgtgttgcctgcgggcccgcccctgggtcacgtgttgcctgcggacccgcccctgggtcacgtgttgcctgcggacccgcccctgggtcacgtgttgcctgcggacccgccccaggtcacgtgcagctagccggcgcgcccgcccccgactgcgcgcgactcctcgcgggccaccgtagaagggcgtcgggcgg

SEQ ID NO: 10616 - DNA, 538 bp, Homo sapiens
  source 1..538: mol_type = other DNA
acgcgggaagagccggcgtttccatcagcaggggccctgcaggagacctcgcgtgcagaccccacacattccccagaagggcgcctggggaggaggggccgcgggaggagcccggcctgcgagcgcctgcgcacgcccggagcggcgggggtgagccccgtcggaagtgggggctgcctcccggagccgcagctgcccctcccccaagacgcggacgccctcctggagcgtagaccgcgtatctgaggggcagagccctccgcgatgcagacccctcccccaggtgcagacccctcccccaggtgcagacccctcccccaggtgcagatccctcccccagatgcgggcccggagccctccctcagatgccaggtgcagcccccataccgggacgtggcctcgcccgcccgcggcccgtagccgcctcgtcattggccagaacgcttcgggtggcgcgctcgggactggtgaaggcctgcgttgctcccgccctcggcccggggcgcggcccgcgattggctggcgtgggcagagcgtc

SEQ ID NO: 10617 - DNA, 674 bp, Homo sapiens
  source 1..674: mol_type = other DNA
cccctcccgccagctcgctggggcgtcctgcaggccaggctccgggcgctgtctggggcgctgtctgctcctgcgtggtccctcccgccagctcgctggggcgtcctgcaggccaggctccgggcgctgcctgctccaggggctggccctctgacctcagcgttgcccgctgcggagctttgccatgggtcaaacccagagctccctggctctgcgctacgccgtgctgacaggggccctgcccctggggcactgagccctccctgtgggtcctcgaacagaagccagggtctgtgcggcacccaccagctgctgggccatggcggagtgttctggtgcgggccagcgcctgaccggtgcgggcggcctcaggagcgtcacgtagtcagggctcaggctggggcccggctccagagcctggtcacattccacctgtgaattgcaggcttccctggtgtgccctgcacatgagggaagacacgcgtgaagcactgggtccctccatggccttgggccgcaggaaccgtgggcgcacgagcttcggaggccggcgcctgtgcgggcagaagctgtgtcctccagcccgtttctctgtttaaaaaacaaaagtagcgcatcggtggtcttcacacccagaagcacccgtccatcgaggacgggcctccgtttgtgga

SEQ ID NO: 10618 - DNA, 50 bp, Homo sapiens
  source 1..50: mol_type = other DNA
ccagtgggaagctgacggtgcactgtggagggaggaggggaccccacggt

SEQ ID NO: 10619 - DNA, 325 bp, Homo sapiens
  source 1..325: mol_type = other DNA
accgcgggagaggcccctcactgagccgcctgcgggaggtgtgaggtggtgacctctccccacagatgtctgtggcaggccccaggagcgccctgactcttctgactctccagtcgaaaccgcagcctgagctcccgttccacagaagcgccgtcagggcgtgtcctgagatgggggtgacactgccacggccgtgtctttgtattcaaagaacacggtgtaacggaccgcagttggcccctgtgctccatggccccgccctggcctccagagtgtcctgtcccgggggggaggctgcccaggcgtgactgagcctcatgggctc

SEQ ID NO: 10620 - DNA, 566 bp, Homo sapiens
  source 1..566: mol_type = other DNA
agcctcatgggctcctcagagcaggaggatggggacagcgacggcagccccatcgagctggactgaactggccaggccacgtggagacaccacggtcgacgggctcctcgccttgggggctcctggccctgaggctggcggtggccgcatgccggcgcgggctcagggtggcgcggctgctgctcactgtgctgctgggacccaagagtggggcgtcgcccctgctggccgccgcgtcccccgtgatgggcagcacaggaggcccgtcctcggggggctgcgcacatccgctccttgccgggcgtccggcacagctgcggtcaccaaagcaggtgctggccctcggacctgagagcccagccagggcccatgtggtctgcctgcagtcaggacgaaccggtccccgtcgcagacggagtgcacgtgccctgcgccacatcctcacgctcggtggagggacgcgtgcggcgggacggtgcctaccatcccagagctgcgccctgctggtctctgtgagcgccacgcttaaaaagggatacgacctaacattttgggttttaaccaaa

SEQ ID NO: 10621 - DNA, 341 bp, Homo sapiens
  source 1..341: mol_type = other DNA
gaccgcagttggcccctgtgctccatggccccgccctggcctccagagtgtcctgtcccgggggggaggctgcccaggcgtgactgagcctcatgggctcctcagagcaggaggatggggacagcgacggcagccccatcgagctggactgaactggccaggccacgtggagacaccacggtcgacgggctcctcgccttgggggctcctggccctgaggctggcggtggccgcatgccggcgcgggctcagggtggcgcggctgctgctcactgtgctgctgggacccaagagtggggcgtcgcccctgctggccgccgcgtcccccgtgatgggcagca

SEQ ID NO: 10622 - DNA, 56 bp, Homo sapiens
  source 1..56: mol_type = other DNA
tcccccacagggtaccgtgagggttttctctacaggtggggtgggggcctgtccca

SEQ ID NO: 10623 - DNA, 812 bp, Homo sapiens
  source 1..812: mol_type = other DNA
gctcttagccgtgcggtgggcagaagggctcctcagaggcgtgtgtggactggacccagctccccacaggtgggacaagacctggcacacagtgggaccggcacacagtagggcctggtgtgcagtagaaccccccccacccccagcgggaccagctcacagcagggcgcggcacgcggttactggtcgagtcctgccccaggactcacgagtcctttaagagaaaatggccatttctggccacagcccacccggctgtccaggacgctgccgtgtgaggggctgctctgtggggagaagccccgtgccgactgggggctgcaggcccctgaggtcctggccctccccagcgaggccaaggggctggccaggcatggggagagcagaggctcagcctgaggtctggactgggcgtggggcgcgtccgggaccgtggccagcgccgtcctcctggaatgcggcgtcctggcgcctgctgtcgggaggaccggggttcccgctggcgcctgctgtcgggaggaccggggttcccgctggcgcctgctgtcgggaggaccggggttcccgctggcgcctgctgtcgggaggaccggggttcccgctggcgcctgctgtcgggaggaccggggttcccgctggcgcctgctgtcgggaggtccggggttcccgctggcgcctgctgtcgggaggaccggggttcccgctggcgcctgctgtcgggaggtccggggttcccgctggcgcctgctgtcgggaggaccggggttcccgctggcgcctgctgtcgggaggaccggggttcccgctggcgt

SEQ ID NO: 10624 - DNA, 467 bp, Homo sapiens
  source 1..467: mol_type = other DNA
ggcaccccgtgactctgagaggccgctgtgtgaccctggggtcatgggacgctgggtgctagggggcaactcctccgtggtcacacagccggagcggctcaggcagctgcacggtggaggctcacacctgtaaggtggcctctagcccagctactcgggaagccctgcgttgagctgtgatcgcaccactgtgccccagcctgggagacacagtgagaccctgtctctaaaaggtgggcccaaaccccacaggaccctggaggagattctccccagaacacctggagggaccagctcggccgacgccttgatctcagacgtttggcctccgtgaccgagatgatacatttctgacacacacctggggccaggggccagagacccagctgggacccatcacccatcagatcctgtgggcgaggattcccgcccagcccagcaggaagccacagggttcctatttgttc

SEQ ID NO: 10625 - DNA, 523 bp, Homo sapiens
  source 1..523: mol_type = other DNA
gcagcgtggacccgctgtgtaaccttgcagcatggacctgctgtgtaaccggacctgcagtgtaaccctgcagcgtggacctgcagtgtaaccctgcagcgtggacctgcagtgtaacccctcactggagggcggggggtgcctacatcctgcgtggggcccaaacgtccagcctggcgaggtgggcaggggactcgtccaccttcctccgccccagcagcgctggtgcccacggcctccgtgcagcctggacaagcaggtcttcaggggaaagctctgctgcacagatgtccgcagcgtccggagcagggtcctggaaggccccccacgccatgccctgcggcctcccggcacacactggggtccctccaggcaggtcgagcaccgtgccgctaagcagaggcccagggcctcagtttgcccagcgaggggaggctgcacccgcaggggagggcagagggtctcgtgtgccctgcctgtgactcagaggccgggacccgtctcttccaaagaaagtcgtgcg

SEQ ID NO: 10626 - DNA, 587 bp, Homo sapiens
  source 1..587: mol_type = other DNA
gcagaggagtcggccctgtgcgagggccctgaagagcctggaggggcgcggggtgggggccccatcaccgtggggttcccgccatggggctggagcaccaggtccaggagaggggcacgtgtccctgaaccgggtaggggccagcggatctgggtcctgggagggcctgttcctagggccaaagggccccatcctcacaatggaatgggaccagggccgcccgtgaaggaggtgtgggctgccagcccacccaggagctccagaggtcactgcctcgctggcggggatccaccggccggcgggagcctggatccctgcaggggcggggcgctgtgtgcctgggggacagccatgcatgccccgcctcacgtagctgtgaagggtggtgggcaccggagcccctcccacaagggcacccccttgcgtgcctggccagagccagcgtccgacccggcctcgggcaaaggtctctggaaccagggccccatggacaggcttggctactgcccttccccctgcccgtgccccagcctgggccttggcttgggggacacgcctgccccacctggctccgcccaagaatgtgg

SEQ ID NO: 10627 - DNA, 581 bp, Homo sapiens
  source 1..581: mol_type = other DNA
caggctggtctgtgctgggattacagccgttagccaaaaccctcgggtgtactgcattaacctgacatcaaaaccaggttttttgttacctgtcagcccccatgtgaagtcccggcggggcccctcagcctgcctgagtgggaggggtgcccagaggggctccgtctgggccctgtgtggcctcagtgccctgggactggccgtccctcccaggcagggatggtgtgagcgccctggtcctggtccgtagcacaggacacgcacacacgagcacccccatgcccatggtcttggggggctcggcaggtgccctctgcgccccccacagtaggtgtgcaggctccgtcccaccgcgcgcggcggcacgagggtcccacccaggccggccaggttttggggcggcctcgcgcccaggcaggtgggacgctgcgcgcggatggggggcgggcggcgggcgatttcccagcgggtccccggggcgcgcgggctgggggcgccggagcggccgagggaggaggccacacgctcgcctgcaccgctgggggccgcccgcgggccttgccggccagagcgcagcgtgc

SEQ ID NO: 10628 - DNA, 563 bp, Homo sapiens
  source 1..563: mol_type = other DNA
tccttataaaaagagatgcctataatcccggcatttagggactgatcgctgagcgctgcagtgagtcgtgatcatgccactgcactctagtctgggcaacagagcaataccctgtctcaaataaataaataaaaatagtaaatttggtgcttctgcaagccaaggaacctcacaggctggcggcccccagaagctgggaggctgggactgtccccagggcccccactctgcccactgcttggactccagaccccaggactgagagcacattcctgttgttgaagctgctcggtggtgtcacctggctccagcagccgcaggcagcgagtccaatggcgatggggaaaccgaggccccagcagacacctgggatgcagagacgccggcaccgctgtgagggtcccaggggacgggaaagcccgggcagcgcccaccggggctcaggagcttgctgactccgagggggtggggccgggcctgggcaaggggtggggccgggcctgggcaaggggcggggacggggcctgctcgacgtgctcggcgctcccggggtgcctgctcgg

SEQ ID NO: 10629 - DNA, 563 bp, Homo sapiens; identical to SEQ ID NO: 10628
  source 1..563: mol_type = other DNA

SEQ ID NO: 10630 - DNA, 612 bp, Homo sapiens
  source 1..612: mol_type = other DNA
gagctccccaccacaggaggcgtgcgggaccaacccgggaggggtgagggcctcaggctgcctcggctctgcgcatgggcaacgccccagagacaggctgtggggagggtcccgcctgctggcaccagctccagctgcctcatgtcagggcaggctgtgcaaagcaggcccggccgcttctgctgccagcagccctcccaccagcggtttaggagacagatggaagggttgcatcccctgcccgggcggcagccctcgaaaaggagcaggctgctacctggggcgagaacacccttgggatttgagtcccctcatgggcctccctgaggtctcactcctcaaaccctgagctccacagggtcccactcagagcctgtgaaaggcagggggctcccctccaagccagggcctcggccccaaagccctgtgaatcccagttctgaggggtggccaaggccaaggggcctggactggcacatccttctctctggccaggagacatggatgcctgaccccaggggcaggcctgcagctttaagccatccgctgggggctgccctggtggggtgggtggggtgcgggcacgccctcccgcggaggcctataagggtg

SEQ ID NO: 10631 - DNA, 713 bp, Homo sapiens
  source 1..713: mol_type = other DNA
gggctcaagccctgagtccaggcggcaaggtccattctgaaaggccagagtctgcacagagtgagggcctgacaggctcggcccccggctacagcccggccagcagcaccccagcccgcagttgggggcagccggaggcagggcccgggcctgactggtcagccctgtcccactgaccctgcctgcctgagcgaggacagagcgacagtgctagcctcagcatccctgcccaggaggcacaggtcctcttcccatttcacagatgaggagggccgaggggggctgagcaggcagccgacaggcccaggccctcctcccctctgctcctggcctcctgcgggctctcagcagacgccaccgcctccagggagccctccagactcctgctcccgcgccgggccctgggtggcaccttccctgtgggacggggtggctttcccctcccaaaagcagggtgggccctccggcctcctgcgtgccccgctgggcccggcaccatgtgggaacaggcagtggaaaccgggctgggcttccccaggaggggggccaggacacggcagctgtccaagcggcaagagctgcccgggctatcagggaccggtcctgttgcgacagacgcagcaagtgcaggttcccgacgagcggcagcgggcgaggccccgggggccaccgggcagctggggaggggtcttgggcgcaggcgcagagcagcc

SEQ ID NO: 10632 - DNA, 716 bp, Homo sapiens
  source 1..716: mol_type = other DNA
cctcggggtcatccccctgcagaggcgtggggcagggctcgtgggatgatctggggtctgtcccccaccccacagacccagcccagccctgggctccactatggatgccccggtgatctgggctcgcgtccccgaggcagtcacagacaaggagactgaggctctgagaggcccccagggtagggagcttggtgcaggaccggtatggacccctccccagccgtgctcccctggggtgtccctcaggacccctacaggccttcaaggaggtcttgggtcccgacacacctgtccctgctggatcagggcgtccacatagctgcacacggggtcccccgggcacacgtggggcctccgcgcctccaggagggtcctcagaatggcacggacctcctcgatcttgcgcaggacgggccggtgcagctggagcagggccccgagccatgggcagccccagggctgcacgctgggcaggcggtgatcgtccccagcggctgtgttcacgcccagggactctgggtggacctcaagggaggaccaggaactgccaggaaaccccctgtccgtgtcccggaaggggacagccaggcaggaggacctccttccatcctggagagggaggagggaggcagctgccacagtgggccgccactgagccagcccgagcctggcaccagcgggtgctccgtgactgcctgtggcagccccgccacacc

SEQ ID NO: 10633 - DNA, 411 bp, Homo sapiens
  source 1..411: mol_type = other DNA
ctgtctctacaaaaaatttaaaaattagctggacacagtggtgtccccaatggtgccactgcactctggcctgggcgacagagcgctgcgtgactcatccacgtattctcccctttgctggacacgtggatgccatgggagggctaggcctctgcctgcagggcctgggcatgcagctggcaggggccctgcgcgggcgggggtgcgccctccccgcagttcgcgcaggtggaccggagacccgggcggccagagagcctcgtcggaggagcagtgggggctgcagcagggtccacccccgccttctcagcgccgaggccccgccccggctctcccacccccgcgccgaggtccagtccccgcaggcgcgctggcgtcacggtccagccggctggatctggttccagccgc

SEQ ID NO: 10634 - DNA, 611 bp, Homo sapiens
  source 1..611: mol_type = other DNA
cccacctggaggccggcgttcccaggtcccggctggggtgacagcacgcactcgagagccggtttcttagccctgcagacgctggctgcctccctctgacttggcctcacggcggggcaggcattagcagtccaggcagcttctctctgactccctgcaaggaggggtgcggcgggcaagaggctggccccacgcggttccacctgcaggagagccctcgcaggaggctccgtgtgtggggccggctcagtggccatgcccatgtcccttctgtgcacggagacaccagatgcacgtcctctgaggactccccaggccttcgctcgacagtagacgacctggacacgtgtctgcctgacctgcccccaggctctcggtgggatgccccgcagcgatgcagacaggggcctgcgggcagaggccacggcctccatgagcccaagaggccagctgtgctcagtttgcagtgcggtcccgtccaagcacggcccctcgtttctggaacccggctgtacagcaggagggaggggcggtggcgcctgccaagggaggcagaggccctgggccctcacacgcacgcgcaggcggccaggcgcgctgctgataagagc

SEQ ID NO: 10635 - DNA, 532 bp, Homo sapiens
  source 1..532: mol_type = other DNA
gacggaagttcctgcagtccgggccctgtctcttactgctcgcccgcccagggcaggctccccaggaaacccagggcacgtgagagcttgggagctgagctcttcctcagccgctgggcatctttcaaaattgtgtctcaggcatttttaatgctgaaatcatctcaaaatcagctctttatcatccaaatacaaaaaggtacatattagagttgtcaactttctactgctggaagaaaactccacgttagtatttttccattaaaaaattaacacagcattctgtttaggaaatgtgtgtatatttcctaaaatacacatctgaaagactttaaattgctgccttgagccccagcaggtcccgaggggccgagtgcccctggaggcccagcaccccactcttgcacctgcaccagctctcctggcggggagcaggtcccgaggggccgagtgcacctggaggcccagcaccccagtcctctgcctgcaccagctctcctgggggggagggggaaggggaccacgcctcagg

SEQ ID NO: 10636 - DNA, 457 bp, Homo sapiens
  source 1..457: mol_type = other DNA
gtctccgcctgcacgagaacgcttctgcagcgagcgcgggaggagggacctgctgagggtccctggtctgaatgcttcagatttttgcagattttggaatatctgcaggtacagaatgagaaagctaaatacgaaattcatttgtgtttcatacacaccttacctgaaggcaactttataaaaacacttttaacaatttcatgcataaaacaaaccccgccacacgaggtcaggtgtggaattttccacttgtgtcacgacgctccaacagtgtcggactgtggggcactctggatttcagatttccaatcttgggattttatggatcatgcacatgctactaagttaattatgaaatttagtgtttaacgcaggtcagttgcaaaaacaagaatattgcttgcttcaacccgtatgatgccttcaaacttaaagaaaggtttgttctagtagaacc

SEQ ID NO: 10637 - DNA, 465 bp, Homo sapiens
  source 1..465: mol_type = other DNA
aggctggagtgcagtgccttgatcatagctcactgcagcatttttttaatttattttttattttttaaaacagagtctcgggattacaggcaccttcgaactcctgagctcaagcgatccgcccgcctgggcctcccaaaatgctgggatcacaggcgtgagattttttaaattcagcacgaagtttaagtccccctggaccctcggcggaggccccaccccgggacgccagcccggccggggcagcttgcaccccagacccccaagccctgcggggcccaacatctgcacttgttctgggcagggcgggttgccttggcaaccagctcctctccaagcaactctaggcctctagagatggcgtcagtagcccgcgcccggtcctggaaccgccccccgtgctgccgccgcttgccattagccggcggagagacggacgaggcgggactaacgcttacctggggc

SEQ ID NO: 10638 - DNA, 568 bp, Homo sapiens
  source 1..568: mol_type = other DNA
actcagccgggctgcacccgggtgaaataaacagccttgttgctcacacaaagcctgtttggggctggtctccatgtcctgggcccacgccctcctcctgcccagctgggcggggtcttacccaggcggagccccttacgtgcagggcgttctgtgcagtgaccgcggccctgggcagagccaaccccacgcggccacataaccgtccagggggcggggggcattttccctaagtttgaaattacctaaaaacacgttgttttggaggcctcctggggcccgcaggatgcgcggccgcgggcgggtgcccggggcgggaggcgccggatgggtcgctaggcctcctccctcaggccggcctcgcgctcctaccccgcaggaccccggccgcagccctgagtcagcttccccgctcctcgcccgcccggctgcgcctgcgcggagccgcctcactgtgacccagcaagcgcgccgcctgcgagagggcctgcggggcgcggcggggcggtgcgccggcgccactgggccgcggcctggcgggattggccggtctgcgggtgacgttgtc

SEQ ID NO: 10639 - DNA, 305 bp, Homo sapiens
  source 1..305: mol_type = other DNA
aacaaaacaagaaaaagcatgcctggttgtgtctgtccttctctgctgcccaggctctagtgcagggcgcattgcctccggactgcaggtgcatgaggctggtcttgaactcctgtcaggcctctgcatgtatacatcaactgataataactcagccgggctgcacccgggtgaaataaacagccttgttgctcacacaaagcctgtttggggctggtctccatgtcctgggcccacgccctcctcctgcccagctgggcggggtcttacccaggcggagccccttacgtgcagggcgttctgtg

SEQ ID NO: 10640 - DNA, 560 bp, Homo sapiens
  source 1..560: mol_type = other DNA
ccccctgagcaggcttcccagaaccccgggcagatgccatgggtgtcctggggggccctcggttgcccaggcctgaccctgcagcgctcagaggggggcgggtggcaaggggctccagacggatcccctctccagcctgtcctccacctgtgacaggaagcagaggcagctccctcaggggcccgcccccacctgaggatccctcacaggactccttgggccagtggtgcccctgggcctgctgtgtcccctggcaaccaccagctggggctttagaagggggctggccccacccacagaggctgacagggtctcaccttgtcacccaggctagagtgcagtgatgaaatcatggcagccttgaatatctggggccgcagttatgtttatagagacccggcctccagagatcttcccgcagggcctcccaaagcgcggggattgcaggtgcgcgcggggccagcggccccccgggcgggagaggagggcgtggccggggggcgtggccgcggggcggggagggggcgtggcccggggggcagggcggtgtgacgcgcgcg

SEQ ID NO: 10641 - DNA, 523 bp, Homo sapiens
  source 1..523: mol_type = other DNA
tcttctgtcacagctcaaagtggtcctgccccaggaacaggtggcaatgcccaggcctcacctaacacaaggcgcctcctgctccccgggaggccgggctgccgagggctgaggccctagacagggcagaccgcgccccttcaccggttgggggtctcggccctcagcggcggggcggggcctggggaggggccaggcggcgtggggcggggcctgtcgggcgggacctgacagcgcgggacgtgcctagggcgcgagcccgtactggggccgggcggcgtggggcggggcctctcgggaggcgaggctgggggcggggcctgtccggagtcggggcctgcctggagcgggagcctgtgccggggccaggaggcgtgggcggcctatcaggaggcaggacccggcggctgggggcggggcctgtcgggaggtggggcctgcctgggcgggagcctatgcgggggcggggcctacaaggaggcggggccggcgggggcggggccgggctcggcttctcttaggg

SEQ ID NO: 10642 - DNA, 349 bp, Homo sapiens
  source 1..349: mol_type = other DNA
agtgacacttctctgagaacataatttaattataataaatgggttgggtggggtgggggcggatcggccccaccccaaagggctttatggggatgggggtcggggagcctccgcagccccccccacctctgtcttcctcctctcccgccgcctgcagccggagaggaggagatgagattttaaattcaatgtgaaggcggcggctggcgggaggcgcgggctcggggccggccccgagtgaagtggggggctagctgggggcccctgccccgggcccaggcaccagcccgcgcctgcccggccctgggcggcccctccagagccgatcccgggccgcggctaattatcg

SEQ ID NO: 10643 - DNA, 492 bp, Homo sapiens
  source 1..492: mol_type = other DNA
ctcagaggagctcggcttggctgcagtgctgaccaggtgctaatgcagtagcccctgccttgggcccggggtagtgcacgggcgtctctgcgaccccaggcacggatgacaccctaaggctgcgtctctggccctgggtgctctggcggccctggaggccatgtgatttacaaactttttttgtgcatacaaaactcttctctggtggggagagggaggcgccagcaccatcccatcccgtgccccgcctctccaggcgcgtggctggtccaggcttcctcggcgagcacagcgtgggggccgcctgggagccctgcgtccgccaggtcctcggccccagtgcaggtgtgcctcgaagtactgcacaggcgtgcttcagtagccccccctcctggggcgcccccggctaccgtgtgcctccgcagtgtcacagggcatcgcggcggcatctggccgagccccacacgtcaccgtgggtctggccagacggtc

SEQ ID NO: 10644 - DNA, 470 bp, Homo sapiens
  source 1..470: mol_type = other DNA
gccgtgagccccggcacctgaaggcgcgaagctgctgaggagggcagaggtcagctgcccctagctgtgttcctgattcctgccctgcccgtctgacctcaccccgcccacccaggaggggaagcgccgtggaggccccgcttgacgccccccacccaaggtttagcccaggaaggcaggggcctgcagctcctgggggctcgtcctgccccacccgggtgggagacccaaccttccaggcccacaggagctcgtgcgtgcgtctcacgttccagtcacccgggtagcaggcgtgcttggtggcgatccgtgtcccgacaccctcaggctcccgaatgggacttttcaggggtgggggctgcgtcactcgtgaaggggcatcgggaccccagcccacttgtggtcccacgtgggagatccaggctcacacccgcgccagctgtacccaggcaggtagggctggctggggg

SEQ ID NO: 10645 - DNA, 537 bp, Homo sapiens
  source 1..537: mol_type = other DNA
aggagcggcctctgcatgggggtgacagggaccctcagggccccgcaaccccttgccagaccccaaagggtccagggactgggctgtcactgatccacaaaaaccagaaatatttccttttttttttttttttttttttggacacagagtctccctctgtccccaggctggagtgcagtggtgtgatctcagcttactgcaaccacccaccttggcctcccaaagtgtggggatgacaggcgggcccagaaaacaaatgttttcaactcatctcttggggcgtggattttttttttaattcagatgaaattcacataacatcaatttacccaggtttaagtgaaccgtgtccccaccaggtggcagctgcctggccgtctggcataggcaggtgagggcgccaggcggccagcaggttcctgggagccagctgccacccagcaaacaaccgggacgggcctgcagcctggggcccaggtgggccactggggacgtgaggcactggccgccccgccccagcctggcacagcccttgcc

SEQ ID NO: 10646 - DNA, 378 bp, Homo sapiens
  source 1..378: mol_type = other DNA
gtggtgacctggaggcagccgccccgcgctgctcagcaggacacgggactcaagtctcacctccctccccggtggagggaggaactttggcacgagccaggaaaaaagactcgtgtctcaggcagactcttactcagtcagcaggcgtggctcatggcccccccggaggaaatttcttttttattaaaagcgaatgtgtagacattgcagccgcacagcatgagttcagtttcatgggcttcatgaagtcccaggaactgggtggatcccatgcttgggcctgtgcacgctgttgggaagctggtggccgtctgcagctggggacagacgctgtcccttctgtcaagggagcagcgtgcacagaggtcaataagtggc

SEQ ID NO: 10647 - DNA, 508 bp, Homo sapiens
  source 1..508: mol_type = other DNA
ggtcctctactaaaaatttaaaaagttagccgggtgcagtgagccgagatcgcgccactgcactccagcctgggtccccgctcagggtggggctggcccccttcggccttggccggggcttcgtgtcacggagcgcccgagggacggtcggagcccaccccagcccgcccgccgcctgagcctggccgagctccgcttctacgccgcctccagcccaaagcccgtggtcgagcagggccgggctcccagcgctagggggttcctaggcgcggcgcttcgggggtcctggatcccgagggtctgcagcagaggggctgaggcccgggacgggggtggtcgcagcgccctttcctgaaaaaacggggttcggctctaaggcgcccccaagccctgccggcagcgcggaacccgagccgctcagaagcccgggagccccaagtctccgggaccagaagcgccgcggccctgacttccggaaggtggacggaacccgcggacggggcgggcc

SEQ ID NO: 10648 - DNA, 350 bp, Homo sapiens
  source 1..350: mol_type = other DNA
caggcctcagcctcccgagtagctgggaccttggaagtctttctctgaaagaaggaaaattcattgcttaggaacagcccataataatggtggggcctgacctcaccccattggatgctgtgccctggcttgcagagcactgggaaggtagcctagtagcataaattgcatttctagtgggcccagaaaaagcgcgaggcgaaagccttagtggaagcgcgtcctgcgcaaagccggggggcccccgactgcgccttggctcagccccgtgcggagtctcccaggggtggcggctccgggtgcggacgcggagtccccaggatcagccggtgcgcagactcgcaggtctc

SEQ ID NO: 10649 - DNA, 485 bp, Homo sapiens
  source 1..485: mol_type = other DNA
acagctgattgctcagccttttttttttttaattcttaaaaaccttttttagagatggcatctctctatgtccatctttctgatttaaataaataaataaaagttactgacaagccaggaggcactgactgctgaccgtgagtcgctgtcttctcccgggaacaagccggtcccgggggccagggcccactcgacagcccaggaagcgcgggcaatggagctacccggcccagaagcgaaatcccgccccgggctcgcccccggcgccttggatctgggccccggcgctgcgccccccacctggactccgccgccggccccggcctccccacggccccgccggccctgcccctggagacctgagggcgccctcctcccggggaactgcgacccggaatcctggcctcgcccctgtcgcgctcgctgagtgcggggacggtgcccagcgctcggcacccagccccgaggccaggaccgaggaaggc

SEQ ID NO: 10650 - DNA, 241 bp, Homo sapiens
  source 1..241: mol_type = other DNA
ggccatcaactgatggaaccatgggagagcccaggctgctcagcagcccgactccagatacagaaagccctctgtccttgcgataagagacactgccgtggggtgggagcccctcagcctgcctgtctgtgagccacatcctcatcgcacgcccttcgaggaggacaagggaacctttcccatttcactgagactgggtccctggaatccccgcgccgccgcttccgggggcgtggcctct

SEQ ID NO: 10651 - DNA, 562 bp, Homo sapiens
  source 1..562: mol_type = other DNA
acagctgattgctcagccttttttttttttaattcttaaaaaccttttttagagatggcatctctctatgtccatctttctgatttaaataaataaataaaagttactgacaagccaggaggcactgactgctgaccgtgagtcgctgtcttctcccgggaacaagccggtcccgggggccagggcccactcgacagcccaggaagcgcgggcaatggagctacccggcccagaagcgaaatcccgccccgggctcgcccccggcgccttggatctgggccccggcgctgcgccccccacctggactccgccgccggccccggcctccccacggccccgccggccctgcccctggagacctgagggcgccctcctcccggggaactgcgacccggaatcctggcctcgcccctgtcgcgctcgctgagtgcggggacggtgcccagcgctcggcacccagccccgaggccaggaccgaggaaggcgaccgggcggacccccacgcgcagcagcagcgcccagcccttggtgttccccgcgcctgcagcgcgccgccggaagt

SEQ ID NO: 10652 - DNA, 507 bp, Homo sapiens
  source 1..507: mol_type = other DNA
tgagtgaatgagtgaatgcaggaatgcaggatgcagtgagtatgaatgaatgcaggatgcagtgagtgagtgggtgaatgaatgaatgcaggatgcagtgagtgagtggctggatgaatgaatgcaggatgcagtgagtgagtggggtgaatgaatgaatgcaggatgcagtgagtgagtgggtgaatgaatgaatgcaggatgcagtgagtgagtgggtgaatgattgcaggatgcagtgagtgagtgagtggctgatgaatgcgcctgaggtagtgcacctgcgagtccggaggtccaacctggtaacctgcgccaccagcaggctccgtgtccacgtggacggggaggggcatgcgtggcgaggccgggcgaggagcgcggcgggcccgcaggggcggactgtgggcgtgtgggcggggcgagggcgcggcgcggcagggctgcgcggccgggtggcgcgggaggcacgtgggagcgcgggctcacatgactggccgcgcgatg

SEQ ID NO: 10653 - DNA, 395 bp, Homo sapiens
  source 1..395: mol_type = other DNA
acccgcgcagagcgaaccgctccggtccctccggagtcagcctcgagctccacgcggcgaggacccgcccccgcccccacgtgacccgcgctgtcccgcgctgaaggcggcggcctcgcgttaaacggtttccctagcgaaaggctcaggacattttcctagcattccgggtactaaaatcatttccccgcagcgtccgacggaaccatctgctgccacacatggggtggtcaatgctcccatgagtttacagaaacaaccttgctgaatggaattaagcactttcttgtcacaaatatatcagcgtgaggccccagggcgtgggtgcgccccccgccccgcggccttggtgcggcctccccgtcgcacgcacatggctgggctgtagccgtcgc

SEQ ID NO: 10654 - DNA, 477 bp, Homo sapiens
  source 1..477: mol_type = other DNA
catgcctgtggtcccaggtgaaccgcgatcacgccactctcctccagccagagcaggatctaaaggaaagttggtcctggccctccagcatttctccagggtccttttttcagcagggacctggcggaggcatcgccctcagagtcctctggacctggacctgcacacctatgggagcaggaaggacccttgtgacttccagtggcccccctgggtgccaggtcccacagtagcgagggaggactagccgggcctggctgggtggacctgtgtctacagccacacatttcctgggaatctggaaggttaatccaaaggcctgacctgaggaccacaggataaactgcgtggttattttggtgccaatcatcctctgcacctgagagcctctgctctgcttgatcagccctgctgacctgccacaagggaagccacacgtggcagggctggggagttacagcatacccccccgccccc

SEQ ID NO: 10655 - DNA, 519 bp, Homo sapiens
  source 1..519: mol_type = other DNA
ttttaccataatttaaaacgtttctattaaaaattaaaaattagccgggtggaggctgcagtgagctgtgactgcaccgctgcaccccatcctggacgacacggtgagatccactgcatgctcactatgcattaggcatctgtagggtcactaacctattatattttacggattggcgacaacctcagagaggttaagtcacttgcccaagtcacgatcctttgccaatgagccgatgctcgggagctcccgggtcgaacggcgagacagctgcgcgtccccgagccgccgcgcgcccggtccgccggggcggagtcaacgccgcggattggtcgatctctggccgtacggcgccacatggcactggctcgcgagggcgggggcgggcgggctggccgggcgcaggcgcgctgagggcgggcgcccctcggcctccgtggcccctccggcggccgcgacgtctcgcgagaagacgaccggtaggaggggctcctgcgccgggggcggggccggcgaggg

SEQ ID NO: 10656 - DNA, 439 bp, Homo sapiens
  source 1..439: mol_type = other DNA
tcaaggtcttaaagccgagaagtggcccctctgggttcggaaggcaggctgggccctggggcagcctctatccccagccccgggcacagcccacttccctaccagggctgtgtggcccagtgggcccctagagggagacctggggtctgaagctgagcggaagcgggcgggggtggctaggcgggccaccccctcatgacagcaaagaaattgacccgctgcttccagacaggcagcaagacgcggggcccctgccaggctgggccatccacctgggcacattgctccgctgggtcaaaggcaccgcagtcggggtggggcggctcagggcaggaagccccatcccctggcctgggaactgtgctcacagcgtcaggtggggtgcagggtggcatggcacccaccatcggtgccactacgaggtgcgtgaatatcaggc

SEQ ID NO: 10657 - DNA, 719 bp, Homo sapiens
  source 1..719: mol_type = other DNA
gtggcgggcagggggctcacaccctgctcaggcgacccctcggctgccggcgcgcattcctgccgcccccgctcgtgcgaggggcgggcccgggcccgtgggaagggccggggatgggggccgcgcacagctgggccgcatctggcccgagcgcaaggagaccaaatgggacagaaggcggcctttcatccggcgagggaagtggcggccttctgggagccaaccctcccgacggagggccaggatgtccccacctgcggcacaggtggccaagctcgcgctcgggaagacccaggcgccaccccagtttgcaaggcctgccgcgtcccaaggggaggaagccgtgtgtcccccgcggtgcgtcggagcccagagcccgggtctcagcaccctgcccgctgcgccgagggcgcgcccctcccgtgccgggacgcccggtgcatccccggacggcgctggccaggctgggtttcctcttcagggacaccggcgcgggccgggcccgtccccaagcccctcggcggcccgcaggggctacccggggcggggggggtgcggggcgtgcacgtgcgcgccgggggcggggccgctgcgccctctgggcagttcccagcccccagccgcggccccacgtgggtctgcgggcgtggagcggcgaccggcgcgaggccccgcccccgagcccgggagccaatgagcgcacgggggcgggaccggcg

SEQ ID NO: 10658 - DNA, 385 bp, Homo sapiens
  source 1..385: mol_type = other DNA
gcgatcctcccgcctcagcctctggagtagctgggaccacaggcgcatgtagcccaggctggagtgcagtggcaccatcaagagagtacttgggaattttgatatcttagagatactggccaggctggtctcgaactcctgacctcgtgatccgcccgcctgggcctcccagagcgctgggattacaggcgcggccgcggaggacttacggtgcagacactgggcgccctgcaggcgaagcccacccaccggatgctcggcatgaaccactaggcgcctggcgggggggagcgaccggcttggcgcctgcctgtccccgggccctcgaggcttccagagcggcctccaggggtgcagccgcctcctccgggcctggcaggtggca

SEQ ID NO: 10659 - DNA, 256 bp, Homo sapiens
  source 1..256: mol_type = other DNA
tagtcccagctactcgggtagtgcagcgcaccactgcactccagcctgtcagctcagagttttcctcctcaagttggaaagcaaacgaaagtttattatgtgtgtttgtttgactctgtcccaggctggactggcgatcctcccacctcagcctcccgaggagctgggaccagcccccgcgctccgccccgggaactccgggagcgctcctggtcggccggccggcgcccgcggactctgcgcacgcgcatggtcg

SEQ ID NO: 10660 - DNA, 312 bp, Homo sapiens
  source 1..312: mol_type = other DNA
ctgggatgggtccattgtacagataggccactcggtgccttgctgggaggccaagaccagcccagccggaatgaagcgcagctgcatatgcagccagggttccagcccccacggccacgtggaaagactggctggcccgggtcttacagcgctgagggtcggtcttccagcgccttaggggccaggcgtccctccaagaaggcgcgggggctgggctggcgggaggcgggccagaggctcgggggcggggccggcgggcggacgggcgggggtgcggagggggcggcggcggcggcggcgaacaaagaggcg

SEQ ID NO: 10661 - DNA, 786 bp, Homo sapiens
  source 1..786: mol_type = other DNA
gcctcctgcactctcccaggaggggccctgcactcttctttcagtaagcagccagccagccttgccatgcacaggccgcagtacagggcctggcactcgggtgcacccaagggcagggctggatgcagagccaggtgacctgcccacagtcccagtgtgcacacctgggaactgacccccatgggtctgtggccagctccttcctgctggggcctgagcccgtgctgcgtgtccctcctcacagaggccctgatgaggacggggaggaggaggccgctccagggccgcggcaggcgcacgacagcctctaccgcgtccacatgcccagcctgtacagctgtggcagcagctacggcagtgagaccagcatcccggccgcggcccacaccgtcagcaacgccccggtcactgagtactgtgagttgacgtgggcctagtggggccagcggacacgtcagctgcggctgagagcgcggatctgggctggggctagctcgaggcgaaggggcggcctccgggctgggcagccctggccttgagtgcctcctgccccaggtgaacacggtccaggggccatggagaggccacatggtcacatggaggttccgtgtccagggcacaaggactctgtggccaaggacctcagggcccagctacatggccaaggtgggcaggggtctctctgtgggccctctctgagtgagaatggatgtgcccatctgggcacagcgggcctacccatgggccccccgacctgcagctgggactgcatggccagcaggcact

SEQ ID NO: 10662 - DNA, 441 bp, Homo sapiens
  source 1..441: mol_type = other DNA
acacccccagggttgcagtgagctgagatcatgccactgcattccagcctgtgagactgtctcaaaaaaaaaaagaccactttctctttggggtgctgaaactttgagggcccagagtggtcactgtcctcagagctctgtgtctggcagagtctgggggacccagggtgggtgcggggagcgcgaggggcagggccagctctgtgcctctcacatgccaagagcagcctggcagagacggacggggcccggagaggaggaaagggctggtgtccgcttctgaccagcgcaccacagcaagccagaacagggctgacctcgcctggccttgccccacgcaggcttgtcaccagccctggtggggtgttcagagcctggtgtcccaagctctgacgcactgacacatgggcatgttaacacaggggaggaggtggggactgg

SEQ ID NO: 10663 - DNA, 514 bp, Homo sapiens
  source 1..514: mol_type = other DNA
atcagctgatctctatcaagagctgattttcatgacgatttgagcctggtcgactggatcactgtgagaagcttttcgcaaagcctcctagaagcccatgccactctcaaagggtgcatgtgtttgaaatttatggcccatccccctccagtgtttctggaaggagggaatacgacgagcagctgaacctcttatcagcatggtctcacaggcggacccaatctgggatgtccactcagagcaattataattggccatggcggacgatcgctccgcctcccgggcgaccccgcctccctttcattctgaaagaaagaacctcagcctgggcgtccaatgagaagcgccttcccgcctctttcggcgtcgaccccgccccgaggccggaagggatgcccgcctcccttggcgagatgagccaatcgagggctctcacggccagatggacggcagccggcccaatccgccgggcctcacgcggcgccgcccgcccctccgccgggcccgagtggcg

SEQ ID NO: 10664 - DNA, 419 bp, Homo sapiens
  source 1..419: mol_type = other DNA
cagggccccaggggtctgcccactgcacaggaccagagtcccgggctctgcaagcctggcccatgtcacgttcactgcgcccgcaagcatgaggggggcataagccctggcctttacactggaaatgtctcaggtggcccttggtcggtgctccctgaccccagaggatggagtgcagtggtgcgatctcatctcactgcaacccctgcctcagccttccccgtggctggggctgcaggcaggcaccaccacggcgtgggccccggcatagcatgtgtcaccaccgtcggggtggccctggaggtgcacggctctgctttccctcccaggcagtagcacctggggcctggcagctcctgccccacccgggaccttgctagagctccccgtgggcctggagaggaccaggttggaagttg

SEQ ID NO: 10665 - DNA, 300 bp, Homo sapiens
  source 1..300: mol_type = other DNA
ggggagttcgaggccagcctggccattcccagctactcgggaggctgaactgcactccagtccctcggggtgaggaaggcctttgaaggggtgctgaccacccggcatgcccaggaacaccccgttcccctcccattgcagtgacaggctctggaatttcttcagaaattcagctagatctcgggagccaagagcccctcccaaggccccacctggactctgccgggggtcacggctgggtggggactgatgcccagactggtccagcctcaccccgactgatgcaggtgggctgggccc

SEQ ID NO: 10666 - DNA, 484 bp, Homo sapiens
  source 1..484: mol_type = other DNA
accctctcttggggtccagatcgggtcctgtaacacaggctcaccttcccaagggaagaaaggaggctccctaacatcatgctgtagtttcagggagagatcagggacctctccatgatgagttaaacatcaaatcctctataaaagctgctctggattctgcctaggttctcagcatctggcaaaaacatttgcggaccaaggtctgtgttttgagagctctcgtgatttctaaattacatcacatggagggatttaaaacgcccatccttttaaaaaacatgaaccgtttcaacttgctcccacaggcctagttacttgcctcatctttgtctaggaagaggatttcactagaagactcccagcctgagggtcttcttttctttctttcagaagaggaatcaattctggaccacatccttctctggcaaggggaatgaggctgagaatgacctccatccgcaggacgaggtaggcactgatt

SEQ ID NO: 10667 - DNA, 761 bp, Homo sapiens
  source 1..761: mol_type = other DNA
tggttgctagaaattaaaaacccgattgcgcgtgtttgcaattacggtaacttggcgcgtcacccccaagcactgagctagctggtggtagccgggcgcctctcggggcgcgccctattccgccctcggccctgggctgccgcacgatctgcgcgtcctgctgcacctgagcccttcccactcgggcgcccgcaccgctgcggggccgggcgaggatgcaccacccccgcccgcgagcccgccacgggagcgcgtgccgaatcgacgccgcctgcagtccccactacgggtccctagggggcgcagccggcgcgggaagccgcccgagccaggcgccgcggccggcacaaaattgcaggcgggcgggcgccgcgactcgagggcctggggggcgggccctgggagcgggcgccgcctccctcggccaatcaacggcgggcggcgggcggcgggcgcgggcggcgcgtgcggccgggctgtgaatggggagcggcggccgcggcagctgagggcgagcgcgaccgcgacgtgcgggcgggcgcactttcttctcagcgccgggcgggggcggcggcggcggcggctcctccgcgcccggcggacccctcggagctagcgcggcgggctcgggactgcgtgagcgccggacgcgaatcgcccggctcgtccccggcccgcgccgcgcccctcacgcggggacccaggacgccgcccctcagcgctgggcggccgctcacctcgggccggggggcgccgcgcct

SEQ ID NO: 10668 - DNA, 198 bp, Homo sapiens
  source 1..198: mol_type = other DNA
cctggaggagagcaggtcccctggaggagagctggggtcccctggaggagagcggggtcccctggcctggaggagagcattggggtggggtacctacagcatgcacagctgcagatggagcaggtcttctggggcaggaaaccagcttccatggctggaaaacccagggggctgctggctcctgtggcaggaagcagg

SEQ ID NO: 10669 - DNA, 244 bp, Homo sapiens
  source 1..244: mol_type = other DNA
ccacctcctggcttccagggagggcaccgggaaaaggggccggggccagggccgccccaggcctgggcgatgggtggctcgcgcgcgcagccaggaccccccccgtccccccacgaccctcctccacctcagcggaggcggcggggtcgcgggagggagggggccgggcttaggcgattggcagcgcgagcccgggagcccccccgtgcccccgcccgccccgcccccgccaccatctgctcgg

SEQ ID NO: 10670 - DNA, 294 bp, Homo sapiens
  source 1..294: mol_type = other DNA
caatgagagcctctcagttcacatatgaccaatagataatatcttaaaattcccattttactaataaaaaattcaaagcgagattctgcagtggtgcgagtagctgggccaggctggtctggaactcctgacctcaacgctgggattacaggcgtgagccactgtgcccagaatatatttgcagaattcctccagcctcggatgcaggcgcggctaggctgccctctctatggtgagccccccggtccctcctccgcagcacccggagtgcctccgcgctgtacgcttgcgcga

SEQ ID NO: 10671 - DNA, 477 bp, Homo sapiens
  source 1..477: mol_type = other DNA
actctgtctgcactactgtgcagtcagtgtgtgttatctcactctataaagagagtctgttcataggaaaacatgatctgttcatcagtctagcttagcagctagctaaataaatgaagtgtaactcaatggctcatagagctttatattaccatagagatttatgttaccacaggggtataaaaagtattaatgaattaacagaaggtcttttatatttcatttatttattacatctttactgtaaatgtgaacacacagttttttcttgacaaagagtagctacttttctttcaaattttccaattttgtagtttaaccaataatagtttcagtgacttcaatacattataaacttcagaattgctttttaaattttttatctttcacaaagatagaaattcagtgcagttgtttgtttatttacaaacatcttaatgtaacgtgtgactaaggactatattcttcagacattgc

SEQ ID NO: 10672 - DNA, 359 bp, Homo sapiens
  source 1..359: mol_type = other DNA
gttctcaggaccccctgaggctgtgtcacaaaactcttgacagactttgagtctttttggtcaacataacctaacccggggaaggtgagatcacaggttagaaaagctacagagtctcgctccgtcgccaggctggagtccaggggcgcgatctcgcgagtagctgggattacaggcacttctaacccagaggccttgggctccaggacccagtcaggcagccctggacttgaagagctcccaaagctcatagcctggagcttcttaacctttaggcatttaaaacggcccctaaacttgggggtcctgggaccagctgtgggccccggaggctgacttccggtgcactcgcgtgttcg

SEQ ID NO: 10673 - DNA, 482 bp, Homo sapiens
  source 1..482: mol_type = other DNA
ttaatattcacaagtcagttgctattatacaccacctgtagaaaagtaaagaacattcttgtggtacaattaatgttcatatgcttaatgatgaaatagtgaacatttctcctaagattataaaaataagacaaggatatctgctgtcaatgattttattaaagaatataaatctctatttgcagatgccatgagtaaatttggtaagttccctgcataaaagttatgcaaaaagcattttatgatgaaattttgaaaagcaatgccacttcaaagatccctcaataatatgctttgaagaactgtatccagaaaataaaattaaaatcctagcaagttctttaatgtaaattaacaagctaattctagaattcatatgcatattcaaaagtcgaataattgtcaaggctatcctgtagaatggacagagaggattgaaatttctaaatatcaagacctgttataaagccatagaaataatg

SEQ ID NO: 10674 - DNA, 280 bp, Homo sapiens
  source 1..280: mol_type = other DNA
ctcgattttcaaatctgtaaaattaagatatactattctctactgcctctgcactccagcctaggagacagagtctcgctcggctccgccttggcctcccaaaatgctgggattacaggagctctgccccatgcgcatgagcggccgccgctcgccctcagccaggcccagcgcgccccgacgcgtccccacgcctgcgtgaccggaacccaagcccaggcaggcggtgagagggcggggcctccgcagtgcgactgcgccgctcgaggccgtgcgtcgc

SEQ ID NO: 10675 - DNA, 214 bp, Homo sapiens
  source 1..214: mol_type = other DNA
tctgagatgctgctgagcagagaagctgcagacagagccgctgttgtcagaaagaaggtttatgacagctttctggttacttgtcactgtgctgcagctggccacaggcaggtctgtagccaggagccacaggccacagcatacagcccaggctcctgagtagctgggaacatgagtgtaatagcgacatctttttaataaatatgtgtcatgc

SEQ ID NO: 10676 - DNA, 129 bp, Homo sapiens
  source 1..129: mol_type = other DNA
gcgggggtggtgggctgggtcagccgcaggtcacccggccctcccggggccaccatgccgcaccctggtgtgttggggatcctgatttcagcctcagcctgggcctggcgcctgcacagcccagggcgg

SEQ ID NO: 10677 - DNA, 477 bp, Homo sapiens
  source 1..477: mol_type = other DNA
tgtatgtatgtatgtatgtatgtatgtatgtatttattttgagacggagtctcactctgttgctccatctggagtgcagtggccagatctcagctactgcaaaagcccggccgggttattttaaaacgcaaacgcttaagtatgagggtgcatacattcatgtttacttagcaaatatgtattcagtcagtgtctatcacattccagggatagtttcaggtattggcctgtggcgtttgcacacgaaaggccggcatcggagaagaggcagaggtccttggagcccttcttggctccctgctccccgggcggagccacattcaacatggcggccgcctagggcccgcctgcggacgaacggaagtgcgtgtaggcgggcgccggaagtgacgagagcccgctccttgccggggtctcggttgagcggtggacgcgccggcttcgagcatccctagccgggcaggtgggaggcacggg

SEQ ID NO: 10678 - DNA, 388 bp, Homo sapiens
  source 1..388: mol_type = other DNA
ctggaattacagtaagtatgtatgtatgtatgtatgtatgtatgtatgtatgtatgtatttattttgagacggagtctcactctgttgctccatctggagtgcagtggccagatctcagctactgcaaaagcccggccgggttattttaaaacgcaaacgcttaagtatgagggtgcatacattcatgtttacttagcaaatatgtattcagtcagtgtctatcacattccagggatagtttcaggtattggcctgtggcgtttgcacacgaaaggccggcatcggagaagaggcagaggtccttggagcccttcttggctccctgctccccgggcggagccacattcaacatggcggccgcctagggcccgcctgcggacgaacgga

SEQ ID NO: 10679 - DNA, 690 bp, Homo sapiens
  source 1..690: mol_type = other DNA
gttcagctgtggctgcgcatagcagacggacggtgggcccagacccaggctgtgtagacccagcccccccgccgcagtgcctaggtcacccactaacgccccaggccttgtcttggctgggcgtgactgttaccctcaaaagcaggcagctccagggtaaaaggtgccctgccctgtagagcccaccttccttcccagggctgcggctgggtaacctccagccactggaccgctggcccctgccctgtcctggggagtgtggtcctgcgacttctaagtggccgcaacacatttagctagctgagccccacagccagaggtcctcaggccctgctttcagggcagttgctctgaagtcggcaagggggagtgactgcctggccactccatgccctccaagagctccttctgcaggagcgtacagaacccagggccctggcacccgtcccgagagacgggcaggccgggggcaggcctggccatgcggggccgaaccgggcactgcccagcgtggggcgcgggggccacggcgcgcgcccccagcccccgggcccagcaccccaagtctcgctctttttttttttcgcaaaaggaggggagagggcggcgaagccggtgagtgagcggcgcggggccaatcagcgtgcgccgtttatggctcgagcggccgcggcggcgccctataaaacc

SEQ ID NO: 10680 - DNA, 514 bp, Homo sapiens
  source 1..514: mol_type = other DNA
tgggggggggggctgtagccagcaccatgtccctcctgccagctcagagtcccatgaaattggggctgcctgggaaccagagacctgggctggtctggctcacagttgtattgggaatgtcggctgactcaaccactctcccggagacctatttgggccacccgaggcgggtgcctgggccacacggaggggtcctggtggtcttcagggcagcggctgtggggctgaagcctctgcagggcctcggagacaggggtctgtgggtcccaggtcctggcctcaccgggtccccaccgcgctgctcgtccttgctcctagcgaggcttggggtcctcaggcggcggcgctgcggggtgcggcgaggacaccggtggggtgagagcaccggcggggcagcagcgggggccgcagcgccgggtccctcggcccggggcccctcccgcgcggagccaggggcgggacaggggggcgtggcctggtggcgctgacgtcacctcgcctataaaatgtccgg

SEQ ID NO: 10681 - DNA, 318 bp, Homo sapiens
  source 1..318: mol_type = other DNA
accacgcctggccagcaattgccttggccttccaaagcgcggggtattttagtcagttattcacttgctcactaaaaccccaggctggagtgcaggggcgccatgttggctcactacaacctaccatgttggccaggctggtctccaacgctgggattacaccacaatccagaatatatttgcctgcctcgtgggggagtcaagtctccgcaggcggagagcccggatgcaggcgcgactaggcggccctctctatggtgagccccccggtccctcctcgcagtacccggagtgcgctgtgcgcaggcgcgaggtgac

SEQ ID NO: 10682 - DNA, 280 bp, Homo sapiens
  source 1..280: mol_type = other DNA
tacaggtgacctcaggtgatccacctagtctacacccacaagatttgtaaatgaatcatttttatggagatgacacactgtcgctcagggctggagtgcaatggtgcgaacagtagaaaccacaggtagaatctaccacagggtggaaatctacgtagaaaaccttttacaaagagacaaaatctttttgtagaaacaaaaggagccggctgggcatggtgtcattcacccccagctctgtatggccacctcccacgtgactgcagccgtggctgtggct

SEQ ID NO: 10683 - DNA, 365 bp, Homo sapiens
  source 1..365: mol_type = other DNA
ttcaagtaatcccaagtagctggaatggtctgagccaccgtggctagccttgtttatttctaaatgagctttgtcatttaaaaactgggcgcacctgtggtcccagctattggaggctgaggtgggaggatcacttgagcccaggagttccaggctgcagtgacgtctgatctggccactgcaatccagcctgggcaacagagcaaagtgctgttttagaataaaatactttttaaataaactaaaaacaaaactcacatctgtaatcccagcacttgttcattccctcaatcagaggctgatgggggggggggcgggtgcgcgtctccacttcagcctctgattggtcacaggccaatcctcct

SEQ ID NO: 10684 - DNA, 225 bp, Homo sapiens
  source 1..225: mol_type = other DNA
cagctactcctcaggctgaggtgggaagatccctagctatgatggcaccactgcacttgtctctaaattaaatttaaaacaataaaaaaaaacagtgcccgctcggtttttcctgaaacgcgcagccctcgcctgtagccaggagccacccgggggtgcctgaagaggacgctgcgaggcggattctttttccgggcctgcggcgagcgcttccggggcggtggc

SEQ ID NO: 10685 - DNA, 412 bp, Homo sapiens
  source 1..412: mol_type = other DNA
cagtagtggtccatggcctattagtgtgaactgcacacaatgggggctcccactgagtctctgtgatggtgagttgtagaattatttaattatatgttacaatgtaataatagtagaaataaagtgcacaataaatgcaatgcacttgaaattgtgttccgcgaaaccgttctctcggactaatttacatactgtagggtaataaatttgtgttgcttcgaaccactaaatttatggtaatttgtttgcggcagcaatggaaaactaatgcctgcgttattcctattttatgaagcagttaaaacggccttcaggaccagcaagggcgggacacctgcttggcgctggcgcgcggccccttggcctggcggcgtccgcggttgcctggagaccggagccgggtctgggacgc

SEQ ID NO: 10686 - DNA, 485 bp, Homo sapiens
  source 1..485: mol_type = other DNA
acctggaaagatacatacatatatatatatatatattttttttttttttttttttttagtagctggagtctcgaactcctgacctcaggtgatccgcccgcaggcgtgagccacggcgcccggcctggataaatcttttaaagtccctggccggccggcacagatgccggggtggggcaaccggttgggacgcgctcgctccggcctggggggacccgggccagcagccggtcgccgcgcgtgcgcactgggcggggggccccgcgctcctacctgcacgtggccagcgcccggcgctgggccgtagctcctgccgtgcacgttggggagtacatgcaggtgggaagctccacacggagaggcgcgccgcccccgtgatagggctttacctggtacatcggatctttgacgtcacgaagtcgacctttgacagagccttttgccgccccgcccggaaaagttcaggaggcggagcgcctgtggga

SEQ ID NO: 10687 - DNA, 474 bp, Homo sapiens
  source 1..474: mol_type = other DNA
gagcaaatttgcgtttacaaatctgacatggaatgcaaatgtgctagaacgtattgcatttttaaaaactgcgcagctatgcaagtccccaaaataaccttaattttttaaaaaggccaggcacggtgcatcatgcctttaatcttcaagtccacggccctgtgatgggatgtgggcaaggcctgtctgggacaggccccgaaggagcttgcctcggcctcaaggcgcacccaaggggcacgagatcgctgcaacactgaggtcgccactccggggcctccagggggctgcctcgccacgcgcctcggccatgttccccccgactgcgagccccgctcacctcgagctctcagctcgccgcctcggggactgggaaagttccctccagggctcccacaggcgctccgcctcctgaacttttccgggcggggcggcaaaaggctctgtcaaaggtcgacttcgtgacgtcaaaga

SEQ ID NO: 10688 - DNA, 372 bp, Homo sapiens
  source 1..372: mol_type = other DNA
ttagtttggaaaacgaaccaaattttttttttttttttttttaaggaaaacatttcagttgtaaattctaagaggaatttcttggagtacagtgcgcacaggcgtgagccaccgcgcccggcggcatctcccaccaaaatagctccttgagacaggttttgaaaatgctttttaaaatttttttcctggaaaacaaatgaccaaagttacactgacattcgagtctgggcgaactaggccagggttcacctgggcgcccctgaaacccagccgccggtagacgagcccaccagagcgcatgcgccgggggtacgccggggccggacacgcccaatgctacagccccgcccccagtgaaggtgcgcgcgtggc

SEQ ID NO: 10689 - DNA, 632 bp, Homo sapiens
  source 1..632: mol_type = other DNA
gcactccagcctgggctctcgctctgtcgcccaggctggagggctgcagtgcagaggcgcgatctcggctcactgcagcttcccgagtagctgggactacaggcgcgccatgctggccaggctagtctcgagctgggattaaggcgtgagccaccgcgcccggcccagaccttgtttctaagaaacaaaaaataaaggctgccgttttcgggggacggggatcccagactcctgcgtccccaggtgccccgcttctggaaacaaagcccaaagtcctacgcccgccgcgcgccgtctggctctgcccagggaagcacagggcggaaggagccctttcgccggcgcgcagacgcgcgaccagcccagccaatcagcgcgctccctctgccggcccgaccggcgctctggtgacgcgcgacgtctgccttcgcccacggctcttgggcgacgacccctcccacactcgccgtgcttgttagctgcgcgccgcgcttcttgtgcgacggcccctgggcggcggcgcgttcgggcgcggccctggcgcgccccccggcggcccggaggggcgcggcgggcgcggcgctgacccggaggcggcggcggcggtgcccggatggaggcacgtcattgtc

SEQ ID NO: 10690 - DNA, 506 bp, Homo sapiens
  source 1..506: mol_type = other DNA
aggacagctggcagctctccaaggaagactgggcattttgttaatttaaaaatgcggaattcttctgacatgcatgtcttaggaaggagaaggccttgagacagggtctcactctgtcacccagactggagtgcagtggtgcaataataactcactgcagcagtgacgtgaggtgtgagccaccgagcctggccaggcctgacttctgaacgagtgcacgtgcaagttgcacccctggccgcgttccagtgtccggggccccacgcccgtccgcaggctactggaatgctgagggcgaggaggcttcgctccacgcacaccggatcggcctgcacttcaggggccaggtctacagccttccccagcgcagacgccgccggcccggccggttcccgagggcggggctgcgcggcctcacgccccgcccaccgcgggcagaggcggggcatgggtcacgtgacggcacgccgaccagcgaggccccgcccggcgggaggaggcccggc

SEQ ID NO: 10691 - DNA, 315 bp, Homo sapiens
  source 1..315: mol_type = other DNA
gggctcaaaggatggacctgccttggcctcccaaatgctgggattacaggactattttatttgatttatttaaaaaatgctaatccgcagatcacctgaggtaccgcacctgtaatcccagctactcaggaggctgagcctgggtaaaaagaaaaaaaaagatttagtactgcaacctttttttttttttttttttaggctggagtgcagtgggcctcccgagtagctgggactacaggcgcccgccactgatcggggcggacggagacagcagcctcgacccccaggggcggggcctgtgggccgcgcaggcgc

SEQ ID NO: 10692 - DNA, 314 bp, Homo sapiens
  source 1..314: mol_type = other DNA
aaaatttatggagaaaccccatctctctactatgtctctaaataaataaataaataaataaataaataaataaaaataaattcgctggaatccaggaattcaaggcggcattcaggagttcaaggctgcagtgagtcatgattgcgccactgcacctagcactttgagaggcccaggcgggcgtggcgcgctcctgtaatcacagctacaccccttccggatcagcgtttctgcgcaggcgcagacagctccggcggaagaggcggtgtagggctcagtgcgcttgcgccgatctcggcctcagcgtgagcatg

SEQ ID NO: 10693 - DNA, 412 bp, Homo sapiens
  source 1..412: mol_type = other DNA
cctgggccgcccaaccaaagtgctgggatgctggagtgcagtggcgccatctgggctcactgaaaccaccgcctcccaggttcaagagattctcctgcctcaggctcctgagtagctggaactacaggcgcgcggatggtctcgatccactgcctcccgggttgaagtgattcacccctaggtgatccggtcccagggaagggacctgcaggcccggccacgcccaggccgctttagcgcgccaagatggcggctgccacgccccgcggccggagccgagtgggcccgagcgcttccgagcattcccgaagtccagagaaactccgggagcggcgcgggcgggagcggcgcgggcgggagcggccccgcccggaacctgggagcggcggcgccggcgcgggggaggggaggc

SEQ ID NO: 10694 - DNA, 328 bp, Homo sapiens
  source 1..328: mol_type = other DNA
tggccagcatgctgtcgatctctctttcttaaagacagtcatcagaaatcaattttttcactcagtctggaatagctcaagcaatcctcctgccttagcctttggcctggctaattttttaaaaaatttttgtagagacggataggcctgtagagctcttttgaagaaaagatccccagggattaccggggtcttcttgcaagggagtccctgcgagctgacctgctgagcctgcgctggggcgcgccccctttaaggggcggggcctggccccgctctcccagggtgccccgcgcgcgcgcgcgccggcagttcggccacgtccctg

SEQ ID NO: 10695 - DNA, 389 bp, Homo sapiens
  source 1..389: mol_type = other DNA
gtgggtggctgaaagcaaactctgtccaccacacagacatagtctgagagcgggccacctggatccccctgctgggctctgagcagggacatgactggtctctgtgcaggccgcagggcagcaggatactggtcccagctacttgggcgaatacataagtaaataagaaaataggtaatacattaaaataaataaaataaaataaataaaataaaataaataaaataaaataaataaaataaaataaataaaatacccggccacggaggtccccaggctggctgcgagggcgccggggaggtcactgttactccagccccgcaacccgcggcggccctcgcacacttccgccggaagtcagcccctcaggggcgccgtgctgatgtcac

SEQ ID NO: 10696 - DNA, 452 bp, Homo sapiens
  source 1..452: mol_type = other DNA
catctctgaagtcctggtgtcaaggggcaggcctgccttccggccagtatgggcctcaccagtttaaaaattgtgaaagtgaactgccacctatttcagaggagacatgactgccaggcaggtgttctgcaccttgctaggctgggagtcaggggcagggggccttccagccatcttcccccgtaccccccaagctggggcggccagggaacccaagtccgattcttgctggtggaaagcatgggcaaggacggagcgggcctgcaccggcggttgggcgggctccgggggcggggtccacctgggaccgcggcgcgcccctcaccgctcgcgccgccagggggcgccctccggagagcgcgcctaggccgcggcctgcgcttggcccctgcgggccgccgtctccgtgcccggcattcggccgctgttcggctgcgcggcggcagctcccg

SEQ ID NO: 10697 - DNA, 366 bp, Homo sapiens
  source 1..366: mol_type = other DNA
agacatattttcagatcaggaatattgaaatgattatgtaaatggagaaatgcagtcaaaactgcattttctctagtggggattgtgggaagtcaaccaacttccaccaagacgcatagctatcactaattcaaagtgatttggaaaagctggaattcggatggtatcctgtcctttactgaagttttcgttaaatgtgaagctagcatggactggcccaggcatggactttctagacgttcccttaaagatagtcaagacagctcctaaatttggggacggtatttgtcctgggaccggcggcgggtcccgggaggcggacttccggtgcattcctgcgcatgtgcacccctgtgtgcgtgttcg

SEQ ID NO: 10698 - DNA, 396 bp, Homo sapiens
  source 1..396: mol_type = other DNA
cagtagtggtccatggcctattagtgtgaactgcacacaatgggggctcccactgagtctctgtgatggtgagttgtagaattatttaattatatgttacaatgtaataatagtagaaataaagtgcacaataaatgcaatgcacttgaaattgtgttccgcgaaaccgttctctcggactaatttacatactgtagggtaataaatttgtgttgcttcgaaccactaaatttatggtaatttgtttgcggcagcaatggaaaactaatgcctgcgttattcctattttatgaagcagttaaaacggccttcaggaccagcaagggcgggacacctgcttggcgctggcgcgcggccccttggcctggcggcgtccgcggttgcctggagaccgga

SEQ ID NO: 10699 - DNA, 202 bp, Homo sapiens
  source 1..202: mol_type = other DNA
cagctactcctcaggctgaggtgggaagatccctcagtgagctatgatggcaccactgccttgtctctaaattaaatttaaaacaataaacagtgcccgctcggtttttcctgaaacgcgcagccctcgcctgtcgggggtgcctgaagaggcgctgcgaggcggattctcggcctgcggcgagtgcttccggggcggtggc

SEQ ID NO: 10700 - DNA, 401 bp, Homo sapiens
  source 1..401: mol_type = other DNA
ctctttaacaaccatgctgtagagtactaaagaaccgcttggatataatggttaacgccagtaaagactaaactgtggggttgcctcaacaggtggcagcctcctcacgcccctaagaagctcttccggccatttgcctatagaaagctttctggtatcagatgacccacaagagtcctgcagggttagagcctgtacctcaaaaggttcttgaagctagtgcataacgggcggagcgtgcacccggcagccccctcccgctccgcccttccctggggctggtgcggcggcggagacgtcagcgccaggagacttcgggtggcggctgcgccataggcgggccacggcctggacgcgctgcggggaggggcggagcgagcgggcgggagcgcgcgctgggc

SEQ ID NO: 10701 - DNA, 371 bp, Homo sapiens
  source 1..371: mol_type = other DNA
gagtgctgggattacgtgcctagccagcaaactttttctataaagggctgttcaaataaaactctatttacaaaaacaggtagcaggccaggtttggtccatgggtctttttttacgtttataaaggattgtttaagaagacaaaaagccaaaaatattttatttctagttctttacagaaaggatccacaaaggatcctggtgggaagaataggaaattctgtgtgcaatactgatgtgctgttttagcagcaaatagaaactcatagataatagctaaatactgttagaaattaactttccgttatagctaaatgttaccagaatttttactccgttattttgttcttacagaaatacactttcgggaa

SEQ ID NO: 10702 - DNA, 455 bp, Homo sapiens
  source 1..455: mol_type = other DNA
gaagcactcaggacagtgcctagcacctggtaagtgtccactattattgctgtaataaggaaattcatacacattaaaatggctaagaaagttcattttaaataaccgtaacatgcacattttcttggcagtatatattacatgataaacattgacttaatatggaccatattaataaatgattaaatctactctctcatttcataagtggggaactgaagcccccataaaagtagtttccctgtatattatatataccttttattataaaaaatttcaaaaatcacagaaatacaatcaaactgttacctctcttaaaaaaacagctttgattctgcagagatgttcagaaccagtatagaaagttctctcaagttgtttttacaatagtctggaaaacacagtctcattctgaaaggacactgttcctttgctttgacttagtcgaataaaca

SEQ ID NO: 10703 - DNA, 795 bp, Homo sapiens
  source 1..795: mol_type = other DNA
tcattactcatatgagaagtaggtaaagcaggaatctgagtccgactctcccgctccaggcacctggctgagcctcccgggaaaggctgggacgccgctccccacaagcccgccgcggcgaaggctgtagcgtgttccctgcgccccgaggaggtctccgcaggtcccacggccgcccgcagcccccggtggctcccgctgaggcccggccaggcggccggccgcccggcgcgattaccctacagcgcggaacgcgctccccgccgagacgcccgggccttctatctccggcccctcgctgcggccgcggcgctcccgagagtcgagacgcgaaccgggtcgcgctcactgacctgaggtggcagcgcggccgccgcacagccgcttccggccgggacaccgccccgcccgccgcaggagcccggacgcgggcaagatggcggccgcggccgtgcggcccgtgacctggaccactgggctgggacccacgaccccaccaccacgcctggaggacgcgcagcggcgcctcggccttggaaggggagtttcccagcgcgagccccgcccttccccgcccgggaggcgcctcggggcggggtcactggccgggaggccccgccttccgcccgaaagcgccggtgcaccccgcaggccctgcccgtgggtccacaggccggatccccgggttcctaggctgggactgcttctcagaaccactctgtcatttctattaaacatttttttttttttgcaaattttggttaatgatttattcactcattagtcattccacaa

SEQ ID NO: 10704 - DNA, 392 bp, Homo sapiens
  source 1..392: mol_type = other DNA
cgcgcgcctgtagtcccagctactcgaggtgctgaggcaggcgccattgcattccagcctggcgatatagcattgcctttaggtaaatgccaaactggtttccaacccgtttctagccctaccaagtcaaggctccattccagcacagtgctgggtacattgtggaatgactaatgagtgaataaatcattaaccaaaatttgcaaaaaaaaaaaaatgtttaatagaaatgacagagtggttctgagaagcagtcccagcctaggaacccggggatccggcctgtggacccacgggcagggcctgcggggtgcaccggcgctttcgggcggaaggcggggcctcccggccagtgaccccgccccgaggcgcctcccgggcggggaagggcg

SEQ ID NO: 10705 - DNA, 474 bp, Homo sapiens
  source 1..474: mol_type = other DNA
attgcctttaggtaaatgccaaactggtttccaacccgtttctagccctaccaagtcaaggctccattccagcacagtgctgggtacattgtggaatgactaatgagtgaataaatcattaaccaaaatttgcaaaaaaaaaaaaatgtttaatagaaatgacagagtggttctgagaagcagtcccagcctaggaacccggggatccggcctgtggacccacgggcagggcctgcggggtgcaccggcgctttcgggcggaaggcggggcctcccggccagtgaccccgccccgaggcgcctcccgggcggggaagggcggggctcgcgctgggaaactccccttccaaggccgaggcgccgctgcgcgtcctccaggcgtggtggtggggtcgtgggtcccagcccagtggtccaggtcacgggccgcacggccgcggccgccatcttgcccgcgtccgggctcctgcggcg

SEQ ID NO: 10706 - DNA, 239 bp, Homo sapiens
  source 1..239: mol_type = other DNA
ccctagctcggggaaccctagctcggggtctccaacacggagatcaatctctcttcttacaggtggagaagctggtacgcagcacccacagcaccgcggcagcagctagtgccgactcccgcctagctcgcggcgcctcccgcgagacgaggtacctgaggctggccccgcagtcccccgccttccggggtcaagtcaccgccgggaatcctgttccgggacgccgcgcgtcgcggggc

SEQ ID NO: 10707 - DNA, 159 bp, Homo sapiens
  source 1..159: mol_type = other DNA
gggaacttcactttaatactggggtgaaaacactttgtttcctccaaaaagttccttgtgcaaaacaggcttgtcgcatgccggcgttgatgcgcgacctgggcaagtccatcatgtccaccatgattatggtcgccccgcgacgcgcggcgtcccgga

SEQ ID NO: 10708 - DNA, 566 bp, Homo sapiens
  source 1..566: mol_type = other DNA
tatcactagttttacttggatgaagtactgcatgaaatttttgtatttttattgagtttcatcaatttttttactgaacctagtatgctttctcgtctgaacacacaagagtcttctcttttaacctcttgaaaattaatgaaagttatctgatgaagatccttacattaattgctaaggtttaaaaccttggttttatgtttttgatagtcatccaaaatctttgtacgctttcagtttcattacagaataaaaaacaaatttaccacaatggattattacattacatctggtatttattcctcccagaaaacatagaacttgataatcatttctcctgatcaccagaagttcttttgattaataaggctactggtcacgaaaactcagcttactaaaagagatccagtcttctggttctaactaaaacatcccaccggatgcaggtgtacttgcaacctgtgtctcaagtcatacagacggcccaggagggtggagcccctgcaacctgcctagcggggcgtttgcgtgtctgggggtgtcgggacacgcgcaggacacacaca

SEQ ID NO: 10709 - DNA, 531 bp, Homo sapiens
  source 1..531: mol_type = other DNA
cttctcttttaacctcttgaaaattaatgaaagttatctgatgaagatccttacattaattgctaaggtttaaaaccttggttttatgtttttgatagtcatccaaaatctttgtacgctttcagtttcattacagaataaaaaacaaatttaccacaatggattattacattacatctggtatttattcctcccagaaaacatagaacttgataatcatttctcctgatcaccagaagttcttttgattaataaggctactggtcacgaaaactcagcttactaaaagagatccagtcttctggttctaactaaaacatcccaccggatgcaggtgtacttgcaacctgtgtctcaagtcatacagacggcccaggagggtggagcccctgcaacctgcctagcggggcgtttgcgtgtctgggggtgtcgggacacgcgcaggacacacacataggaggcaccattgtcattggacacttgctcgctgcggcagctgccgggtcctgggcgctgggaggcggtgccggg

SEQ ID NO: 10710 - DNA, 640 bp, Homo sapiens
  source 1..640: mol_type = other DNA
gaaaactcagcttactaaaagagatccagtcttctggttctaactaaaacatcccaccggatgcaggtgtacttgcaacctgtgtctcaagtcatacagacggcccaggagggtggagcccctgcaacctgcctagcggggcgtttgcgtgtctgggggtgtcgggacacgcgcaggacacacacataggaggcaccattgtcattggacacttgctcgctgcggcagctgccgggtcctgggcgctgggaggcggtgccgggtagaagcggcggcggcggcggcggcgtttgcggtggcgcggactccgaggagcgccagcacctcgaggccctctggtccccagaagcaggggtcccggccctccttgcagctgccgggttctcccgtgcgtgcagccctgcgagggctgaggagaaggctgcgagcggccctcggggctgcgtgatccgggccgttgccctgtcagcacgatgcctggagcggtggcggcggcggctccgggctccttgcggccccggccgtgaccgccacaccgagcccagccgggcggttgcggccgagccttcccctcccccctcgccgaggcggcgggggtgtgcgttggggagggggagccccgagactcctcccccacagc

SEQ ID NO: 10711 - DNA, 621 bp, Homo sapiens
  source 1..621: mol_type = other DNA
ttttaaattgtttcagcgacgactgaatgaacttatttataaatgtataacataactagggatgaagtcatactacattgaggtttcatttccacatagataatattaggaagcagctatgcgaaacaaacagaaatatatggaaatgaaaaacatatacctatacatacacagctgtttttaaaacatgacctttattctcgaagctcaaacttgatttccaggtacagcaggcttttcttggcagtgaagtcatgaagtctcccagcacagagggaaccctggggtgtacgctgtggctcccacctgtccgccaggtcattgtgcactctggggggagtagagagagagaaactcactccccgagtcccgcaaggtgaggtcaacgccacccaccttcccccggtcaccctgggaggggtcgctccggcgggcgtctgctggggcagcggcggcgcccaggcggcggtaggtagccgggcggcgagggcgcccgcaccccccggccgctgcgctgcgctgcggtgcgcacgggctccgccggttgctattccggctggtggcggccgccgcaggaagggccggttcctgcgctccccccgccccccctcgccttcggct

SEQ ID NO: 10712 - DNA, 545 bp, Homo sapiens
  source 1..545: mol_type = other DNA
aagaataactttaaaggttatgtaaatttctggaggtatcttattatctttctattaaaatgtcaacatattctatggcaagacaccatgctatcttgagattaagctaagttgctgtaaggattaaatataaagcatacagcatgtgccggacatagagctagcactccatccatgatttctgattcgtcagcatcattactcaataactatcattttttaaattgtttcagcgacgactgaatgaacttatttataaatgtataacataactagggatgaagtcatactacattgaggtttcatttccacatagataatattaggaagcagctatgcgaaacaaacagaaatatatggaaatgaaaaacatatacctatacatacacagctgtttttaaaacatgacctttattctcgaagctcaaacttgatttccaggtacagcaggcttttcttggcagtgaagtcatgaagtctcccagcacagagggaaccctggggtgtacgctgtggctcccacctgtccgccaggtcattgtgca

SEQ ID NO: 10713 - DNA, 464 bp, Homo sapiens
  source 1..464: mol_type = other DNA
aattcgattttgatgtcactacaggttcctgagataaatagattgatatggatatgtgcatcaccccaggagaggctctggttgtgccctgaatttgggcaagaccagcaccagaagaagctggtcctggctgtctcccgagactggtgatcggagcacagaggccgagtctgggagacgcgagggaggtggtgacggctcgaagcatcccccgtcctcctcctcccccttcacgctcagcccagccggcggcgaggagtccagaggccaaggtcgcccagtcctctcggctgtctcgagctgaatggctggcagtctgcggctcccccgcctccggcccggcagccacaggtcggaggcgcccggcgtcggcgctcgaggccggcaggggcgccctgcaccctcccgcgcccttcggctttgcgatcttccctacgccccccgggaagggggcgctgcggcca

SEQ ID NO: 10714 - DNA, 463 bp, Homo sapiens
  source 1..463: mol_type = other DNA
ttgtgccctgaatttgggcaagaccagcaccagaagaagctggtcctggctgtctcccgagactggtgatcggagcacagaggccgagtctgggagacgcgagggaggtggtgacggctcgaagcatcccccgtcctcctcctcccccttcacgctcagcccagccggcggcgaggagtccagaggccaaggtcgcccagtcctctcggctgtctcgagctgaatggctggcagtctgcggctcccccgcctccggcccggcagccacaggtcggaggcgcccggcgtcggcgctcgaggccggcaggggcgccctgcaccctcccgcgcccttcggctttgcgatcttccctacgccccccgggaagggggcgctgcggccaccgaagacaccgcgggagccacttgtccctgtgggcccagcacagggtactaattagtctttgaggaatcattcacccac

SEQ ID NO: 10715 - DNA, 371 bp, Homo sapiens
  source 1..371: mol_type = other DNA
tcaagtccagaggactcaggcagctgtgggaagccgagagtcctggactgttcgtccgggtgccagcgctggcagtcccagtccgtccggtgcagcagcccccaagccttggctcccgcgaaccaatcctgagcgcgacccgggcactgggacggcgactccgccaaagctggacgaggcagccggacccgtctgcgctcgagcagacggagcgcctgggagggcacgtccggggcgctggagacgccaggcccgagtagcttctccatggagcctgcccagagcggtcccttctcgcaggattcgcccctccgctgttcccggagggtacacctgggacctggcaggtgaccctcctgccagggctggcg

SEQ ID NO: 10716 - DNA, 347 bp, Homo sapiens
  source 1..347: mol_type = other DNA
ttttagatgattcagcataattgctccaaataaatctaaaaggctattgtcaaacagtggaatatttggatttataatttcatagataagactatcagtccatttcctggagtttttaaaataaccaagttcctaggattttagaaaaatgtttactaagtaggttatacattttggaatagaagtttctatagcacaatagttccaagtcagggcagatgggaaatttgcatagaagtatcactttcaaactgattgcaggggaaatcttcctttgcatagaggtataccggctgctttctgcaaccaatcagactgattgcgttctagagggtatttggactcaa

SEQ ID NO: 10717 - DNA, 505 bp, Homo sapiens
  source 1..505: mol_type = other DNA
gtcccaattattaatacttgcttgatcatttgattaatgctttaagccagagtgtacattttctttaagtcatttactagtttttaacttctcaggaagcagctgcagtcttctcaaaccgcagccgctgaccttagcggcaagaggcccgacctgccctccaggcgcccggcgctcggctcccagaggcgccgcgcagctccctcagcggcagtcacagctggccagcgcgcacccggcacgcgcgcccccagggcctctgcgcgcggacccggctctcaggcgccgcgggagaggccccctactcacggagcgcgcggcccgtgcgcccacgctccgaccgcacaatcgaagagtcctcgtttcgaccaaaacatggcacggcaatgaaggcatttcactatgaagtggaatgatgatggtccgaccaggtcaggacgaacgccctcctgccgcaagctgccctcccagccaagggtccttcaggtaggaggtcctgggtgac

SEQ ID NO: 10718 - DNA, 299 bp, Homo sapiens
  source 1..299: mol_type = other DNA
tcagggcagatgggaaatttgcatagaagtatcactttcaaactgattgcaggggaaatcttcctttgcatagaggtataccggctgctttctgcaaccaatcagactgattgcgttctagagggtatttggactcaagattctgtatccggtgtccaattctttgttaaaaacgccaatatcatttaaatattggttttgtggaacgtttactcagtaaatcccggctccgctcgcctccgcgcggcgctcgggaagggtgcgcgggggcgagtcctgcgcatgcgccctcaagggct

SEQ ID NO: 10719 - DNA, 324 bp, Homo sapiens
  source 1..324: mol_type = other DNA
attctaacaggatcgttagaagagagaaatatatgactctcaaatgcctaccattcattaaacgttgagactagagtgcccttaatattattaccggcttgttcttctaaggaaatgacctagacgttgggggagggcagccccaacccacagcgaagagcctctaaattaaaagtgcacatttataccctttgcaaaaggaaatggtctgatatagaaggacgcatgcgtcacgcgcacgccaggggtgtccctccgggagcgctctgcgcaggcgcggacgcaggttacagcagcgcttggcctctgctgatgctacggcgg

SEQ ID NO: 10720 - DNA, 358 bp, Homo sapiens
  source 1..358: mol_type = other DNA
tttcaaaggaccctgttcctctgcagaggcaacctacttgacgccaggagttcaaggctccagcgagctgtgactgtgccactgcactccagcctgggtgacagagtgagagacattagagccctctgatcttctaataactcccaggtcaacaaatggtttggctagttccacttctgaaaacctgtcacagaggcagaagaaaaggcatctactgttgcaacgttagtgtctacaaacttccccttccaacggaaccttgtagtttctaggattaccaagttttcatacagcctctgtctacatccctgtagcttgactcctggctgtgcgactgcacggtgcggagccactgccg

SEQ ID NO: 10721 - DNA, 561 bp, Homo sapiens
  source 1..561: mol_type = other DNA
gctgactggtccattttagggtgctgattggtgagatacagagtgtattcactctgaatacagccgattggaaccccctgcccagctggcttcacccagtggatcccacactggggctgcaggtggagctgcctgccagtcccgtgccgtgcggccgcactcctcagccattgggcggtcgatgggaccgggcgccgcggagcagggggcggcgctgaggcttgggccgcgcaggagcccatggcgtcggggaggctcaggcatggcaggctgcaggtcccgagccctgccccgcggggaggaagctgaggcccggcgagaaatcgagcgcagcgccggtgggccggcactgctgggggacctggcgcaccctccgcagctgctggcccgggtgctaagcccctcactgccgggggcggcggggcggtcccgccgctccaagtgcagggcccgccgagcccccgcccacccggaactcgcgctggcacgcaagcgccgcgcgcagccccggttcccgccagcgcctccgcaagctgagggagccggctctggcctcggcca

SEQ ID NO: 10722 - DNA, 436 bp, Homo sapiens
  source 1..436: mol_type = other DNA
aagctaggtaagagaacatctcagagcaggtgttaagagagctcaaccacagctcctgaactctgagatttacagagctctgtcacctggggtaatacttttcaaacgaattgatcattaggatgcttgttactcaaaaagcccattttttaaagaaggatgtattaaaattattccagcatgctaatgtgcctaacggcaggtgttgctattagcagaggaagccttgttctaagaattattctagagggccagaaagaacaggagtaaacgctgactcaactctgcagggctggttcttcgtctattgctagagaaaatgtctttccttggaggatggcctggggcaaggcgtgggttggaagccagcgctgcgctccccgtgggaagcgatcgttttcagggcgccgcctccccggatggcaaacactataaa

SEQ ID NO: 10723 - DNA, 535 bp, Homo sapiens
  source 1..535: mol_type = other DNA
gaaagttaagaattaaactctcccgctgcttggaaaatgcagctttctgcaggtagagattaaaaaaaaaaaaaaggctagatggctttttgtgttgtattttccatacaaatggtgtagttgaatggtatattggaaattatatctattgcaattaaaattgtgtgagcaatttgaaagaaaagaaaaaaagaaacatccctttcatctttcagagtgtattccccgggatgctgctaggtccactcacctcgatatatacgtaacgcgtgtctgctgccccgcggacgccctagacgacgtgagggaaggcggtgccgggcggggcctgtgccaggctggcgggccgccgcagacagagctacccccgttcaggggtgaggccggaagtcccatccgacctcgcgggcagccagcgctaggccgattcgaactcgaccttgttttggcgttgctaggagacgcggctcctgcgcgccccctacaggccggcgcccgggcggcgcgcgggcagggggcggggactgtcggctgc

SEQ ID NO: 10724 - DNA, 704 bp, Homo sapiens
  source 1..704: mol_type = other DNA
ggtgccgggcggggcctgtgccaggctggcgggccgccgcagacagagctacccccgttcaggggtgaggccggaagtcccatccgacctcgcgggcagccagcgctaggccgattcgaactcgaccttgttttggcgttgctaggagacgcggctcctgcgcgccccctacaggccggcgcccgggcggcgcgcgggcagggggcggggactgtcggctgccgggcgagcaccgttagggcagcctggcgcgcggcgcccgccaggcgcccagtcctctgccatcgcccacgcctccctggtgccagggaacaggtatcagcgcgcctccccagcggctgggagagacgagccgcggcggggtgggcggccggggcggccacgccctgccgagggaggatgggcttatcccggcgggcgcgccaggtgggatctctagcgcctcaggggcccgcgcggcaacagccggcaccctcgggcccgcggacaaagggttaacgcgttggcagtgactgcgggccccggatgtgagagccttggcttgacgccctggctgcgctgcaggtgcgccgggccgaacggagccggcagcctggcggcgacctgaccgcccgaggctccccttcacctgcagcggctgctcggctccctctgggtgccggagagagagctcagctccgccgcgctgggagcggcagttcccg

SEQ ID NO: 10725 - DNA, 372 bp, Homo sapiens
  source 1..372: mol_type = other DNA
aaaggaggcagcagtggactacactgtgagttcagcaaacttatcattgcagcaatttcggagctgacttttcgacagtgcaagatctagaaatgtgtggaaagttaagaattaaactctcccgctgcttggaaaatgcagctttctgcaggtagagattaaaaaaaaaaaaaaggctagatggctttttgtgttgtattttccatacaaatggtgtagttgaatggtatattggaaattatatctattgcaattaaaattgtgtgagcaatttgaaagaaaagaaaaaaagaaacatccctttcatctttcagagtgtattccccgggatgctgctaggtccactcacctcgatatatacgtaacgcgtgt

SEQ ID NO: 10726 - DNA, 516 bp, Homo sapiens
  source 1..516: mol_type = other DNA
tgggatctctagcgcctcaggggcccgcgcggcaacagccggcaccctcgggcccgcggacaaagggttaacgcgttggcagtgactgcgggccccggatgtgagagccttggcttgacgccctggctgcgctgcaggtgcgccgggccgaacggagccggcagcctggcggcgacctgaccgcccgaggctccccttcacctgcagcggctgctcggctccctctgggtgccggagagagagctcagctccgccgcgctgggagcggcagttcccgctgccagagctgcttggagagctaagctggaagggtgcttatccctgcgtggacccagactccagatcgggaggtgagtagattccgaagataggactatcttagaccagatactggtgactgggttctcatattactgcaatttaagtaaaccagataatttcaatcactgttattccatctattttagcaaagtagagcaaacctgttttaatgtattatttcgggagaataactta

SEQ ID NO: 10727 - DNA, 200 bp, Homo sapiens
  source 1..200: mol_type = other DNA
gggctctggctgtttctaggatatgccacagtggactggaagtaccttttcccagtgcacaattctcacggatcaagttgaggatgactgtttaaaaaatgtttcgataaaccataatggtgatgttttcagtatccccagcgcctaccggccgagcaccccctagggcagaggggcctgaggcagcgatccatcagttt

SEQ ID NO: 10728 - DNA, 763 bp, Homo sapiens
  source 1..763: mol_type = other DNA
atttaattatcaaagtttagttggcaattttaattagatatactgaattctgaaacttcctcaaatctaacttgatgagaaaagaattatctttctgacttttataaacctattaatgtagaaattttcctctaaaaacttgtatttgaagtggtttcttttagtttcgaggtattgaagttgaaaacataatactttgacagttgtaccatgtaccattatatattttatgtaagattcagaagatataaataaaatgcttttcagtctttctaatcttccccctactactattttagcaagagttaaatatatttaaggaagatttcagtgaacagacacatattcatgagcttatttattaagctgtttgttaaaaagaagaaaagatgattgactttattctttagttgactaaaataatttcttaaagagttgcttaataggcatgaaaagtaggcagtattattgagatatttaagttatgctttttatttttatgttgactgcgtctcttgaaattaaatttatatttaataccaatttcatgacaaatatttccatttaatgaagattaaagatttgcaaatcttatgtttatgtctttgacttgttttttagaactctttcaagatctaagtcaaaatgcagaaggtaaggcaaaatttgctttaaaaagaagtcctgaacttgctgtcttaatattcagcccaattaattgagctctaaaagagccactcatgtgtcatgcatacattagagc

SEQ ID NO: 10729 - DNA, 215 bp, Homo sapiens
  source 1..215: mol_type = other DNA
aacgtcttttggtcactagttctggtcacaaatgaatttcaatccttaaagtgacgctttactgttctgagtcccatgagggctctggctgtttctaggatatgccacagtggactggaagtaccttttcccagtgcacaattctcacggatcaagttgaggatgactgtttaaaaaatgtttcgataaaccataatggtgatgttttcagtatc

SEQ ID NO: 10730 - DNA, 582 bp, Homo sapiens
  source 1..582: mol_type = other DNA
ttatttatagattacccagtcaggtatttctttatagcaatgcaataatggcctagcacaatggttcattattaattattatttcaaaaatcttaaaacatttgtctgaaaagctcaattattttgtattatagtttagtgttagaatagtttatagaaaaacatttaaatattaaaaaaattataacactttttttttaatttttgatatgatggtgacctaaaaatttaacagtcctttgtcatgaaagatgatgactgaaagcattttgtcaatgttctgtaggacagaatccagaattctggactatcactcctggagtcaaggatttaacaaaataattaaattgagctcataacttgaggagattttaatcttccttagcaaccagttaattatgatctctgtttttgtccgcattactctacttaagaaaccaatttacctgtagtagattaaatagtatacttgatggcattttgaaatgtaaaatacactagaaatcggtgctgttatttttctcagataaatcgccgcactgattaccatgaagtacattgatgtcactatcactatgacaa

SEQ ID NO: 10731 - DNA, 452 bp, Homo sapiens
  source 1..452: mol_type = other DNA
atattccaaaaaaaacttaaatgaggaagtatatataaagatattttttgaaaagtaagcccaagtttcccattattataaacacaaagaataatgttaaaatgtgtagttgttaggaagttcttttacttgtatgtaacatataacaactgatacattgttttcaagcaacaaaacacaacagatggcttttataaaaatatttatttttcctttcatattgctggcagccggcaaagaggccagcctctttcaatgggtcatcaaagaaaactattttaactgtttatggattttcatttatttatttattctttgactatatttttaaaaatcagttactgttatggtattactatgaactaataaatatttcaaactcccaatatttgttcagttgcctcagaagaaaaatttaaatgtgaaattcctggtcctaatgggctcatcag

SEQ ID NO: 10732 - DNA, 496 bp, Homo sapiens
  source 1..496: mol_type = other DNA
attgcacaattttgtacagtatagtgatttttaggaatggatatatcacattatagcaaaactgaccatacatgtaccaaaatgttaatagcgtttatctatagtttctatatttttctaaaacaatcgtgcattgatactttaattagatctatgtaaacatctttaaatgatgaaatggcagctgtaatgtaataaattaagtgccttctaatctacttaaaaggtacaatcacttaagctctttctgtaaaacagacttctttaatcagaaagttcccataagactagccaattttccattaaataatgtagattatgtaataagccataaggagccagatattcagtgcttactgactttcaagctattattaagtagctcgcctatacacagtctctgtaggaaataaagaaactacaagcttgaacacattgtaaatttctaaatgaggagaaaaaaaggtttttctatgcagtcaaactgcactgtatg

SEQ ID NO: 10733 - DNA, 298 bp, Homo sapiens
  source 1..298: mol_type = other DNA
tagaaaacaattcgatctttcacacggaaagattaatcaatggtggcgcatttggggccccgggcagaataggtgactacagatattctcctgatgcgacaggtcgcagatgggacatgaaaattgtaaccagagtgaattttgggagctatcgaaatgtaagaattctgaatgcattagatctgggctagctcctatgagaaatattcttgacccaggaaaagttcttcttggtggacaagtgcctccacctggcatcgcacgtgaggatgccagggagcaggcatctgcaaccctt

SEQ ID NO: 10734 - DNA, 350 bp, Homo sapiens
  source 1..350: mol_type = other DNA
gaatgcattagatctgggctagctcctatgagaaatattcttgacccaggaaaagttcttcttggtggacaagtgcctccacctggcatcgcacgtgaggatgccagggagcaggcatctgcaacccttctaggcgcgctgcggcgcccggggcacgggaagatgcaaagtttgaaaaacttaaaggataggcgtgacactgacaagtgggggtggtgtgcgccgcgcccaggcctccagagtctggagggcagagctgctgccctcccgggcgggacttgcttgtagtcctggcagccggcagtgctgggcgggcgtggacgctctacgtccgtccagcaggagatagg

SEQ ID NO: 10735 - DNA, 548 bp, Homo sapiens
  source 1..548: mol_type = other DNA
aacgtcttttcccctttgtaaaaagggaaatggagcaattagtattgctttgaccctatggttctctttaaaaacattggattattgatgtgccacaataacacacttccgaaattttaaagcagggagggatgggacagaggcctgacctctcctgcatactccacttgcggcgacagctgggcctgcccgggggaagcgcagagcgggcaagtcagccctcccgcaggcgctgggaccgggtgcggaggccgcagccgagccgcgagggcagatcggcagcctcagctgctgccgtagctgtcgggatcgtcccctgcggggcagcaacagcggggctccgacggctgaggggggcgccttctgcttgcgcgctctgtgcccttcgccccgcgaccccggccgagggtgggagcagcgcggggtcgcatcggcccgaggctagcggggctcgccgttccgcccgcagccatggaggccgggccgccgggcagcgccaggccggcggagccgggtccttgcctgagtggtcagcgcggcgcggacca

SEQ ID NO: 10736 - DNA, 502 bp, Homo sapiens
  source 1..502: mol_type = other DNA
tagaattttatgattgttttaaagggatcatcagtggcctataattaattaatggaacacgtgttctgggtgccggtaaagtaattcagaaaaataggtttcttacttaaatatttagtaaatacgagtagaatctgtgttctgaaaaaatctagaaaaaattattttgaatccgctaaaaagtctgtcacaaatggctttatgtaaaacaatgctatggatattaatgcttgtgacacatttttaagacaaaaatgagtattacttactttaatgtagacagaactatgctcattattcttttagatcaaagctgcattatttaagcatttagctctgtgccttttactttaaggaaaaaaaaatattggtttgcttcttgagagaaagcaatgtttatcatgcaagtcctgcaatattaacacatgaattcctcttcaaatgaacagcgatgtattttcgtttaaattaaacccgaatgttaaatttcactatggatata

SEQ ID NO: 10737 - DNA, 589 bp, Homo sapiens
  source 1..589: mol_type = other DNA
ctcactgactcgctagtaatggggcgctgtccttgcgacccctacctagcccagagccccggccccagcctccccgggagccgcatctggcggtgccacgcacgaccaccgcgtggctggcccccgcccgcccgcccgcggtcccagggtctcccgaggcgggcgatgatgaggtggagcgggggcttctccaccgcgaggcaggaagccgccccaggaggcacatgcttcctccccgccagctcctgcccgatggaaaccccggcggggcggcagtcgctactctcgcaacgcgcaaggctgggggctgcggcgattcgtgcagcagcagcggcagcagcagcagcagcagcagtggcggcagacaatgggcgcagccccgcctcccgtaccgcccgcccccgcccagactgcgccactcccgggggaatggtgggggtacggcgacaacctggggcctctgcatgccccagaattttcaatattacatgaggaggaatttaattccccccgcggctcctcctcctcggcagggccaatgacaggcggcaggcggtgaccgccgcagggcctgcggagaccgtccgcc

SEQ ID NO: 10738 - DNA, 475 bp, Homo sapiens
  source 1..475: mol_type = other DNA
cgtttccaaaagcggatttagaggccgagcctctgtaactatctttcccggttccaggctgcaaaccttgcagaaccgcccaggccaggagcgccccccgggctccgccacgccccccggccaggctggccgcggccgcgtcgcagcccagctccctttcttagggagtattaaaaaagaaacgatgcgtctgtatgcttcgcttctctcctccctcccgcgggctggcggacagcgggcgagctcgggcgagccaggcggacggtctccgcaggccctgcggcggtcaccgcctgccgcctgtcattggccctgccgaggaggaggagccgcggggggaattaaattcctcctcatgtaatattgaaaattctggggcatgcagaggccccaggttgtcgccgtacccccaccattcccccgggagtggcgcagtctgggcgggggcgggcggtacgggaggcggggctgcgcc

SEQ ID NO: 10739 - DNA, 521 bp, Homo sapiens
  source 1..521: mol_type = other DNA
ctgcagtgagcagatatcacacccctgcattttagcatatttaaaaaaaaaaaaaaaaaggtctttttttcctaaagtcttaaacttcgagctactttatttgaaaaatattaattaaaaatttctattctttagatgtatttttatctttgtatcaaatttaagtgttttgggacataagaattgcacataagtaaccattagccacactgtttaaatttagttaatggaaataaaataaaattaaacatttatttgtctagtcacttggctactatattagatagtgctgaatcacagacacttctattggatacaatataggacaaaggacctcctgggggtccaatctggtccaatacagccatgaccatttgtctgcatatagaaaccttatatccctcagagagagtaaaatatttttcttttatttctttacaaaaaatgttggagtatatatgctcataaagttgtttgaataacatatgcatagcacatgttagtaatatagcatgttacgt

SEQ ID NO: 10740 - DNA, 496 bp, Homo sapiens
  source 1..496: mol_type = other DNA
ggtagaaactactatgaagtaaataaacctttattgcctctactagctgacatttattcttgcttgacatacttctaaaatctcaatttataggtgaggaattaagatttctatagtagagaagcagtaaactgataatgaattaattggttatttgaagattttcagttatttttgtgaaaaaataagtttattgaaattcacgaccagaacacaaaaataatctctcttgattttctttttaaaattttttaaaaaacttttgttgacacgtagcagatgtatatatttacgtacatgagattacaaacaatccaattacattctttaagttattttaaaatacacaattaagttcttattaacgattgtcactttctatcaaatagtaggtcttattcattctttctacatgcatgtattcataaagtttattagtattttgcaaatctttgtaggataagtctgacctgtccaggtcacaagagaagttttg

SEQ ID NO: 10741 - DNA, 471 bp, Homo sapiens
  source 1..471: mol_type = other DNA
tgcttgacatacttctaaaatctcaatttataggtgaggaattaagatttctatagtagagaagcagtaaactgataatgaattaattggttatttgaagattttcagttatttttgtgaaaaaataagtttattgaaattcacgaccagaacacaaaaataatctctcttgattttctttttaaaattttttaaaaaacttttgttgacacgtagcagatgtatatatttacgtacatgagattacaaacaatccaattacattctttaagttattttaaaatacacaattaagttcttattaacgattgtcactttctatcaaatagtaggtcttattcattctttctacatgcatgtattcataaagtttattagtattttgcaaatctttgtaggataagtctgacctgtccaggtcacaagagaagttttgacaccaaggccgccgctctggcctggggctccctc

SEQ ID NO: 10742 - DNA, 467 bp, Homo sapiens
  source 1..467: mol_type = other DNA
tttttgtgaaaaaataagtttattgaaattcacgaccagaacacaaaaataatctctcttgattttctttttaaaattttttaaaaaacttttgttgacacgtagcagatgtatatatttacgtacatgagattacaaacaatccaattacattctttaagttattttaaaatacacaattaagttcttattaacgattgtcactttctatcaaatagtaggtcttattcattctttctacatgcatgtattcataaagtttattagtattttgcaaatctttgtaggataagtctgacctgtccaggtcacaagagaagttttgacaccaaggccgccgctctggcctggggctccctcccgggaccgctccgcccctcccggatcccggtcggcggagcctgccagcggccaatcagcgcgcggggcgagacgaaggggctgggcggggctcgggctcctgctcc

SEQ ID NO: 10743 - DNA, 395 bp, Homo sapiens
  source 1..395: mol_type = other DNA
tgaaatattatgaccttaactcattttaaaaagtcatttatatagggcttgctcattctgagcttttaaagactcaggattaaaattttctgacagaaaatttaaattccagttttaaaatcttcagggagtaattaaaaacttggttgcagaccttagtttttaggtctggcaggaaagtttgcctttaaataagagattatctgcatacattcaatgacttcctcagttttgaaaaattacgattgtagaaaataatttttatcataatcttttcaaaacctcttaacaatacgtttcacaaatagttaaaaacatgcatactgaaaagcatacttttgcaatgttatttttaaaaacaaggaactctttcccagggaagataatcacttggg

SEQ ID NO: 10744 - DNA, 579 bp, Homo sapiens
  source 1..579: mol_type = other DNA
ggactgtaccggactttgctgttgcagtgcaaaagttgggcttaaggacactgaaattgaatttcatataactttcacatgtcacaaaatatgattcttttgggttttttaaccgtttaaaaatgtcaaaaccgttgtacaaaaaacaggtatgaaatttgatcactgccttacgttattttaacagtaattaaataattactctcaattaattcaacagtatctaactattagataaatttaaacttatctaatgtttttctaattttttgtgcagtaaaggttttatagaaaaattgtaaagaataatcaaattatgaaaatgttcaactttaaaacagaatttttatttccttctctctcaaaaaaaaaaggacccaatctctttagctgttaattatattcctgtaaacagagtaacccttaggaatttctatttgaacaattttttttgtgctgaacttcagccaaacattaaaccaaagatggtatttgaccttattttatgaggacattcaatcttaatttagagaaaaagaatagagcttttggtgtgtgtgtgtgtgtctataaatccac

SEQ ID NO: 10745 - DNA, 297 bp, Homo sapiens
  source 1..297: mol_type = other DNA
tggaagaaaaattgcctgtgaggatgccatttatcagtgactacacattgagaaaacaagaatgacattttcagttctcaactaatttgaatttctcaacagtattcaatattgttaattactcccaatatttttcatacagtcccattggttgtctaccagttgtctaccagttaattgtaattagttaagctcaatatttggcatatcttgatatactttgtacagtctagctacaaaccggcgggggggggcgtccttacgtcctacgtcatcacgtgccgggaattcagccgg

SEQ ID NO: 10746 - DNA, 450 bp, Homo sapiens
  source 1..450: mol_type = other DNA
taacatgacacctccaatagtaagcatcctatcatgccaaatataaagatacctgtgcacatcttttttgtagacaactttaaaacattctagcaggacaaaatatagacttgatgtatgttcttggatagaatgattcaagattataaagacattaattctccatgagttaatttataaatttaacatgaacctattaaatagtcacagtaattaacagtttttacagaaatccatctcttaatatttcaataaatacataaaaatgttggattcatttttataggttaagttttgtgacaaaattatatcgtgaactcatcaaaaattatttttaacaatctgtcagctgacaacttgactaaacccttcagttttgcctagtatttattatttaccttgttttagccaaatactaaaaataccagtggatgccagtatttcaaataa

SEQ ID NO: 10747 - DNA, 693 bp, Homo sapiens
  source 1..693: mol_type = other DNA
atacagtcccattggttgtctaccagttgtctaccagttaattgtaattagttaagctcaatatttggcatatcttgatatactttgtacagtctagctacaaaccggcgggggggggcgtccttacgtcctacgtcatcacgtgccgggaattcagccggtgcgcgcggcggcgggaggcagtggctggggagtcccgtcgacgctctgttccgagagcgtgccccggaccgccagctcagaacagggggagcagccgggactggtggcccgcgcccgagctccgcaggcgggaagcaaggaagtcccgggagcagcgcggcggcacctccctcacccaaggggccgcggcgacggtcacggggcgcggcgccaccgtgagcgacccaggccaacggcccaggctcctcctccgcccgggccgcctcacctgcgggcattgccgcgccgcctccgccggtgtagacggcacctgcgccgccttgctcgcggggcccctcgcccaccctcactgcgccaggcccaggcagctcacctgtactggcgcgggctgcggaagcctgcgtgagccgaggcgttgaggcgcggcgcccacgccactgtcccgagaggacgcaggtggagcgggcgcggcttcgcggaacccggcgccggccgccgcagtggtcccagcctacaccgggttccggggac

SEQ ID NO: 10748 - DNA, 500 bp, Homo sapiens
  source 1..500: mol_type = other DNA
gagattagccattttccaatccatttttttctcgcatatacacatggatttttttcctaaaagaatattcatatctgacgcaagtggtagattaagacaccatttttaaaactgcaagttacactatcaaactgttttttagttgtttaggatagaataaaataatatagaatacacagtgttatctcatgtaataatggtaagtgttttgtgaaacttttccatgtgtttatgtctgtgcacacacctgtgacagatggaaatgtattttttatcataacttgcagttaaaaaaaaaggaaaacaacagtgaaaattttatatgaagaaaattttaggaatatggaacataaacagattttaatatgttgcatttaagggaattttaggaatcattcaattcgtattcaaatctaaataggctttaaaattaatttagccatattttttaatcagtagtctgatgtcatacatcagagtgtatatgaactgctgaattt

SEQ ID NO: 10749 - DNA, 781 bp, Homo sapiens
  source 1..781: mol_type = other DNA
tggatcaatacttccacctcagttgaccaaaaattttatctttagaaccaaacacaaactagacttcacacctattggttgtgatgccaagtaagtgagactttttcacttagtaagtctctcttagcatgtaaaacatacagtgtatgtaatattgtttattattagattggctattatcgtacattcttccagtgtagccttttacagtaaaataatttaatcaggctcacaaatcatctttttaatttttgcaatacttgtctcaaatgatgatgttcttatatagtttgttttacatttttaaatggcacaaatgttatttgatttctagccccagaagttttagtaactttcagaaaattgtgagcaggagtctgatattaaacatttatatcatatcaaacatatcagtgcttttctcctttctaatgtgggaatgcagagaggtaattagaaaaaccttcttccctaaaaatagattataaaaacattccagatttttattaaagatgttctgttacccatacatctgctctattagattcatttttagcatactaatttccatggatttattcaggaaaagaaaatagaagatcagtttacatggatgtgtttaatttcacatctacttatgtgaaattctaaatgtgaactaaaaactagcgtaaaaccaatgaatttatcttggttatttcatttatgttaaatcttaatccattcttattttacctttttttattttaaacagaggaagaattgttttagatatactgaa

SEQ ID NO: 10750 - DNA, 497 bp, Homo sapiens
  source 1..497: mol_type = other DNA
tacgaaaacgaaatacgaagttgccttttatgtttgttgtatgaggcaaccaacccttttcctgccataatggatcccttaccactaaggactaaaaatggcactagtggaaaacatgatgcaacaagatctctatcctgcttcaagtacttcaagtactgcaccttttgaaaacaactttttcaacgaatctatgaatgaatgcagaaattggcaaacaaattgaccagcctcaggatgtgaactcatttgctggaggtcacccatctttcaagatagaatgaaaaacctaggcattgattttgaagacatcagacacatgcagaatgaaaaatttttcagaaatgatttttctggtgaggttggacttaacggatgaaatcctgacgtatgtccaagattctttaagtaaatcaacagcaaagcgagccacagcaacagctgtgtcatgtttgaaaattgtgtcttacaaatctgaaatggattctatgccttat

SEQ ID NO: 10751 - DNA, 426 bp, Homo sapiens
  source 1..426: mol_type = other DNA
tcaagtacttcaagtactgcaccttttgaaaacaactttttcaacgaatctatgaatgaatgcagaaattggcaaacaaattgaccagcctcaggatgtgaactcatttgctggaggtcacccatctttcaagatagaatgaaaaacctaggcattgattttgaagacatcagacacatgcagaatgaaaaatttttcagaaatgatttttctggtgaggttggacttaacggatgaaatcctgacgtatgtccaagattctttaagtaaatcaacagcaaagcgagccacagcaacagctgtgtcatgtttgaaaattgtgtcttacaaatctgaaatggattctatgccttatactaccctatggggagttttgatttagaagattttgtcacttgtttacaacttcctgaaaaccttatgctg

SEQ ID NO: 10752 - DNA, 670 bp, Homo sapiens
  source 1..670: mol_type = other DNA
aagacagagcattttcttttgtaattagaactatgctttcagtagtattcattaattaaaagtatattatgaataagaaatcggttaagaaaatcatacctgtggtgtaatattttaggaatatttagaaacatttagaaaatcagaagctgccttttttggaaaagttttgcattgtgtaagattcctgaatataatcaattcattgatacctatgatagagaatatttaactgtaatttgtgaagacagctgcatcaaaaatttcctgtcaaattaatggaaaaacaggttataaatgcaactaatacataatatgtcctcagtatgtcttcactgtgtgaaagatttaaaatttagcaacagtaaaggaacttgaagtttacaactctcaggggtaagattttaaaaatacatgttaatgttatttaagatctattccaataagttgcatcaccatttttgttttcagtttcagaatggagttttaaatgaaacatatccagctgaattaaataacatatgtaattccaagcccaattttgaccctggtttttggattaaattaaaaataaaaggcattgatgcatgctcacaattattccaaaccaaattttaatttttgcttttagaaaagggagtttaaaaatggtatcaaaattacatatact

SEQ ID NO: 10753 - DNA, 510 bp, Homo sapiens
  source 1..510: mol_type = other DNA
cactttcccagcatgttcaggtaaactactttctagttctatgcacattgagttccagagttcaattccatttaagttgggactatttacaatgacatttgaaatttgctcaccttgatatacaagcatattgtattaagcagaaaacgtaaagcctgttttacgtttttttagaggtgcattacttgtagcataactaaaccttcatgcaggtgctaggatcggggtaaagccgataagccgtcttcggtcgccgcggggccagggagacgcgagagggaagtggaaatagggcgggccaacgctagtgggcggtggatgatgcgccggccccaagggcgcgcacgtccattcccggaaggctcgggcgctggggcccctctgcactcccagcggtcccaagttggcccaggcgcccggtcccggggtcctacaaggcgccaagccgactgcctacctccgcttctccgcgcgccggcgctatggagacggtcacgagacccctgcgcc

SEQ ID NO: 10754 - DNA, 549 bp, Homo sapiens
  source 1..549: mol_type = other DNA
tttttatagaacaagaatgattcttcaagctccacgcatctgtggggacgttccaggtaccgccccacatacctcctctttaaaagaagtcgttcagctggggcgggctggcgctgcgtggcgcgcacctgagcggccggggctccccgagccacggggggcgcgagagggcgaggcagcggcctggcttctccccagcaccccgcgcctcgcgtggccaagcctggtccttcccctgggggggaaaaaaaacgctggtgcagcccagagcccttttccgctccgcctcccgcgcgtccttcccagcgcgtcggccgcgcgcccaggtgttcccgcgtcccctccggcccgcgcctcccggcccgccctgcgggtctccagcgcctgggcccgcgctctcgccgcgggtcccagccccgcccagcctccgcggcgctggggctcccggccgagcctctccctccgcgcgccgccgcccgctcagctcgcagctcgcagccgcccgctgccgccctcccgagccccccccgcgcggcggcggcggcggcg

SEQ ID NO: 10755 - DNA, 521 bp, Homo sapiens
  source 1..521: mol_type = other DNA
acagtcatagttgggtactaaccatatatatgatttatccatcaacaggtgcatatgctcagaaattctgtatccataagaaatcagactactttcttttccttttgcaagtaaattgaatttagcctgagaggctgaggggaaattttcacatatagatatagtactaactacaataggatttgtgaaatggacaattgtcttgcataaatagcaagtaaaaaatcaagcctgtccttcataaaaattttattctggggtgtgcttgttttccaaaagtacctctgtagaaggcagaaaagcttctagtgctacaggcttccagtattattttagaaccaatacagagctctgtacttcaaaaataaaatgaaatgaaatgtatgtgcatttctttctttggaagcgaatcgccagtatggaaacactttaaatgcattaatgcaggctccaatcactcggccatgcttgacctatttttggctcaggattcatatgcaaatggattatcactcgcttta

SEQ ID NO: 10756 - DNA, 434 bp, Homo sapiens
  source 1..434: mol_type = other DNA
ttccagtattattttagaaccaatacagagctctgtacttcaaaaataaaatgaaatgaaatgtatgtgcatttctttctttggaagcgaatcgccagtatggaaacactttaaatgcattaatgcaggctccaatcactcggccatgcttgacctatttttggctcaggattcatatgcaaatggattatcactcgctttaggactgagggtttttgcaacaaaaccctagcaacttaataattttctacgtattctgacaaagcttgtagtttccgggataacctaaactcagggaaaagtgtccaggtctttttaaaagtggatgcccatttgagcagaaactctgctgcttctcctcagggaggagggagaaccagcgagcggtgcactgagcagtgtgttactggaatatgctgcagacaatttacgag

SEQ ID NO: 10757 - DNA, 430 bp, Homo sapiens
  source 1..430: mol_type = other DNA
ctttctttggaagcgaatcgccagtatggaaacactttaaatgcattaatgcaggctccaatcactcggccatgcttgacctatttttggctcaggattcatatgcaaatggattatcactcgctttaggactgagggtttttgcaacaaaaccctagcaacttaataattttctacgtattctgacaaagcttgtagtttccgggataacctaaactcagggaaaagtgtccaggtctttttaaaagtggatgcccatttgagcagaaactctgctgcttctcctcagggaggagggagaaccagcgagcggtgcactgagcagtgtgttactggaatatgctgcagacaatttacgagagtgactccttcttggctcagcaaagaatgatcagctcaggtaagatcctctttcataactgagacgttt

SEQ ID NO: 10758 - DNA, 427 bp, Homo sapiens
  source 1..427: mol_type = other DNA
tcagcccccgcggcgcggccacgtcttcagaaacgcccaggacctccgggctgggccgccgcggtttggcctttggccaagaatcggccccacggacctagagggctcttgggcgagatgagacatcgaagctgttgccattgctgctgtcacagccactccggatggggctgccaccgcggccaggacagtctcctccgaccgcttcctgggctgcgctagggttcgggggcgctgcccgcacgctccggcggggaaggaaatcgccccgcgcccgccggaggaaggcgacgggggaggcgggtggaggggccggccgcccgggccaggtcggaaactttcctataaaacttcctcgcgggctctgcagcaccggcaccgtttccaggaggcctggcccccgcgcgccctccccgcggaggtccct

SEQ ID NO: 10759 - DNA, 410 bp, Homo sapiens
  source 1..410: mol_type = other DNA
ggcattgccagctgttagggccgcagcaaaggcgctgcgctgcccccctctggctcttcagcccccgcggcgcggccacgtcttcagaaacgcccaggacctccgggctgggccgccgcggtttggcctttggccaagaatcggccccacggacctagagggctcttgggcgagatgagacatcgaagctgttgccattgctgctgtcacagccactccggatggggctgccaccgcggccaggacagtctcctccgaccgcttcctgggctgcgctagggttcgggggcgctgcccgcacgctccggcggggaaggaaatcgccccgcgcccgccggaggaaggcgacgggggaggcgggtggaggggccggccgcccgggccaggtcggaaactttcctataaaactt

SEQ ID NO: 10760 - DNA, 218 bp, Homo sapiens
  source 1..218: mol_type = other DNA
tgagtagaatttacccttgtgaaaaatgctattatattcgcagcatgataatattagttgtaacttataagccattttcatgagttagtgtccaaatagaatgatatttccactttgtactgcataaaatatactccataaatattttgattttttattgtacagtccaagcctgtaaaactcccgttctcgaagcgcgaaaacgcggttccccaacg

SEQ ID NO: 10761 - DNA, 372 bp, Homo sapiens
  source 1..372: mol_type = other DNA
gaaaactgaaactggcatttatgttacagaacttatgcaaggtcaccgagcttttatgttctcatcatgggagctttaagaagcctctaatagaggcgcctgcactgcactactgtagaataccttgagatttttcataaaactagagtaatagactgtcaaaaataattgtgcattaagccagacgtgttttttttttaaataatgcctgttctaatgcatacacatctcttgaattttgttgagaatatataatcccagctcagttgggtgccccagaacgtcaccgtggaggtgtggcccccatcaactgccgacacggaaggtgtccttgtaagcaggcttgaatctagctctcctagacaggggatc

SEQ ID NO: 10762 - DNA, 445 bp, Homo sapiens
  source 1..445: mol_type = other DNA
agacccagccaggacttgtctctattcattttctgggctgtgtacaaatagagaaacacatttgttttaaacattctctgttgctgatgttggaaaaaaatgtgaaacaattattgcacatttcatttcactaattttctctttcttgaattttgaacaaaatacacagaaggaatggaagaaaatatcaagaaaactttattcttgcttatattttaaaaggcacattttaaagtgttatcttaaaaatccagagcattttagaagatgaaatgctctatgtctttgagtgacaatcacatcctgttccacagggcagtgaggcataaaccacttttatttcctttcatggaaataagattatatttacagatggttcttagatatactcagcagctttggagccacagtggtagaacttcaagcagtgcagttgcctgcctgc

SEQ ID NO: 10763 - DNA, 253 bp, Homo sapiens
  source 1..253: mol_type = other DNA
ttcagtcccagaattgctgggagaagcaatgccactgaataggttccttgtttctgctttgtttgcacagctgcctctgctcaccgcagcactttcttaaggaagtgatcctgagccatgtgctgaggatgcctccagtccttatgacataattaaagaattcccttccctgagggaggagatcagtggttaagaactatttaaatagtccaaagtgcacagtttaatctttagagcccgcaggaccatggga

SEQ ID NO: 10764 - DNA, 457 bp, Homo sapiens
  source 1..457: mol_type = other DNA
ttctggattagtatatatatcaacacctaaaatttcataacatttatattttatttattactgtaactgccattacttgtattttagaatattatggaatggtgatatgatagacactttaaagtgtattgacactgcacctgcattcagtaggtctgtgagagtcactaatcagatattgaatatgatatttttgtgttcaaattttcaaatttttaggcctttcctttaagacaaccaaaaaacaaaactaataaatattaaagcggagctggatttatttctatttatttagaacatcacctccagtgtgcctttccattcactcagtcaacagaaagaaagagagagaccgcgcctcctactttttttttttttttttttttaactacaaataaggagacggaaactagggggaaactcccgcatatttgctcctgcccctagagggaaaaga

SEQ ID NO: 10765 - DNA, 408 bp, Homo sapiens
  source 1..408: mol_type = other DNA
agagtcactaatcagatattgaatatgatatttttgtgttcaaattttcaaatttttaggcctttcctttaagacaaccaaaaaacaaaactaataaatattaaagcggagctggatttatttctatttatttagaacatcacctccagtgtgcctttccattcactcagtcaacagaaagaaagagagagaccgcgcctcctactttttttttttttttttttttaactacaaataaggagacggaaactagggggaaactcccgcatatttgctcctgcccctagagggaaaagaccgtgttaaactggaaacactgccttgtttccaatgcgggggactgagttccctcccaggacccgaggaggcgcgctgcttccgggcagttgcccgctgcaagcaggcaga

SEQ ID NO: 10766 - DNA, 301 bp, Homo sapiens
  source 1..301: mol_type = other DNA
tgtgcctttccattcactcagtcaacagaaagaaagagagagaccgcgcctcctactttttttttttttttttttttaactacaaataaggagacggaaactagggggaaactcccgcatatttgctcctgcccctagagggaaaagaccgtgttaaactggaaacactgccttgtttccaatgcgggggactgagttccctcccaggacccgaggaggcgcgctgcttccgggcagttgcccgctgcaagcaggcagagaacagcccctgcagactggtccaactctccaaaggctaggg

SEQ ID NO: 10767 - DNA, 311 bp, Homo sapiens
  source 1..311: mol_type = other DNA
gctcctgcccctagagggaaaagaccgtgttaaactggaaacactgccttgtttccaatgcgggggactgagttccctcccaggacccgaggaggcgcgctgcttccgggcagttgcccgctgcaagcaggcagagaacagcccctgcagactggtccaactctccaaaggctagggcagctgcgctcgcagctgccgctggcgctgagcgagtctcccaccacccccgcgagcgttggggtgcaaggattcggggggggaacgaggcgtgccattcctgttgcgcggcgcggtgacttcaagctgttact

SEQ ID NO: 10768 - DNA, 439 bp, Homo sapiens
  source 1..439: mol_type = other DNA
gaacagcccctgcagactggtccaactctccaaaggctagggcagctgcgctcgcagctgccgctggcgctgagcgagtctcccaccacccccgcgagcgttggggtgcaaggattcggggggggaacgaggcgtgccattcctgttgcgcggcgcggtgacttcaagctgttactgctgctcctgcccgggctgcagccgcgcctgcgggcagccgaggcgaggcgctccggtagcgtggggaggtttcctagcaactctctgccctgagtgcacccggctacccgcaggtctggagccccccggggggccagagcaggaccacccctctcccgcgcgcgccagcaactcgggctctggactgcgggacgcctgagccgcgacgcagcccccgccccgcgaagccgggctccggcacctcgcggaacctcccctcctg

SEQ ID NO: 10769 - DNA, 636 bp, Homo sapiens
  source 1..636: mol_type = other DNA
gaatcataattgaattccccactgggaaatacactgagttttagtgaaaaaggccattcttttcctttcatctgggctgagatcagacgggaaatggtctgtagagtttacactcaatgtagtaatttaaaaaacagactacatatagctctgtccagtatcacagtttggagacttttaaattcttatgggttatgtgttaaataataatttattcagttatcctcttaagttacaataaacagatcagttcaggattaagaaacatttgtcttgaggaaccaaaatgaattaaattcatcttttgaatttgaggcattcataattaagacttttagctattcatttatttcatataaagtgaaatgtgagcatgaacgatttttcactcatccttgtggcttactaagcctaagcatcctcatctatatgataggagtaagagctccttttgcagagatgagtctgtcttaaaatggacagctgtaaacagtacaatgtctctgagccaataaaatctactgaatttttctttttacaccgatttttctggtcacacatcccagcatgtgataaccacaagactatgagataatcaaaagttgttccttattaggaaaaggccaaggatacttg

SEQ ID NO: 10770 - DNA, 490 bp, Homo sapiens
  source 1..490: mol_type = other DNA
gcggtgacttcaagctgttactgctgctcctgcccgggctgcagccgcgcctgcgggcagccgaggcgaggcgctccggtagcgtggggaggtttcctagcaactctctgccctgagtgcacccggctacccgcaggtctggagccccccggggggccagagcaggaccacccctctcccgcgcgcgccagcaactcgggctctggactgcgggacgcctgagccgcgacgcagcccccgccccgcgaagccgggctccggcacctcgcggaacctcccctcctgcgctcgcagccgcaggccccactccccgccagggagggagcggcgatgcctcgctctgtggggtgtcggcgggtgcttctagggcgctcccagagccgcctccccagccagtttgcccgctgctccgcagacggggctgcaaagctgcaaaccggctggagagaaacaaaagctcttttctttgtcccggagcaggctgcggagc

SEQ ID NO: 10771 - DNA, 291 bp, Homo sapiens
  source 1..291: mol_type = other DNA
catgggcgcgcaggcgcgcatccacgtcctatttcgttggagagaaagatcttcttcaaaaatgtagtgacgctgtttaccaagtgtttgtgaatatttattcactcatggtgcgcgcacacaactgtcactgttacggtgtcaacgcgagcgcgcgctttgcgctttgtaacacctcccccttccaccacggcggcaggcggcggcgccgatgacctcacggcgcgcgcgccgcgcggcccggcgaggccgcagattggctggccgcgcctccgcggcacttcaaagccg

SEQ ID NO: 10772 - DNA, 235 bp, Homo sapiens
  source 1..235: mol_type = other DNA
tagagtgagacgtgcacttctaaagcagaatcatgggcgcgcaggcgcgcatccacgtcctatttcgttggagagaaagatcttcttcaaaaatgtagtgacgctgtttaccaagtgtttgtgaatatttattcactcatggtgcgcgcacacaactgtcactgttacggtgtcaacgcgagcgcgcgctttgcgctttgtaacacctcccccttccaccacggcggcaggcggc

SEQ ID NO: 10773 - DNA, 534 bp, Homo sapiens
  source 1..534: mol_type = other DNA
atcgccgagcgctccgggtgtgagctcgccccgcggggagcggcttggagccgaggtttgggcagccccgcgcggcggataggcccaccgccccctcgggcagctttccgctcggcagccaggcctcggtcgggggcgggagagaggcggtgcctcgaccctgggctcagccaatgggggcgcccgggtccggatgcgcctcaggaaagccatgctccctgcgcgggggcagcgggcagttcacccagcgcgccgacctgttggtggtccgcgcgcgcccacgtccgccgctctatggagggcctaccggcagcgctcctgagctagaagggggtggagaggaggcggccccagcgccccggcccccggcaggtcggcggccaatccgctgggggaagccgaggggggtggggagtcggccaggctcgcaccgccctggccccgcccccgacccgcgccgccgcccgcgccgcgcgccgccgctgtcaatcaagggcgagtcagccgggctcgggcggagagaggagctgctac

SEQ ID NO: 10774 - DNA, 545 bp, Homo sapiens
  source 1..545: mol_type = other DNA
tttacatttatttgcatcatcattacatttgtcattgatagtggtatcaaattaatattaattataaatctaatttataaaatttacatcgttattacacttatttgcatcattattgtatttatttagaataatgcaattagctgtaaactccaacagagcaggggcctgtttttgttcctaggactagcgttaaattagtcagcattcctgaccttgtccacgaaacctgggttgcgttttgggagacagaacaggggttgcagcagaagctcgcgccccagggcatgacctggtatccagcgcgcgtgccagctggaggctgcgccgggacagcggctccactccctccctctgctgcaggggggagcccggcgccctaacactggtagcctcgcgccgcctgcgaagacaaggtcagtggccgcgaagccacgaggcccagtgaggcggcaccgagggggcagcgcaacgcgctccccctgtccagggcgtcaagtgcgcccctcccggggcccgcctgtgctccgggcggagcgcgctag

SEQ ID NO: 10775 - DNA, 560 bp, Homo sapiens
  source 1..560: mol_type = other DNA
aatttcagcctagatgagattctaactagagatccatttttgcttatattctggcaaaactagtacattataaatttgatctcaagtctgaaaaaaaaattgaattgaatgatggagtggttttttttttcttgccgccttttaaagtaagggtgtaaagtaaatgaatatatgtattgattgcaactactgaatactcattgtcttaatgtttcaataatgtatattttgtatgattcaactttaatagagtgtttaataaacatctaccaggtaaaagagaatatagtatacatgcaattagtatgttgtgctttttgaaactttgaactttgtagtccctaaattgtttaggtagttttaaaaataaactctgaattccaccatgttttaagttttcatagcacttgagcctggatactttaatatttcctaatttattctcaatctttgaagagatctagaaaatagtgctgtggcccagcccccacagctgggagtgcggagagccattggaggtgagagtttccctgcagccacagaggcacgcgcttagctga

SEQ ID NO: 10776 - DNA, 391 bp, Homo sapiens
  source 1..391: mol_type = other DNA
tgtcattttttaaaaatgtgaataagcttattcaacttttgtaagtcttagacaatcactctcaatgatccagaattcctgcctcctggaagggtgtaagctttcagggaaggtcaggttctgacatgtcaggtcaccagaagcacacttggttgaagtccaagtcaaccttcgaagattctgggaattctgcacctgtggatgagccggtgcccaaggtgccctcttcctcccgggtcccgagtgggagatccgagggggacaggtcccaggcagctttcgcaggcgaaagggcggggcggggcggggcccgcgcacctgggcgggggaggcgcgcggggctgagcctcgcgggggccgcggcgcgcgccaatgggcagcggctggcagc

SEQ ID NO: 10777 - DNA, 344 bp, Homo sapiens
  source 1..344: mol_type = other DNA
aaggtacacaatttgaacaattcctctcagaaattcagaggtcaggagttcaggaccagcctggccaagaagtggcaggcgcctgtaatcccagctactcgggaggctgaggcaggagaatcgcttgaacccggggccggaggtttcagactgagactcttccatatctcatgggaacttgttagaaatgagaatctcagacctcatcccagagtgggtggacagcccaacaatcggtgttttaatatgcccccgggtaatcccgaaccctgcggacgcggggcgccagcaggtggcgctggacgcgcaactgcaaggaggcggggcctgcagcaggcttggag

SEQ ID NO: 10778 - DNA, 331 bp, Homo sapiens
  source 1..331: mol_type = other DNA
aaggtacacaatttgaacaattcctctcagaaattcagaggtcaggagttcaggaccagcctggccaagaagtggcaggcgcctgtaatcccagctactcgggaggctgaggcaggagaatcgcttgaacccggggccggaggtttcagactgagactcttccatatctcatgggaacttgttagaaatgagaatctcagacctcatcccagagtgggtggacagcccaacaatcggtgttttaatatgcccccgggtaatcccgaaccctgcggacgcggggcgccagcaggtggcgctggacgcgcaactgcaaggaggcggggcctgc

SEQ ID NO: 10779 - DNA, 329 bp, Homo sapiens
  source 1..329: mol_type = other DNA
aaggtacacaatttgaacaattcctctcagaaattcagaggtcaggagttcaggaccagcctggccaagaagtggcaggcgcctgtaatcccagctactcgggaggctgaggcaggagaatcgcttgaacccggggccggaggtttcagactgagactcttccatatctcatgggaacttgttagaaatgagaatctcagacctcatcccagagtgggtggacagcccaacaatcggtgttttaatatgcccccgggtaatcccgaaccctgcggacgcggggcgccagcaggtggcgctggacgcgcaactgcaaggaggcggggcct

SEQ ID NO: 10780 - DNA, 357 bp, Homo sapiens
  source 1..357: mol_type = other DNA
actacagaaaatgcttatattaaaacatgaacagttcatggaaaatgtggttgcgcgtttatgagaatgttgtataccaaatccccagaattttgctgtctttttctaaaaccttggaatattaacagttaactttactttaggaaggtacacaatttgaacaattcctctcagaaattcagaggtcaggagttcaggaccagcctggccaagaagtggcaggcgcctgtaatcccagctactcgggaggctgaggcaggagaatcgcttgaacccggggccggaggtttcagactgagactcttccatatctcatgggaacttgttagaaatgagaatctcagacctcatcccaga

SEQ ID NO: 10781 - DNA, 230 bp, Homo sapiens
  source 1..230: mol_type = other DNA
ctttactattgccattttacaagtgaaaacagtgaagcttggagaagttaaggaacttcccccagatcacgtctgaacttacacctggaattttctttctttaccacaaactgagttatatatagaacttgtgcaagggaagttcttatgcaaaatgactaaacacaacttataaatattgtttattcataacaaaaagttgttgtgaaagacagtctgtccttctgtca

SEQ ID NO: 10782 - DNA, 214 bp, Homo sapiens
  source 1..214: mol_type = other DNA
aagaagatcctcaatatattgaaccttgcggcaacacagcccagctgctgggactgatgggtgtcagcgtcagaaaaagcatttttaagatcctgaactaatctgtaagacttgtccggttttgataacaggctttaatccttttaaaagataatttgcttaaaatatcatcaatacccacactccgtattgattaagaaggggacggacttac

SEQ ID NO: 10783 - DNA, 425 bp, Homo sapiens
  source 1..425: mol_type = other DNA
gacgcggaagcagattcagagcctagagccgtgccttcttttgatttcaaatcaagacttaaagaggtgagtagtattctccccctttctgccctgaacaagtgggcttcagtaatttcagggctccaggagacctggggcccatgcaggtgccccagtgaaacagtcctcactgggaggattcccaaggggtcacttgggagagggcagcagccaacctcctctactccacctggagacgccttgaagtatcccatcagaacatctttggtttttacaaatacaaattaactggaacgctaaattctagcctgttaatctggtcactgaaaaaaaattttttttttttcaaaaaacatagctttagcttattttttttctctttatgacttcagctttactctttgtcaagacatgccaaagtg

SEQ ID NO: 10784 - DNA, 403 bp, Homo sapiens
  source 1..403: mol_type = other DNA
aaagaggtgagtagtattctccccctttctgccctgaacaagtgggcttcagtaatttcagggctccaggagacctggggcccatgcaggtgccccagtgaaacagtcctcactgggaggattcccaaggggtcacttgggagagggcagcagccaacctcctctactccacctggagacgccttgaagtatcccatcagaacatctttggtttttacaaatacaaattaactggaacgctaaattctagcctgttaatctggtcactgaaaaaaaattttttttttttcaaaaaacatagctttagcttattttttttctctttatgacttcagctttactctttgtcaagacatgccaaagtgtgagtctcaatattagagtctcaacccccaataaaagg

SEQ ID NO: 10785 - DNA, 306 bp, Homo sapiens
  source 1..306: mol_type = other DNA
tactcttgttacatgtctgggaaagaataccagattttcagttccaagctcacctgtgactttaggtctccaaaaaccttccttgcaaatttgttttgaagattagacacaatatttatttaaagtgcctggcacacagtagatacttaataacagcaattttgacaataattaggagaaggatctatgacagaaccagaattcgagtgtgggctccctggaatggctttgaggaatcctagccattctgagaagctgaacgggcatggatttcagacccattctgcattttccagaaaggaaagg

SEQ ID NO: 10786 - DNA, 365 bp, Homo sapiens
  source 1..365: mol_type = other DNA
caggaaagtcttaaaagtcaaagtcttagaaatgtcttacagccttaaaaatcaattaagtcttagacctaccaaactctttagaatttctaggatgcaatggaattcctcagcttcaaaagtccagaatttcatgtgagatttccaaattctaaaatgttggcaagtaattaaaagaaatttttttaaaaaagattgggatcaaagaaagttcaacctcaggtttgaacaacctgattctgagaagttaaaggactaaaacccagtccctctgaatttaattaatgttccttccatgagaaggaagccagccatgatcgcaccacgcatgcgcctacgctcacgactcctgccgtaaaggccgt

SEQ ID NO: 10787 - DNA, 404 bp, Homo sapiens
  source 1..404: mol_type = other DNA
aattgccttttgatatcaagtaatatatcttcttaagctagaatgaacttcctgtcttctttcttctaattaatcctgaccagtcttgagaaggatattatacaaaacatttagtatatgttcagatttgactttttccaggctaagcccaaaagcgtttgtatttccattttgcaaaaacgtaatttttttttcctcccgggatttgataagattttgataaattcttgtgaatttaattacagggaagtaaatcctactgactagtaaattatcaatttgtttctcttttctcacaaaagagaaacaaattgatacccttcacatcatccggtaaggtttatttttttctgagaaggccataagccctaacggctcagaatctaagagaccttcgctgattg

SEQ ID NO: 10788 - DNA, 497 bp, Homo sapiens
  source 1..497: mol_type = other DNA
taaattagcacgaacaggaggactcctcttcaactagctccacaagagcagctgatgtcaggccagcaactctctgaggagtcccccaggagtctgacttgggaggacgagaagtttgctcgagaattgttttccaaatccacagggcgcggggttccaccccgggaaccaggggcccgagccccggaccacctcccaccgcaacaatttagcttcttcccgagcagcaagtttcttctcctcggttcacgcccggggctcgccgggccgggcgaggggtcgcactctctggtcggcagtgcagctgcagcgcccagctctggaacgcgcggcaggcggcggtggctcggccactgccgaaagacaggccgggcggccccctacgctcagggagcgacgctaccaactgggctgcgtccccgggcagaacccgagccctgcccaggagcctgcgcacttcgcgcaaggaggctcaggggcggggcctgacacgtcac

SEQ ID NO: 10789 - DNA, 506 bp, Homo sapiens
  source 1..506: mol_type = other DNA
gaaaataaatcttgtgctccgtgtaacatgactttaacttgcagtaatatcctttcatcatttaatatttatttcggaccagctccgaggcacagggaatccggccgcacctgtgcctgcagtctcattgctcggaacggcgcgccactgtgacgtgtcaggccccgcccctgagcctccttgcgcgaagtgcgcaggctcctgggcagggctcgggttctgcccggggacgcagcccagttggtagcgtcgctccctgagcgtagggggccgcccggcctgtctttcggcagtggccgagccaccgccgcctgccgcgcgttccagagctgggcgctgcagctgcactgccgaccagagagtgcgacccctcgcccggcccggcgagccccgggcgtgaaccgaggagaagaaacttgctgctcgggaagaagctaaattgttgcggtgggaggtggtccggggctcgggcccctggttcccggggtggaaccccgcgccctgtg

SEQ ID NO: 10790 - DNA, 506 bp, Homo sapiens
  source 1..506: mol_type = other DNA
tgctgaggcttcagtgagctatgattagccactgcaccgcacccccagcctgggcgacagggccgagacaaaaaaaaaaagcctcaatggtgtaaattattttacataaaatgtctctgtatagtcctatatagacgatataaagttttcataatgttaaataatgtacaatttcaaataatcctgtatattactatacagtagaaagaatatggttacaaaaaaaacacttttctagaaccgactgacaactgatttcagttgtaaacacagcctagttaggcagacgaaaataaatcttgtgctccgtgtaacatgactttaacttgcagtaatatcctttcatcatttaatatttatttcggaccagctccgaggcacagggaatccggccgcacctgtgcctgcagtctcattgctcggaacggcgcgccactgtgacgtgtcaggccccgcccctgagcctccttgcgcgaagtgcgcaggctcctgggcagggctcgggt

SEQ ID NO: 10791 - DNA, 237 bp, Homo sapiens
  source 1..237: mol_type = other DNA
gctgcttctctgcgtcaaagagacttagattctgatataatttcaaatagcaacgtttatggtggcgggcacctgtagtcccagctactcgggaggctgaggcacgagaacgggaggcagagcttgcctccaagctctgccactgtactccagcctgggcgactaaaagaaacattgttccatgcgtctcatggcactgccgtcacagtagcccggccgggcgccgaggttgccttg

SEQ ID NO: 10792 - DNA, 357 bp, Homo sapiens
  source 1..357: mol_type = other DNA
ttttaatgctttgagagcagttaccaaaaattatgcaggttattacaaaagttatatggaattgcacagatattctaaatgtgcttttgagtaaatttctcagctaccagagctgttccacaatttcaaatgattgagcttcctcttggaggttttattttaaagaatattgagccaggcacccatggtggcgggcacctgtaattccagctactcaggaggattgcactagtgtgagactccatctaatattgaaatagagtctataggaaaaaaactccttgaatctagtaaatgtggaatcacaaaattgaaataatgtatcaggccgaggccctgtatttaattaaaatagag

SEQ ID NO: 10793 - DNA, 387 bp, Homo sapiens
  source 1..387: mol_type = other DNA
tgtgatatacacaaatgcttaatttctctatttttaaaaaacttcccaaaattagtgcttggaattatttaaaataatgtagcaaacatttttggagtgcctgctatgtgtctggcactgtttcaggcatttgaaatatttcagaagccagaaactggcttctgattctgacgcagtcagtaagtggggcaagttgcttccctgcggcgtgcagttctcaagtcctgtgacttccctgggcagattttcctcgcgcaatttcaaatttgcaagggaatcttgaatattttctggtatctggacattcagtaccaggaactgttttaggtgcaatgaaacaaaaattattgccttcatgaacactagttctttattcccgcacgccct

SEQ ID NO: 10794 - DNA, 352 bp, Homo sapiens
  source 1..352: mol_type = other DNA
atgtctggagacattcatgctactagcatctagtaggtagggaagttagtaaatttcctaagaaacatcactcttgacccatggtagatgttacaagaaatacagttcttgagtcacaaggtgctcagcattttgctgaccagtttgtttttctatctcaatttttgcaagtctagaagaaaatgacattcttttagctggcagacatataattactagtgaaattaaacatcattttgagtttattggccactgctcatccaatgaatgaagaatgatatactgtgcagaataagttcatagaattaaaatttgcctcttaaggcattaatgttttttggtaattacagac

SEQ ID NO: 10795 - DNA, 352 bp, Homo sapiens
  source 1..352: mol_type = other DNA
gccgagagccaccgcgagcgcaggcggaggcggaggaggtgtcgcccagacacccgcccaggacgctgcgggatcccatcccccaccactccggggccgggccgcccccactcgcgcggtgcccagggcccgagaagggcgcacggggtggggcgcgtcgcccgcctgtcttgcccccacccccagaaacgtgcctgcggctttgctggggttacacttctaatgccattaaagccacctttgttgttaataacctattttgaaaaatcgaatgattaaaactaggaactgcctgttagtgaccgtcagcgccccgcttggtgccattcaaaaagccggacactcggagcgg

SEQ ID NO: 10796 - DNA, 362 bp, Homo sapiens
  source 1..362: mol_type = other DNA
gccggtcaatccagcgagaattgcttgaacctgcgaggtggaggttgcaatgaacctagcaccgcgcgggtgagcagtgatcgcttcactgcacttcagacataaaaaaacgcttccaatgttttgttcccttacatcagaatccacttggacaatatttaaaggggctaaggtcatataaggctcatctggcgactgaaaagtcttcaaaggcgattccaaggcgcccaggttgagagcgcaggccgcccgccaacctccacccccagccgacacaaagcctcgcgggaggtggagcctcgtgacgtcacagagacgcccgccccctttacgtcgtgctctgaggaggccaggagatttct

SEQ ID NO: 10797 - DNA, 384 bp, Homo sapiens
  source 1..384: mol_type = other DNA
ggaaatggtatctttaaaaaaattatcttttttactagcatatataaataaatattgattttttaaaatatgatttttgtatctattaaccttgttaaaaacttttattgttaacagtttatctgcagattgttttgaagtgccacaaacaattttttttttttttcgagaggctggaatgctggtgtacataattacataatctatgaaaaaataattttgtttcttcctatttaatgtcgggaacaagaagaccccgccgccctgccgcgcagctgcgtcgttctgacccagggtaggtgcagggcggctggaagcacgtgccgccgccccacaatgccgcgcgccgcgggcggctggcccccgagtgcgggaagggccggc

SEQ ID NO: 10798 - DNA, 473 bp, Homo sapiens
  source 1..473: mol_type = other DNA
gtacataattacataatctatgaaaaaataattttgtttcttcctatttaatgtcgggaacaagaagaccccgccgccctgccgcgcagctgcgtcgttctgacccagggtaggtgcagggcggctggaagcacgtgccgccgccccacaatgccgcgcgccgcgggcggctggcccccgagtgcgggaagggccggcctcgatctggaggctgcttcgccagtgtgggacgcagctgacgcccgcttattagctctcgctgcgtcgccccggctcagaagctccgtggcggcggcgaccgtgacgagaggggcgagtccgccagccgggcccgcacctctcgcgcgcccctcagcccgccgcgcccccgtccccggtccccgccccgctagggccgctgctgcggaaacccggcttaggaacgggccggcagcctccggccgcggccgggaaggctcttgggccgcgtctct

SEQ ID NO: 10799 - DNA, 583 bp, Homo sapiens
  source 1..583: mol_type = other DNA
gaagaccccgccgccctgccgcgcagctgcgtcgttctgacccagggtaggtgcagggcggctggaagcacgtgccgccgccccacaatgccgcgcgccgcgggcggctggcccccgagtgcgggaagggccggcctcgatctggaggctgcttcgccagtgtgggacgcagctgacgcccgcttattagctctcgctgcgtcgccccggctcagaagctccgtggcggcggcgaccgtgacgagaggggcgagtccgccagccgggcccgcacctctcgcgcgcccctcagcccgccgcgcccccgtccccggtccccgccccgctagggccgctgctgcggaaacccggcttaggaacgggccggcagcctccggccgcggccgggaaggctcttgggccgcgtctctgcccctccgcgtctgacagccgcggcgcctcggctcgggcggagagccgagcgtggctggggctgcgcgagtcgagcggggcgggcttggtccggagctgcgggatgtagatcccgggcggcaccgtgggagagagagaaagtcagatgccccttttaaactccctcttagga

SEQ ID NO: 10800 - DNA, 404 bp, Homo sapiens
  source 1..404: mol_type = other DNA
tggtacccaaacaatttgtttacataatgttttatggacctgaaatatgtagaacagtactttgaaactaaagtactgtactgaagtttaattatttttcttcaaattatggccaaattaccaatcgcatggtaattcagcttctaaatatattttgcagagtgtttccaaaagttaaaaaacaacaacaaaacttcacctaaattgtttttacttgcttcacaagagtttttgaatttcaccttgtcacttgttaatttacaagaagactcggcaaactgcactccatcggagatccgggttctggtgcctggcgccggcagccagtaggggcgcgcgtcctgcgcagttgccgcgcgcggcctcctcgggcttcaggccgggccaatcaggaggcgggcggg

SEQ ID NO: 10801 - DNA, 655 bp, Homo sapiens
  source 1..655: mol_type = other DNA
ttatcaatcaaaataattatgctattggaaagaagctagattaaatgttcatactgtatgattctattatcgtaaaattctagaaaatgcggtgatttcaacagtgtatacatatgttcacccttaacaaattatgcacttttgatatctgcagtttattgtactttaaccttcaagctgttaaaaattaaccggagataattttcaattgttgtgtaaggtttgccacaaagtgtaatatctgcaaagaagcagacaactaattttttcttcttaagattgtggaaaaagttgtaatactacagagagctgtggaatctaaggattagttgaccaacgcttgtaaagctaccaatctgaaaaacacattttcagttaccaaagttattttctctcttccagtaaatataatttgggtgtttctaaaatttaaatccacgtgaacagagccttcagggcgcagcctcagtgcctgggggtcggcagcagccagcgtcaggcggctcccgcacgcttcttcctaggcggcaggccgtggctgccacgtgactcccgctaacaccggatgatggcgcagcgctgtgcacgcaggcgcagtgtggggcccagctcacgcggtaagccgctgcacgtgtgctacggcgggcggagggcc

SEQ ID NO: 10802 - DNA, 647 bp, Homo sapiens
  source 1..647: mol_type = other DNA
atgttcatcgtttttaacatgtttcatcttaatcagaaaacgttagggttagtaaataagacagaaactgttgttcatttaaccaccgtcactttggaccaaaaaagaaaaaatatatatttttaaaattgagcttaaaagagtctctagtctttttcagcaaactgggggaataggtttaccgtgttccccctctggggaattttgagtcgccacactcatgtctcgaccgagcctggctcgctgcgtctgagcaccctctagccggagacttccggcagctgcctccgacttgcactccaacagcgcgcagttgtgcccggcgaggatgccgcgctagtcgtggagatgccccaccacaaagaggaggcaggagacaagaatcgtctgggctgctcctatctctggcaggactagacgggggcactgcccgagggcagatacttgcagcgcgctcggagtgcgctgcctcgctcacgcggtcccaggccccgcttcttcaggcagtgcctggggcgggaggctccctcgacactcgtgcggctgcggttccagccccctccccccgccactcaggggcgggaagtggcgggtgggagtcacccaagcgtgactgcccgaggcccctcctgccgcggcgaggaagc

SEQ ID NO: 10803 - DNA, 500 bp, Homo sapiens
  source 1..500: mol_type = other DNA
tcacaggtctgagggttcacagagctcttttaaggggctgcagtgcattgctcagttcctttcaactgaaaaattaaatctgcacttctgtcaaaatgtgtcatcttctacgcagagtccaggctgaaaggatggcatgccctccccaaccccacccttttgaggtctgggaagcccaggtgctggggcccagggatcacggagcgcgacttcggcccaggagacccggcggggactgggtccgaccagccctctctcgcgggcgcaggtccgggacccctgaagcgagccggccgggcgcagagcgcagtcagtctgggcgctcagaagctgggagggggctccacctgggcgcccagccgcggcgggaggggcggggcccggctttccggaggcggtggcacctcctcgcgcccgagcgcgcgctccccgacgtccggcgcacgcgcgaggccggctgggagcgcgcccaagcggcggcggcggcggcggctggagga

SEQ ID NO: 10804 - DNA, 493 bp, Homo sapiens
  source 1..493: mol_type = other DNA
aactgaaaaattaaatctgcacttctgtcaaaatgtgtcatcttctacgcagagtccaggctgaaaggatggcatgccctccccaaccccacccttttgaggtctgggaagcccaggtgctggggcccagggatcacggagcgcgacttcggcccaggagacccggcggggactgggtccgaccagccctctctcgcgggcgcaggtccgggacccctgaagcgagccggccgggcgcagagcgcagtcagtctgggcgctcagaagctgggagggggctccacctgggcgcccagccgcggcgggaggggcggggcccggctttccggaggcggtggcacctcctcgcgcccgagcgcgcgctccccgacgtccggcgcacgcgcgaggccggctgggagcgcgcccaagcggcggcggcggcggcggctggaggaggctgaggcgcggctggctgcgcgcgcggaggcagcggcgggggcgaccggagctg

SEQ ID NO: 10805 - DNA, 212 bp, Homo sapiens
  source 1..212: mol_type = other DNA
gctgcggctctgtgtgagctctcgcagctctttgctctcagcttagtagagagcattgcacagtgcactgactgaaagtgtcactgctattgccagtcaactggacaattcacaaagaaagcttacttaagtaatggttaacacgtcctaatgttacaaaaagagctaatatttaagtcagttcacaatgtttgagcaccagctattgtggg

SEQ ID NO: 10806 - DNA, 559 bp, Homo sapiens
  source 1..559: mol_type = other DNA
ctattgccagtcaactggacaattcacaaagaaagcttacttaagtaatggttaacacgtcctaatgttacaaaaagagctaatatttaagtcagttcacaatgtttgagcaccagctattgtgggcactgtcgcggctcccacaggctggacaggccttggactggttgcggtgtcagtccacactccactgtgggtggcgggttcggccccgcgaggaggcgccgctctcaaaccccacggtcccgcgcagcgaagaggcgaggcggccgcggaaggcaggcgcagcccactcttcccgagaggccccgacatctcccgggtgagtcccgaaaagcgcgcggggactccggctgagcgctgggccgtcagcaacccggctcccagagagtcacacgaaggaggggaagcggctctctctggggcttctgggaggtctggcccgggcccctcccgcagcctccggcggccagtcccgcggctctggggcgcccggaccgagcaaaggtcccggcgggcgggccctctctccgccctccccaagcgcccgccccccgcc

SEQ ID NO: 10807 - DNA, 445 bp, Homo sapiens
  source 1..445: mol_type = other DNA
aattatggactaaataaatattgaaacccttttacattaaaagagagattgtgatcattatttagttgatatttctttagtattttctggtcaggaactatgctattagcacattataaaataaatagtgaaattgcaaatatccaaaggatctgcaattttcaggtagtacatatcttaggctctgcagaccacatggtctctgtttgtgttccaacaaaagtttatttttaaaaaacaggcattgcagactacagtttggaagactcaccctcagtgtgggtgggcaccatcccagcctggccagcagtggtggcaggcacctgtagtcccagctactcgggaggctgaggcaagagaattgccgagactctggcttgctaagtcttcttccagctcttgaacatcagattccaggttctgcagcctttggactcttggactt

SEQ ID NO: 10808 - DNA, 162 bp, Homo sapiens
  source 1..162: mol_type = other DNA
cagcactttggaagagcctgtagtcccagctacttgggagtgagccgagatcgcgccagtgcactccagcctgggcgacagagcgagactctctgaaatttcttacaaatttatgattttaatattaacagaagcttttgatctgaaaatatattttcagat

SEQ ID NO: 10809 - DNA, 379 bp, Homo sapiens
  source 1..379: mol_type = other DNA
tcacagttgcaagctcgcaactgctcctggcatatactagtttgcagtctgcaaagcttgcattcgtcctaggatcaaagaaggccattgggctagtgggaagtcaggacttggaggtagggtcacggtctccgagccccgggtctcatgcgaccgcaagggtcccctggagcctttccctggcccggaaaagccactccgcgcgcaggcaccgagctgggccaccgggagccccacccagtgcctcgccgcagggaatccggggtccctagttcccccggccccctcggggccccgcccctgggcctctcaggcccctcccctgcgctcccgcccttgcgcggctcctcgggctaatcgccgggcggcgcgcgccgag

SEQ ID NO: 10810 - DNA, 451 bp, Homo sapiens
  source 1..451: mol_type = other DNA
cactcaacaataatttattgtacattaaacaaactaaaagtataattggattgcttgtttattatacattgtatgcctgtatcaaaatatctcatgtacctcttaagtatatatatatatttacctacttcgtactcataaaaattttaaaaggtacataaatgttatcattgcatcctcttgataatcctgtctctgccgcaaatgcagcacaaggtcacgagctggtgcccaactcgtgtaactcctagattagggcgtcttttcctggaccggcaaaagagtgacgtcacctctcccgacaccacctcgttgtcgtacgaccaaaggcctgtcgttaacatgctcgccagcatgcgcgcgcaggtccttggcgcaggcattgggactggcggcgacgttactgcgtagccgccagctcggccgcacgtcagggcgcgggagcgcggag

SEQ ID NO: 10811 - DNA, 425 bp, Homo sapiens
  source 1..425: mol_type = other DNA
catcccattccttgatggggtggcaggtggcgaggggggggtgacatcccttattgtcagccatcacaggaactcatgaccctgtaggtgcagattcagtaaaggactttgccatgtccgcacccaccggaaggagcagagactctgttagggcgccatgccaggggctgcagtttcagaatcctgcactggggagggaggacaggtcggatgctccgacctcaccagggactccactggaccggagctcttcctcgagagagctccctggccggccctgagacagctccagacctgtcgccatcgccgccgccgctagagggcgcctgggggcggggcgcgggtggggcaaggcggggtccgacgggccaggggtcgcaaggcggaagagcccctctcgcctccgacccgaccgcggtcacggc

SEQ ID NO: 10812 - DNA, 512 bp, Homo sapiens
  source 1..512: mol_type = other DNA
atggctgcggaggcctcaggaaagcagttaccttctccacacttataaaaccatcagatctcgtgagaattcactcgctattacgagagggggaaactgcccccatcccattccttgatggggtggcaggtggcgaggggggggtgacatcccttattgtcagccatcacaggaactcatgaccctgtaggtgcagattcagtaaaggactttgccatgtccgcacccaccggaaggagcagagactctgttagggcgccatgccaggggctgcagtttcagaatcctgcactggggagggaggacaggtcggatgctccgacctcaccagggactccactggaccggagctcttcctcgagagagctccctggccggccctgagacagctccagacctgtcgccatcgccgccgccgctagagggcgcctgggggcggggcgcgggtggggcaaggcggggtccgacgggccaggggtcgcaaggcggaagagcccctctcgcctccgacc

SEQ ID NO: 10813 - DNA, 602 bp, Homo sapiens
  source 1..602: mol_type = other DNA
aaagagattcgctttggcatttcagtaaatgcgcatttatttctgtaaattcttaatgtcatgatgaaataatatgcgtcctggccctgctagtctccctaaggactttgagagggccagtttgtcaaaatgcctatcaagtatttgctcatatacactttttaataaccaaacagcattttacaaaaaaactaattcatggcattttgttgggatattataatttttttcacattcttaattttgcttgacattttgaaaatactacgcctaactcttttgtgcagattaaaaaaaaaaaaacatagctagcatggattgaatacttccttttcctacacaaacaccaaaaacaaaatactttttgtttaagcttagagaaatgaagcattctgtctgtttggaatcttaattactaattagaagctcttttataatgaggaaaattattttcaaagttaatgaatttgcaagcacaaacaaatgaattattatgcatattttagttgtacactctaattaatattagtacttaaaatgtgtgagattgatttcactgtttaaaaaaaactttcctttgtttttagacgatataaaaacac

SEQ ID NO: 10814 - DNA, 409 bp, Homo sapiens
  source 1..409: mol_type = other DNA
gcagggagcacttcctacccatgcagtgcttattagtctcattttacagtgagaaaactggtcgcccctcaagtggaggggggaaatggcaacggtggaatttatatgtgaaactccgaactttacacgaaatatttcaggaactgagacagagaggttactcttgcccactctgcccgccaagtggggtggaagcccgttgcaagctgccaggcccctcgtagctgagctcacggccacagggtggcaaggggccacttggtgcccagaacaacttctgctcccagaaagccttgcgttccccggacataaagaggctttgagctcggggagccccgccccgtgcggcccctcccacgggcgcgggccccgggcggcagggggcgtgttcctgtcggctgcgcccgcg

SEQ ID NO: 10815 - DNA, 552 bp, Homo sapiens
  source 1..552: mol_type = other DNA
cgggagctgcgcgcggggccgccggggggaggggtggcaccgcccacgccgggcggccacgaagggcggggcagcgggcgcgcgcccggcggggggaggggccgcgcgccgcgcccgctgggaattggggccctagggggagggcggaggcgccgacgaccgcggcacttaccgttcgcggcgtggcgcccggtggtccccaaggggagggaaggacagtgaccggagtctcctcagcggtggcttttctgcttggcagcctcagcggctggcgccaaaaccgccgcccacttcctcgcccctgcggtgcgagggtgtggaatcctccagacgctgggggagctcctgtacaccaggggtcagttccacagacgcgccgagtcaatccggcagggaccacctcccgggttgagggggctggatctccaggctgcggattaagcccctcccgtccaagccgcaattcattgagcgcatttacggaagtaacagagccttcccgccattggcggcggatagggcgtttacgcgacggcctgacgtagaaaagcg

SEQ ID NO: 10816 - DNA, 426 bp, Homo sapiens
  source 1..426: mol_type = other DNA
agggggaggggaagctccgcagcctcgctcacgaggacctgctgcccgccgctcgccgaggagacgccgtggcccccggcggggcagcgtccgccatgagctccccatcccccacccccagtgaagggaaatggcgccgggaggccccacggaggcggctggccgacttccactgaggcgccaacggcattggcccgatttcccgcagccgagcggactcgtcctggcgctgtagtgagaactgccgctgctcgagaaacaactctgcgaggagcacctccgcacgggacccggcgctgctgctactgccgctagagccgctgccgccgcttttctacgtcaggccgtcgcgtaaacgccctatccgccgccaatggcgggaaggctctgttacttccgtaaatgcgctcaatgaattgcggcttg

SEQ ID NO: 10817 - DNA, 537 bp, Homo sapiens
  source 1..537: mol_type = other DNA
cgtcaggccgtcgcgtaaacgccctatccgccgccaatggcgggaaggctctgttacttccgtaaatgcgctcaatgaattgcggcttggacgggaggggcttaatccgcagcctggagatccagccccctcaacccgggaggtggtccctgccggattgactcggcgcgtctgtggaactgacccctggtgtacaggagctcccccagcgtctggaggattccacaccctcgcaccgcaggggcgaggaagtgggcggcggttttggcgccagccgctgaggctgccaagcagaaaagccaccgctgaggagactccggtcactgtccttccctccccttggggaccaccgggcgccacgccgcgaacggtaagtgccgcggtcgtcggcgcctccgccctccccctagggccccaattcccagcgggcgcggcgcgcggcccctccccccgccgggcgcgcgcccgctgccccgcccttcgtggccgcccggcgtgggcggtgccacccctccccccggcggccccgcgcgcagc

SEQ ID NO: 10818 - DNA, 378 bp, Homo sapiens
  source 1..378: mol_type = other DNA
cgagtagctgggattgcacccgcctcggcctcccagagtgctgggattgcaattttaggaaattaaataccagcttcaagatccaagatgttaagacacaacattgtatatttatacgtttattcatgcttgaaaaatgaaatattaggctatgcttattattctgtgtcattcagtcacttattagcagttaaggggacccagcctcaggtgccatttgggaaatgctttcctgttttattgagacatttcaaacatagacaaaaactgaaataattttatatcataactgtggggtcagggttaggaaaagggtgccgctggagcacctccagcctcttcctccctaaccagggtgggggcgcacctgggctgggc

SEQ ID NO: 10819 - DNA, 482 bp, Homo sapiens
  source 1..482: mol_type = other DNA
gcaattttaggaaattaaataccagcttcaagatccaagatgttaagacacaacattgtatatttatacgtttattcatgcttgaaaaatgaaatattaggctatgcttattattctgtgtcattcagtcacttattagcagttaaggggacccagcctcaggtgccatttgggaaatgctttcctgttttattgagacatttcaaacatagacaaaaactgaaataattttatatcataactgtggggtcagggttaggaaaagggtgccgctggagcacctccagcctcttcctccctaaccagggtgggggcgcacctgggctgggctgcgcggaggcggcggaagcactaggcgcggcgcccacaggcggacggctggcgctgagcgcgggcgcggggccgctacgtgcgcggggagcgcggggagcgcggggagcgcggggctgcgctcgtgtgcgctcctgggcgctcgccgccgc

SEQ ID NO: 10820 - DNA, 413 bp, Homo sapiens
  source 1..413: mol_type = other DNA
gcccggctcggcccggccctgctctgttctgcccggaggagccgcccgtaagtgacaagagacccgctgagggggcctcccctgcaccgcccaggtggggacggcggcccttctttccagaggcgcgggcccttcccgctgttcccaggtgcccgcacccttgcgggctggaaagagggcccttggagcagaggagccgcctccttttcgtcgatccagggattcttggctaaaaagacacccctttaaaatttatttatttatttttttattcattcattaactgactgattatcagatttggtgaccaggaaagcaacagctcctgctcagcgaaccaggcctacaacctggcaggcttctgacttccaccccaagctccccctcctctcccaggagggggctgggctgga

SEQ ID NO: 10821 - DNA, 338 bp, Homo sapiens
  source 1..338: mol_type = other DNA
cctgagctcaggtgatctcttacctcagcctcctgagtggctgagactacaggcacgcagcccaggtctcgaactcctggccagacagaaaatttttgtaaaggaacaaatgctctgtgatcatgaggaaggcacctcagcatttttcagtgactgcagctggcacagtcggagccaggcacagtgaattcacaaccaggtggtctggattaggggggcattcccctctaaactgctcctcagcagtggatcttcatgacagaggcaccttttcctttagaaaagagaatttctctctctgtttaaaagcagaacattaaatgttgaatttttttctc

SEQ ID NO: 10822 - DNA, 534 bp, Homo sapiens
  source 1..534: mol_type = other DNA
ttgcttgatgcagggttgccacaaaccttcaatttgttaaaaaatgcaatatctgggaagcacaaagatgtatgcctgttaaaggttttaaagaagccattttttttaaaagagaaaacttttaagaagctttacagatagaagacagtaagtatttgttgactaaatggtcaagttggagtgagcagattttataattttattctactaaccaccaccagcaattttatttttgatgcttgtagatggacagtcgctccggagcggctccagactggcttcgcccggacgactggcggaagacggactgttacgcagaaggaaaacttgtatacactctgtatcatggatacattattttctggaatcctgcagaaacgatcagcagttgtgatggcaccagtacccggacgctggatcaggtgacgcagcatcaggtgacgcagcctcagtcgggaatacacatgcgcagttggacccctcccatctccccgccccggccctctgggcggggctgggccgacagtccagctg

SEQ ID NO: 10823 - DNA, 600 bp, Homo sapiens
  source 1..600: mol_type = other DNA
gcattttgagtttactggaaaaaatgaaaagaccaatgtctctttttgcaacatgttcaaacacaactaaaacacgtgtctctatttttaatcagttttactcttgtattaaaaacctgttggtaaaacgtctaatcacaaggttaatctatagaaatcagattttttatattttcatttaggaaaataaaagaaaaattattgagcgacttttcttttcaaacttcgttctaagccctgtccaagcttgggaaaggtcggctcgggcgatcgagtcgctcgggcagcggcggccgcgggaactccggctctgctggggctgcggggagcgggcggggggcaccagcgcctgcccccggccggctaggctgcggcaactgcgagaggagatgccgcaggaccttcgcgaccctgcggggttgtagaggagccccgacgccgaggtcaggacggctttccttccttttctcctgcttcctgggccccaggcagagcacgaagggagcagcatccgggctcttccctggcctgcaggcttcgcgcctctggatggacctgcgccggtccggggcgggaaaggagcagcatccgggctcttcc

SEQ ID NO: 10824 - DNA, 545 bp, Homo sapiens
  source 1..545: mol_type = other DNA
atcccggagggaagaagagcccggccgcccccggccttttccggcgagctctgagtttgaaactcctcattgccatgctaatgaagaccctcctggaagaagggaagtttctttccgagcttgaagagccggtggcccagcctcgccctcccctaacagaggaggtggcctgggaacccggggcgcggtgtcagccggattccccgccttccggctgggcgcgctgcgggctgggccggcgtacttgcggccacccggcgagctctggcccactgattcccgccccgagagagccgggagcccttctcgccagttcatctttcattgaacggtggggagggggcgggagcgggggacgcctcccagcccccacctcccggaggcctggcggggcgggcagcggagtcgggcgcgcgcagaacgctcggcctttgcagtcgccgcagcagctgccgccgcctaggctgcctgggggggcgactgcgcgtcacctagacggcggagcgccggggatttttttgcaggaggctcagccattggctgac

SEQ ID NO: 10825 - DNA, 261 bp, Homo sapiens
  source 1..261: mol_type = other DNA
gaaggtcgggaagcttcgagagccgcctcccgttttccgcttcccgccggagccagatgcaaagggcccggggcgcagactctgggctggaccccgacagtcccaaacaatgcgcggagtgtgcgggggaggcagagggcagccaccggcgggaccgacaacatatatgtatttttgctctgaaaaaagtgtaaataaatttttggatcaatcaaacagacagtggcttcttttgattaaagcccaaattgtcattgggca

SEQ ID NO: 10826 - DNA, 385 bp, Homo sapiens
  source 1..385: mol_type = other DNA
atataatatatattatatatatatgtatgttttaggaatccgtttgaaaacaagtacctgtctctcccaggattaaccaaagagagcccagttggctcttgagggtctctagagaaaagccttatcccagctccccacacccccacccaaagatctgtttgggagttgcaggagtctgggaaactcactttccacaattggaagtgtccagggcagagacgaattcctaagaaatagggcgttggggggtggggggaggctgccctcctcccgccaccgccgaggctgctccgcgtgtaatatcccaggcagagcccggcgccgcactagcgcttatctccgggccgcggctgctgccctcgggaagggcaggggggtgggtggg

SEQ ID NO: 10827 - DNA, 763 bp, Homo sapiens
  source 1..763: mol_type = other DNA
cagcccgaggcctaggccagcagtagggcaggcagagggctcccgagaggacctacagcctgacaggaaagctggggggctggggtccaaagctcctgctccctcccccagcccaggggccggacagcagcatccatcacgcacccgcgcgtttcctgatccgggtccgcgcgcgcggtgcgcccattggtgggggcgctgcacgtggggcacggggcggggcgcgcgctgggcgaaaaattagtatttttgcacttcacaaattaatgaccatgagctcgtttttgataaactccaactacatcgtacgcgcagcacagcggctcgggcggcgcagacggcggcccgggcgggggccccggctaccagcagcccccagcgcccccgacccagcacctgccgctgcagcagccccagctccctcacgcgggcggcggccgagagcccactgcctcctactacgcgccgcggaccgcccgcgagcccgcctaccctgctgccgcgctgtaccccgcgcatggggccgcggacaccgcctacccctatggctaccgcggcggcgccagccccgggcggccgccccagcccgagcagcccccggcgcaagccaagggcccagcgcacggcctgcatgcgagccacgtcctgcagccccagctgccgccgcccctgcagcctcgcgccgtgcccccagcggccccgcggcgctgcgaggcggcccccgccaccccaggcgtcccggcagggggcagcgcccccgcgt

SEQ ID NO: 10828 - DNA, 373 bp, Homo sapiens
  source 1..373: mol_type = other DNA
caaattagatgctattacgaaggttccaatttttcttaggaaaacacgaaacagattgtctgcagcttctgccaagcttctcaaagccgaagcctgactgggttgcgcccgaggtcagcgctgagtcgcggccgccagacagcccgaggcctaggccagcagtagggcaggcagagggctcccgagaggacctacagcctgacaggaaagctggggggctggggtccaaagctcctgctccctcccccagcccaggggccggacagcagcatccatcacgcacccgcgcgtttcctgatccgggtccgcgcgcgcggtgcgcccattggtgggggcgctgcacgtggggcacggggcggggcgcgcgctgggc

SEQ ID NO: 10829 - DNA, 363 bp, Homo sapiens
  source 1..363: mol_type = other DNA
tatgtttttgtgaacaaagttacaaatattgtccaagtctggctgttttaagcaaactgtgatttttttttttttttgtatttgtttttaaggaaaaaatactgactggaacaaaaaataaactttctattgtaagttctcctgagcagatgacctgtgctggaaaaaacccagggctttgttttgctacaattaatttgctacaaattgaaggtacttaccccatcctagtcgattgggaaactcctgtctttccttttaaaagttataaaacagtaaactttatattttgtctatgaattagatcgtaaaatcatccataggttttatggttttgggagttgacatccaacattatatacc

SEQ ID NO: 10830 - DNA, 527 bp, Homo sapiens
  source 1..527: mol_type = other DNA
cgggcgcgcgatcggcagctgaccccggcccttgcagcccccggtcggaagctgggcgatgagccctgcctccagcgggtggcgctcgagtccggctgaacggcggcaactggcggcgggcacgcgcccggggcgcgcgcgccacccccctcgcctccttagtgcacgagtttacctctagaggtcattcgaagtcgtaccccatatttgggtgcctacgtaggagggaaccaagtacatacatatcaaaaaacaaatgagctcttattttgtaaactcattttgactaccagttgcataattatggagatcatactcagcgtcggccgctcgggctccggccactttggctccggagagcgcgcccgcagctacgctgccagcgccagcgcggcgcccgccgagcccaggtacagctgctccgccgtggccccctcgcccggcagcgacagccaccagcggcgcctcggccgacgccggcagcacccacatcagcagcagagagggggttggcacggcgtccggag

SEQ ID NO: 10831 - DNA, 501 bp, Homo sapiens
  source 1..501: mol_type = other DNA
tctttaatagacgcctgtcatttaagagcggcagggacactgtccctcagccgtaattgtagctgctgctgctgcgggcaggatttatccaattggctaaatgggaaggtgatatctgtattttcaattcagagctgctggcaggacggtcagtacgggcgcgcgatcggcagctgaccccggcccttgcagcccccggtcggaagctgggcgatgagccctgcctccagcgggtggcgctcgagtccggctgaacggcggcaactggcggcgggcacgcgcccggggcgcgcgcgccacccccctcgcctccttagtgcacgagtttacctctagaggtcattcgaagtcgtaccccatatttgggtgcctacgtaggagggaaccaagtacatacatatcaaaaaacaaatgagctcttattttgtaaactcattttgactaccagttgcataattatggagatcatactcagcgtcggccgctcgggctccggccact

SEQ ID NO: 10832 - DNA, 536 bp, Homo sapiens
  source 1..536: mol_type = other DNA
tccccagaccccaggcagcctctgtggctgcagggagcctgggcccactcgctgggttcaaggagaaccctccgacttggggcccggctggctcgaggaaccggttataaaagtgtatggaatttgacctcgcaaaagctatctttaatagacgcctgtcatttaagagcggcagggacactgtccctcagccgtaattgtagctgctgctgctgcgggcaggatttatccaattggctaaatgggaaggtgatatctgtattttcaattcagagctgctggcaggacggtcagtacgggcgcgcgatcggcagctgaccccggcccttgcagcccccggtcggaagctgggcgatgagccctgcctccagcgggtggcgctcgagtccggctgaacggcggcaactggcggcgggcacgcgcccggggcgcgcgcgccacccccctcgcctccttagtgcacgagtttacctctagaggtcattcgaagtcgtaccccatatttgggtgcctacgtaggagggaaccaagtacat

SEQ ID NO: 10833 - DNA, 419 bp, Homo sapiens
  source 1..419: mol_type = other DNA
tgctgagtccccaggcgctaggcaggggagcaggtccctcgctttcaattccctgggttcctttgacaccaggcaggcgcgggcgccccttgggactcagctcgaggtgatccttcagctctgggctgcaaggcccaggcccctggtgctagcgcgcgggccgtgcctggagtgcaggccggcagggagcaaagccacctttgtcactgcccctcctggagcaggacgctcgccactgaaagggccgtgcccgccgctggcgttcgggaagagagccgggccggctagctgtgcgcgcccattaatctgccgggcgggcggcgggcgggcgggctgggggcgcctcggtcgccgcggtccccggggagcgggctccggcgttcgctcccattggccgccgccgcgtcagctggtgcgat

SEQ ID NO: 10834 - DNA, 376 bp, Homo sapiens
  source 1..376: mol_type = other DNA
gtggcccggcacactgtgttcccgttggattccccaacaagagggcgatagggggaccccccaatccaccttggccgaccgcactccccaccttccgcgagcggggagaggatggtggaggcagagcgtgctgctgctgtagctcggcctaagtgcacatcagaccagaacagcgacaagaaaagagtccgaggttctttttgtttgtttttgtttccccaacttgagacaatatcttggtatggattcgataaagctctgcgtgcgctcggggcggataaagcggcgcatttgcatcctaggtccgccgccttcctgactgcggctgccgcgggccgatgcgaccgtgctggcgctcgctgctgccacgccgtgg

SEQ ID NO: 10835 - DNA, 554 bp, Homo sapiens
  source 1..554: mol_type = other DNA
cctaattccacaattgtatatattttggtgtatgtcattctgtgcccacaatagagtgtattgtagatcccttgaaaacggaatctttggtagatacgttatattctatgaatctacctaaaatccatgaggaaatttcaaatccacactttcctctaaggctgagcagtgggcttggaaaggggcattacccagagctgattccggattcgcatgcgcctaacccagccccaggctaggtccccaccccgcctgcagaccaggcgagggggccccagggtccggcactgcagtaggtggcgcggggaggggctaggaccgcagacccccgctaggctacgcagcctgggcaggggctggggtgcgggcagctcagagcatcctgagttccgtatggctcttttagtaaaacctggcccaaaagggtctgtaaaacctgaggccccaagtcggggcggcctcggtggtaagaagagctgcctcctctcagtgaatccgttgttgtttatgaaaatttacaactttgcaatacaactttatgtgaacatgaactt

SEQ ID NO: 10836 - DNA, 358 bp, Homo sapiens
  source 1..358: mol_type = other DNA
actgagcggccgcagagactgggtcgccttggattccctctgcctccgaggacccccaggccagccggccctgctctggcgcgtctacctagcacaggcctcagagggcctccattcccaggggctggcttgcctgcaagtcctgctgcttacagcccgcagcttttggggtccctgaggctgccctgagaatgtgctgatctatttaaatcgaaaaataatatatttattccaaaaagcaacccccacttctggaggggaatgttcctttagcagctataatagcagatactgtatatttgaacaagatttttttttatcattggtggggaggtccaatgccctccgcaatgcccag

SEQ ID NO: 10837 - DNA, 443 bp, Homo sapiens
  source 1..443: mol_type = other DNA
ctaccccagaaaccttccagtattgggagtgcctggaagggtgcaggcccgagatttttccaagctgggggaaacagccctggctccccatgcgccagaggggaaccagagcctgcagcactacagttggcaaatgagtctcattaatagataaatatttcactgtggcaatctctctgcagctgcaagagatgctgcgccctgtcgcccactggacagagtcgatctgctcatagctgagtcctgcccacaaggccaccgcggggcaggctgttgcgggggacacccttccagggtctggtggcagggggtgctgcgtggggccgggccgcctggcgtccgcagaccccagtgcggaggttggccgccagctgggcgctcccgcggagcctccaggtctttttccgcgggacgcgccaggcccgccgggcgcgggcggattc

SEQ ID NO: 10838 - DNA, 446 bp, Homo sapiens
  source 1..446: mol_type = other DNA
tattgaaagcctgattttatccgaccttttcgttttaaatcactcggcccagttggctgacttgggtccataaaggccgaagccttgggcagtatccgcatcctccttggccggggcagaggggcagtgcgtcctgccagaacctcctggacgcgcatcgggcgagcaggaatgagccggtggcgagggcacccggccctcccttggcgaagtgcgccccttcagtcgcttgagtctagacagacggcggcggcgggggccttgtgtcaccccaggaaaaatttattggtctaaaacggtctaaggcttccgtggcccgggaggagacagcccagcgcccacctgcccccccaagccccggtggttcactgcgcaggaactggggctccgtggcgtccggccccctgagaggaactaaactctacaatttacaggagaatttccgg

SEQ ID NO: 10839 - DNA, 489 bp, Homo sapiens
  source 1..489: mol_type = other DNA
gggcggccgcgggtaaactcgcctctcccggggaccgcagccaagtcctcgtaaatttttacctgaaacaataactccttatgaaatatcataaatatagatttaaatacagctccgctggccgcactcgcacgcgggacccgcgccttcttgatggcgtgattaatgatcttttaatcgtcgttggcctatccctttacataaaaacatatggcttttgctataaaaattactggacgggcacgtgacgcgcacggccaatgggggcgcgggcgccggcaacttattaggtgtgggtcgggccgggcgggccaggcgctgggcacggtgatggccaccactggggccctgggcaactactacgtggactcgttcctgctgggcgccgacgccgcggatgagctgagcgttggccgctatgcgccggggaccctgggccagcctccccggcaggcggcgacgctggccgagcaccccgacttcagcccg

SEQ ID NO: 10840 - DNA, 485 bp, Homo sapiens
  source 1..485: mol_type = other DNA
gtgtgcgtggggtcgagggccggggaccgagcgcgccgcacaaccggtggcggctggccgctccctcctggccagctcctttgcccgggcgcccctcgctccaggcgggtagctgtggggacctacacccgcggtactccctgagcggccggtccctgcctggagtgccctggtagggccggcggcggctccggggcggccgcgggtaaactcgcctctcccggggaccgcagccaagtcctcgtaaatttttacctgaaacaataactccttatgaaatatcataaatatagatttaaatacagctccgctggccgcactcgcacgcgggacccgcgccttcttgatggcgtgattaatgatcttttaatcgtcgttggcctatccctttacataaaaacatatggcttttgctataaaaattactggacgggcacgtgacgcgcacggccaatgggggcgcgggcgccggcaacttattaggt

SEQ ID NO: 10841 - DNA, 428 bp, Homo sapiens
  source 1..428: mol_type = other DNA
aatgaagctttttactatttaaatattacctagatctttcgggagccccagggctgggtcacagatgaccctcaatctcggggagcaggcctggcccacagcgcatctctagccgctggaggcagcggttaggtggacccgggctggactgcatgggggcctccccctcccccagtacggcctcccccacctggcggcctaaggggagggggcgcaggagcgcgcgccccggcgggcgggcagctaggccggggccagacagggagccgggatctgtaccgtccctggcgctcttggcgccggctcgctgggctgcaagatttgggaaagcggcgcgcacactgcttctcggagctgcggccgcctggggcactctgttgcactggcgggcgcaggttgcctaggggctgggctgggccgggccaggc

SEQ ID NO: 10842 - DNA, 407 bp, Homo sapiens
  source 1..407: mol_type = other DNA
gcacctgtgctggagcaaaaagccatatcatgctaaaattctatagagatagatattttcggccgagctggtttcctgcccagcctggggcaaacctagccggaaggacatgcaggttggcaaaaagtgagaaagaaagtaaaaaaggttaatttttccttcctctgtaagatatcccagctttaaaaagaaaaaaagagaaggggacttctcttccagtttctgtaaggtcttacattctggctgtagataaataatgtagttttgtttatgctttttgtcattaaaattgttaccactggtaacatgtgacaagcacttgtgaagttgtttttttaaatcgccttgaacaaaaagttttttttttgtttgtttttgctttctgaaattcacagaagcctttatat

SEQ ID NO: 10843 - DNA, 225 bp, Homo sapiens
  source 1..225: mol_type = other DNA
tacatgccaggcaatcgagagcggcgcctcgcacctgtgctggagcaaaaagccatatcatgctaaaattctatagagatagatattttcggccgagctggtttcctgcccagcctggggcaaacctagccggaaggacatgcaggttggcaaaaagtgagaaagaaagtaaaaaaggttaatttttccttcctctgtaagatatcccagctttaaaaagaaaaa

SEQ ID NO: 10844 - DNA, 630 bp, Homo sapiens
  source 1..630: mol_type = other DNA
cgccgcaggccgccgaactggctcccttcccgcggggcccgccgcccgacggctgcgccctgggcacctccagcggggtgccagtgcctggctctcaggcctacggcaccgccaagggctatggcagcggcggcggcggcgcgcagcaactcggggctggcccgttccccgcgcagcccccggggcgcggtttcgatctcccgcccgcgctagcctccggctcggccgatgcggcccggaaggagcgagccctcgattcgccgccgccccccacgctggcttgcggcagcggcgggggctcgcagggcgacgaggaggcgcacgcgtcgtcctcggccgcggaggagctctccccggccccttccgagagcagcaaagcctcgccggagaaggattccctgggtaagcagggctgcagagggctgcagtcagccgcgcagcagccggccggccttggcccaagctgcaggcaggctgacattcattggcctcagctccccctgactagggacgaggacaccagcgagcaggccccctcctgtgcgctctttcctgtggccgggaggacccagagccctggtccctgcccagcctgcgcggcgcggcccacgcggggggagggggagggag

SEQ ID NO: 10845 - DNA, 717 bp, Homo sapiens
  source 1..717: mol_type = other DNA
ctgggagtggtcgcgcggaaactctggctcgggattggctgcgggcgcccgccgcggtgcggggggattgctaatctgttttgcggagactcgctcatcagctcgggcagaggcgaggcagcgcggggggcggcggcggtggcggttactacgcccacggcggggtctacctgccgcccgccgccgacctgccctacgggctgcagagctgcgggctcttccccacgctgggcggcaagcgcaatgaggcagcgtcgccgggcagcggtggcggtggcgggggtctaggtcccggggcgcacggctacgggccctcgcccatagacctgtggctagacgcgccccggtcttgccggatggagccgcctgacgggccgccgccgccgccccagcagcagccgccgcccccgccgcaaccaccccagccagcgccgcaggccgccgaactggctcccttcccgcggggcccgccgcccgacggctgcgccctgggcacctccagcggggtgccagtgcctggctctcaggcctacggcaccgccaagggctatggcagcggcggcggcggcgcgcagcaactcggggctggcccgttccccgcgcagcccccggggcgcggtttcgatctcccgcccgcgctagcctccggctcggccgatgcggcccggaaggagcgagccctcgattcgccgccgccccccacgctggcttgcggca

SEQ ID NO: 10846 - DNA, 431 bp, Homo sapiens
  source 1..431: mol_type = other DNA
tgtacacaggctggcagccgctagaggcaagtcagcttctagttcactctgggctcctgacactctgaggatcctgacggccataggggatccagagctgaatgggaagcgcgtgagtccccgacacggccgcttcagacttgttaactgcgcggggcccaagggcccttctaagggaccccggtatggggctcacgtccgggtaggggcggggcgagcccaatggccaggccccccaccagccacgttggggcagcccccacagctcccggccttcgggccaaggtgtcggggtgcgaatatttatataatcgcgggctctgagggcgccctcggagagcggccccgcgcctacgaaaccaaactgggagtggtcgcgcggaaactctggctcgggattggctgcgggcgcccgccgcggtgcgggggga

SEQ ID NO: 10847 - DNA, 544 bp, Homo sapiens
  source 1..544: mol_type = other DNA
gctcacctcaggacaggtaggcctgcagtgggaccgtccgggggcccgtggaggcttcaacaagagggagcctggtctgggttccaaggcagagcagactcccaggagcctctaagggtgctttctgaggctgctttttccctttgggggaaaaaaaaaggatgccgatttcctctttgtttgagggctgaaaggacagagccctttgttgcccaccccaccccaggcagggccagagcagcagatagggggagagaggccccagatgaatgtctaggtccctccttaaagattaaccaaagtctctcaagttgctagagagagtctagccaggaggactgctcgcgggcgggcggcgggcgggcgcgggtttgccacctccggggccggccaatttgcatatttggaatgcgccgctataaacccggctggggttttgcagcgatttcttagatgtaaaaatgagatctcaatagcagagctggtttccgtctctcggctcggggctggaactccggcccaacctaggcgcgcagccgccacg

SEQ ID NO: 10848 - DNA, 536 bp, Homo sapiens
  source 1..536: mol_type = other DNA
caggcttaggaaaccaaggtggttggctacgtggcctggaatataggccctggagagggccttggggcctgaggtggccaacaggtcagaccccaggctgccctcgctcacctcaggacaggtaggcctgcagtgggaccgtccgggggcccgtggaggcttcaacaagagggagcctggtctgggttccaaggcagagcagactcccaggagcctctaagggtgctttctgaggctgctttttccctttgggggaaaaaaaaaggatgccgatttcctctttgtttgagggctgaaaggacagagccctttgttgcccaccccaccccaggcagggccagagcagcagatagggggagagaggccccagatgaatgtctaggtccctccttaaagattaaccaaagtctctcaagttgctagagagagtctagccaggaggactgctcgcgggcgggcggcgggcgggcgcgggtttgccacctccggggccggccaatttgcatatttggaatgcgccgctataaacccggctg

SEQ ID NO: 10849 - DNA, 443 bp, Homo sapiens
  source 1..443: mol_type = other DNA
tatcaggcccctgagggggactgacaggcttaggaaaccaaggtggttggctacgtggcctggaatataggccctggagagggccttggggcctgaggtggccaacaggtcagaccccaggctgccctcgctcacctcaggacaggtaggcctgcagtgggaccgtccgggggcccgtggaggcttcaacaagagggagcctggtctgggttccaaggcagagcagactcccaggagcctctaagggtgctttctgaggctgctttttccctttgggggaaaaaaaaaggatgccgatttcctctttgtttgagggctgaaaggacagagccctttgttgcccaccccaccccaggcagggccagagcagcagatagggggagagaggccccagatgaatgtctaggtccctccttaaagattaaccaaagtctctcaagttg

SEQ ID NO: 10850 - DNA, 386 bp, Homo sapiens
  source 1..386: mol_type = other DNA
cctcagctccagaagaccaggcagatgggtggaccggtgagcagcagggcagcccctgtgcctctgtctctgccgagtcactccgaagcccggcaggcagccgaaggcccttccgggccctgcggatactctggccccgaaggggttccggctagggtcggaggcagaggcgcttcccaggggcatccctcacccacccggggagctgcgggtgggaggtggggacgagagttgagctctcaccgccctctattgagcacaagcatgctgcatgggggcgcaccccagcctctccgcgcgcgccgggaggccccccagggtgagaacaccgtgttgcttcccctgaagcagcttgttgaccagcacctccaaggatggggatagat

SEQ ID NO: 10851 - DNA, 304 bp, Homo sapiens
  source 1..304: mol_type = other DNA
agaagattacttcctttaataactatttttatttttattgttgccaattattagacttcttttttggcccaaaggtggcccaacccgaaggttggctctggtccttgggtctcggtctctacagccgtagctcaatttttggcttccgcgaaaagaaatcctttgcgctcagcggcagatcacgcttaagctaacgtttaccgcagaaggggctctctccctcgcagagcgcaggcttgccactcactgagggagaggcctggattctgggaccccaggagagtctctccagcagggtcttggc

SEQ ID NO: 10852 - DNA, 386 bp, Homo sapiens
  source 1..386: mol_type = other DNA
agccagccatactggcgaggtgggagcaaatgtcctgggaccctgcagaaaccacctcccctccccgcctggttgcgcgggtctgggcccgaagggaaggggggcggagatggggccgccttccttccctgccccacccgccgcctctcccccgggtgaatggtgcgcggccgcgcggctggcgctggggacggcgcgggccgcggcggggacgacgggtgcaccgtgcagagctggagtcggagccgcccgctttgcatacgccgtgggcggagcgggggggccgggccaatgggcggccgcctggcgcgaccccgcggggcgcgatccgcccccctcgctcgggccccggccccgcgccgcgcgctcgggggctttttaaaaca

SEQ ID NO: 10853 - DNA, 434 bp, Homo sapiens
  source 1..434: mol_type = other DNA
ccaaaatttctgattaccacaatcactgtcatagggaatctgagaagagttgctgtaaggctgtcttattagaaatggtcctcatccaggggcttcccacagcctggacttatataggctggcactctcacccaaggagctcgcaggagaactgcttgatgtccagctcagagagcgggcgcatagggcctattggggccgctgctccgggcagagccgcgggatccgagccagcaaggatgctgggactcgccgcgacttccgcctctggcgatcggcagtggggggcgcaccaagacagcagttcgggagctgcgctttgtcaccgaccctcaaggggctccaggcagcacctggggcaaggggagggactgatactcccggccggagcccaacctgtggcgcgtgcttcagtcctgagccagcggctccct

SEQ ID NO: 10854 - DNA, 569 bp, Homo sapiens
  source 1..569: mol_type = other DNA
tctgtctctctgcaccgcggtgtggtggcgcacgcaggcctatagtcccacctcacctactccgcaggagaatggagattgcagtgagccgagatcgcgccactgcactccagcctgggtgacagagagactccgtctaaaaaaggtctttctaatacacatacatatactactactttctggattttatatttagttttgcttacaaaatggatttagggtgtagaattttcaaagattagagaaatatgccttgaaatagaaagtgcaagtttctagtaactcttcccttcaaagataatgttaccaacttcttttcctactatttttagtattgagaaactgttgtgttaagtaaaatcaaatgaatttaaaagttattacacacatggtagcgaggaggcgggagcgagcgacggcccccgcctcccacacgccctcggggcagcgccagggcgcctggccctgtccgtaaagggattgacaggccctgccgcgtcaggccgctcctctcggctccgcgctccttccctcgcgcgtgggcacccgcccccgagcggtgagagcgc

SEQ ID NO: 10855 - DNA, 465 bp, Homo sapiens
  source 1..465: mol_type = other DNA
gtctgtctctctgcaccgcggtgtggtggcgcacgcaggcctatagtcccacctcacctactccgcaggagaatggagattgcagtgagccgagatcgcgccactgcactccagcctgggtgacagagagactccgtctaaaaaaggtctttctaatacacatacatatactactactttctggattttatatttagttttgcttacaaaatggatttagggtgtagaattttcaaagattagagaaatatgccttgaaatagaaagtgcaagtttctagtaactcttcccttcaaagataatgttaccaacttcttttcctactatttttagtattgagaaactgttgtgttaagtaaaatcaaatgaatttaaaagttattacacacatggtagcgaggaggcgggagcgagcgacggcccccgcctcccacacgccctcggggcagcgccagggcgcctggc

SEQ ID NO: 10856 - DNA, 286 bp, Homo sapiens
  source 1..286: mol_type = other DNA
tgtaaatattgagaacctatgttatcaaagctaatgtcttctgaaatagtaaagatgaaagtatatgaaagataattttgaatgttctgtatttagaatgtgcttcaacatttaatgcgatctaatttaatgaattcgaatgggacacatttgcttctgtagaactgaaaagctcctaggagctttcagtgacaaaataataacataaaatcagaatgtaaatccagacgcattgttttgctgcgatttacccgcgggatgaggcgtcccgcggcggagtgggctg

SEQ ID NO: 10857 - DNA, 590 bp, Homo sapiens
  source 1..590: mol_type = other DNA
agttagtggacatagcttacatctaccatgtgcagtaaacacttcctgtgcaaaggtgctggaaacaacatctgtggtttctaataatgagatagtttgaagtgagtttataatgaaaagaaatctgtgtgaaatctatgaacctttttctaagaaaattaaaattgtgtgctcattttcttccttatatgtccttattacataaacattgtttatacatatatttatacagtcatttctctatgtgagaagtttgagaatacatttgaaaaaagtacctttttggtgctgtgctggagaagcaccattataaagcgttgaaccagtatgagaatttctgattgagagtctagaaaagttataataaactcattatacattttaaaaagagaagaactgcccttcagaatatgaatatactcagtaggttttcaaattgatggagctttccaatggaaactaattttttctttcttttatcactgttgatgtttggaattcccttgaaaagtaatgcaatatcttgttatttatgaatgaatgaacaaatgattgtgcttcgccgactcagttttctttaaaaagtggtg

SEQ ID NO: 10858 - DNA, 376 bp, Homo sapiens
  source 1..376: mol_type = other DNA
caggatgaaatcgcttcctttttaaatgaagagtcaatgcactgtcctttctgcagtggctgaaacgaggagcactctattttgaaatttaaataaagctaagatttttttctggcccaaacctccggagaatgtgtactttttctaaagaaggtttaaagaagctgtgaatgtgtcacacctagacaggtgctgagagggaccagggtaactccctgagttctcctcgcgggtgtattaagaacgtcatatacagctcgcaggtgaggcctgggtccgcgcgctgaggttggggccgcacagctgtagccgcgcgccctggtcccagctgcggcgccgccgctcccgacgccgccgccgcagccgccgcctcccc

SEQ ID NO: 10859 - DNA, 458 bp, Homo sapiens
  source 1..458: mol_type = other DNA
tatttctaaaagtgctactggaaaattaattgattctcagcaaaatgctggttttcagggaagctactaaattcaccttaagtggttacctggtcaacattatgctttaaatgctcacaggatgaaatcgcttcctttttaaatgaagagtcaatgcactgtcctttctgcagtggctgaaacgaggagcactctattttgaaatttaaataaagctaagatttttttctggcccaaacctccggagaatgtgtactttttctaaagaaggtttaaagaagctgtgaatgtgtcacacctagacaggtgctgagagggaccagggtaactccctgagttctcctcgcgggtgtattaagaacgtcatatacagctcgcaggtgaggcctgggtccgcgcgctgaggttggggccgcacagctgtagccgcgcgccctggtcccagctgcggcgccgcc

SEQ ID NO: 10860 - DNA, 519 bp, Homo sapiens
  source 1..519: mol_type = other DNA
ccggatactggagacgccaggctcctctcgctgcagaccaggcgcccggatcctgcagtctggccctggctctgccgctccccagcccgtgagcttgggccagttaccgaagaggctctggaagtgacagccaagggccctttcggctgattcacctttcgccttaggagcaactctccctacagcttctcagacgcatgaagcaccataaggaagttattctcctaagagcccacgcccgcgcctcctccgtggtcttgtctgaaaccataaggattgtttccaagctgactcacaccactaatgtcagggagccgtgtcacacggcgctgggctctgcaagctgttgcttgcgcagtcgcccccgccgctgccgctcccgggcgggtgcaccagggtccgcgcgggcggggcggggtcggggcgggaccggggcggggcctgccccctcgacgcgccggccccgcccctcgctcacgtgacgtcaccgggggggtgatgtaatgcactctaaataga

SEQ ID NO: 10861 - DNA, 571 bp, Homo sapiens
  source 1..571: mol_type = other DNA
attaaatttaaaaaagtattaactaaataaagaaaagtttatattgcaaatatgtgggaatttcttgaagaacacatgttttcttataattagatctactttcttccatccttccccaagtctgtggcaggatttagtatttattcacatctagagatgaaatagtgtaacctccacacaatatatgtgcatcgaaaatgttgaacttcttgtttgtgatgcatagatgattaatgatcagtgatttagtgatcagtgattagtggttttattcaaactgttacctctgaccagaagcacttcagaataataagctctattaacagaaagcccttttaatttaaaacttgcttttatcttgtaaatcaaagttagatgtaaaagtttgtagtgccattataacctaaattttgattatctcagtagcgatatttttttttatttaaacaaacaattggacctttaggaaccctgacaagttcttaactcccagggtttgaaagtgtccccccttctagcatggagattgcagcttgctaactagatggctctgctgcgtagcgcaggagta

SEQ ID NO: 10862 - DNA, 182 bp, Homo sapiens
  source 1..182: mol_type = other DNA
gatgtcttcccctttggaaggtacctaggggaagtgactgtgatttcacagcccttggtggctccagacacggtgtcacctggttctgaaccaaagcggttgcagaactccgggtccctcttggagctctctgaagcctggaactcagcctggggttctgccagattgtggtgacttcacta

SEQ ID NO: 10863 - DNA, 409 bp, Homo sapiens
  source 1..409: mol_type = other DNA
gtatttgagccctgctatgaaaccaggcctgaaactgcagctgagtgttgcttttaaaactaattattttgattgcccaaaagatttatgtttactatataaaatttagagacaaaaaaagccatagatttcccaagttaaccatttggtatattatttatttcatagtaagtaaccttggtgattatatttagtggagttacttgaaatagatcgtttagtctatagcttttgtatggatatattattctttacagccatacaaataagcactatttatttacaaaagtggaaatatttggtaattttatttgaaagtgatctgccatgacaatgtagttctctttgaagcactttcttcaaagaaatactaaacgatccattggacagaaaagtgcagctttgtcta

SEQ ID NO: 10864 - DNA, 303 bp, Homo sapiens
  source 1..303: mol_type = other DNA
aaaactagtgctttagttagccttagttgcataaaagtggcttaaaacaatttttactcctgcagctagctgtgagaagattccccgtggcctctcccacccaagcaatgtgaccctggatgggttacttaacctcacttagtttgtgtcccccaattgcaggcacttggtgcgagcttactgctagtgcagctactcgctttccaaatgtaaattgggcttgcaagtaagtcctagagtgcagaaataatttcaaaatacagggttgaaattttaagatagcagcttttaaaaactctaagc

SEQ ID NO: 10865 - DNA, 488 bp, Homo sapiens
  source 1..488: mol_type = other DNA
cttagctgaaattctgtatgttatttctatttccaataaaacaattctttaaaaagaaaaacttattatctccatctttcagatggaaagactgtgggatttaaatccacaaatattccaaagctaatcctacattccaagaataaaagtcttcctatgcgttcctaggcacgttcaaaatagaaggtattttccgcttttaacacatccccaaaacacgcgttgagggagtaagggaaagtgtcctgcacccgccaccctcccgcgctaagcggtacttccccggaggagctcctggagtaggagacggcttctagcctggaagaaccccgggtctgccccgcgctccctaagtccgagggaccgaggcgaggacctgtcccgctgagctggcacgacccacgcagggcaggcggcacttacgcggcgcagtcggtgctcctccctgagccgcggcgcgcaaggaccccagccggttagcggcttag

SEQ ID NO: 10866 - DNA, 355 bp, Homo sapiens
  source 1..355: mol_type = other DNA
ataatttttaaattgactatgttcttttaaccatgttttaaaaagttgaactaccccaatgtgaacactttccatttttgctatataatgagagtactttcattcctttctgcatggtatttcctcccagtgaaattaatttaggtttaaatacaaggcacggagaacctcttcctcagaggcccacggacgcgtcgggcactgtccgtggctgaccacccccactgtctcgctgctcgagagcccggcggggcgcggtgagccccaccaccttcccctaggagcagcgctgcgcgcagcagccgcgctcgccccgcgcccggccccggcctccccagcaccccggggacccggt

SEQ ID NO: 10867 - DNA, 336 bp, Homo sapiens
  source 1..336: mol_type = other DNA
tctgcatggtatttcctcccagtgaaattaatttaggtttaaatacaaggcacggagaacctcttcctcagaggcccacggacgcgtcgggcactgtccgtggctgaccacccccactgtctcgctgctcgagagcccggcggggcgcggtgagccccaccaccttcccctaggagcagcgctgcgcgcagcagccgcgctcgccccgcgcccggccccggcctccccagcaccccggggacccggtcccccgtcccgcgcctccccctccagccccagtggcgggagctgtcaagccccggagggagaagggggaggtcgctctgtctgtccgtc

SEQ ID NO: 10868 - DNA, 434 bp, Homo sapiens
  source 1..434: mol_type = other DNA
cctcagaggcccacggacgcgtcgggcactgtccgtggctgaccacccccactgtctcgctgctcgagagcccggcggggcgcggtgagccccaccaccttcccctaggagcagcgctgcgcgcagcagccgcgctcgccccgcgcccggccccggcctccccagcaccccggggacccggtcccccgtcccgcgcctccccctccagccccagtggcgggagctgtcaagccccggagggagaagggggaggtcgctctgtctgtccgtctcccgccgcctctgcccggtctactcgaagtgcggcgggagaggcgggagctggcggggcggctcggagctgccaggacgccctggtcccagccgcgcacaggggagcgtggacggcagaggggctcggcgggagccgagatccgcccgtcccggctgcccct

SEQ ID NO: 10869 - DNA, 664 bp, Homo sapiens
  source 1..664: mol_type = other DNA
ttacattttttatttttagacctaaaaatagatcagaaagttttgcttatcttattacattttctagaaagactttatcagatctagtctttttaactttttgtagatttattccatttaaaattaattatttcctcttcaggattctgaagagaacatcaactttttttttcaacctgtattttcacagaagtagaatccaaaggtacctgcttaggatagcttttccctttagcagaaataaacagaaatcactcattatgttccgaaaaatcacaaataattgtctgatagattgctttataagtctgtctaatggcttggtgtttcattcactcacagaatcagttatgtctttgttaaaatgccagttcttttcctggtatgtcaagagacatcggcatttaaattcaggaatcctattatatgatcttactactcaggtactcacaagtagaatttcatctttaaaatagtcaaaagaattttagccatatttagtctttatgaaactaaattggccttataagaataaaaaaatcaattttgcaagtttatattcacagtgactaatttccatataaataatctgactttttccagtctaaaaaatgtgttacaatccttgagatgtacttaggtggaaatatttgaaggcacgttg

SEQ ID NO: 10870 - DNA, 400 bp, Homo sapiens
  source 1..400: mol_type = other DNA
gggataacatctcacttgaaaaggtatattcccttaattagtagaaactatgtggtattgttcattgttttagaaaaaaagaactgatagcatcgtgtgttacaacatgtgttctgccagtctgctctgtgactcagagccacaagttttggggtgtaaccagggttatccagattttgctcacctggttaaactgtaagcactgagaggcttggacgtagatttctgaccttgattctgcttttgtggatgatgcaatctcagacagcctcaattttaatatgactatgctgaatgatattacctaattatttacttgttgtcagtcttttaatagaaatgacagctatcacatgtgccctggcttcaggcccaccacaatcccatggggcatccctct

SEQ ID NO: 10871 - DNA, 494 bp, Homo sapiens
  source 1..494: mol_type = other DNA
gcgtaaattattgtgctcaatagcttaacgtaattgaaccaagttaaaatcatggtgtttaccaggaataaagaattacacatgggaaggagtgatctttggtgggcccttggactgcccatctacataaaggcccagttatctagatcttgttttctgtcaggagtactcccaagacctgaacactgaagatgttttatttaaaagaaaagcaattatgatgttttgattttacctgaggcaagacatcctgccttgcaactttgcagaactcagagtggaaaagctttgctctcctctgataatgtaatgcatgcataagaataaaaattaagctttcaagtgctaaggcagatttttaataaagagacataggctttacccctataagattaaacagtcatcagggtttaaaggtttaatctgttggagctcagcccaggatggggttcagagccccagattaattggatgcagcctcagactttgaacgt

SEQ ID NO: 10872 - DNA, 467 bp, Homo sapiens
  source 1..467: mol_type = other DNA
gtcaggagtactcccaagacctgaacactgaagatgttttatttaaaagaaaagcaattatgatgttttgattttacctgaggcaagacatcctgccttgcaactttgcagaactcagagtggaaaagctttgctctcctctgataatgtaatgcatgcataagaataaaaattaagctttcaagtgctaaggcagatttttaataaagagacataggctttacccctataagattaaacagtcatcagggtttaaaggtttaatctgttggagctcagcccaggatggggttcagagccccagattaattggatgcagcctcagactttgaacgtctctcctttgcaagtgctgcggcaggagaaagcaggctgccggcccctgcctccctgaatcctcagtgggcgcaacatgccggaggctgctgcagacaggacccagctgcctcaaatctgccgcctaacgc

SEQ ID NO: 10873 - DNA, 356 bp, Homo sapiens
  source 1..356: mol_type = other DNA
agctggggaaacggggtttcaccgtgttagccaagatggtctcgatctcctgacctcgtgatctttacattaccccaggtaaaaagccctttcctttgctgttgggaacagtcactgcctttgcttctcaaacaaagcttgtctaagcaaagtaaaattcggctctgagaacaaaagctttgggaaccaaagcaataattgtatacttttcaacactgtgtgctgatgcaatctttgcttatttaaagcctggaaaattaacagactcctctctaaaatgaaaactgtttgtcaagagaaaaaccactcggttatttaaagggccaaccccagaggcccggcagtcggcttgctcg

SEQ ID NO: 10874 - DNA, 559 bp, Homo sapiens
  source 1..559: mol_type = other DNA
tggctgtttaacttgaaattaattaaaaatttggttccttgttgaactagccacatttcaagtaccagatagcccatccggctggtggctactgagatagagactatttctatcatctcagagaaaaagtagcagatatttttttatactctgcccacaaaaatgtaccagctacatgatacctttacattattaaactaatcagttggaaaatacagagaacataaatgtatagtacaaactacagataaatgcactttaaaatactcttaacaaggacttcttaggaaatgtcagacctggcaagaatcctaatgggtatttgccacaaagaagccttattttaagttttttccttaagactcacagtaagaaatgttacataacatagtacctatagacgcttatatgtgcatgtgtatggacctaaacttaaaattagagtttctggcattagtacttacccttactgtatgagatgcatacatgctttctaaaaatgcttttctgaaaaaacttgttcctatccactaaattgatttctgttttaggcctatag

SEQ ID NO: 10875 - DNA, 368 bp, Homo sapiens
  source 1..368: mol_type = other DNA
cgcagtggcgggcgcctgtagtcccagctactcgggaggcgcttgccgtgagccgagatcgcgccactgcagtccagcctcggcgactgagcgagactatccccggttcacttcctgcaggggtgtccatggacttccaggcctgcctcactgagtcgtgttaagagtctcagactgggagtcaggccccctgggttccaacacaggcaaacctgagcaaccattttcccgtgctagggtttcctcgagtgagaataaacttgggatcccgggacccggagggacagctgctgcggcaacttttacccagcgtcctcccctggagggtgggaacgcgaagttcctacctgcacctgtggcagcggtga

SEQ ID NO: 10876 - DNA, 471 bp, Homo sapiens
  source 1..471: mol_type = other DNA
cgagatcctgccactgcattacaaagcaagactcaaaatgttttgatttttgttaatctttttcttatttacttataaaagatggataactttattaacccagatatggaatcttggcttagttgtgaccttgggcaagttacttaacctctctaggccacaatgtccaagtacctgggacagggtctgcacatttctctccggggaaatcttgtgtgggcgccgaggcccggacgtagcaaccaatgggcctggctccttgaagcccgggttttcccttttgagagccagagggggccactttctgcggcgccctactcgacggtgagcagcgccgcggcccgtgcagccagacgcgcggggtgcggcggggccccgggggccggggtgggggcccgcggtcacgtgagtcgggccagctgctgcggggggcggcgggccccagcgccgggagtctgggtagggggaagc

SEQ ID NO: 10877 - DNA, 506 bp, Homo sapiens
  source 1..506: mol_type = other DNA
tctttttctttaaagttgcctgatttagtaaataaaaatgcaaaaccattattcgttatgtatctgaaataatttcttccaaaatgacttcaatgaacatgcattacttttgaacttaggcaaaaaatgtaatgattaccatttcttctttaaatcattatttaccctgtaaggtaacttaagggataaattataatgaatcagacctggtttgaaggcagagctcatttgcttcggggccaaaacagttaatatctcctggtgtaaatttacttctcttttaaatgggaaaaaagaagtctttacagtttataagcaatagcaaaatcctaggattgtggcatcttgggccgaagatttcatagggccccgggactctctcagcagggttcttcacagagataaatcagccggaggagtttcgttgaatgctgaaatcgcttggcagctgcccggctctaccgtgggaggctgctattcccaggcggccgcgttataagagccag

SEQ ID NO: 10878 - DNA, 351 bp, Homo sapiens
  source 1..351: mol_type = other DNA
tacattttttgcctaagttcaaaagtaatgcatgttcattgaagtcattttggaagaaattatttcagatacataacgaataatggttttgcatttttatttactaaatcaggcaactttaaagaaaaagattaatattttggtgcatgcttctgtgacatatacttaaagcgatttaaatcgtcactctatgtgcataggaatccccctgaagatcttgtttaaaatgcagattttgatctgggttcccgcaaactccgccccgccgccgctgccgcgaaatcccggagtggattttgggaaggggcgcgcgagcggcgccctgggcatgcgcgagcgcgtcccgggccc

SEQ ID NO: 10879 - DNA, 450 bp, Homo sapiens
  source 1..450: mol_type = other DNA
ttaatattttggtgcatgcttctgtgacatatacttaaagcgatttaaatcgtcactctatgtgcataggaatccccctgaagatcttgtttaaaatgcagattttgatctgggttcccgcaaactccgccccgccgccgctgccgcgaaatcccggagtggattttgggaaggggcgcgcgagcggcgccctgggcatgcgcgagcgcgtcccgggcccggcgagtcgagggttcaggtggtgcgccgtggcgccgcctgcgaccggcagctcgttcgccgcactttggaggcttcggctgcccctccgacccacgtagggcccggacccgggcctccttgtgaacagcgtgccggcttcgccccacggctggctgggcttcaagcgccgaggccgccgcagtgaccccgcccccgggccgaggatgtgaggcgggccgggcgtcccca

SEQ ID NO: 10880 - DNA, 361 bp, Homo sapiens
  source 1..361: mol_type = other DNA
attcgtgcacagtgcctggttcagaagacacactttacagaaaaaagaccctagtgcattttctgcaatccagtaatgcctgtccagtatatggcagccagtgagcactcaaaattcaagctgaataatactgaagccagtcttatgaggctcatttctaagaaatattcagctttacgtaaaatacattcatattagtgtctgataaatgcattaagaagacaacagaactttggtttctgcaaaaagaaaagctcccttttcctttcgcaccgcttccaggtaacccgcggagctgcggattccaggctcgcgctgtgacgtcaccgggctcgcaagccgcggcgcggtctcaggctcc

SEQ ID NO: 10881 - DNA, 668 bp, Homo sapiens
  source 1..668: mol_type = other DNA
ctgcaatccagtaatgcctgtccagtatatggcagccagtgagcactcaaaattcaagctgaataatactgaagccagtcttatgaggctcatttctaagaaatattcagctttacgtaaaatacattcatattagtgtctgataaatgcattaagaagacaacagaactttggtttctgcaaaaagaaaagctcccttttcctttcgcaccgcttccaggtaacccgcggagctgcggattccaggctcgcgctgtgacgtcaccgggctcgcaagccgcggcgcggtctcaggctccggtgattggctggggcccatgacgtcacggcccggggcggcaccgcgatggccagggccccgggatgctccgggtttgtttaaaaataaagggggggcgggagcgcccaggaaaatccgggcgcccgcgggggtgccggccgctcctcccgccgccccgcgtcccggcccggccgcgccaacccccacggcggcccgcaagggggcggggggaggcggggcggaggaggagccgcgggcgcggcgccgcgctgtccccggccgccgcccgccccactccgcgtcccagccggcccagcccggccccggaggagcccgcgcaggccgagccgagcgccgcgctgcccgcccgggaggagggcgcctagga

SEQ ID NO: 10882 - DNA, 615 bp, Homo sapiens
  source 1..615: mol_type = other DNA
attcgtgcacagtgcctggttcagaagacacactttacagaaaaaagaccctagtgcattttctgcaatccagtaatgcctgtccagtatatggcagccagtgagcactcaaaattcaagctgaataatactgaagccagtcttatgaggctcatttctaagaaatattcagctttacgtaaaatacattcatattagtgtctgataaatgcattaagaagacaacagaactttggtttctgcaaaaagaaaagctcccttttcctttcgcaccgcttccaggtaacccgcggagctgcggattccaggctcgcgctgtgacgtcaccgggctcgcaagccgcggcgcggtctcaggctccggtgattggctggggcccatgacgtcacggcccggggcggcaccgcgatggccagggccccgggatgctccgggtttgtttaaaaataaagggggggcgggagcgcccaggaaaatccgggcgcccgcgggggtgccggccgctcctcccgccgccccgcgtcccggcccggccgcgccaacccccacggcggcccgcaagggggcggggggaggcggggcggaggaggagccgcgggcgcggcgccgcgctgt

SEQ ID NO: 10883 - DNA, 431 bp, Homo sapiens
  source 1..431: mol_type = other DNA
cctggatccgtccccactaaagagtgattcttggtacctgacagatactctgtgcttagatatgcagggcagggtattctgcattaagaatgctcaaacctatttcttggccttgttccaggtctttgaacatggatcgagaccagcctgggcgcacctgtagttccacctacttgggtggccaagatgggagggggttgcagtgagttaagatcatgccactgcactccagcctggaaccgatctcctcttagtatgtgttgatgtccttttaaagcattttagggaattttcagaaagccttgcatttggaagtaaatttacctgggtaaagaatgtcttgttccaagttaatgcttacaaactatgcttaattaatctttcagccgtagctgaaagcaaagttaaggattttgaaggcaaaggctctg

SEQ ID NO: 10884 - DNA, 539 bp, Homo sapiens
  source 1..539: mol_type = other DNA
tgactgagcgagactccgtctaaaagtaaaataatttgctcactacagataatttagtttggtggggtcaacctggattatcccgagttctttttaatcagtgtgtaacaccaacctgccaggaaaagctgcagctgacacaggctcctacagcgtcggcgggccacgtgcgggaggaggggccgccttctggttggcgcccggcgttcctcctatcggcgtaggccccgcgaggaagacaagggcgcgccctggctgggagggcgtggccagagacctgtccatcaccgcaccttggcgagccggcgggagccaatcggcctggcggcacgagggggcgggggcggggtcaacgcgcgcgacccaaacacacgggccgggcgcaccctgcagccgcgccgctccgcggccttccggcgcggggccggggaacctcctccccatctgcgcccgccagcccggcccctccttcgcagggggagcgaggcgacggttgccgggaagcgcgcgccacctctccctcaaggtggccccggcgg

SEQ ID NO: 10885 - DNA, 465 bp, Homo sapiens
  source 1..465: mol_type = other DNA
acagtgagcttatgggatatgtggagcatacatctcatctcatagctgaaatgcatatgtctgttggtcttcaacaaccatatgagtgttatatttgttttcgaatatagaacctgaatttgaaactactcagaaatctgaaccaatggttaagagtttatagacatggaatatcttttatcaagtgataaattcttgtataccttttaatagtcctagattaaagttcagtgttgttaaaacattttgtaaggcactgtgtataacgttctgatatccttcagcataagaatttaataatcaacccaaaaacatgaatatttgaatatttatcactgattttatgagttttcagaatagtaagtaagggtatgaagacttacagtaactaaagttcatggggaaatctatttttacacaggttttcttgtcttgacaagatgcttgaaaaaatctgagttttgt

SEQ ID NO: 10886 - DNA, 713 bp, Homo sapiens
  source 1..713: mol_type = other DNA
ccacagaactcagtgacacacagggattttgaaaatgctgcacatcccttaatagtcatctacataggtaatactgataaacattttgtattcagacgccaaagttaactgatttaaaagttgatttactttttattaagttctccagagctgcacaactagttcataatgtcataatgcattcatctgttcttaaattgaaaaacatataatttacttcttataaattgaagtcttaaatgtgaaaccactgaatgtagaccatgatctcaagttcttcattttctcccccacgagtggaaaatagacttctacataggaaagctaaaatatgttaatatttttaaattaaaggtttaatatcagaatgcagcaaatcatattacataattacattttaattaaatatagaatattctactgaattgcaatttattaaatattcttatcctcttaaataaaactgctcaacagttaatcagcagtgaatcatcttgcagctatgcaatttaaaaaaaataaccaatttcaagtgctgccagctaaaataactgttttaacgggtatctgggtaaaatgtttagcaggctgtaaacttaagaaaagggtaaaataaaattttctggagaacttggaatttgagggagattttatatacctttaaaaactgtaatttaattgggatgccaggtttatagcaatttgcaacttta

SEQ ID NO: 10887 - DNA, 608 bp, Homo sapiens
  source 1..608: mol_type = other DNA
aggcaggaaccagcatgtatacatgcaggcttgggctagacatttgatcctatcaactttagttacagcctctgatgggaattttaatactcacaagcaagtaagtgacaactttctatatccccattcaaaacgttttaaaactattttattggggacatttattagcatgttaaaactcttttacaacctattagagcatatgcatagaacataaaatgtacaatttaaggataggaagaaaagcttacattttttaaaaagtataaattgaaatgtatgcagtgtaatttaaatttgattacgttaacctccattattcccaagtgtgtcacctctgggcgaacttgggcctgtccactcggccctgcgcggtggccaggggctcaccctctcgcaccgggcgtccctctgcgcgcagcttctctcgcccccccgcgccagacccgggcgaatggcagcaccgtgggaccctgccttgaccgcccccgcccttcggcggcctctcccagcagccggcaggctcttgggcgcgccaacagaggggcgcggctgcggctgtagtcgcagccagttcccgttccgggcccgcgaggcagccgccccgg

SEQ ID NO: 10888 - DNA, 504 bp, Homo sapiens
  source 1..504: mol_type = other DNA
gaggaaagaagttaaactagaaacctaatttcattacttattagttccaagaccttaggaagattgcttaatctttctaactgctgtaaaatgggtataatgttagcaaaataaaacggaatggtccataattatatattagccaatagcactgtgcttatgattattgtagataaattagtataattcgtgagtattagtgttcataagtacacaaatcattcatgtaggatactctacagacataatctctaagtaaaaatttatgtgtatgttgaaaacaattgtgtttttgttaagatgtctatacatattcagtgtatgtttcatttttaaagaaaaatatttaaaaaacgtaatccttatgcatagaaggaactcagtttattgactgttttaattgcatggagttcaaggtaaatccttattattcaagtggatattgatcatatcactttgatttcttttaagcttgactttggcaattcccaaggcaaaacaagt

SEQ ID NO: 10889 - DNA, 356 bp, Homo sapiens
  source 1..356: mol_type = other DNA
cttatgttcattcaaaagttaacaatataggttttaaaaaatacacccaggatgtgtgtgtgtgaaacacaatataggggtttctactgtgaccctaacttatattatgatcccgatttttaaaaagaggaagtaaatggcagcgtcgggatttaagcccaggcatgtaacttccatgtaacagggaagggaggaaccagcagaaagggtgaacggacccgtcctgcccgactcctctaggccaggaaggcaggacccggcgagctgtgacccccgacccgcctgtgaggagtgcctgtccacccctcaatcagaggaagaccggcagccaatcaggagagcgctcgctcctgact

SEQ ID NO: 10890 - DNA, 378 bp, Homo sapiens
  source 1..378: mol_type = other DNA
acattattgatctaaggaattttttagaaataaaatagttttattcaaaggatatagaatttcaacattttaataaaaatctaaataaaaataaaagtaaaacttaaaatgatttttcacatttaaagatattaaaataaattcaaaattgcctagtaaaataaaagccaaataaattataattaatatcaaatcttgaaataaaagtgtttaaaaatataattgttcaatattgcagaaggttcttaaaaaggagacttcattatactgggtgactcccctgagcagtgtaggggagtctgctgtttttataaccaacggccctccacggggcctaaccaaatcctgctcgccccgcaagggcagattggaatttac

SEQ ID NO: 10891 - DNA, 319 bp, Homo sapiens
  source 1..319: mol_type = other DNA
actcccctgagcagtgtaggggagtctgctgtttttataaccaacggccctccacggggcctaaccaaatcctgctcgccccgcaagggcagattggaatttacacatctgcacttgagcaacagggcgggcgcgaaagaacaggctcagagctgtgtccctgaacatccaccctgaaccggagaaaaccttcggcggggtccttccgggttttgtgtcgaatctgcggcggcgacccggcgccgcgtcacgcggtggtgaatgtgcggcagcacgcgcgccgcgtcgtttacgcggcgatttcatcatgctccgagcc

SEQ ID NO: 10892 - DNA, 550 bp, Homo sapiens
  source 1..550: mol_type = other DNA
tctggggaggtttccagctcctccacacctgctgtggccgcccctgccccgctactggtgtggaaaccagggtcaggtgaagccctgcccaagccttgaggaagagagacacattctcacttcttccacaactgggtaaagccagcatctgattaaatggcccactcaagcaggagccacttgatctcattagacccagaggctatggaggcttttggaggatgcagatctgcccatgctccctccagtgtcctcgctcagggaggggaagctcaggcggaaagctgccgaacttttccctcgattagcagagctgcggtgttctcctcgggcaggcgggcaggtgggcgcgctttgctgccccctgcagctcgggggcctgcgatccccgcagcccaccgccctcctctggacgccgcgagtggaagagagctggggcccgggggctggagactgagcccctccgagaggagccgcccggccccgccccccggcgcagccattggccgcggcggagcggctgtacccgcagctccgtgcactcggcggc

SEQ ID NO: 10893 - DNA, 419 bp, Homo sapiens
  source 1..419: mol_type = other DNA
gtctcataactcagaaccagagagtctcagagctgagttcactgatgatcctgcctggggtaccatggcagctggcagacacagcaggcccgccctgggcactctgagggtgcagccacagcatctggggaggtttccagctcctccacacctgctgtggccgcccctgccccgctactggtgtggaaaccagggtcaggtgaagccctgcccaagccttgaggaagagagacacattctcacttcttccacaactgggtaaagccagcatctgattaaatggcccactcaagcaggagccacttgatctcattagacccagaggctatggaggcttttggaggatgcagatctgcccatgctccctccagtgtcctcgctcagggaggggaagctcaggcggaaagctgccgaacttt

SEQ ID NO: 10894 - DNA, 364 bp, Homo sapiens
  source 1..364: mol_type = other DNA
gctgggggagcttctggggccctgccccccccatggctcaggagctctgtgccagctgaagagcacagccccgtgcagtggggtggagcaagttcagtcctgaccttgcacagccaggcctctggggcccccagaaggccaagggcccctgccctgggacaaggattgctaggtggggtctcaaccctgagcaaggggctcagaccggtgtgaccaagcttggaaggccaagttggaatgttggaagtcatgcttcattccagcttccaggtgaccctggattcactcctggaagaaacccatccaggaagggctggacttccaggggaggcttccagctcccagtcagcctgaaacttaaagg

SEQ ID NO: 10895 - DNA, 424 bp, Homo sapiens
  source 1..424: mol_type = other DNA
cactttcagggcaagaggcctgatagtgccaaaaacagagactgagcttttttctgtctgtggcccttgttctcattcatggagattgacgacaatgttctccagcagggatgggggatgcatgaagctgcacccactgcctggcctagagagagccactgggccccagtgatcaggtcacaacacctgtgacttagaggagtgactttggtccttacagtcaacataggtctgacacctacttggaggccacagagcagcatgtggctgccagggctgagagttgcacccagggctgggcaccatcaattgcctttgacggacatgggttggtccctagaggcagcagggccagggcggctgcagccccagctgtcatagctctggggttggggaaacctctgccttctgcatccccctagaa

SEQ ID NO: 10896 - DNA, 470 bp, Homo sapiens
  source 1..470: mol_type = other DNA
tgtcaccaatgctgccaacaatggggtctgcttcattgtggctcgcaagaagcctgggccctgagccaggagggccagccagaggtctggtcaggctggaatggatactgtctaacagtctcaacattccatcttctgaaattctgagattctaacatccttgttttagaattctaagtttccaacattcctcattctaggatcctaggagtggaattttccattttctaatatcaatacctaatatgttaaggacaaggaaacctctgagtctacctaatatgttaaggacaaggaaacctccggagtctggctctgtcacccaggctagagtgcaatggcacgaccgagtagctgggacgcccaggctggagtgcagtggcgcgatctcgactagcctcccgtgtagctgggactacaggggtctcgatctcctgacctggtgatccacccacctcaaagtgctggga

SEQ ID NO: 10897 - DNA, 360 bp, Homo sapiens
  source 1..360: mol_type = other DNA
gtctttatggtgttccacatggtctgtggtactttgtatggcagcccaagcaattggatgctgggcttccttgcccccaccgtcaaggcccgccaaggtcagtagcgttggtggccccagagttccctgtgagtttagtcctccagaaacaaggaggcaggcttgtcctaggcctctcagatgaccagggccagggtcagagtgaggccccgagtccggagccgtggacggggccctaggcgacaccagggcgccctgactgcggcctcccactccgagacgcgagtttgcgggcttccctcccgccccagcccgccagccccagggaaggggaggagttcttgccgcgccgacgccgcc

SEQ ID NO: 10898 - DNA, 293 bp, Homo sapiens
  source 1..293: mol_type = other DNA
atttggatatttcaattgactcctctagaattccttcatttcaaaatatgtaagtgggcacagggcaaatacgcataggagtagtgagcgtttgctgagtcttgttggggagaagtactcaaaatttataattttttttttaattttggaaaggaagtgggtttgtggtagcactgaatattcacactttaaaaagactgtaagcacaggattttaaaaaacctttcattttcagaggttttgggctggagtacagtagtgtgatctcggccccagcctgcagcttgccacag

SEQ ID NO: 10899 - DNA, 186 bp, Homo sapiens
  source 1..186: mol_type = other DNA
ctggagtacagtagtgtgatctcggccccagcctgcagcttgccacaggtgacacttggtaggtggtgatgcagactggagcgacggcttcacctgctgcatgcccaggcctgctctgaggttccagcaggcagctccttaaataataggcaagatccatctgcccagcaaacggctgcccccatg

SEQ ID NO: 10900 - DNA, 376 bp, Homo sapiens
  source 1..376: mol_type = other DNA
tgggagctcccagggcgggggctttctaacagctctgcctagctcgggcctgccctcaaccgcagcatgcagggcagcgtgcccccatccacagagccctggctctgggggactggggactcactgcccctctggagccctgggcccggggactccaggccagtgcctctgcaggatcatggtacctgcctccagggagggcaacgtccaccccgccctcaggaactccctgagctttgcacagggctcctgcctgcctccttgggctgggcagggctgagggcggagggccgacagcacagccgtgtctgcatccatccagaggaggtcgggccaggagcgaagagaggccttcctccctttgtgctcccccagg

SEQ ID NO: 10901 - DNA, 360 bp, Homo sapiens
  source 1..360: mol_type = other DNA
ctaactctgggcaggcttctgccagcagctgcctctttggcccaaccttgggacagaaagggaactggcattggccagagggctggcggacctaagggatgtagccctggggtccgccaggaaaggcccacattccctgtaacccaggctgggaaaacctccaaggtgtgcccccctaccttggattttgcaaaattctctatggccttggagacactcccatatcctgtgcaccagccctgcctgggagaaggcagcctaagtggcctgggcattgcacttagcccctgggacggccacaaagcataggggcttcctggggaggggtcctccgggggcagctgcatggggagggccttc

SEQ ID NO: 10902 - DNA, 397 bp, Homo sapiens
  source 1..397: mol_type = other DNA
ctcagagaggctgagccacttacccaagctcacagagctgtggcggagccccgctgaccctcccaggcctgggcggtaggggcaggctttctagacggggatgacagggggctgagggctccacctcagcgcccccgacccccgccgctgggatttcccgccgcagctcctgctccagtctgtgctgcgggtggggtcgggttgagcagcccggcgccccccaccgcgccccccaccggcagcaccccctccccagcctgtgaagtgagcagggggaggcggtggtcggtcgcctccctccagcgcccagcctggcttcgcggcggaggcggcgcctctcccgcaggacggagccaagctggactgccgcgccgcgcggggcgggcaaagggggcgc

SEQ ID NO: 10903 - DNA, 316 bp, Homo sapiens
  source 1..316: mol_type = other DNA
ctttgattagacaaacacctaagtgataatttttatgtttattgtgtctgaactttctgcagaggacaaagtatgtagtttgaaatccttaacacttgcagtgtctctgcaaaagttggtgaaagataccagacacaaatcttagtttggttaaacgtcttaagatttccctgggtacccaggtgcacaaatgggatggtgatctttacaaaacaacgcagttcgaggagaaatgcacctactgtacgtgaaatgctggtgatgaaggctggtagagagaggatcacatggctctctctgccatgggtaccagctc

SEQ ID NO: 10904 - DNA, 346 bp, Homo sapiens
  source 1..346: mol_type = other DNA
accgttctaaagtattgaacatccttttgaattgtgaaaggaatattaatgtgcagtaatgacagccttaacatttaatgtattttaatgattctaattatttggaagttggtaatcagtgtcttcactcaagctaggtcatttgattaaccagacttacaaacaatatgctgcattcagacactaaagtgtagaatcattataatacttattattttctatagtctatgttggcattatcccctgggagagggctggggagaggaaagcaatttgttcatcttcacatctcctttttccatcttttcagtccctttggatgaggaaaacaggtttttccttagga

SEQ ID NO: 10905 - DNA, 306 bp, Homo sapiens
  source 1..306: mol_type = other DNA
ggagttcaactataacctataagcttcaccatgtggggagtggtcagatgatttggcccagcttcctcaataaaatgggatggtagccttacataaatgttagcagttcctcatgatagtactttgagaagcagcaatagtgattgaaagtactctggatttaaacttaaatagctttgagagtcgatatttacaaaatcaggccaatactgtacttttgtaatgtacaatttctccccttgccctggtgcctgtgaaacagagcatccccatggcaacagcagcagctggtccctagataagagg

SEQ ID NO: 10906 - DNA, 483 bp, Homo sapiens
  source 1..483: mol_type = other DNA
tattgacattgttcatgaactagggcttgagtatattgatctgaagaaacttactctccttttcttccgcacaagagagagtgaggctgtgggggacctccaggcccaacctccgcgaagcctcgcggcttctgcgtgccctggccccgggaggataaggaccccgcgttgaggtgagggttccggaagcccacgcagctccgcaggtcggtggtggccgcggctgccctgcgggggtgagtgtgcccggccggggtcggagcccagcgtgtgcccggcagacggcggtgcccgcgcgcccctccctccgcgcccgcggtgacagcccagacaccagcccgggcgctgacagacgacttttctcacttgtcagttttctcgcttgtcagcagagctgctccggagtgagcggggcgctgggcgcggggcggagccgggtgcgcggcgtccgggtcaggccccaccgcccgcgccggctcccgc

SEQ ID NO: 10907 - DNA, 331 bp, Homo sapiens
  source 1..331: mol_type = other DNA
atattgacattgttcatgaactagggcttgagtatattgatctgaagaaacttactctccttttcttccgcacaagagagagtgaggctgtgggggacctccaggcccaacctccgcgaagcctcgcggcttctgcgtgccctggccccgggaggataaggaccccgcgttgaggtgagggttccggaagcccacgcagctccgcaggtcggtggtggccgcggctgccctgcgggggtgagtgtgcccggccggggtcggagcccagcgtgtgcccggcagacggcggtgcccgcgcgcccctccctccgcgcccgcggtgacagcccag

SEQ ID NO: 10908 - DNA, 290 bp, Homo sapiens
  source 1..290: mol_type = other DNA
aactccatgttaaaatattgcttaatgttaccattgcctagtaataataccttaactcagtgaaaatataaaccttaaaaggctgcctttaatggggcgacttcagatttacctggcaggtgagtaggtaagtcgttttttgttaaggtcaggtgaatggaactttacttgagcagtgaagagggaagcaggtaatcatctaatagatatattgacattgttcatgaactagggcttgagtatattgatctgaagaaacttactctccttttcttccgcacaagagagag

SEQ ID NO: 10909 - DNA, 462 bp, Homo sapiens
  source 1..462: mol_type = other DNA
tctagaaagaggagtcccgctgaactctggcttcccgtcttgggcgcccccagggctggctggcgcctcccagcttgctctcccgcggagaactagcggagctcttagccgccaacaggaaagtgggggaccaagcttttggcctcaggtggtgcagctatatagcagactgttaggcgggcgcggacaccgcccgcattaccctccgttccggtcccccgcgggtgggcgcgcagccttcgctgcagcccgcagggtcagaggcggagcagacagctgggggcgccccggcaccaggagggagtaagccttcggcaggcgagggccgtggattcctcggggagccagggccgctcacctgggtccggcccggcccgctgagatgggctcggtctcctccgcgctggcgcggtcccgcaaagccgtagtgcagtcgggctcgttgccaccgcagcctgaggc

SEQ ID NO: 10910 - DNA, 393 bp, Homo sapiens
  source 1..393: mol_type = other DNA
gctctgcccgagtagctgggacttggtctcgaactcctgacctcaggtgatccgcccggtttcctaggatacaaatataaaacagactagggccgatactttgctgttttcaacacagaagtggaaagcatgatttaaagtagtaaaaagtttaaaaaacatatcttaaatcctcactaaagaaaaattttaaaaaatgctagttgcagattttcaatccactggactttaaaaagaaacaatagattccttaatgagtagttgtaacgaaaattgtaacagttaattgatgcaggaaatacgaattaatgtccagtgggcaggaaatatttcaccggctagatcgtgcgctcggcgcggaaaaagcggaagcgcgcttttcaaagtcgtccc

SEQ ID NO: 10911 - DNA, 390 bp, Homo sapiens
  source 1..390: mol_type = other DNA
ctcccattataggctcaaccatttttcaggggccgggggcgaacgcccgaacggctgggggcgggggcgggccctttcctcacctggcagcccgtggtgaaatcgcacgatgtgcagtacgggcccccgggggacgccatccccgcctctcctggccttctccatgggcggccgccgcgggcccgcacgacgacttcgaccgccaagaccccaccgtgtgcggaaagccgcggacttcgggtgtcagcgagctcggtggaggcaaagcagctcccgccgcccccagggccacggccgccctgcagcttccgggctgtcacctgacacggcggccgccgccggcgaggcagggctgggcaaggccgggagggccctgacggggcggggtct

SEQ ID NO: 10912 - DNA, 455 bp, Homo sapiens
  source 1..455: mol_type = other DNA
atcacagttactgtagtaatctcgaattctatacacctatcctttaggttatttgaaaactgtcctagataagacttgttaaatcttttctataatgcactttaaattgacatgagattcactgcttaaaaaagaattgtagtacaatcagccctggtgacaacagagcccatatattttgtattgaccagagtactacacccaaaatgagaatgaaaagaatattcttataaaatcgcaggactagaataatcattttacacgtatccaagtaaacttcctttgttgtcaaggatatctcagattcctacacataatatttaaattctctgccacgccgcacctccaggtcccgcggacaccacaggctctgcaagcccagccgcccgggtagaccccgccccgtcagggccctcccggccttgcccagccctgcctcgccggcggcggccgcc

SEQ ID NO: 10913 - DNA, 529 bp, Homo sapiens
  source 1..529: mol_type = other DNA
gcataggctcgtgggagaggaccctcacggtgccttaaaacttttgcctagacaagtgtcacgggagccgacagtgtctcgtactgtcgccagggctggtgtgcagtggcgcgatctcggctcgctgcaacctccgcctcccgggttccagcgatttcccgagtagctgggagttggccaggatggtctcccttggcctcccaaagcgttgggagccttccttttcctttaagcagtattaaaaaaaaaaaaaaaaagtcctgaaggatggtttcggtctctttcaaggtagaccatacccttgtaactaagcttaaaaaattaaaatctaattttccctccctctcccccctcaccaaacccggtgtctccagggacgggcggagaccagcgggtgggctttgggccaaagccttgtccggagaaagccccgctgcggcacgcacattcccaatgccgggcggggcagggcgcagcaggcccgccctcggcgcgcggccaggctgggctcctcccctggagctgcggc

SEQ ID NO: 10914 - DNA, 550 bp, Homo sapiens
  source 1..550: mol_type = other DNA
tgtatttcaggaacaattggtgttttgggcctctccatccgcccgtctaggcccaaggcctcggccgccgcggctactcggagtgcccctctgccgcgcacgcgcccctcaagggctctcccatgtcccgggaactttccggtggcatccggcagtgccgctggtgccgacaggcgcgcgcgcgcgcgaggcgggagggcggcgtggcgagggcgggcgcggcaggctggccagcggtccattgcgcgcgcgttcccgggccgcgggcgggggcgagagcgcgcggcgggggcgggggcgggggcggcgggggcggcgggcccggcgtctcgcggccccggactgacaaggcggcgcgggcgggcgggcggcgcggctcccgggggaggagtctggcggtggtcgggccctgaggagcgtgcggcggcgcccgcagaggacgctgctttccgcgctggacggaccggaagaggcggcggcgccagccttcctcggccggaggcggaggcgagaccccaggcgaggccgcggcgggagggccacgcccccg

SEQ ID NO: 10915 - DNA, 534 bp, Homo sapiens
  source 1..534: mol_type = other DNA
ataaaggtccacacatggcataacttatctatcaggtcctgacacatggtattagcatattgccaactactcaggttaaaagcaagactagttctcttttaaaaaaaaaaatttttttttcttcatgacagttggtatttttaacaggcaggaactttttccccccatttttaaaaacagaaattaatttttattttcagattttatggctggtcttattaaaagtataagaaaatataaaaattactttaaatcccacttttaaagactattaatcttttttttaatagtggtaaaatatacataatataaatcgtaccatttaaaccatttttaagcatttcatttggaatctttttaactttgtattaaaatagaatatacagaaaagttcacatcacataacttcaattgataatgttatgtagattgacttgtgactagctcagagctagcgaggctgtaaagtactgtgcagcagtgcgtcacaaggtttttgcatagggcttagtcaaggcttttggaaccgctcag

SEQ ID NO: 10916 - DNA, 441 bp, Homo sapiens
  source 1..441: mol_type = other DNA
atactgagtctgtgttcccaggcttaagtcctcaaacttggccgagtaataaaactaaccatgatttctttaagttttagtatcaatttaatttgtactagaaggaaacaatttttcctcccctacaactattaaccccgcggctgcggcggaagggacaccgcccctcactgcgcaggtcacaccgtgccgcgcagccttctgggggtcggagtccagaggggctgaggcgcgaaggcggagaccgacttcttagcgggccgcagttggaattagatttctactgggctcctaatcctcattagcaagaaggataattagaccctgagtctgctgaaggccgcctccagcctgggctccgggcacaggccacacccctggcgggcggagctgcgcggggcggggcgtcgctgcgcggggcggggcgtcgcgggctcgtcc

SEQ ID NO: 10917 - DNA, 481 bp, Homo sapiens
  source 1..481: mol_type = other DNA
acaaaaacaaaatttggaactccatttctgttttagattgtctcaagacgaatgttatcgtctacaaaatgtttaaaatcctgaaattatagaaacgtggctttagtctctacccattcaaaataatatgtaatatatggaaaatgtttttgtcacaatcagacaacatttaagtcatattggtatttggtgcaaaactggattcataaaaaattactttggcgacaaaatgcacagtagtctagatattgatactcaaatattctgggtattaaaactcagtcatactgagtctgtgttcccaggcttaagtcctcaaacttggccgagtaataaaactaaccatgatttctttaagttttagtatcaatttaatttgtactagaaggaaacaatttttcctcccctacaactattaaccccgcggctgcggcggaagggacaccgcccctcactgcgcaggtcacaccgtgccgcgcag

SEQ ID NO: 10918 - DNA, 708 bp, Homo sapiens
  source 1..708: mol_type = other DNA
ttgtcagcattatgttttacaattcactatgctatgtattacatcttaacatcatttctaatactggaggcatcaactatataaagacttttagagagttcaaatttgttttatgcattttttgcaaatatgactcaatcaaagctcattattacaatggtgactgtgtaagcattctacatatatgcaaaaatgtagaaatttcctcgataaataaataagtgtcttttctgtacatctgcatttgtgaaagatgaaatcgtcatggtgacccatcctgtcaaaagagttaggttgtctctcatggtatatcagatgaccgcagttataataccgaacataattatatgtttatacatttcactttttgagactggagtgcaggggcaccatctcagccacccaagtagctgggactactggcgcccgccacgtgggtgtggccgggcgggaacctccaggctcccaactagcgcctcgccccgcttcggctccagctaggcggcgctccccacccacccgcagcagcccgcctggcggctgggcccgagacccggagcccctgacttggggcccgacgcggggaggcggggatcgggggccgccggtgagttgcggggcggcggcgggagggggcgctgcgaagccccgcgaccgccgcgcggaggaagtgctctcttggctgccgccgccgccgccgccgccgcc

SEQ ID NO: 10919 - DNA, 449 bp, Homo sapiens
  source 1..449: mol_type = other DNA
caatcccagcactttgggggactgaggtcccgggaggctgaggcttcagtgcttcagtgagcagtgatcctgtcactgcactccagtctaggcgaccctgtcagggagacccagctaaaactagaatggtattttctaaaacaagaaaaacttcaaggttggctacattgaatttgaatgtaaagattaaaaaactctaaggtatatacggaaaatatatttaacacatgtgtataaactgttcaaaagcttcatcatctcgatgatcttaccagggcgcacacgctggcgctcgctaccgcgaccaccctcgccacggtcgcgcggtgcatggacggggccctcatgagtgtcccattgggactctcagaagcgcaggacacccacacgcaccgaggggagagggcggtcacgcggccgggggggcgtggcctgcccccggagcccag

SEQ ID NO: 10920 - DNA, 515 bp, Homo sapiens
  source 1..515: mol_type = other DNA
tctaggcgaccctgtcagggagacccagctaaaactagaatggtattttctaaaacaagaaaaacttcaaggttggctacattgaatttgaatgtaaagattaaaaaactctaaggtatatacggaaaatatatttaacacatgtgtataaactgttcaaaagcttcatcatctcgatgatcttaccagggcgcacacgctggcgctcgctaccgcgaccaccctcgccacggtcgcgcggtgcatggacggggccctcatgagtgtcccattgggactctcagaagcgcaggacacccacacgcaccgaggggagagggcggtcacgcggccgggggggcgtggcctgcccccggagcccaggcaggaggagggtcttccttaaggaactgctgccaagaggattgcagtaattatcactctctgctaatgaggaccaggccgtggttcactcgagccccgccccagtctccagcccccagaagtcggcgcggcacggcgtgacctgcgcagtg

SEQ ID NO: 10921 - DNA, 416 bp, Homo sapiens
  source 1..416: mol_type = other DNA
tttttctctttttgcatattatctttatgattagtaaatacataaacacactttctctttcaatttaaattttacggtaagaatctatttagcatgctaagcgttgcactaattaagtgaagtctccaaatcacaagctagattaaacctgtcagcaaacagactcatttattttcaaagctgtagtttccacaatggaaacaatagtccaccgtgagctcaaggacagctagctgatcgtcaggtcccaacacttggcagggggatcacaggagctgactccccggggctgagagagcgacggagctccgagctgcagaggccgccgcgcggcggcccccgccagagatgagcggtggggcgggggtcaccacctccccgccccggtccgcccgagattggaagggaggagtctc

SEQ ID NO: 10922 - DNA, 489 bp, Homo sapiens
  source 1..489: mol_type = other DNA
aagctagattaaacctgtcagcaaacagactcatttattttcaaagctgtagtttccacaatggaaacaatagtccaccgtgagctcaaggacagctagctgatcgtcaggtcccaacacttggcagggggatcacaggagctgactccccggggctgagagagcgacggagctccgagctgcagaggccgccgcgcggcggcccccgccagagatgagcggtggggcgggggtcaccacctccccgccccggtccgcccgagattggaagggaggagtctcgccccctgagttcgctgtcgcgcccccgccagaggggggccctactgccccgggtgtgtcgctccttcccaaaggtggggcacccgggagcgagcagggtggtggggcgcccctgcgtcccgtttgctgctccctcgctggattggggcacccgggcctgagcgctagtgctgcggcatccccggggctcccccaagaaagggagga

SEQ ID NO: 10923 - DNA, 652 bp, Homo sapiens
  source 1..652: mol_type = other DNA
gccccctgagttcgctgtcgcgcccccgccagaggggggccctactgccccgggtgtgtcgctccttcccaaaggtggggcacccgggagcgagcagggtggtggggcgcccctgcgtcccgtttgctgctccctcgctggattggggcacccgggcctgagcgctagtgctgcggcatccccggggctcccccaagaaagggaggaggagccgcgctcgcccggacagtggagacgcgccttctcggctctggtccgcgccctggggccctggcctccctggaggggctggggggccgagagagttcccgctgcagctatcgcgcagtccctcctgcgcccgggcgcccccagcgggttccgggaggcgcccggtgagcccacgtctgttgcggcggagcgagcgcgctccgggagggccgagagccggcggggctgggagtggaggacgctgcggcagcgacagcgacagcccccgaaacagtagcggcagcccgggcggcggctgagcggcagtgcgcagtcggcagcgccgcagctcctctccctctccggcgctgaggggctgactgctaagccggaggagcctggccgcaggacccctcctccccgggcgctctcgggcgcccgcccgcggacggtctcccgacac

SEQ ID NO: 10924 - DNA, 352 bp, Homo sapiens
  source 1..352: mol_type = other DNA
aagttctggagatgggttatcagctcatttacatcagcagctgcggtctctgctagcataagttgggaaacaaagaacgtgtaaatgtgctttgcaggacaggaatagctgaggtgacctcatgtttctctgtgtgaaatacaaacgtactatttgcctacacttacggaaaagctgaaacaaatgcataattataatttgatttcagaagtggaaacatgacccgaattcgggagccatgtcgatggctatggggagctccaccttgctcttggggtggggccctggcctacctggtggtaattgccaaggagagagcagcacagagctcttcagtgaggtgggctcaggg

SEQ ID NO: 10925 - DNA, 641 bp, Homo sapiens
  source 1..641: mol_type = other DNA
gggaccatcgaatgagagtcccagccctgggatctgccccgagtatggacctggccagttggcgccggctcagaggcgccggattctactcttttggaactttgagcgcaggtaagaaaaagaactcccgaggcttccactggtctggtcatagcttccccaactgggccatgcccggatctcgggcgttaggccgcggtgatgtgtcctctcccgacagcgcgcaccgccctcccgcccggggctgtgagaccaggtggggacctgaacctgtgctggggtaccgaacagccggggcgacaggccacgcgggcgccgcaccctgggcgcgccctccgcgcccggcccgcggccccgcccccggcggcggaatcaggaagcggtgacgtgagacggcgctgactggctgcgggcctccgggatcgccgccgccagcaaattaaggcgcagggcagcgagcgccagggctcactgtccgtagttccgcgccgcgctccccacgccagcgtcctagcagccgcgctcggctggtggccacctcagcctgggacatcccggctgtccccagccccagaggcagactgtcgtcctgccgagcgccccggggcgtgcgcacccgccgtagtgctcggtgggccctc

SEQ ID NO: 10926 - DNA, 633 bp, Homo sapiens
  source 1..633: mol_type = other DNA
attaccctgcgaattcggttgttcaggctgagcagggctaacaggacgccctccaacaaggccgtgggaagtcctcgtcacagccgcctttgcacgcgtcgcgcagggtccctctagggattgctaagcttatctttttcagggctgcatttgctcagccccactgtcaaagagatcaaatttgggaccatcgaatgagagtcccagccctgggatctgccccgagtatggacctggccagttggcgccggctcagaggcgccggattctactcttttggaactttgagcgcaggtaagaaaaagaactcccgaggcttccactggtctggtcatagcttccccaactgggccatgcccggatctcgggcgttaggccgcggtgatgtgtcctctcccgacagcgcgcaccgccctcccgcccggggctgtgagaccaggtggggacctgaacctgtgctggggtaccgaacagccggggcgacaggccacgcgggcgccgcaccctgggcgcgccctccgcgcccggcccgcggccccgcccccggcggcggaatcaggaagcggtgacgtgagacggcgctgactggctgcgggcctccgggatcgccgccgccagcaaattaaggcgcag

SEQ ID NO: 10927 - DNA, 518 bp, Homo sapiens
  source 1..518: mol_type = other DNA
tccaaagagaaactctcacttagtttgagtttgtttttggcagcctgtttggctgcagcgtgcgccatccacgcaggtcccacgcgtccgcccgggcaggccagggcaagcaggaaacgtgtcccttgtgaagccacagatttgcattggaagcccggttctacaggcccgggaccggggtcacaatttagatgtcaacaaactcagttgtcaagaaaaatatattttaatgcagtaattctaaaagtcaaaattcatacaaaaatcatgatatacaaaataatgggaaggcgggcctggcttccaagcccacaggatcagaagagatttttcttttctggccgggaggaggcccggggctctgagggccggtccctgggtcgcagccccgagggctgtcctgtgagcaggctgcggggcctggcgcgcggggacccggggaagacgctacaaggcctggaggcgccgcgccttgggacccggaggaggcccagggcggacacgtggggtggcctggg

SEQ ID NO: 10928 - DNA, 433 bp, Homo sapiens
  source 1..433: mol_type = other DNA
gtgctcaatgaatacttgtccatgacttcaggtttaaccaaaagcctgtaacattttgagcagaagcgtggttcagccttcccctagcgccaggggagctagtggctaggccccagggcagctggggccgaggccgagcaaacggccaggggagaggctcccaggagcccgatctgccgctgggcgacgcgaagcctggcggctagagtcccgggcagcccgagcaatgtgcaggggcgtgccgccggtgacgcacttccgccctgcaccggcgcgccagcggtggcgcaacggctctcgtccccgcccgtcgcctgggccgcccccggcccagccctgccttgccgccaccctgcgctgtccagactgaggggtcaggcggagagccgggccgcgccttcggtcagcttctctcccacccgcgcctcctcgc

SEQ ID NO: 10929 - DNA, 394 bp, Homo sapiens
  source 1..394: mol_type = other DNA
tcccctatgttatctactcctaagtggaagctgggagctgtgaaaatgcacaaatgaagaaaagttcggctatgggcaatagactcaaccttttgttctatgtctaacctataaaatagaaaaataagtgctcaatgaatacttgtccatgacttcaggtttaaccaaaagcctgtaacattttgagcagaagcgtggttcagccttcccctagcgccaggggagctagtggctaggccccagggcagctggggccgaggccgagcaaacggccaggggagaggctcccaggagcccgatctgccgctgggcgacgcgaagcctggcggctagagtcccgggcagcccgagcaatgtgcaggggcgtgccgccggtgacgcacttccgccctgc

SEQ ID NO: 10930 - DNA, 292 bp, Homo sapiens
  source 1..292: mol_type = other DNA
gagcgaaagctcagcttgagctgtgacacacaaagtgtgcaattgcaaagagggtagccaccgctggcttgaatgcctggctaggcttagggattcttagccagcctaggaaatattggggaggtttgaccaccgctctaactcccctatgttatctactcctaagtggaagctgggagctgtgaaaatgcacaaatgaagaaaagttcggctatgggcaatagactcaaccttttgttctatgtctaacctataaaatagaaaaataagtgctcaatgaatacttgtccat

SEQ ID NO: 10931 - DNA, 651 bp, Homo sapiens
  source 1..651: mol_type = other DNA
agcaagctttataaccaaggccttgatacctactttgcagatattaagtgcttaatagatgtttattgaggaaataaatgctttctgttagatgatatttttgtcacgcaaaaataattaggcatggaatttataaaataatgttaaaataatgacacttactagataaagattggttcatgaatgattaaaacctgttgcattcaggataatgatgctatgccatccataacttatttgttctgttgaaaaggaaacttgagtaagcagcttttcacaggttacagtgtgagccccataaggagactgtctcctctctccttttatgtttttttacttcttattatgaaacatttcaaacatatacaaaagaagagagaagagtatgataaactctcatatccttcaacaattatcaatgttttatctatattggactaaccaaagtaatgcactctaaagattgtttgaaaagcatatgtaagtaaatgttctaggactagttcaacattctttgggaagatttagagataacatgtactcccagtctgcacaatctcctgatgagtgtatataatagagtcactgtacttgtctctaaaaaaaaatttatttattttcagaactttagaaaattgtggcgtggtacaa

SEQ ID NO: 10932 - DNA, 563 bp, Homo sapiens
  source 1..563: mol_type = other DNA
gaccaccacgctcaggctgctccggccgcggaggccgcggctctgcgccgggggccagcccgccgcggcacaggaaatgccgccgcctcggcctccccccgagcccgccgctgccgcgccccgggcccgcagtggcccccatcccggctcgtccagcggccgcagagcttcccggcattcggagccgctgaccccaagtcgcggcacccgaagctgagactcacccatggtgctgctgttgacgctcctctcctcagcagcagcggatctcgcaccgcgaccagccccagcggagcgcagcccgccgattctccaaaggcgcctacgccgattccgcagcgtagccgcccggcgtagctgccttgcttacgcacgctacagcaggcggactcctcgccccctcagacgaggcttccgggcctagcggaggctggcttccatctcgcgagtcgagcatgacttcattggcgtcagcaacgttaaccgcgttacattttggccgcagtcagctctgccccgcgcaatttcacggagctgcgggagccggccagttggcctcagcg

SEQ ID NO: 10933 - DNA, 449 bp, Homo sapiens
  source 1..449: mol_type = other DNA
gggggctacagcggccgacctctggggctgtgccaggccactagagtgtgatggccagggcctaacctcacttttcaccccgtcgggtcagtaaccagaagccgaggggcggatgcggcccccgccctgtggcttgccttacgccaattccgtaaggaggcgctgaggccaactggccggctcccgcagctccgtgaaattgcgcggggcagagctgactgcggccaaaatgtaacgcggttaacgttgctgacgccaatgaagtcatgctcgactcgcgagatggaagccagcctccgctaggcccggaagcctcgtctgagggggcgaggagtccgcctgctgtagcgtgcgtaagcaaggcagctacgccgggcggctacgctgcggaatcggcgtaggcgcctttggagaatcggcgggctgcgctccgctggggctggtcgcgg

SEQ ID NO: 10934 - DNA, 515 bp, Homo sapiens
  source 1..515: mol_type = other DNA
atgagctgtctatgaccaattgaagataattgaaatctattgtagtcataataattgtactgaatgtagagtattctaaagaatgtacttcttaagggactagcttactaagaggatcctgaattatctcatttttcatttttaaaaaatcctccagcctgggcaacctggcgagacattgtgtctacctgtagtcccagctactcaggaggctgagatgggaggatctgagaggtgggttgcagtgagctgagattacaccactgcactccacccaaaataaaaaaaaaaaaattaaaaaccttgtaaattttgagtaataaatatagagataattctaggaaattctattaggagcaaccctgtgaccagggttcaagggcaggagtcaaagccttagccactttctgataagtaagtaaagtagttacattgtatttaactagcagaatcttgttctcccaaactgatcaattcagtcaaattaaatactgtgtatttcagacttaaaccat

SEQ ID NO: 10935 - DNA, 310 bp, Homo sapiens
  source 1..310: mol_type = other DNA
atgattagacttaatattacaaaaacttatccttgtttactcacagcgctaaatgtgcaagaccctggacctacagcgatgcactctcagggactgcagtcctaggccccgggcggcaaccatggtccgggggcagctgacttaggacagcctccctgtgacccgccctcgccggcacggcgccggctccgccccttaagccgcctctgcgctcccggggcctacccccgcgctcatggcccccactggtgccaggcctcgccccgcgccagggcccctcccccacgtgccctcgggagtcccggggagg

SEQ ID NO: 10936 - DNA, 605 bp, Homo sapiens
  source 1..605: mol_type = other DNA
cctcggcctcccgagtagctgggactgccatgtggcccaggctggtctccaactccgtgcatggttattgtaaaagattaaattttcatacttgctaatgtgaaaatgaataataaactgtcacaagctaaaatgtgaatttcagcattaaggatagtatgctttagcttccccgcacctcgtaaggggaaggacgggtctatttgcagctagggccgagtgtcacagcgcaccatggagttaagtcacctttgaacgggtacaaacgtctcttggagaccccagcgcgctcgcgggcacagccacaagccccggaggcactggcccgcgctgtgcacgccgggagttgtagcctcccactctctctcgccgcccgcgggccttcgtcgcacgagcgcccccagcggcgcgcaggctccgtgaagcgcagcgcgcgcggaccccgggggcagtttcctagcaaccggcggagcggctacgtcacgccgtgtgtaccttccagtagctacgggctggtggaagcgctgctcacagtcagtgtctccaggtagcggagagccgcctcccgccgcgcccccgccaccgaggcccgggtcagaggctag

SEQ ID NO: 10937 - DNA, 482 bp, Homo sapiens
  source 1..482: mol_type = other DNA
aaaaaatgtttgcctcggcctcccgagtagctgggactgccatgtggcccaggctggtctccaactccgtgcatggttattgtaaaagattaaattttcatacttgctaatgtgaaaatgaataataaactgtcacaagctaaaatgtgaatttcagcattaaggatagtatgctttagcttccccgcacctcgtaaggggaaggacgggtctatttgcagctagggccgagtgtcacagcgcaccatggagttaagtcacctttgaacgggtacaaacgtctcttggagaccccagcgcgctcgcgggcacagccacaagccccggaggcactggcccgcgctgtgcacgccgggagttgtagcctcccactctctctcgccgcccgcgggccttcgtcgcacgagcgcccccagcggcgcgcaggctccgtgaagcgcagcgcgcgcggaccccgggggcagtttcctagcaaccggcgg

SEQ ID NO: 10938 - DNA, 432 bp, Homo sapiens
  source 1..432: mol_type = other DNA
gaattcctcccgctctaacactgtacacagttgggaatttaaaataaaaaattgtgcatgaacgcttcacacagtctgttaattgagggccaggcctgcagtaagggctctggaatgcagtggtgtgatctctgctcaccctcagcctcccgagtagctgggattagaggcacgcggcaaggctggtcttgaactcctgacaacactctcactctgccgcccaggctggagtgcagtagtgagatcgcagctcactgcagccatgacctcctgggctcaagaatgctgggattatactcccggccttaatactttatttaggaatgaaggaaggcggcaaacgcggttggtgtgaagcaatcgccttaaccgttggagagcaggaagcgccccgctgcccgcctccaccccgcggcgagggctgggaggggg

SEQ ID NO: 10939 - DNA, 510 bp, Homo sapiens
  source 1..510: mol_type = other DNA
tgcatgaacgcttcacacagtctgttaattgagggccaggcctgcagtaagggctctggaatgcagtggtgtgatctctgctcaccctcagcctcccgagtagctgggattagaggcacgcggcaaggctggtcttgaactcctgacaacactctcactctgccgcccaggctggagtgcagtagtgagatcgcagctcactgcagccatgacctcctgggctcaagaatgctgggattatactcccggccttaatactttatttaggaatgaaggaaggcggcaaacgcggttggtgtgaagcaatcgccttaaccgttggagagcaggaagcgccccgctgcccgcctccaccccgcggcgagggctgggagggggccgggaaggaggcggggccgcccctgggaaccacccggcccggcgcggccacgtgaccgagcgcaggggcggggagagggcgccccggctccgcccagcgcgcatgctcgcggctcggcgctgaaattcaaa

SEQ ID NO: 10940 - DNA, 475 bp, Homo sapiens
  source 1..475: mol_type = other DNA
cgtattctagtttagataaaataaatcctattttaaggctaatacaaaaataggctctagatttttctattagaacctttaaggaaggtgaaaaaaattgatgtatttgtcccaagatgattaagaatttgaaacagaaaaatagattatgtcatgcttgaatataagtaaactctaattgctgaaatctgtaattaatatctcatacataacttatagaattataattacatttaccactcttcacagcatttaagtttttgaatcagtgtaaacagttttatttgcaacactcaaaaactaacagtttgaaatttgtttcaattaaaatggtctcaaggaactactggctttttatgaacgaatgcagtggtttctagcagcgtgaactccgcaattcccggcggcagccgcactgagtcaccggccccggaccccgccctgcagggcattccagctgcttccagcaggaccc

SEQ ID NO: 10941 - DNA, 424 bp, Homo sapiens
  source 1..424: mol_type = other DNA
caaatgctattttttttaattgctaacaatttagatagcttctataatatttcaaaatttgtaataagcttttgttttatcttattttagagagaaacatttagattatatgtcttttatctaacagtgttcagttctattcttcagagcagaaaatcagtcaactgtgaattgattaatgtactgtttattttctgcacaccaaataaaaggccttgacccttcaaggaataacccaatttctccagaggaaagatattatttgaccagaatatccttttacaacaaaataaggatcacaaccttattgaaaacaagactaagtaagttctgaatgtaaccaattagaatttctaccctcgaggctcacggggtttatgcacactaacttcactgagccagggagcacggaagttgtgccact

SEQ ID NO: 10942 - DNA, 452 bp, Homo sapiens
  source 1..452: mol_type = other DNA
cctgtttcatgaacaagcttactcaggaaccatctggtggtattccagcacattgttacctccgtctcacacatgtgtccaccggtattatctgtagctttgtcctattgcaagggttcccatgatgtaggagactctgaattcaaaattgatgcatttcaagagaaaatgcttttaaagctacattaataatcaggcacggagcccggagccgtgttattacaatggtctgtcaaactaactgagctaggtcatgtcctttccttttatgaaacctgtctccaaattgaaatatgttttttaattaattgcaaagataaagtgaagtgcaattggaaagattttagcagtcaaaaagcatgcttcaaaatgactctattttgcatcctttcaaacccctgaaaaaccagagagggtttgcaaatgacactggtgatgaaattttcaatttc

SEQ ID NO: 10943 - DNA, 515 bp, Homo sapiens
  source 1..515: mol_type = other DNA
agaagaaaatgccgaactgcctttgacttttccggtagagccggggaggacaggtggttcgcctgcaaccctcttccctcctgccagctaggctgggatttctgctttgaaaatgatttaagtaggttgcatgaattaagtaatttattctaaatatcaaattatgccttatgcaaagttatgcaaaattaggaagtccctggcttaattgtagaaatacatcttgtagtttcttgccactctgtccgaaatatccggaaccggttgccaaaaagtgcctccaaacgccgtgtgtgagctcaatgctctgcacacatattatttatagcagatctgaggcatgcatgacttcaaatccccctaggcaaagtgcagtgggcagggaccaggcagggtgcgggcgcaaggcgaacgcgcagaccacgagtgtcctggcgcaggtgccgggggcggcggctgcaactccgcagcgtccgctcgggaggagagttcgcggcgagcagcggcagccggcg

SEQ ID NO: 10944 - DNA, 522 bp, Homo sapiens
  source 1..522: mol_type = other DNA
ttacattttctagtagctacatcagaaaatgtaaaaagaaactggtgaaattaatcttatatatgcttatatcttttactacatcagactattctcatgtattgcaataatgtaatcaacataaacatacttaacaagttagtttacattcattttaaaaatactgaattgtatgtctgttttacacttacagagaagaaaatgccgaactgcctttgacttttccggtagagccggggaggacaggtggttcgcctgcaaccctcttccctcctgccagctaggctgggatttctgctttgaaaatgatttaagtaggttgcatgaattaagtaatttattctaaatatcaaattatgccttatgcaaagttatgcaaaattaggaagtccctggcttaattgtagaaatacatcttgtagtttcttgccactctgtccgaaatatccggaaccggttgccaaaaagtgcctccaaacgccgtgtgtgagctcaatgctctgcacacatattatttatagc

SEQ ID NO: 10945 - DNA, 585 bp, Homo sapiens
  source 1..585: mol_type = other DNA
tgatgatctatcatattctacattatgatgagttgtataattatttcattatatattatcatgtaataacaattgaaataaagtgcgcaataaatgtaatgtgcttgtggaaaaattgtcttccatgaaacctttccctggtgccaaaaaaggttggaccaccgatttacataattagaaagtttataaaatcctaatttatagagtttcaagcagtttgaggaactgagataatgttgacagtctaaaaagttaagctgtttaaatattttctctcttaattctaattaaatgacataattatagtgccatatcccagtcaatgccatttatcagtgacagctaattaacacaattataaaagtgggcaactctggaaattttctccttactgaaaggaaatattacacatattccttcaccagaagaacaatacacagtttaattctctacaaaatttagtttgaagaacattttaaaaacttgattcatcgtagtcatcaatccttcataaatatttcttgagtttaagagcttggtttttcaagactattgtgtttcaaaatggtctgtctgaggaactta

SEQ ID NO: 10946 - DNA, 498 bp, Homo sapiens
  source 1..498: mol_type = other DNA
cctcaatatcaatgactcatccttgaaatgcagttcaaatggaaagacgctatacatttttttagttctatatttttagagacagggtctcgccatgtcacccaggctggatggagtgcagtggcatgatcatagctcactatcctcccacttcagcctcaggagtagctgggactacaggtgtgtgagcctccacccaaaccactcggctggtggtattgccaggcgatgggaggagcagtctcactgcaatgtgaccttgaggctatgtccatgagtcctaggcccaatgcaaggggctgtctactagtctcctagactcttcactaatagctagtatcatttcttcaggaaaagactcgtctttccacttttaatttggaggaagaaggcaaacgtttgcacagcaaacgcagcagctctgcgttgaacactgaagttagtggagaaacacacttctcagcggcaccactgccactgcatttcctgttggcagca

SEQ ID NO: 10947 - DNA, 352 bp, Homo sapiens
  source 1..352: mol_type = other DNA
ccttttcctaatgcaagtaaatcaagattttatggaagatgctagcacaccttcccccagttctgttaactgttatactggaaaaatttcggcccaaactggccttgcaggacaaaagttcagttttcagccaaagagtgtctttctctctcttgtatccggtgtcgaaaacaactgccagaggttctttttcttggtccgaagaaaaaagactggccagcaggcttccagccctgggctgcggcccagagggggtgatgtcaccgcttctgcaccgacgggcctgggggtggggcggccgagggggagcccgcgccgcggctgcagctgccaagggagcgttccgagccca

SEQ ID NO: 10948 - DNA, 457 bp, Homo sapiens
  source 1..457: mol_type = other DNA
acatgcagcattttcagagaatgaggtagatttatatacagatatggaaagatttcaatgctaagtgtaaaaaagtaacatctacacttgcaaaagggatataagcataattgtaacgtttaagctttttttttttttcgcatggacaaaatcttacttgtgtaatttaaaattaataacggtacttagaatgactttggaaaaaggggatccaaagaatgttcactgtatacctctgtacttctaaaaatgtgaataagttgggagaaaagtttaattaaattttaaataaaacaataaaaggacagacatatagatataattaaatgtgactaccgcttagagatgttagttatgaactattcctggagctcagcatgaggcccaagaagctccgtgtttcaaagctggagtagaattgacactctatggaggcactcaggaaccagtcggtgtg

SEQ ID NO: 10949 - DNA, 468 bp, Homo sapiens
  source 1..468: mol_type = other DNA
aaagggatataagcataattgtaacgtttaagctttttttttttttcgcatggacaaaatcttacttgtgtaatttaaaattaataacggtacttagaatgactttggaaaaaggggatccaaagaatgttcactgtatacctctgtacttctaaaaatgtgaataagttgggagaaaagtttaattaaattttaaataaaacaataaaaggacagacatatagatataattaaatgtgactaccgcttagagatgttagttatgaactattcctggagctcagcatgaggcccaagaagctccgtgtttcaaagctggagtagaattgacactctatggaggcactcaggaaccagtcggtgtgtgcgtcgacgtcagcgtgctgacgtcacgggccggaggtcccggggctgctgggtgcgggcggtgggctgcgcgttgtccgctggactgggtcccggtcacgc

SEQ ID NO: 10950 - DNA, 274 bp, Homo sapiens
  source 1..274: mol_type = other DNA
atccctattattcgtacttctcccaagcattaataagaataatagggatggtgccatggttctgcccagcacaggaattttggagatgaccaaaacacatcgcctgtcttccggaattaaagtttaatcccagccagggcccctcactgggctgtgagcctcctgagggtagggcgaccggactgctggaaagaatcaggccgagctgcccctgggcccagggactttatcatcgaggagacaacccgccgccgcgccccgccctgctccgcgg

SEQ ID NO: 10951 - DNA, 454 bp, Homo sapiens
  source 1..454: mol_type = other DNA
gtttgaaacttagcatttcagagtctgctaaagcagaagtcatccttgctgatgctagaaagtgaaagaggctttcttttggtcttaaacaattttggaacaaaaatcattcctatcacaaaacaagttgtaaaatttgttcctaaaccagtaaaagctatagccttcagcagaatgttgaaaatatccagatcattctggatttttttggtatttgatatgcattacatacatagtatattttctagaatgaactagtcatagatttaaaccttaagccaatgaatgtaatcactttctttaaagactgactcttcagaaagtctttcccctgacgctagtacaggtgggtttggagaagactcctgctttcgtctgctgactggcccactgtagctgaagagagtgagcatgccccggggccagcctttccaggtggaaatgaacaactgcc

SEQ ID NO: 10952 - DNA, 463 bp, Homo sapiens
  source 1..463: mol_type = other DNA
tcctactgggtcagagtcaatgaggcacatgccatttgcaatgcatggaaattgtaaaatgtctgtcagattcctgagggttaagaaacagaattcataatgttcagaaacatggagaaggaatcagtcattctaccaaggacaacttcatattgtgtcttcacttgaacatttacctattgaatatcctcaacaaaagtttaacaattaatttattaaacaacagagattttttttaaatcaatgttcatatgaagtagcaagcaaaaataatgatattatttgttggcgtataaatttaaagactgctttatattcactgaatatacttaaaaaagagagactcccctataaatggggatgattaaatgagataatttatgcaaacaataaaataagctatagtattagcaatggttatgttcattcaaactacatttcccagaaggccctgggccaagtg

SEQ ID NO: 10953 - DNA, 602 bp, Homo sapiens
  source 1..602: mol_type = other DNA
tacaataccttagcctaagaaggttaaaaagttggtaagttatattcttttcacccttaacaaactgacccataatgcattagcaatctgtcccaatcagatagttaaaattaaatttagaaagttaaaatacttgtcatcacattaaaaacacattacatcagtttagatgagctgaagtatcatcccttacctttcagaagataaaaagtttagtgactgctatttacacactttgaatattttatattacagtggtcatcatcatttacacggattattttcttgtccacttccaattcacaaatatcagggtgtttgttatgtagattctgaaaaggtgtccttatataatgcatattatcaaaaggtcatttagagattttaaaaataaaatcattagggaccccttaaagcaatgaactgtaattttaaaaatgtatataatagcacaaaaatcaaagtcttaatggacactcatttgagtttttgttttgttttaaacatagatttctagagcattaaaaacaatcctcataggtttgttaaacctttagcggaagatttgtcaatgtcatttcatatctacagaaaattcttac

SEQ ID NO: 10954 - DNA, 395 bp, Homo sapiens
  source 1..395: mol_type = other DNA
gcttatttaaaaatttttttcatagcatttatttatgatcttctaacaaaccttatgctacttatatattgcttattgtttatcctgtcaattttacatgactataaagtcgacaatcaataaattgttagataaataaatcataatcacatgactcattttacccaggcaaaacaggaatacctggtgttgacaatcaatgaaaaaatatattggctttacaaatgtactctatatttcttactaatctcaaatatcctaacagtttaaaatgtcggcttgtcaaatcctttaaatgcagaggagatatttgggtggtaatcgccgtttaccaaagcgaaggctccggcggcggccacgggccacagcccgcctccgcgcacacgaccggaagg

SEQ ID NO: 10955 - DNA, 522 bp, Homo sapiens
  source 1..522: mol_type = other DNA
ctaagtttgaacttcaagacctgtaattattactcttgtagtagaaaatgcctatttatctttaaaagtaagtacatcttgataaaggacattccttgatatagttggtactcacataagaatctgtagctgctaacttaaatttacggatttagtgaaactacttctcacaagctaccaaatcacagtgccatggggccgcaagatgatctcagtgccacaccgacacctgcagagtcgcaggggggtccgacacccctcagaaagaactcgcagaccgtccgatcgcccagggcagccacgagaccctccagccagggtaggcggctgacccgcctcctgggatttggcccgtgacaagccacgtcgccagcatggcggccacgacgccgagatccgggaacctccgcgaggcccgcggccactcccgagcccccgggagatgacttcacctcgcggagctcagagagccgggggtgggcagcgcggacagccctcagcttgcagggggcggaggccggg

SEQ ID NO: 10956 - DNA, 538 bp, Homo sapiens
  source 1..538: mol_type = other DNA
ttgtagtagaaaatgcctatttatctttaaaagtaagtacatcttgataaaggacattccttgatatagttggtactcacataagaatctgtagctgctaacttaaatttacggatttagtgaaactacttctcacaagctaccaaatcacagtgccatggggccgcaagatgatctcagtgccacaccgacacctgcagagtcgcaggggggtccgacacccctcagaaagaactcgcagaccgtccgatcgcccagggcagccacgagaccctccagccagggtaggcggctgacccgcctcctgggatttggcccgtgacaagccacgtcgccagcatggcggccacgacgccgagatccgggaacctccgcgaggcccgcggccactcccgagcccccgggagatgacttcacctcgcggagctcagagagccgggggtgggcagcgcggacagccctcagcttgcagggggcggaggccgggcagcctgcgccctccgagccactgttctgcggcccaggccgccccgctccc

SEQ ID NO: 10957 - DNA, 562 bp, Homo sapiens
  source 1..562: mol_type = other DNA
ggacattccttgatatagttggtactcacataagaatctgtagctgctaacttaaatttacggatttagtgaaactacttctcacaagctaccaaatcacagtgccatggggccgcaagatgatctcagtgccacaccgacacctgcagagtcgcaggggggtccgacacccctcagaaagaactcgcagaccgtccgatcgcccagggcagccacgagaccctccagccagggtaggcggctgacccgcctcctgggatttggcccgtgacaagccacgtcgccagcatggcggccacgacgccgagatccgggaacctccgcgaggcccgcggccactcccgagcccccgggagatgacttcacctcgcggagctcagagagccgggggtgggcagcgcggacagccctcagcttgcagggggcggaggccgggcagcctgcgccctccgagccactgttctgcggcccaggccgccccgctccccagcgccccggaagtgatctgtggcggctgctgcagagccgccaggagcccagagcaaagcgtcggagtcctcct

SEQ ID NO: 10958 - DNA, 223 bp, Homo sapiens
  source 1..223: mol_type = other DNA
taatgcctcctgagaatttggaattttcacttttaacattccacttatttcctgtattgatttaaagctttaaaaatttttattttaaagtaaatagtgttaggcagtgcggcgtctgcagagccggaaccggcactgcgcgctggacgcaaaagccgatgccacttccggtgcggcctgccggcccctggcgggagcgagcacgccagtgcgcggtagcggg

SEQ ID NO: 10959 - DNA, 317 bp, Homo sapiens
  source 1..317: mol_type = other DNA
gcctcctgagaatttggaattttcacttttaacattccacttatttcctgtattgatttaaagctttaaaaatttttattttaaagtaaatagtgttaggcagtgcggcgtctgcagagccggaaccggcactgcgcgctggacgcaaaagccgatgccacttccggtgcggcctgccggcccctggcgggagcgagcacgccagtgcgcggtagcgggcgcgctcccggtcgtacgtcaggggaggttagggcccaaccagcaagtcccgttgctctccctcctcctgacgaggagcggagagggaaggggaggag

SEQ ID NO: 10960 - DNA, 430 bp, Homo sapiens
  source 1..430: mol_type = other DNA
ggcagtgcggcgtctgcagagccggaaccggcactgcgcgctggacgcaaaagccgatgccacttccggtgcggcctgccggcccctggcgggagcgagcacgccagtgcgcggtagcgggcgcgctcccggtcgtacgtcaggggaggttagggcccaaccagcaagtcccgttgctctccctcctcctgacgaggagcggagagggaaggggaggagcgagccggggcaggccgcgcacaccaggagcctcctcgtggagggggggagcggaggaaaggggtagctccgccacctctgctggcggcggcggcggcggcgaaagaagaagaaagtcagggcccgtacctacccccaaccgagagccgcagcccggtcgcccccgcctcgccccgccccgctgcccagccccgcgggccgcagagtgcgc

SEQ ID NO: 10961 - DNA, 866 bp, Homo sapiens
  source 1..866: mol_type = other DNA
ccgcctctgctcttcctggctgctcccggcacggccgccgccgcagccgccgccgccgcggcctcctcctcttgcttcagcccgggcccccctctggaggtcaagcggctggcgagaggggcgcgcaggagggcggcagaagcggcgtcgcgggccccgcgccgggcaggaggcggagaagcgtcgggtcttctcgctgccccagccgcagcaggacggcggtggcggtgctagtagcggcgggggtgtgaccccgctagctcccagtccgagcaggggctgctgctggggggggccagcgcggcaacggcggcgacggctgccgggggaacggggggcagcggcgggagtccggcctcctcctccggcacccagcggcgcggggaggggtcggagcgcaggccccgccgggaccgccgcagcagcagtggccgcagcaaggagcgccaccgcgagcaccggcggcgggatgggcagcgcggtggcagcgaggcctccaagtcccgcagccgccacagccacagcggcgaggaggccgaggtcgccaagagcggcagcagcagcagcagcggcggccgccggaaaagcgcttcggccacatccagcagcagaaggccgcagccggactaagtcgtccaaggagccgccttcgggcctgaggccgagcctaaggcctacaggcggcggcggtccctcagcccactgggaggccgggacgacagcccggtgtcccacagggcctctcagagcctgaggagccgcaagtcccccagcccggcaggaggtggcagcagcccctattctcggcggctgccgcgctccccgagcccctacagtcgccgccgctcccccagctacagccgcca

SEQ ID NO: 10962 - DNA, 518 bp, Homo sapiens
  source 1..518: mol_type = other DNA
ctgtgattacaggcgtgagacatcacgcctggctgtaaattttcttaaaactatctttctgaaacgaactctaagagactctaagcagagcactgcttactctgaacttacaggaaggtacttttgagatgtggcaactgtctcctggtaaaagatttgtcagactttaccctgctgctactactaccattggttgagacatacatttgtagaccaaagaaaactatgatcaccaaataatactctactttaaagaaatttttatttttcaaaacttcaaaaatgtaactttgaaattaagtaaatttctattttatttcataaacttgaattagcactgtctttgtaaattccaaactgaacctttctcaattactgattaaatcttaattatttctcaccagacattgtctagataagtcgtcattctagtatttctagcaagagccgcagaagcagcgaaagctgcagaagcaactaaggctgctgaggctgctgccaaggctgcaaaagcttca

SEQ ID NO: 10963 - DNA, 627 bp, Homo sapiens
  source 1..627: mol_type = other DNA
aaagaaagttctataacactgtagtaaagctaaatttcatcctttctcaacctgtacaagtcttttattgtgaagttacgcgagccgcgggacgcgcaggagcgggaccccacggcgcacggagccctcggcagaggcgaccctgggcggccagagcggggcaggccggccgcaggcccacggagtcagcagagacttcagaccctaattgctctcctcagggcgcccgaggaggcaagctggggcagggatccctttagccacccagaccgaatctcggagggtacctgactgcgggcggccagtccacagccccctcccgccgccccggccggagaagaggcaggttctgcgcagagctgccaccctcgccagcgtcgccagcatcgcgtgcgtctcagatggcatcggtcccggtgcaagcggcgaactccgtgcggcgccacccgccgccactggggggcgcccacggacgccgcagaccccgcccccgccgggcggggctgagcactagtcgcctgctgggccagcttctagtctgtcggtcagaccaagggcactcagactactgagtctctcgccaagtcagtgatttaggctggcggaacctttgtgacgccggaactg

SEQ ID NO: 10964 - DNA, 585 bp, Homo sapiens
  source 1..585: mol_type = other DNA
agccgagatcgcgccactgcagtccagcctgggcgagacagcgaaagaaagttctataacactgtagtaaagctaaatttcatcctttctcaacctgtacaagtcttttattgtgaagttacgcgagccgcgggacgcgcaggagcgggaccccacggcgcacggagccctcggcagaggcgaccctgggcggccagagcggggcaggccggccgcaggcccacggagtcagcagagacttcagaccctaattgctctcctcagggcgcccgaggaggcaagctggggcagggatccctttagccacccagaccgaatctcggagggtacctgactgcgggcggccagtccacagccccctcccgccgccccggccggagaagaggcaggttctgcgcagagctgccaccctcgccagcgtcgccagcatcgcgtgcgtctcagatggcatcggtcccggtgcaagcggcgaactccgtgcggcgccacccgccgccactggggggcgcccacggacgccgcagaccccgcccccgccgggcggggctgagcactagtcgcctgctgggccagcttctagtctgt

SEQ ID NO: 10965 - DNA, 557 bp, Homo sapiens
  source 1..557: mol_type = other DNA
tcttccgaatccacgtaaagggaatacgctggctattattattaccgggctgctgccctggggagtagccgaattgctgctgggaccccgcgggggacctggagtaggagccagggtagccgccaggggacggagacccgaaccggccccccgggaagctgccgccgtgtcgcggagagtgactgctcccgtacggcctagaccggggcccgtacggcggcgtgtggtgcggactcccgtacccgtctcgaggggagggcggccgtggtccgcccccgcccggggttccccggaagctgcttccgctaccccaacctcctccacccggaccagggtaaggaggagttgggggccagttccggcgtcacaaaggttccgccagcctaaatcactgacttggcgagagactcagtagtctgagtgcccttggtctgaccgacagactagaagctggcccagcaggcgactagtgctcagccccgcccggcgggggcggggtctgcggcgtccgtgggcgccccccagtggcggcgggtggcgccgcacggagttcgccg

SEQ ID NO: 10966 - DNA, 288 bp, Homo sapiens
  source 1..288: mol_type = other DNA
attctcctgcctcagctgcctgagtagctgggattacaggcatgtgccagcaaaccctcatatttcttaggaaacataattgcctgtgttagataggagttctaaatttcttttcaaagaatcaatagtgcggtctaaccctaggggaacaacactgtaagggcatgcccttctaaagaagtacattgccttgctgagaattaaaaagaaaattttatattcgagtgctatttcttttgaaaaatgaggaggtccgccccgcccccttgtggcggcctcaggggtgag

SEQ ID NO: 10967 - DNA, 197 bp, Homo sapiens
  source 1..197: mol_type = other DNA
ccctgctgcatttcacagttgggaagagtggcctgaacatttaaatatgaagccccaccacgtggccaggtgggcgttctaccacctagggctgtcaatcaattcatccctattgattgagacactgtttcttttctcccctccaaaaaaggaaaaaaatagtgaacaaaattaggataatttattttagaacctgt

SEQ ID NO: 10968 - DNA, 487 bp, Homo sapiens
  source 1..487: mol_type = other DNA
tctgctgttatatttgtaacaatttagaaattataggagttctaaagacctgggaaggatacttatgaagttcatttaaagagaattactatttccaaagttcttgatttatgaagcaggcattcaatttcaagatgtcatcatatgattatattttcccaatttttttcctcaatgaaatagcttattttaaaaatataaaattagaatccctataaagaacactaccaattttctttcctgaaagaaacaataaaatactttgtaaatagaagcaacttcatgaagtaacagatgttttatgtaaagacataaaactgttgacacactcattgagacatatctatttgattccaatgtttttctaaaaggtaggaggtttcactggctcagtgtttccattagataatgaattatgaaatgtctcacactggaaaaacctggtaccaatgtgtggtgtacaaataagtagtacagtataaaactt

SEQ ID NO: 10969 - DNA, 481 bp, Homo sapiens
  source 1..481: mol_type = other DNA
aaatggtaatcactttcatatgacactcgagaaatgttataagtaactcactcctagtgggcagcagtgacgtcagcagcagctgagcaaactgactacatttttttttcctgtgactaacatgaagataacagcatctaataaaacaaaacttgaaatttgggaaactttcagccatagttaatgttggagttggccaaagggatcacaaatgaaccctcttccatcttttaagaggaactcaatgagtatattttttgaaagtttaaagctggttgtagaattcagtgattccattttaaactttgtaagaatattgtgcttaattacagtttaatctaaagtgacagaagtcctacttgctatttcacctttgcaaacttgaccttcctaaaattagagtgggccccagtgtccacgcgagtccacaggactcgtgaacagcagcacatgccttggagctgctcccacagagggcaga

SEQ ID NO: 10970 - DNA, 458 bp, Homo sapiens
  source 1..458: mol_type = other DNA
tggaaagggcatataattgtaaatacgtatcccttgcaactaactcggaagcttttctttcaaggccctgagagccattccttcgaaatctaatcattaggaaggatagggccccagtctctgcgggaggatagaaggatggagctcagctctttacctgcagtagttactgaataaaatctgttgaatggaacaagcagaggaatttttttttttttttttttgcggtggagggagcgcaaaaacagtcgttctgttctcctacgtccccgacatgaggccgcggatcagaaccggggctttacctaccccacggaggactgggaaagcccggccggctctgcggaagcttccgtagcagtcgcggccagcgccattttccctgctggaagaccgccccggtcccgcccctgctttcagcatgcgcacaggcacagaagactctcctccaatcatag

SEQ ID NO: 10971 - DNA, 268 bp, Homo sapiens
  source 1..268: mol_type = other DNA
ttttggaaagtaaacttattattctaatccccttttctacaatagaaaaagacttaactgtaaagctgagagttttccaagaagcctccgaccaaggaagctccaggaatcccgggtcggcctggcaaatgactttgcaaagccgcatttccaacttccagaagcaccaatgccgacgtcaggagacctcgagggccctgtagtcagcgaaaagctgctatgattggaggagagtcttctgtgcctgtgcgcatgctgaaagcagggg

SEQ ID NO: 10972 - DNA, 477 bp, Homo sapiens
  source 1..477: mol_type = other DNA
cttaaaaaaatacttgatccaagcacttgtttttctttagggcaaattaagtagagctcaaaacagtttttaaatgcctggagaagaacctcttattcttatgcaactggttcctccagcagggaaaaaagcttaagcttaattactgtccaatagagttaaaccccttggccagggcgtggctgggaaccagccagccagctgtgccggacccttgggccatgcgtcctaggcccagcagggacaggggcgggtggaggggagctgctgctcacgggtcccgaaatggtttcctccatcctcagaagtgtgaggatgaaaaggcgagagtttttttagttcagctaaagacagggtccgtctcatagtcagagtccctgctagagagcttccggccggcagcttgaattgcaggttccacacaggaagaggaggagccaactccaccccgctgcaaagggtgcagacttctgtggc

SEQ ID NO: 10973 - DNA, 180 bp, Homo sapiens
  source 1..180: mol_type = other DNA
tccgtactcaggtcttcagtaaggagttctgaagtggttggatcataaaatcccaggctatagagattatgtgctcaaagcctctgcattttatgtgaacacacacaaagaagggtctagtctgacactgtgtgcagtgtaatagaaaacaggacgatatatattagagcaagcccggct

SEQ ID NO: 10974 - DNA, 533 bp, Homo sapiens
  source 1..533: mol_type = other DNA
gcacgcgaggccccggcagcgccctcccttctcggggtcagcctgggtcgcgccgccgcccggtccgggccggcatccccgggtggcgaccccggcttgggtactgcaggcgcacccggccctcctgcggggtgcccccaagcgggttcgcagcgcctcccccgcccctcagcgccctcccagtggcgaggaggtgtcaggggagggggcggagagacctacgtaatcccccttcccacaaagctctggcccagagagcgcccagagcctccgcacgggctcgccggtgctcgctcgaggggcgcgtggccaggtccggcccttgctcccatggacgggtgcaggaggggaggaggcgctgtgtgggtgctcccccagcgcctccctgttaccggccggctgcgccgctcagccgggcctgccacctggtcatgtcgcctaccgggctgatgcgcggtgtctctgtcttgcacacagaggctgcttccctgccgaatttcagccaggctgcagagatgcccggcttcctgtgg

SEQ ID NO: 10975 - DNA, 506 bp, Homo sapiens
  source 1..506: mol_type = other DNA
gaggaatcaatgctcatcccaagatttttggcttcatgaagaccaatcagcaacttacttttgtgtatgttaagtctgagatgctaatttgacatgtaagtggagatgccaaatgcatagtcaatacaaattctgtagtcatgagcatatagatggtaaactacagacaatataatagtgtctatttcatagggccggtgtgcagggttaataatatttatacaactctgcctccagtgtacggagatcaggatctcatcaccttattaaccgaaggtcagcttttgtgactctcagacgctcaacaggttccagcctccgggcagctgcaccttctccccctgagctgcagagggcgcgcgtgaggcatcgggcgctcaggaccccgcgggagctcagcgagggggcgggcggccacggagtgaggccggggcggggtcgggcgcggggcggcgcggggcggtcacgggggcggggccggtcgcggggcgcggggcgggcccgag

SEQ ID NO: 10976 - DNA, 191 bp, Homo sapiens
  source 1..191: mol_type = other DNA
agaccctgcagcagagccctgtctgccttgcataagaaatagcaggataaggtttctgaaacagcaaggtttctggccttgacaactggaagatggagttgccatcgacaggaggcaggtcccgcctggagataaaaattcaaagccaagccttctctcttaagatcagagatctcttactaggctagaag

SEQ ID NO: 10977 - DNA, 499 bp, Homo sapiens
  source 1..499: mol_type = other DNA
aaaagaacttctgttagaagtttttaaaaaagtttaaaaattgtttttacctcatcaaaagtttgatgtcttgtgagttttatagcatgcataatatattaatgccatacatgacacatgtaaatatatatatattttttctgatagggatcagtctaaagttaattagagcttgacattaaggtgataatagtggtgactatggaataatcaatataaaaataataacagctaacagttactgagcataacaaatttatgaggtaaatgctttaactgggtacttaatttgtcgaataaaataaaatttagtgctgccaaatttgtcagctcagacggcccggggcttcgtgtccttggaggccagcggaagcgccgcatcggcgcgtcccggcgaccgggtgagctgaagcctccggttgtcccggttcgacgctagccctgcgagcagccgacgccggaagtctctactgctccccgctggcgcgcaggaccgcgg

SEQ ID NO: 10978 - DNA, 196 bp, Homo sapiens
  source 1..196: mol_type = other DNA
taaggtttctgaaacagcaaggtttctggccttgacaactggaagatggagttgccatcgacaggaggcaggtcccgcctggagataaaaattcaaagccaagccttctctcttaagatcagagatctcttactaggctagaagagttcagtcggcccggggccactaaataccaatgggatccagtgggttctac

SEQ ID NO: 10979 - DNA, 374 bp, Homo sapiens
  source 1..374: mol_type = other DNA
caggaggcaggtcccgcctggagataaaaattcaaagccaagccttctctcttaagatcagagatctcttactaggctagaagagttcagtcggcccggggccactaaataccaatgggatccagtgggttctacgagatgcgacaccccccgggcctgccccccccacgccggggccaggcacaccgtgagggggccaggcacaccgtgagggggcccagccactgggtgcaggggcaggcgcacggacggttcttacggccccaggcgccagacccagggcacagaggccaggatctcacgcgcgaccgcacgaggccgggaccctccgccaccccgcttcggggcccccgccccccagccgggcagccaat

SEQ ID NO: 10980 - DNA, 528 bp, Homo sapiens
  source 1..528: mol_type = other DNA
atcattgattaaatattctcttgatcctaatagctctataaggtagtactattattaaggcccattttatagataatagaactgagtcttaactgtacaaagattctaaaataaaatatcccgcgttgctatttttccgtttgacattaataattactggataccaataatacagtcaccactgtggtcacatgtggcaaacccattcttgcataactgcgtaagtcatccttgaagaattgggttttaaccaaaatatgtttctaatattatttggaggctcctcttcgagccccgagggtgcaggttgggcagggcgggctccggtgggccgcacacccatcaccctgaggttgtcgaagagaaaatctcacgtttcgcatcctcaaatttccggatctgcgggatgagcattcacaaggctgagcattcacaaccgcggccccgccccgcagaggccctgccccgcccccgccagagtacagagtacgagctccgacttggtctcgtccgcggtcgtccccaccc

SEQ ID NO: 10981 - DNA, 433 bp, Homo sapiens
  source 1..433: mol_type = other DNA
acaattataaaattattgaacattatgaaaactttaaaaaataattgtcagttgaaaaggatttcttaggaaatgttgaaagttcttacatttgcaaagtatgcattcaatatgcataacagttggaacccaccttcatggactgaagtcaagagacttgtgtcttggatcattgattaaatattctcttgatcctaatagctctataaggtagtactattattaaggcccattttatagataatagaactgagtcttaactgtacaaagattctaaaataaaatatcccgcgttgctatttttccgtttgacattaataattactggataccaataatacagtcaccactgtggtcacatgtggcaaacccattcttgcataactgcgtaagtcatccttgaagaattgggttttaaccaaaatatgtttct

SEQ ID NO: 10982 - DNA, 583 bp, Homo sapiens
  source 1..583: mol_type = other DNA
tcttgtattcttaatagtagtaaacatttttaaatagtggttgttaatgatattttacttttaactttaattttatttttaaaaatgaaacgcagtgatatttaatataatactaaaaatgttatcaacaatggtttacattgtccagagcttttttttggaaactcattttgcagaggttgtagattcattatttttcttaataacacactataaagaataataaaagtgcttcgcattgcctagagcttcggccactttatcaatgaagtaggaaagttattgttttgcttaataataaggccttacgcttcagggctaaagaaaagccttttcttacagaaattaaactccaattacagcaggcaccgcccggcgagttccggcctccaggcacctgggcaggtgggcgttgggcgggctgcgggctgacctgggccgccccgcccccaccccgccccagctgtccccgggctgctccgagaggaccccgggcccccacctccacccctggagcgcgtcccggagcgggcgggcggccggcgggccaggcccctccccggcgccgagccgcggccgcgcg

SEQ ID NO: 10983 - DNA, 812 bp, Homo sapiens
  source 1..812: mol_type = other DNA
tgcttaataataaggccttacgcttcagggctaaagaaaagccttttcttacagaaattaaactccaattacagcaggcaccgcccggcgagttccggcctccaggcacctgggcaggtgggcgttgggcgggctgcgggctgacctgggccgccccgcccccaccccgccccagctgtccccgggctgctccgagaggaccccgggcccccacctccacccctggagcgcgtcccggagcgggcgggcggccggcgggccaggcccctccccggcgccgagccgcggccgcgcggaggaagcgaaggaggcgggagcggagacctcgctgcgctcatggcgtcgcccgggtgagtgccgcctcgcaggccctgcgcccccgcggctgccggcaggaacgggagcgggacccggagcggctctggcctgcgggctctggtctgggatgcggcccggacccggccaggggcgcccccgcccgccaggcccaccaggcccacggcccgctcgcgccgaccttgggcggaccggccgcgcgggcgtggggggcgggcgggggcgccggcggaggacagcggtcccccgggatgcgggggtccgggtacgcgggcctaggggatccggggagggcgcgaggcccggaggtgcccggggcgcggcgggagcgagggcccggcgagcggctggggaaccggggtgcgggtcctcgccgcggcccggggcaacccgcggaggcctggaaatgcttcgctccggcagaatgtcaggatccgggcagatgcagaccctttgctgacagccggagagccgct

SEQ ID NO: 10984 - DNA, 616 bp, Homo sapiens
  source 1..616: mol_type = other DNA
ctgtactccagcctgggcgatactccagcctgtaaatactacttcacaacatgcttacatttactattatgtgaataagtggaatacaaaatgcagtataattgttttaaatatagaaaaaaaactgaaggctaaaatgttaacaaatagtaaagtgatagaattagaaatacttctttcttctactgttgtgcgattctagtgaatgcattaaacgggatacccacccagcccttctggataccctacagggggaacccgctgtccagaagcctgcaggtggccccacggcgccccgcccgcatgacgcagccctcgtggccacggcccggccccgccccgcgctcgcgcaagctgcgcgggaggctgttctgcctccttcccaggcaggtgtatccgcgactcgcggagcctccgtcacctttcacttcacggcagcggcgccccgcccacacctcgacgcttcggacacccaaagagttggagggtgggaaagagcgccatcctaccccgctgccggggacccgggcggcccggccggggctgcctgaggcggcccgctgccggctcagccgccaccaagctgcacgccgggagccgcagcctgcgcttgcgc

SEQ ID NO: 10985 - DNA, 357 bp, Homo sapiens
  source 1..357: mol_type = other DNA
ttgagacagagtctcgctctgtcacccaggctggagtgcaacagtgtgatctcagctcactgcaaccttttttttttttttttcaaaaaaatgttggttgcaacctattaaattgatttcgtgacacactagttcatagtttccggagatctccaaaactgcggagagttttgcgtgtgaacgtatgcacagacatctacatggaaatgtatatatacttccttgagggtgctccgcgcgtctccgtaaagccaacgagccaggtgcgggtggccagcgtaacccgggcagccccgctgcttcccctcggccgcgccaggacgctcggcacgcggcgacgacggccccacagtgccc

SEQ ID NO: 10986 - DNA, 452 bp, Homo sapiens
  source 1..452: mol_type = other DNA
acctactacaggtaatgactaaataagttactagtcatgtacttgtggaaagttaatgttaaaaattagggcatgtagtcccagctacccaggaagctgctgtactccagcctgggcgatactccagcctgtaaatactacttcacaacatgcttacatttactattatgtgaataagtggaatacaaaatgcagtataattgttttaaatatagaaaaaaaactgaaggctaaaatgttaacaaatagtaaagtgatagaattagaaatacttctttcttctactgttgtgcgattctagtgaatgcattaaacgggatacccacccagcccttctggataccctacagggggaacccgctgtccagaagcctgcaggtggccccacggcgccccgcccgcatgacgcagccctcgtggccacggcccggccccgccccgcgctcgcgcaa

SEQ ID NO: 10987 - DNA, 284 bp, Homo sapiens
  source 1..284: mol_type = other DNA
aaagcacagtcactttcagtatttattcgtgtattcatacatttatgcatgtttctttcacagatcaagtgtccacaacgctgaagacactgggtccctgcggccaggcttccaagtcgagcggaccagaagacgggctagtctgcgccccaggcctgaggacaaacagaaggccgggtcctcccttctcccgcttgtcccgcgggacctgcatgctagaccagctggccggacagctcgctaggacccgcgggtgcggctggcccctgtcggctgtcaaaggg

SEQ ID NO: 10988 - DNA, 365 bp, Homo sapiens
  source 1..365: mol_type = other DNA
aaagcacagtcactttcagtatttattcgtgtattcatacatttatgcatgtttctttcacagatcaagtgtccacaacgctgaagacactgggtccctgcggccaggcttccaagtcgagcggaccagaagacgggctagtctgcgccccaggcctgaggacaaacagaaggccgggtcctcccttctcccgcttgtcccgcgggacctgcatgctagaccagctggccggacagctcgctaggacccgcgggtgcggctggcccctgtcggctgtcaaaggggcggcccggcccggcccggaagctacagcagcggcgcggagactgcggggcgggccatggcggcgaacctgagccggacgt

SEQ ID NO: 10989 - DNA, 309 bp, Homo sapiens
  source 1..309: mol_type = other DNA
cctggatggggcccatgcccaagggtctggccatggccccttcattagggccccaattgtgctaagctgaaagctgacagtcctcgggaccccggaggaaagacaggggccctttccccctttctgctgagggccgcctcctagcctggctgcgagcagagaatggctgataggccactgagcgttgccctggagagcccctccagccccactcagtctgggctctgggtgccagctggttgccacctgaacccaggccaggcccagcagctcagctactggtcacctgccaccgcctggaatgctgat

SEQ ID NO: 10990 - DNA, 314 bp, Homo sapiens
  source 1..314: mol_type = other DNA
ggtaggccagcagggatggaggacgatccaagtctcagagtggaagtgtcgccctggatggggcccatgcccaagggtctggccatggccccttcattagggccccaattgtgctaagctgaaagctgacagtcctcgggaccccggaggaaagacaggggccctttccccctttctgctgagggccgcctcctagcctggctgcgagcagagaatggctgataggccactgagcgttgccctggagagcccctccagccccactcagtctgggctctgggtgccagctggttgccacctgaacccaggccagg

SEQ ID NO: 10991 - DNA, 589 bp, Homo sapiens
  source 1..589: mol_type = other DNA
aaatttattgattctaagaatcatctacgtgagtttttttgctaatttttctattaaattattgtctttttatctatggacaatttgataagattatcatgagataatcttaattccaaaatatctatcttctgactctaatttttaatcagatttaaaatttgtctgtagtccaagtttattgtgatatttagatcataaaaacattcaccgactttttcaaatggcctgccagttgtcctaatgccattcccaccagcgcattggaaacccgcgtgtcggtcctgcgcccgccggcttccgtgtgacagtcccgagcgcagagggatcgggcacagcccgcacgcgtccgccccgagccgccggctcaaccctagacccagccccggcgccaaggacacagcccaccccgctccgcccgggcctaggtcccagcgctttccgagacattaatttaaataaaaggcgggtcctccttccggagcggccgggacacccaatcctgtaggagcccggaccctccccagcgctccgactggcccatagggcggggccacgtcctcttccagccggcggccgcccgcccgcc

SEQ ID NO: 10992 - DNA, 630 bp, Homo sapiens
  source 1..630: mol_type = other DNA
tgttgatggccgttgtagggcagccaacatttgccctggagaagccaccaggcaccaaggtgacatccctgatggatcctgggatcagttgacactcaatccacctgccttctgggtcctctgggccctctgggtccatgtggcactttttaaaaaatcggaggggagggatggcatgcccttacatgggactcctacccccagcggggcagctggccactctgagggcagttttgcacctgcctcctggctggaaagtgagttcccactgtgctgtccctccctggggcccagcacggggcccggccccacaccgacctgcccatgggcagaggctccagagcctggcctccgaattgagagaggtctcagaggcctgacaccacggctttccgtccagggttcctggtcacccgcggagggctcagagccccggtggactcggggtcccgccttaaggggggtgcctagggcagaaggaggagggatgtcggccccctcagaccctctgtcctaggcgcaagtctccgggcttgggacgctcgccgccagcgcccgcccgcctgccccgctcctcctcctcctccccgggggtggggagccggctccggaagccccggcgcccccgcc

SEQ ID NO: 10993 - DNA, 260 bp, Homo sapiens
  source 1..260: mol_type = other DNA
aacaaaaattaaaatattaagtaataattaacgagtgttaatatccactcgttgtggagagttagggggaggctggcggccgaccactgggaggtagggcctgacggggtgacgcggtcagcccactggaggccgacaccccccgtcccgccaaccaaagacccgcggcgccggcctgcgagcccccgccccgcgttgcccaggaaaccgagggtgtggctccgcgttctctgggcgtcccagggactgggcgcacagtg

SEQ ID NO: 10994 - DNA, 402 bp, Homo sapiens
  source 1..402: mol_type = other DNA
ggctccagtggaggggcagcagccagtgagcccagcctggggtggcccactcctgctgccctcggccccagaagctggcgagactgcttctctggaacagcatcacgcaggcctgcccatcggcccactgtgcaccaggccccaagccaagcaaagtgttcttcttggggtcagccttctgccccttggtcagaggggcaaaaggtcagagcctagggtcaccaaaacctctgggaagccccgggggtctcaggccacctcccatgcctggcgggggccctggactggccctcaccagctctggccaggctctgctccaggcagacattgtgtctggccctgccaggatggtctgttaggcctcccccagcccaggcgggggctgccaagtttggttaagag

SEQ ID NO: 10995 - DNA, 606 bp, Homo sapiens
  source 1..606: mol_type = other DNA
gggaggcctccgagcagctgcgcacacgcggagccttcgagacgcgcttcgtgtcgcgggctggggacgcccgggcactgcagacttggtctcagggcgacgctgagtcccaggcccggggcgcagggatgggaaactagggcctggggcgggattccgggcgtgggcggggcccggggcggggcacagggggcgggggagtgggcggggcccgaggccgggcgctggagagggatgggagcgagcctgcgtccgggcactggtccccatccgtgaagaccctgggcttagttagagggctaaccagtccggtgagcgggatcgcccccatttctccagagaggggtcccggctcagcgagggaaagaggccgccgctggggggacggctggccggggcccctccctggagaacgagaggccgccgctggagggggatggactgtcggagcgacactcagcgaccgccctacctcctcccgccccgcagcgacacgggcgaccgcaagcgagcacgctgggggtgcgccgcgcctgcgagagcgtgtctacgcgcgctgcgcacatgtgctcggcggggctggcgggcgtcatcaaccgcatgcgc

SEQ ID NO: 10996 - DNA, 542 bp, Homo sapiens
  source 1..542: mol_type = other DNA
tttatttaaattaaatgccagcaacatggtgcgtgcctctgatgcagcgtaggtcccgtgctcggcgcagggccccctgcaaggaagcccaggggcacttgaacgtgcacgttctaaagctctggctcattaacggctgggggagtggggatcgcagtgccccacgtggccgcctcgtgacctcagtggggagcagtggggccggctcccggcttccacctgcatgaggggccctccctcgtgcatgtccaggtatgagaagctcatagcttgtgctgctcaggctcgtggacgaaaacctgctcttccacggggaggcctccgagcagctgcgcacacgcggagccttcgagacgcgcttcgtgtcgcgggctggggacgcccgggcactgcagacttggtctcagggcgacgctgagtcccaggcccggggcgcagggatgggaaactagggcctggggcgggattccgggcgtgggcggggcccggggcggggcacagggggcgggggagtgggcggggcccgaggccgggcgctggag

SEQ ID NO: 10997 - DNA, 494 bp, Homo sapiens
  source 1..494: mol_type = other DNA
ctgtgctgtgtgcttggcccagaagaagggcaagtgggtggctgcttcttggcctggctgaaccagaaggccccagtgcgcccccatgagcaaacagtagctcagagctgggggctgcacatgagatctgatgaggccatctcttgggagtgatcactctggccattggcgagagacctggcattctgacaagccagctccagctaattttagcaggctttggcaggtgcactcccaggtgagcccaaggagaggcctgggccagagcctggaagtcatggtctatgcccatcagtcacaaaattaagaatgatacccctgttttttgtttgtttgtatgaaatgcactgcagtccactggggatccccttgcaagagcaagtccagacctgcaccagcgcgggccaggcccccttagaaggcagcccacagagtgtggccggctgccccaccctgcctctgaccccatggcagggggcagagtatttgagcag

SEQ ID NO: 10998 - DNA, 468 bp, Homo sapiens
  source 1..468: mol_type = other DNA
aagtagtgacttaggcagaagtaggctccccactgcacagggcaacctctccaggggcacttgggccaggctgcttcctgagcagggccagaggaggagccagtccctgtgggcctctgttctgacagtgtcaacctcagccaggcggccgcgccaaagccctccgatggggccggctggccctgcgacctggaagtcaggctgccaagaggtccaggcagtggcctccactgtggagggtctctggagagtttacagcccgtgagatggtcccaggggcctgctcctgagccacgccacagactcacgggatcctctgctcatcagaacaggagtgtgggagaccctgagacactgccccaggatctgaacaggtcggtcactgtagtgacaaggcgattgagtggtcaccatggtgatggggatggaggctctgctgaggccactcctggtcaccatgacaaccac

SEQ ID NO: 10999 - DNA, 473 bp, Homo sapiens
  source 1..473: mol_type = other DNA
cagggtggctgtgagctctcgagcagcccctgttcccctggctcagggtcgctggggccaaggggagggggcaggccccaccctttcactttctcatagtgttctcttcctgaggagtcctgtgagggcagcacatgagccctctaccgggccccagtcccctcctgctgtcaggctaggtgggccttcgagagagagaggagctgcgtgcgcgaggtgcgcagcagatgcagggcgccggtgccctgcgggtgcgggtgcagggcgtgcagggggcggcgggcggggcgggcgcggcggcggcggcggtgacagcggcgcccgcgcctccccgcgcgtaggtgtgcggcgcgctcctggcgaggacggagcgagcagatctcgcgtgcgctcgccgcccggcgcagcccagcccggcccccgcctggcgccgcgagccgaggtgtctcccgcgcccgcgcccgtgtcgccgc

SEQ ID NO: 11000 - DNA, 400 bp, Homo sapiens
  source 1..400: mol_type = other DNA
cagggatgtttgcttcaatgttcatcaaggatattggtctaaaataggatgatgctggcctcataaaatgagttagggaggattctctctttttcttttgattggaatagtttcagaaggaatggtacaaaaaatgatgagttcatgtcctttgtagggaccaacatggcacatgtatacatatgtaacaaacctgcacgttgtgcacatgtaccctaaaacttaaagtataataataaaaaaaatgcttactttaaaaaaagggaggcccagcaccacccacccgccgcgcgcccgactccacctggcgagcagggaggggccaagcttacgcgaggcgtggcatcccgcccctcgctgcgggctcacatttctgcatccggagtatgcctcaaccagg

SEQ ID NO: 11001 - DNA, 444 bp, Homo sapiens
  source 1..444: mol_type = other DNA
ggatgctggagcccagtggtctaaagtcccggttctggacagcagccctggtgccaggcctcagggaaggctgttttgtgggaaaccgggtcgccctgcctcccctccttggctgctttcaggagggggttggggtgtgtgggccctcctcctccaggcaaaagcagggggcaggcaaatgtgcacctttacctgatcagggtggctgtgagctctcgagcagcccctgttcccctggctcagggtcgctggggccaaggggagggggcaggccccaccctttcactttctcatagtgttctcttcctgaggagtcctgtgagggcagcacatgagccctctaccgggccccagtcccctcctgctgtcaggctaggtgggccttcgagagagagaggagctgcgtgcgcgaggtgcgcagcagatgcagggcgccggtgccct

SEQ ID NO: 11002 - DNA, 505 bp, Homo sapiens
  source 1..505: mol_type = other DNA
ctgagttggattttatttacaattcattaaagcttatacactatgaagacatgttaacttgcatgttttaatctagaagaggtgcaaatcatttctatacactagaaatgataatctatggttttatcatcttgtagtcaaaatgtttacacttcctcaaaatgcttttgaaccagctttaccatatcattgttaatttgctgaagaaatcttggatatgtgttcatgatatatttgtatgagtgtcatgctttttacttttttaagattatactttgacagacactaacaacatatgtatatatgacgtatatatgtatatacatactatacacacacatacacgtacatacgttgatgagtttaactcacagatctgttaataagaaaagtcacgtgacagaagccacgggcttccttccgcgtaggaaagcccggggccgcgggggccgaacgagcacggaccggaagttccgcagccgcgccgtccggcggagccgttggc

SEQ ID NO: 11003 - DNA, 607 bp, Homo sapiens
  source 1..607: mol_type = other DNA
aatatgttaacatgtaatgtgttttatggtcatttaaaaatgattaaataaatatttaaacattttatgttttaatttctaatgtggtaaatattgataagcataacccatatcaacaaatgttctttggaatgttcaacaaattttaagaggattaatggtccctaaatcaagagtttcagaaccactgttctagggcaatttacctgagttggattttatttacaattcattaaagcttatacactatgaagacatgttaacttgcatgttttaatctagaagaggtgcaaatcatttctatacactagaaatgataatctatggttttatcatcttgtagtcaaaatgtttacacttcctcaaaatgcttttgaaccagctttaccatatcattgttaatttgctgaagaaatcttggatatgtgttcatgatatatttgtatgagtgtcatgctttttacttttttaagattatactttgacagacactaacaacatatgtatatatgacgtatatatgtatatacatactatacacacacatacacgtacatacgttgatgagtttaactcacagatctgttaataagaaaagtcacgtgac

SEQ ID NO: 11004 - DNA, 483 bp, Homo sapiens
  source 1..483: mol_type = other DNA
tcaggcaggagacaggtcccttcctgcagctgtctccagtaggtaagctgcccttatctgcagctcagctttggtaatgggggcccattaccaaatgggggtaccacacccctgggcccaggtggagcagggctgctgctcaaggctcccagccatgctctgtcccttgctaggggtgaccggtgggacaggcctgggatctggggtctctgtcaactgtcaggccctagagtctgttaatattaattaacaacagttgcctctgagcccattgctggccctggtcccaagagggggtagggaggttcctcggccatgctgagctcctgaggccgggtcccagccagtgcctggtcccatctgtgcctccaggccctggcaccaactccagcagtgttagggtagctgactcagccctctgatcattaaccagcagggctcagcctcattggtccctaacccagtcaggccagggttgtcatc

SEQ ID NO: 11005 - DNA, 548 bp, Homo sapiens
  source 1..548: mol_type = other DNA
ggtcatatatacacatacacacacacgtacgtacatacatacatacacgctggtgggaggaccacttgagcctgagatcgcgccagcctgggtgacagtcagatcaaaaaaaaagatttgtgattaggattcttagtcctcacctgtattattttcctattgctactgtaacaaattaccacaaatttactggcttaaaacgagcaagtctgtaggtcagaagtctgacacgggtcttaactggtgacccgagtcagattctgacaggcagtccggttagggagccctacagcaagtgatgtgcccggcgggacactaagagacggtcatgcccgtcacgacctcggccctcgccccggccgaggcttctcctgcaggtcgcgagaatcaggtgcgtcagcggcgtccgggaacgccggaagagccagtggagcggctctgtagtccaaagtacccccagtcctagggactgcgcagtcgcagagctccgtccgagtaccggaagcctaggccgccagcacttccgggaagtgacttcgtctccgaag

SEQ ID NO: 11006 - DNA, 304 bp, Homo sapiens
  source 1..304: mol_type = other DNA
aggctggagggtcccgaactcctgggctcaagggatccgcccgcccggcccctgcccgctcgcagaggctcgccgcggcaggctctcccgacgtgacagagtgtgggtcaaacatcacagggctttttgtatttagcacagaagtgctccgagacccaaatcgctgactggggccgagggcgggcgtgactgcgcaggcgtgcctcccctgcgagatgccggaggtaagctgcgacgtcattgcgcatgcgccctctactctcgttgcgggggtaggcgggcgccgagggtggcgcgcaggcgc

SEQ ID NO: 11007 - DNA, 360 bp, Homo sapiens
  source 1..360: mol_type = other DNA
gtgcaatggcacgacagcctcccgagtagctggggcctttccccaaattttaatactttaaaatagggaacatcttacattatctttgataggtagctctcctgtctgtgaagcgcttgtcaggacaatctcaaaaacggagattctgttattcaaattgtttatctcttgataggttcctagatatcttactttcagaaattatttatgatagcagaacagctgggctccagctggccctggcttctgcaactgcgcagtcggcgctgtgacgcccggcgcggctctgtgacgcggtcctctgtaagaggggttctccaggggaatacgccggggcggggccgagagtttggagccccg

SEQ ID NO: 11008 - DNA, 436 bp, Homo sapiens
  source 1..436: mol_type = other DNA
gacatataatgtatgattccacttatacgatgtccttagagtagtctaatttagaggaaacagttaagatggtaagttttacgttatgtgtattttaccacaattaagaaaaattaattatgggtagttgagagaatgtggtcttcctcaacttacggtaggaaaagtcaagaataactttcaaagatcgaaactgatcagagaggctattccatcaggctagactagctcaatagtgactttttccagagcgaacttgttgtgtgtccccgcccgccgggccagagcaatggactccgggcgcgggcggggcgcgggcggggcgggtgggggaagggcaaggactcactcttcctttcctcctccgccggggcccgccccgagccctggccccaccccggctcctcggccccgccccggcgtcctggccccgcct

SEQ ID NO: 11009 - DNA, 644 bp, Homo sapiens
  source 1..644: mol_type = other DNA
gaaacagttaagatggtaagttttacgttatgtgtattttaccacaattaagaaaaattaattatgggtagttgagagaatgtggtcttcctcaacttacggtaggaaaagtcaagaataactttcaaagatcgaaactgatcagagaggctattccatcaggctagactagctcaatagtgactttttccagagcgaacttgttgtgtgtccccgcccgccgggccagagcaatggactccgggcgcgggcggggcgcgggcggggcgggtgggggaagggcaaggactcactcttcctttcctcctccgccggggcccgccccgagccctggccccaccccggctcctcggccccgccccggcgtcctggccccgcctccgccgcccggccccgccccgctcccggcggactgcgagcaggaagagcgcagtggctctgccgacgccgcgttcagagggctgggggcgcaggtcgcgatcaggctgcgtctcctgcccgcccagccacctgcggccctggccccaccctgccgctttgggccgctcgggctcgcggccgcccccgccccgagcgccggctcggggctctgctgctctggcctgggaggcggggccggctgcgcggcgtcatgcatatgcatg

SEQ ID NO: 11010 - DNA, 356 bp, Homo sapiens
  source 1..356: mol_type = other DNA
aagaccagcctggccaggcgggcgcctgcagtcccagctacttgggaggctgaggtgcagtgagctgagatcatgccactgcactcccaagattgcaccactgcacttcaggcctgacagtgtggcaccgcccagtttgcgcccagccctgggcagcccccaccctgggcacaggctgcccctgcagcagggcatgacccagtccctgtccgtgcctggccccacgggactgggcaggctcctccaggccctgtgccgggctccgtgctgagtgctgtgccttggggcagtcctgtcctcgagagcgacagggtggctaaagaggtccatgtgtgctcatggaccacagctctaca

SEQ ID NO: 11011 - DNA, 554 bp, Homo sapiens
  source 1..554: mol_type = other DNA
caagtgcattttaattaaagtattattaatgtcttttcgcttttaaattgtgacttatctttcacccaaaaatcaaagcacaagccccgaggctgtgcataatgcatcttcacacctgttttaatggcttcctcctgaagaagattcaatattttcggaaagtagagcattttgaaagcatttcataatctctcaaaacccttcctgacattgcctggtaggacgcgacgtgtctcggggacgcgccatccccatttccgctcgcggaggcgtagggtccgggcgcgggaccccagtcgaccttctggcggcgcgaccttatgccccctctgtgcaatggggagacgcgcctcatcgcttgacaacggccgaagagccgccgcgcttccgtctcccgcgtgcgcgcgccatgcgccccgagtcccatgccgcagccaccgcgacggagcccgcaggcgggaacctgcctccgcgcgttagcgcgcacgcgcgcctcatgtgtcgtgtcgcagacccgattggccgggacggaggcgcgagaccgggttgcgggc

SEQ ID NO: 11012 - DNA, 621 bp, Homo sapiens
  source 1..621: mol_type = other DNA
gaactttttccagtctgcctggaagccacttcttccagagtgatgcagtgtctggagattttggccactccctaaatgcagccgctccccaaatgcgctgcctcatcttcaaagtgcagggacagcagctctgagatgaggccacagggctccaggcatgttcctgaggggtcccactgaaggccagccccatgcagaggatgctctggggtcctctgtccctcccccgtggctggggtggggaattgcagtgctaggaccactggcccttggcaggtgtctacaccccagtgtggccttcacactgcaaagaaggctgttgcccccaccccaaaggcctgggcattaggatcctttttcatttttgtattaatgtacaatgtacatacagtatattgcatctagtgttaaaaaatctttctttaagaagccaacccacggagtcttggcttccggaggacccagcatccggcccctcgcccctggcgtgcaaacgggtcagaccgttaggcacagcctccttgcaagtgcggagggcagcccctcccaggacttcctactttacaccagcactggaggaggctggtggggcagggcgggggcggtggggcctcccctagc

SEQ ID NO: 11013 - DNA, 232 bp, Homo sapiens
  source 1..232: mol_type = other DNA
gtaatacatcttggggcgcgcgcctgtagtcccatacaaataacaatatgtagccaattgatagcttttgttttggtgcagtggcgcgatctcggctcgcctcagcctgccgcggaccttgtcagggtccgcgctgagagggccagaatacggctgagcatgaggcctgccacgaataaatcctcacagtctgggctggaggccccgccacagccgctggggttcgaaccaa

SEQ ID NO: 11014 - DNA, 423 bp, Homo sapiens
  source 1..423: mol_type = other DNA
gcagacctgctggtttccccggacctcatctggaaaatgtggaaattataccggatgactgggtttgtctaaggcaggcagactttgattccctgtggctcccagactctcggcgggacgccccgcccctcaacagtggccggccgctccgcctccctggacgcgaggcaggctgggaagtcggccgcggagctgctcccgcgcgcgctcccgcgcgcgctgagtgggcggagcgaacagggggctgttctcggccgtcctgaaggggcaggatcttcagcctgtgggcggtgctctcgccgtgagcggggccaacgggccgtgttctccctgaaggcgggcggggcctgcgctggggggctcgggcccggaagtgcgggtgtggggcgcggccggggcggagacttcgggcccggctggcgg

SEQ ID NO: 11015 - DNA, 347 bp, Homo sapiens
  source 1..347: mol_type = other DNA
tacaattttatttttagtttacaaacacaaacaaacgtaattatttatttttatgttttttgttttgtttgagtcttgctctgtcaaccaggctgagtgcagtggcaagatcgctgctcaccgattctcatgcctcagcctccctagtagctgggactacaggtgcgtggccaccgcccaccgaggcctgggattacaggtaattattaactccacagtatatagaccttttactttgtaattaaacaccactatttaaaaatactccgtatgaggacgccgggcgtggcttccggacgtgcggggcgaggctcgtctcgtttccgccggcgctccgagtgacgtag

SEQ ID NO: 11016 - DNA, 215 bp, Homo sapiens
  source 1..215: mol_type = other DNA
aatgtgtagttgccacaccctccagtctagcccctccctgcctgggggcagctctggactctggtctactttcggccagggcacaccttgagcctggacggaagtccctcccacccggcgcgcctgcagggactgcacaacggggcacggccgcaggcgtggtctgggggtgcggcctgagggcggaccccctgaggccccgccccacccccggg

SEQ ID NO: 11017 - DNA, 298 bp, Homo sapiens
  source 1..298: mol_type = other DNA
caaggggcaggcctggagcatggcacgctccctgatcacagctctccactggaaggccatttctttcgacttctttcctgtgaaagagaatatccgagaaatgagaattttaactaaagagaaaacctttgcatttgctactgataaatatctggaaagtcaacaagacctgcctttttcctgcagaaagagaagtagggctcgcagagacctggattcaattaaagagcctggccagctggacctgggctgtctttttgacaaaaacaaacggcgcggcctgtgccctttataaggt

SEQ ID NO: 11018 - DNA, 565 bp, Homo sapiens
  source 1..565: mol_type = other DNA
tcatgtacttgattcgactcgcgggttttaacccccatgagaaaacgtttaaggcaaacagcagcgccccttttcgccaggagcccatcctggttcagttcagtacccaggaggaatccctcgggccgactcccaggactagggtctccgcgaccctagagcttagggaagcgaggggcggggggtccctcatgcgcatggaagggacgtacgccccaggcctccaccttccggttggacgtcgaaggggcgagggccctgggttcgcagtcagacgcgggcccctctcaaagattaactgccccgcaacagggaatttctattttcgactccccaggtgacgccaagagggacgcggctcctccggcgggcgggaacgcaggacgcggagttggggcgcgggctgtgcgcgcccaggttcgcggctcccggggctcggctgtcgcagcgcggtcgccgccgaggaccacggtcggggcgcgggcgggctccagtgcgcaggcgcggcgggcgggaggggacgcgctccgggcgcgcgcgcggggcagccggcgccccaactccg

SEQ ID NO: 11019 - DNA, 516 bp, Homo sapiens
  source 1..516: mol_type = other DNA
aaatgacaatgaaaattgcctattaaaggactatttggttatttgtcatgggtgtaaactccatttgaaaacatattgtcatttaaaatatttgaaaaaaggggcgaaggccccgggcgcatcttcagatgcgtatttgtgggcccctggggatataaacagcccagcgggtgtaaattaaaccccgcagtgcggagcgctgtatgccagtttccccgacaccggctcgccgcagggagacctcaccccgagagcggaagggtggcctggagtgccggggtggccgggcacaccttggttcttgtagacgacaaggtgacccgggctccgggcgtgcgcacgaggagcaggtgcccgggcgagtctcgagctgcacgcccccgagctcggccccggctgctcagggcgaagcacgggcccccgcagccgtgcctgcgccgacccgcctcccaacccccactcctgggcgcgccgttccggggcgtgtcctgggccaccccggcttctatatagcgg

SEQ ID NO: 11020 - DNA, 173 bp, Homo sapiens
  source 1..173: mol_type = other DNA
ctctgagattctctacgaggtcactcaccaggaacctgtttgctggcgcctggctcctgagcggccccccagagcagcgcaatgcctgcgttacctgcagttttcagatgtggacgactcttcagttctacttgtagaaatagttctagaaaagatgagaggttatgacaggg

SEQ ID NO: 11021 - DNA, 347 bp, Homo sapiens
  source 1..347: mol_type = other DNA
gctgggtttccaacccaggttgagatgtctggaattcatcctccctgggaagaacctcattttgttcctgggaagaacctcattttgttcctgggaagaaccttgttttgttcctgggaagaacctcattttgttcctgggaagaacctcgttttgttcctgggaagaaccttgttttgttcctgggaaccaaagcacagagctcactgtggggaggactcagaagggtgtggtctgcaaaggagacccagacaaggttaggacttcctattggaggtacaagacacactagagggtcagggccccaaccatccttgagtggctcagccatggaggatgattaacca

SEQ ID NO: 11022 - DNA, 483 bp, Homo sapiens
  source 1..483: mol_type = other DNA
tccaagacttgccctggaccctgctccgggtgggattctgagaccgcctgctccacgtggcagatgaaatctgaaaggaccacaaaatttctcttgtgacctccctggaggaagagcacttttccattcccccgatctcacaaatggggaaactgaggcatggacagtcaggatggacaacctataggcctttcccattttaagaagtcatgtgacttctaaagacttccctgaccctaggctttccggatcccgggcggaacctgcaagcctccagaccacttggagcctgggctgctccaggtcctctctgcggccagcgaagggaggtcccagggcgcacctcggcagggcgggggaccccggtgaagggcgccccaggtgacccgccaggctcggggcgcgggcgcgggggccggccgtggcgattgcccgcgccgcctcgagggggccctgccgcgggcgccggcagccagccaggag

SEQ ID NO: 11023 - DNA, 504 bp, Homo sapiens
  source 1..504: mol_type = other DNA
tgtctcctagagtgtaggaaaaatgcctgcctcatctctaggggctggggcatggtgctcatgaagcctttgcctgggcaggggttgttcaagtcttccagaaaagcagctcttgggagtcagagcgtggctcaggccccacattctcagcttctgaaagtcttttccaggataattctgcttcccccgctgccctgaaggggccagaggaacagggcaggaccccagggctgcggatgggttaggcagctctgttaagcagttcttggtccaagacttgccctggaccctgctccgggtgggattctgagaccgcctgctccacgtggcagatgaaatctgaaaggaccacaaaatttctcttgtgacctccctggaggaagagcacttttccattcccccgatctcacaaatggggaaactgaggcatggacagtcaggatggacaacctataggcctttcccattttaagaagtcatgtgacttctaaagacttccctgac

SEQ ID NO: 11024 - DNA, 297 bp, Homo sapiens
  source 1..297: mol_type = other DNA
tcctttatcataaattctaacagcagttttgaaaactgttatactagatagctataaaggaattaaagactgtacaggaagcatggtgctgatgaggcctcagagtcattggtgagggatccaccccctagaatacccatgaataagtgttggccaacataggttttcaaattcacaacagatttgtttataatatagcatccttacatagtctgtagactttttaagcaaatattttatatttttgctgcaaaattctaacactgccaaacgtttgcttaagttcccttctgcaga

SEQ ID NO: 11025 - DNA, 319 bp, Homo sapiens
  source 1..319: mol_type = other DNA
cctcgctcggctggagtgtggtggcacgatctcccgagtagctgggacggccaggctggtctcgagctcctgacctcgtgatccgcccacctcgacctcccaaagtgttgggactgtttcaggcagccacaaagatccctacctaaaacacacttttgttttgttttgttttgcagagtctcactctattgcacagtggtgacagatgtgtggccaggctggtctcaactgtcaaaagcacacttcttaggaaggaatttgtctgacagtgttaggaaaacaaaagctgtttgtcctgataagaggtcacaagtacaga

SEQ ID NO: 11026 - DNA, 358 bp, Homo sapiens
  source 1..358: mol_type = other DNA
tggagtgtagtggtgtgatctcagctcactgcaaccttcccatgtagctgggattacaggcacatggctggtctcgagtgcaagcagtcccaaacttgtaaaagaacaatatgaatgttttatttataacatgttctgctttaaaagtatttgtcttaaatttcatttacatttcctaaagtccatgatagaggtttgaaaactataaaatgtgcacacatggaaagtctctattgtgttcacaagctaggaaatgcccaaatttgtacattaacacaagctttgtccatggtcggactcctgggcctggaggtgcgagcccaggcccctgtcagtgtgatctccgagggcaggggcg

SEQ ID NO: 11027 - DNA, 520 bp, Homo sapiens
  source 1..520: mol_type = other DNA
ctaaaacattaccccatgtaatacatgtgttatgcttttcttaacaattgcattggaacaagataaatgccaattccctatttgtaatgtacttttgtagtgctgaaagatgattcctactgtgatcatcacactccaagtggccaaaggacccaaggcatttgggaaggtatttaaatatcaagccatgatatttaattttattttgaagatttataattcaaattattgaggattttatataagacagagtacctactttatagcaaatttgtctttatgcccttccactgcaaattacagggcactcatttttcacaaaatcatgatacttcaataactatgttgtttttctttagtggatttctgcaaattaacatcacttaggacatacttatctcacccagagctcttctgggcatgagatctgctccagcccatggggcggagcaaggccagtccttgaatgctgatcagcagccccattggagcagcctgcttgcaaatggggtggaggggg

SEQ ID NO: 11028 - DNA, 677 bp, Homo sapiens
  source 1..677: mol_type = other DNA
cactccgccgcgacagagccagactccgtctcaaaatcatcatcatcatcatctgcattatcattatcttgattctatgtgtcaagttaaagacaaggttctagtctatttgcaaaggacattaaaaataacaattgttaacacagataatctttagtctttgaaaaaccaaattagatacaattgttgcttttaaaatttttcctttaaaaaaaatcctaatgacattatttatgctaataagaattttatcggatgtaataaagttcgtcttgaggcaaactgcagaattatcacttaacgtcagtgttctttaagagtaatatgttcaatttttttagaagtcatttgaaacaattttcagaaccttaatgctgctctaccttaggtatatttaagataatattgtttaacctttataaacgattaattttatttggatattttaaaataacacttgaaataggtgtcacaaaattctttcaaaacggcgcggaggcatacccggagactgggacccccacctcccccggggcgtgccctagccccacctcctccggggcgtggcccggagataaccctggtaagatcgcgtagcccgagccgggcggaaccactgttcgcgctgccgtgtttccgggcggggacagggcgcgacgcttttctgttacccacag

SEQ ID NO: 11029 - DNA, 577 bp, Homo sapiens
  source 1..577: mol_type = other DNA
aaattagccgggacttgcactccgccgcgacagagccagactccgtctcaaaatcatcatcatcatcatctgcattatcattatcttgattctatgtgtcaagttaaagacaaggttctagtctatttgcaaaggacattaaaaataacaattgttaacacagataatctttagtctttgaaaaaccaaattagatacaattgttgcttttaaaatttttcctttaaaaaaaatcctaatgacattatttatgctaataagaattttatcggatgtaataaagttcgtcttgaggcaaactgcagaattatcacttaacgtcagtgttctttaagagtaatatgttcaatttttttagaagtcatttgaaacaattttcagaaccttaatgctgctctaccttaggtatatttaagataatattgtttaacctttataaacgattaattttatttggatattttaaaataacacttgaaataggtgtcacaaaattctttcaaaacggcgcggaggcatacccggagactgggacccccacctcccccggggcgtgccctagccccacctcctccgg

SEQ ID NO: 11030 - DNA, 523 bp, Homo sapiens
  source 1..523: mol_type = other DNA
ccatgaagcaccattggtaatatactcattgtactttctgtagatctggagttctaaacgcgattccatataaatatggttaagagctttaaaaaaagtctctcaacttataaaacagaaatattctcaaaaaataagatataaggaagaatgttcacatgataattttattatcgacacacaatttccaaatacttattagtcttgaaaaaaatgcattagatgagaaatttgcaagcaaatttgtctaaaattaaggattcctttactaagtgaatcattactcctgcatgtccccaatttttctggaccgctctacagtaactgtggttcccagcggcatgaggaggactgaggcctgactctctgcccggttccccgtggcatcgctgcgctgccctgccctggtccggctctgggctacgggcagttgacaggcggcgcccgcgctccgcttcctgacagtgctccagccgcgcccgccggttggccgttcagccgttgccctggcgacgccttggtt

SEQ ID NO: 11031 - DNA, 454 bp, Homo sapiens
  source 1..454: mol_type = other DNA
cttgtttttctttattttcaacaagagagaaccaaggctacctatcttggtgggaagtttcttctctagcagaatcccctaggaatttcacttctgggtttagtgtctggatacaggaaaaggaattcagtgaggttcatgtcttaagaagaagtcttgagatgctgtcttctggatcagctgggacagctgagttgcagctggtcggcacttgctcagaagtgaggacagcacagaaggcctggctgatttgccttttcccaacactaacaactgccaggcactgttctaagtgctttgtattaatatacactaactcatttaacctcataacaatgctacaaggtaacattacccccattttatagagtttggagtaatttgcccaaggtcacacacttcgtaagtggctccacagctgttctgtgaggccacagcagcctaaagcaggagc

SEQ ID NO: 11032 - DNA, 378 bp, Homo sapiens
  source 1..378: mol_type = other DNA
atgcagtggcatgatctcagctcactgcaacctctgccacagctggaattacaggcacctgcccgtgcaatggcgcgatctcgctgcctagtacctgggattacaggcacgcgacaccacgctgacctcaggtgatggattacaggcgtgagccaccactcccggcccaacccttctcaggaactggagttgaggtgctgggctgcccgggcctccaccagagtgcggcaccggccgggggcaggcaggtccggcccctgggggtcattcggccacttagctgcgactcgaagtgaatgagtcacttcccctcctcgggcgagctcctggctttgccccagcaagcgggaactcccaggatcaggaagtcccccccag

SEQ ID NO: 11033 - DNA, 513 bp, Homo sapiens
  source 1..513: mol_type = other DNA
gattacaggcgtgagccaccactcccggcccaacccttctcaggaactggagttgaggtgctgggctgcccgggcctccaccagagtgcggcaccggccgggggcaggcaggtccggcccctgggggtcattcggccacttagctgcgactcgaagtgaatgagtcacttcccctcctcgggcgagctcctggctttgccccagcaagcgggaactcccaggatcaggaagtcccccccagggctctccgctggccccagccgcggggccaccgccagacagacagaccggggatcctgcctggcggcgtgacccgccccaggttaggaccacgtggggactggctgctggttctttacaattgcccagctgctctgcagaggcgaggagcctcccgggaccttcgcgggagggcccaggatgcggtcagctgagttcgccggcccagggcaggcggggcccgagcctagcggtaacccccgggcagggcggggccgctcgcagacgagattc

SEQ ID NO: 11034 - DNA, 520 bp, Homo sapiens
  source 1..520: mol_type = other DNA
tgctgggctgcccgggcctccaccagagtgcggcaccggccgggggcaggcaggtccggcccctgggggtcattcggccacttagctgcgactcgaagtgaatgagtcacttcccctcctcgggcgagctcctggctttgccccagcaagcgggaactcccaggatcaggaagtcccccccagggctctccgctggccccagccgcggggccaccgccagacagacagaccggggatcctgcctggcggcgtgacccgccccaggttaggaccacgtggggactggctgctggttctttacaattgcccagctgctctgcagaggcgaggagcctcccgggaccttcgcgggagggcccaggatgcggtcagctgagttcgccggcccagggcaggcggggcccgagcctagcggtaacccccgggcagggcggggccgctcgcagacgagattcacctcgcaggtggtccggcgcacagacccgcgccccgccgtctgcgagcctcccgagagccgtcc

SEQ ID NO: 11035 - DNA, 363 bp, Homo sapiens
  source 1..363: mol_type = other DNA
ctaaacaaataagtttacaaaataattgagtcagtttctttaaaagccatttatcaagcattcacagcttgtgaaaattgctttattccttctgaccacaactgggggcaacaggaactctggcttccaagacgatggagccaccagctggcaagctgaatccatcatgccacttggaacttgagtcaccaaaattgaaatattttggcaaatttgtgtaataaccaatgcttcagaagaaaagggagggcaccctctcgaaggcagctttctgtaagatttctcagcagatgccgaacaagaggggacatctgatgcctgttttattcagtcacactcacttttgttagaattgactaatag

SEQ ID NO: 11036 - DNA, 484 bp, Homo sapiens
  source 1..484: mol_type = other DNA
ggcagccttctcaggctttcaaggagggctccctaagatttgtttgtctatactattaaaagatagacataattgcagggaagcttatctgtttaccgtccagcactttcagggattctaaaatgccgtgagtggtttccatgaaaattcaatttcggggattaatttgaacaggtactattgacgttttctcgtttacacaagatcaaagagtaaaatttctatttaagttcgcgcttgagatttttacgtttcttactcgtaaacgtctatttcgtttctgaatgcaaagacgagaaagccctggcagggtctgcggccggctgcggaggtggggacgcggccgcgcggacgagtccggcgcagcgggtgcggcggtagggcctctccgggggcagcgcgagggcctcccccggggcagcgcgggccaaggcggggcctccagagcgggggcgcggaggcggctgcggcagggggaggcggg

SEQ ID NO: 11037 - DNA, 357 bp, Homo sapiens
  source 1..357: mol_type = other DNA
agatggtttaaaaaaagctaatattaattcctctgatatcatttcaaggctaatgagggcagtggttaacgagggcaggtggacagctctcctgacactataagatgatcttccggtctattttagaaagtaaatttcatctcccactaagtgtgtattgcatttatatactatctataagggcttttcgatcataatgtcctgaaggcccgggggctgcacagcacagttggcgcgtgtaggccccaccagctatgtgaccaccccggcggaagtgggagcacgtccatcaggtccgttgtccggtcctccgcccgccaacttccggctgcaggtgggcgcgcgttgcctaacgac

SEQ ID NO: 11038 - DNA, 419 bp, Homo sapiens
  source 1..419: mol_type = other DNA
tagaaggtaaatcaatggacctttcactaccttccccttcgtagcagtgagttaactggctcagacttcaggacacactgagtactgtagtaagagctgcatcgggtaaagggccttctcccagaggcagcagaggcagatcctgtctctggtgtgccctggcccccgacttggaggcctcctgggccaggccaagaccttccccggcagcgatgcaagcaggagcacgttctcggccctcttcacagggcgctcctcacaggggccttcctggtggctcctacaagtctggaagggcaggaggcgcatctcactcctctgggtcccctcccctagcgcctggcgggagcccaggctgctcctgctcgggtggagcccggctaattagtgaggggctccccgtagggcgggtgtctggc

SEQ ID NO: 11039 - DNA, 716 bp, Homo sapiens
  source 1..716: mol_type = other DNA
gtggctcctacaagtctggaagggcaggaggcgcatctcactcctctgggtcccctcccctagcgcctggcgggagcccaggctgctcctgctcgggtggagcccggctaattagtgaggggctccccgtagggcgggtgtctggctgcagccacccttccgcacgcacttgtgtgtgcacccaggcggcgccatcctaacttctgccgtgagcaggtgtgaattgcaccttcccctcccttgcggaggatcaacttttcccaccccctcgggtgggcactcgcatcctggggccggagcctgaacccgggagccaaggggccccagttccagggacgtgaagctgagcgtacagcgggcgctcccagacactggggaaagtgctttacgatgtcccgagtccctccagtctcgccagcggggcgagcgtgagggtgccccgaccgaccagcggccccgggtgcagggtggcgggcccggcggcgcgcgtccccctccccctcctggcggcccgcacgtgtcgcccgcgccgcgcccccacgggttacgcgcgggtcccgcagcgccgcggccgagccgggctgcccggcccgcggacacagcgccggccgccgcatcccgtgcggggccgcggcgcgatgctgcgctggaatgaggaagcgcggcggcgaggggagggcccgggcgcggtgcgcgcgggggtggcggcggcgcgc

SEQ ID NO: 11040 - DNA, 864 bp, Homo sapiens
  source 1..864: mol_type = other DNA
agtccctccagtctcgccagcggggcgagcgtgagggtgccccgaccgaccagcggccccgggtgcagggtggcgggcccggcggcgcgcgtccccctccccctcctggcggcccgcacgtgtcgcccgcgccgcgcccccacgggttacgcgcgggtcccgcagcgccgcggccgagccgggctgcccggcccgcggacacagcgccggccgccgcatcccgtgcggggccgcggcgcgatgctgcgctggaatgaggaagcgcggcggcgaggggagggcccgggcgcggtgcgcgcgggggtggcggcggcgcgccgagcgggcccggcgcgggcgagcgggctgcagccggcggcggcgccagcaggtacggcccgcacccgccgccgccccggcggcctttgggggctgagccggagcccggcgcgattgcaaagttttcgtgcgcggcccctctggcccggagttgcggctgagacgcgcgccgcgcgagccgggggactcggcgacggggcggggacgggacgacgcaccctctccgtgtcccgctctgcgcccttctgcgcgccccgctccctgtaccggagcagcgatccgggaggcggccgagaggtgcgcgcggggccgagccggctgcggggcaggtcgagcaggaccgccagcgtgcgtcaccccaaagtttgcggggtggcagggcgcgcgctctggccacccgccgctctgggcggcagctggtggcaacgcaagggcgcggcgggggcggccggcgcggagggggccaggtacggggcccgcgggcggcgctgtgcgcgcggggcagccggtcggccgggagcgcgaaagcctggtctgagccggctg

SEQ ID NO: 11041 - DNA, 744 bp, Homo sapiens
  source 1..744: mol_type = other DNA
gcgccagcaggtacggcccgcacccgccgccgccccggcggcctttgggggctgagccggagcccggcgcgattgcaaagttttcgtgcgcggcccctctggcccggagttgcggctgagacgcgcgccgcgcgagccgggggactcggcgacggggcggggacgggacgacgcaccctctccgtgtcccgctctgcgcccttctgcgcgccccgctccctgtaccggagcagcgatccgggaggcggccgagaggtgcgcgcggggccgagccggctgcggggcaggtcgagcaggaccgccagcgtgcgtcaccccaaagtttgcggggtggcagggcgcgcgctctggccacccgccgctctgggcggcagctggtggcaacgcaagggcgcggcgggggcggccggcgcggagggggccaggtacggggcccgcgggcggcgctgtgcgcgcggggcagccggtcggccgggagcgcgaaagcctggtctgagccggctgaagtgactgcgcggcccgcgcccggggcggtgactgcggcaagccccctgggtccccgcgcggcgcatcccagcctgggcgggacgctcggccgcggcgaggcgggcaagcctggcagggcagagggagccccggctccgaggttgctcttcgcacccgaggatcagtcttggccccagtgagtgttttcaaattgaatttcaataggaaaacttgcctctcttgaggacagtgagagag

SEQ ID NO: 11042 - DNA, 296 bp, Homo sapiens
  source 1..296: mol_type = other DNA
tctaggtcttagaaacgtagagtttcagaggattttgttagggacgcagagcacctaaaacacagtttaataaatgacttcatatctaaaagtttttaaatgtttggtaatattccaacaaatattttttaagacattatgaaaccttatgaagtgccatatattacaattactcctgagaagggcccatttgtcctgttaacaggcctggctaaaagacgtccacataatttctgaacggacaggaagcacaggctcccttcctgtctgtgttttcctaagagaaaatctctgca

SEQ ID NO: 11043 - DNA, 552 bp, Homo sapiens
  source 1..552: mol_type = other DNA
tgatatccactgagtggatgctcttacttgtgtgaaaatccaattcactaaattaatcaaaatacggcactcttcttttgaaaccttgctccagaacaaagtcatgccagactcagtcagcgcagactgcagcagccacaggccccgcgatgccggggtggcctcttgtaacgacgttttaaccgctgacctaagtggatccgctcctctcccgccgcccgctccctgcctgcagcacaggatggcggctggctttcccgagtgggcgcaggtgagccacgcttgctctcccgggtgggcgcaggtgagccattgtttgctctcccgggtgggcgcaggagagccacgctttgctctcccaggtgagccgccgctcgctgtcccggtgaggggaagtgaatttgggagtacttttaaaaatgaagcctatgcacaatgatagctagggcctaggtggcggtgcccgggcccaggtgccgcgcccacgccccgcgcgccgaacgcacgcaacgcactcacgcacgcacgtacggcgcgagtccgagggcgaca

SEQ ID NO: 11044 - DNA, 355 bp, Homo sapiens
  source 1..355: mol_type = other DNA
caggcacctgtaatcccagctactcgctgcctagagccacccgtttagccagctgcagaaggcctgctgctgttctgctggccctcaagtcctgttgccacttcacaaccaggtgtgcaggggcaggtgtccccagccacctcctctgtggtcggggacagttccaggagctgccgattcagcttttttggggaaagaaagccaaaaaataagggatttatctcccacaatgatgacgtctttaagctcaaggacaactagttatgatcaggctcctgtttaaaacacactccacttctttctctgtctccttgggcgggaaccggctttcgggatcgcccatgaggccacacgt

SEQ ID NO: 11045 - DNA, 395 bp, Homo sapiens
  source 1..395: mol_type = other DNA
ctcctctgccaggcactggggcctccctctctgctgggcagggctggcctgggctgagcataccctctcctaaagagagatttcatttagctctgctggtccaaatccattctgtcccacagaggagtctgattgccctcaggccttgaagggagtgcctcactatctctcaggctgcgttgcctgatacctcatccctagcagagagcataggctcctggtagagctgggcttggccaggctcaggtagaacccagcaggaccagaagggagaatgcactcttctcacgcacatcaactcaatccaccttaggaaagtccaccacatgcagtgaggctcagtgccttcaggcctttgaatcacatctgagattgggtgattttaatctgggctt

SEQ ID NO: 11046 - DNA, 411 bp, Homo sapiens
  source 1..411: mol_type = other DNA
gtgtgtgtatgcatgcacttaggtatgtgtgtgtgtgcatgtgtgtgtggtatgcatgcatatatgcatgtgctattgtacgtgtgtagtgtgtataaacatgcatgcatgtatgcttgtgtatgtgtgtgcatgcataagtgtgcgcacctgcagggtcccctcctccctgttgctgccccatggtgggagcatgtttttgggaccctgagcctcccgttggtctcaaagttgctgggagagtcccaggagccctggcccgcctgggaacacagggcccattttttccttggcctctcgccagtcccagcaggccctgatgctcctctccatcctgctaggatggctctctccccctgggggcagagtgggggcaagagccggcggggaggcagacactctgtctacata

SEQ ID NO: 11047 - DNA, 265 bp, Homo sapiens
  source 1..265: mol_type = other DNA
gtccagtcccctaggatagagcaaggagagctcttcccctgtgacaaatggctctagtgacagccctccacgcttggagctgctgggggtctgccagaaagaccatcgactttggggtttttttataaatttgtccaaattccactcagagtattgtttcatgcatctcaactatgatgagtgctgcaccgggaagtgctgccttcaggggcaggaggctgtgtgcaatgcaggcatcacctggtgcagggctggaacatacaca

SEQ ID NO: 11048 - DNA, 261 bp, Homo sapiens
  source 1..261: mol_type = other DNA
agtttcagaatccattgtccactgtttctctgctagaggggagtagaaaatctgctttactccttgtaaacggcaagcacatagcagatgcttggtatggaaagagcctctcccttcctggccggccctgcaggtggaaggttgctcgagcaggcggcatctctagcttgccgcggccgcgatgtcccccgcctgtcggcgtagcgggtccttgcccatcaggcgagcagagggcccccgccgggcgttggggcgtggccg

SEQ ID NO: 11049 - DNA, 452 bp, Homo sapiens
  source 1..452: mol_type = other DNA
acagtaacaccacagttcatgaaggttttgcacaaagtgcacgctctatgaacttatcgttaagaatcgccccagacctggctggctgtgagcaaacccaggtttccttttcccagacgacagagtacggggcagccccagctcttccgtcccgtcctgctgcgcccaggataaaggatctggactgcgcagttaatactttgtgcgacaggtccaacctgagccgcggcggtcgtggtcccgcgcccgagtcccgaggacagcaggaggggggaacccgctcagcagcccggggcaggaacctccgggagcttctggccccccggccgtccggcccgcggcccgcgcccccgcgccacgccctgcgcccaggccccggctcctcccgcgctggcggccgccgagcggtccgggcggcggcggcgggaggcggaggcggcggcggcggcaga

SEQ ID NO: 11050 - DNA, 544 bp, Homo sapiens
  source 1..544: mol_type = other DNA
ggctgcgcaggcctctggatacctcatccagaatcgcaaggggagcgtcaccccccgctggctgacttgctctgggccccggcgtggccggcaggacctgcatatctgcccgccagcccgcactggagtggcaggttgtgccacaaaagcgaggccgcgctccagcccgcactgtttctgattccgtgggacctggtgggccccagaaaaggtcagagagcggtgccggacactcacttctccgccaggaggcgccggccccgggatcccccactccgcccagagagggtcgcgctccccccaggggtggaggagcacggggagaagccctctgccgcacccgcgggtgtcggtgcagggcccaggtgccggaggattccttccccggacgctcgccgcgggccgggtcgggactctgagcaggcggggcggggcggggcgggggcggcgctccggtgggcgcggcagagcagccggggcgggggcgcggcgcaccttgctcccggcgcccccgccccgcgccgccgccagcccctccctgcgc

SEQ ID NO: 11051 - DNA, 444 bp, Homo sapiens
  source 1..444: mol_type = other DNA
cccccttcagttaatgagaggctgcgcaggcctctggatacctcatccagaatcgcaaggggagcgtcaccccccgctggctgacttgctctgggccccggcgtggccggcaggacctgcatatctgcccgccagcccgcactggagtggcaggttgtgccacaaaagcgaggccgcgctccagcccgcactgtttctgattccgtgggacctggtgggccccagaaaaggtcagagagcggtgccggacactcacttctccgccaggaggcgccggccccgggatcccccactccgcccagagagggtcgcgctccccccaggggtggaggagcacggggagaagccctctgccgcacccgcgggtgtcggtgcagggcccaggtgccggaggattccttccccggacgctcgccgcgggccgggtcgggactctgagcaggc

SEQ ID NO: 11052 - DNA, 502 bp, Homo sapiens
  source 1..502: mol_type = other DNA
gatagagtctttaacataatatacattgttgtttcagttcttaattaaaaatagaatgtacatctcaaatcttcaccaaggcagataagtagatttgttccacattctgaaacttattgtgattttttgtgtctaaaataagattccttattcacttagtcccagggaacattacataagtattgtgctatgcaaaacttaacggtatttaaaactaattttttaaaaagtaaacatagtatggtgggcttttctttccagaaaattccctcaatgcgttgggatatggctcctgcatgagctgcttgtactgaaagctgttcagcaagaaagcgatctgatccgtccctgctctccagaagggagaccccagcggcgccgacgagccctgcgccctccgcggccgcccggcgcgagctcccgggcggggcgctgtccagcgcgcactgcggcgccgcgagcccggcgaagtcctcagcccgccccgcttgctcccgagccg

SEQ ID NO: 11053 - DNA, 432 bp, Homo sapiens
  source 1..432: mol_type = other DNA
gacccactgaatcaatatctggaggttctggggttacaaatttcatttactaaaaaacttaacaggagatttcagttactgaagaagtttaagaagcactgagagttgtaacacgtcttaatgggagttcaagaccagcctggccaaaaccccgtctctactgacggtttcagccatccggcggggggttttgacaaaggcctcaattacagcggcattcattaccgtgaatgacagccaaagtcaaatatttaggccataacattatattgctcatatttcgaccaacattatatacatacaaaaagtatgtaccgtaaggcaccgcgcaaggccgctggggctcgtgcggtaacccgggatccattccaggaagcgtggccgggcgcacgtcgcgctgcgcttgcgcactctgttggcagaaacccggat

SEQ ID NO: 11054 - DNA, 420 bp, Homo sapiens
  source 1..420: mol_type = other DNA
atttttactgcagaaagctcagtttcttttggccaaagctggcatttctcctgcgggagctacaggggcagtgggacacttagcctctctaactttattccaagagcttcacttttgcgaagtaatgtgcttcacacattggcttcaaagtacccatggctggttgcaagtgcttgacaagatctgaaggaccctcggacgcctggcacccctgccgcgcgggcacggcgacctcctcagctgccaggccagcctctgatccccagagggtccccggtgccattatctccgcggggaccgggtccagaggggcagtgctgggaacgcccctctcactcccgccggagactaggtcccgcgggggccaccgctgtccaccgcctccggcggccgctggccttgggtccccgtgcctccccg

SEQ ID NO: 11055 - DNA, 360 bp, Homo sapiens
  source 1..360: mol_type = other DNA
gtggattttcctacaccgtctaggtatgaacctttaaaatctttcccacatcattccaccgaggccacggaggcaggaggaacttgcttgcttccagaaaagcacctacatcagctatgctgtaatccttgtgggaatcccttcatcacctagtaccatttggtgctcaatcaacgtttactgagcggaaacggaaataagacattttcctcaaggagcagaaatcattacacgtatttggtccaaacaaatacatcacgattacataaatgtaaagatctggttgcttgtgtcctttttataatacatactatgatcataattaagtatgctttcatttttccaacagtgatgaatagg

SEQ ID NO: 11056 - DNA, 476 bp, Homo sapiens
  source 1..476: mol_type = other DNA
tttaaaatctttcccacatcattccaccgaggccacggaggcaggaggaacttgcttgcttccagaaaagcacctacatcagctatgctgtaatccttgtgggaatcccttcatcacctagtaccatttggtgctcaatcaacgtttactgagcggaaacggaaataagacattttcctcaaggagcagaaatcattacacgtatttggtccaaacaaatacatcacgattacataaatgtaaagatctggttgcttgtgtcctttttataatacatactatgatcataattaagtatgctttcatttttccaacagtgatgaataggagggactgtctccctcccccatccctgaaattctgttctttagaagagattttttttttcttcttaatatcaaacaaagaactgctgctattcctttgggctggcgcagcagggcaggctgacgacggcgcgccaggggctgagctcg

SEQ ID NO: 11057 - DNA, 312 bp, Homo sapiens
  source 1..312: mol_type = other DNA
ttggtttcgttaagggatatatttaaatgaaaaccagaaatgttaggcctagatctatcatctaaataatatttattttatggtaaatgaattggagtttcagtccccttaaagaggtttttactattggaaatgagattatgagatataattaacttgactctttgaatgtttccaagtttattttaggaagattgacagtcataattatattgtcaagcatttgtcatttttgctgtagcaataacactgaaactcagacaatggtgcagcagacagatttcggttgcatgagtgactcagcccatggga

SEQ ID NO: 11058 - DNA, 421 bp, Homo sapiens
  source 1..421: mol_type = other DNA
atcttacaagtttaatagtgtttgttgaaccgcgaggacagcgcgagctccgcacatcggtgggccttcccacccccaggccggccttcccatcacgcgtgggtgtgggggcactgcccccgctgcgcgcaggaacagcggggagagccaggagcggagcggctcagggaacaagcttccccccgcggagactctgacgacctcccttgggaagggagagcctgccagtccccctcccattcgccaggcggtgcagcccctcctcccgcccggggcgcgcgcacctcagcgtcgcgggcctagcgcccagcagccgcgccccaggccgggcctcgggttccgggagcccgcaggcgcgcgcccggccgggcgtgtcgggagcgcgcggcggccgggggcggagcgcagccagggctgcgcg

SEQ ID NO: 11059 - DNA, 503 bp, Homo sapiens
  source 1..503: mol_type = other DNA
ccactgcactccagtaaataaaataaaattccattcttcgcatcagtagcatatactatataatgatataatgatatcattattgtatttttttttccaggctggagtgcaatgatgtgatctctgctcacttccggaatagctgggattacaggcgcccgtcaccacgcccagctaataggctggtctcgaaccctgacctcaggaataacatcatcatcattatattttgagtttcatcaatatgaaattgatgggaaattggcagggacgaagggacgggtcctcggcccgtccccctcgttccggaaggctcgaggccgcggtccccggggtccgcatagtccggctcggagcgccgccagcgcatgcgcgccattgcggggaggctgtcctcagagcaggtctggcgcgccggtggctggaccggccccaggagcccagtcaccgggcgtcattggctcaggctgcggggccctcggcaccttctccctcccgggtcc

SEQ ID NO: 11060 - DNA, 437 bp, Homo sapiens
  source 1..437: mol_type = other DNA
tctcagattctgacctagggtatttatatctgtgtattttaaaatcactacattagactcattactacactagtgtgtctaatgcaaatactaatttagcacactttgccctcttcagtttgtactgaaaagaaaaatggatcagtctgagctgttctgcaccctgggtgcagaacatcaccccactgcacccatatcctggaatttatgatacaaagaataatgtatagccaatcaataccttatgtgattttgatgtagatttttggtaaacagctcaggtgtggtgccagaggttgcagtgagctgagatcgcaccactgcattccagaaaaatccacttataactgctgttaatcagagtgtattttcatggcaacttgaatctatgctcccaagttgcagtcctcaagcttggcccaaataagctctccgct

SEQ ID NO: 11061 - DNA, 405 bp, Homo sapiens
  source 1..405: mol_type = other DNA
tttctaatatataaaatacttctctaaatcagggtcaggagtttgagacaagtgtgaccaacttggtgcaacttcatctcctcagaggatcacgcagtaagccatgtttgcaccactgcactccagcctgggtgacagagtgagaccctgtctcttttcaaataaagttcaaatggatcttaaacacaggaaaagtgttcatctgtactgcaaacaagaggaaatttgtgttatcaccaagctttagagtttgatattttccacaagtataacatattctgttggcaaagctgtggggaaacagacactcttacactgctggtgtgaatgtgacagattgcattttcagaaagaatgcaaagctttgtgactttcaaggcagatcataaatggcagtaagacttc

SEQ ID NO: 11062 - DNA, 206 bp, Homo sapiens
  source 1..206: mol_type = other DNA
agcaagttgctcacctagcactcagagctttgttgtaatatttttcgtttgaaaaacttctgatacaatctgtttgggagtgtcttgcagtgagtcaagatcatgccactttgaaaggccaaagtgggccactgcacacgcccccgaccccgccaccgccgcgggtccctttaagggagagtgggcggggtcctgccgcccaagcc

SEQ ID NO: 11063 - DNA, 197 bp, Homo sapiens
  source 1..197: mol_type = other DNA
gcgccgaaataggcctgcccattttgcagaaggggaagttaccgctcacgcctcttaatcccagcactttgggaggcttgaggcgggcggatcacctgaggtcaggagttcgagaccagtcttgttagtcccggctactgcagtgagccgagatcgcgccaccgtagtcccagctgctcgggaggctgttcttgcca

SEQ ID NO: 11064 - DNA, 458 bp, Homo sapiens
  source 1..458: mol_type = other DNA
cctgacctcaggtgatctggccagaaaatttttaaaaagaaataggccgggcgcgggtaatccctctctatttaaaaacataaataaaaattaaaaataaaagtaaggtgcaaagactctcattttgttactcatggttgcattttaattaagaatatatggcgggcgcccgtagtcccggctacttggactgcactccatcaaaaaaaaaagaatataagtagtctttgaagttcttttgggatttcactaattgctaaatcagtgcagctccctcacctatccttatcctaagtggtggtggcggcagcagcttctccgggagctcttttcctctgcaaagcggaggtgccacaggcaccgtgcacctctcagactgcaggggctgagcccccggaggaggagggggctggttcagggagcccctcccctggggcggggccaaatcgtcctcccag

SEQ ID NO: 11065 - DNA, 608 bp, Homo sapiens
  source 1..608: mol_type = other DNA
atctttctacaaagaaaacattctactttttcaacgataactaaaagtcccattagaaaacgggcttttcccaccccgtccccgcagagattgtgccgagtcctcagggtgcctggaagccccagagggcggggaacgccgcgctctagagccgctttgttctccgcggagactgcatcgatgcgcccgagaaggacggctgcgcagccccgaggcggcgggctccagtccgcggtcccgggcccgccaggagcgcggcggcgcgcggtgcccgcccggccctccggttcagcccggtgcccttgggccccaggttggtccttagcacgtcctgcagaccccgcgctgcgctgatgttgaccgccagcgccgcctgcgctcgggccacctcggccttggttcaccgccgccatagctgctccagcggaggaaaagggcccagagccggcgcggcgtggccgggaggaactatccgggtcttctggaaaagtcggcccgtctggccggcccccagcgtgcccgcgcgccgccgccattgggccacaggtcgtccggcgcccgctcattggtccgcggctgcacggctcctgcggccctccatcgcgcac

SEQ ID NO: 11066 - DNA, 492 bp, Homo sapiens
  source 1..492: mol_type = other DNA
gtgggaggaagatttaattttcactacatgctttgaattcagaacaatttccgttatttattaaaaataaaatacagcttgaactcaggagtatcacttgagctcaggagtaataccacgtgttactgaatccctggtatttgttaccttaaaagggaggggtgaattttcatctgccataggggcctcgggcctcagcagcatccagagccctacggacgggcagggtggactcgcgtgtggccccacggcacctagggcaccgtcgagcacacggtccgggaagaggggaggtaggaggcccaccctacgccctgcccccgcggagcacaagccccgcctgcgtcccgagctcccgggtccgcaaagctgggcccggctcctcccgtgcgcgatggagggccgcaggagccgtgcagccgcggaccaatgagcgggcgccggacgacctgtggcccaatggcggcggcgcgcgggcacgctgggggccgg

SEQ ID NO: 11067 - DNA, 295 bp, Homo sapiens
  source 1..295: mol_type = other DNA
aaaaatggatgcgtccggccccagaatgcagctttttgaaatgacaatatattcatatactacaaaatttaaatggcggggtggggtgggggtaaacccactgccactgccccgccccaggcccaccgagctcctcccgctgaagtgttcgcgctttcccgcagcggccgggccttggcgcctggacgccccgccgacccccgcggccgcgcgccctgctccccctggcggccgcgccccgcactgcagtggccgcgttggggcccggccgggggaggggtcgcgcggcggcggc

SEQ ID NO: 11068 - DNA, 413 bp, Homo sapiens
  source 1..413: mol_type = other DNA
agcagtgacataaaattccatgttagataagcatatgttacttaccttgttattaaatatttcttgaaaagcaaattttaatggtttaattttatgtggacgtatgttaaattatccaactaccctattgttaagcatttggttttaaaatttttatgctaatataaatgctcaagtaatttaaaatattgaaagcatccctgttataaatttctgagtaaatgcattggataacgcctttgaaatggcttaactgtattttcaagcttctgaacttaggcaaaatattcatcgcaaagtctctagcgtcatatttttcatttatatatatggtggcgcagcctgcgcatgtgcataggggtcgactgccgctgcggtgcatgagggcgcatgcgcagcggggccgtgggtgt

SEQ ID NO: 11069 - DNA, 342 bp, Homo sapiens
  source 1..342: mol_type = other DNA
tctcgaactcctgacttcaggtgatccacccgcttccaccgtgcctggccttaaaggaaattgattgattcagactgagtctctgttgctcaggctggagtgcagtggcatgatcatagctcactgaagccttgacttgagtagctgggaccacaggtgtgtcggtctcccaaagcgctgggtgtgagcccctgtacaggtctgcattatgtagggtgatcatgcacactgtccctgcgacagcccgggcagtcagctgctgcatggagagggagctccatggcctggtctcaggccacaccttccgcccggagactgggctccatgccctgtccctgcgga

SEQ ID NO: 11070 - DNA, 377 bp, Homo sapiens
  source 1..377: mol_type = other DNA
tgatcttagttaacaaatcaaaaatctcgcatagctgtgtgttcttttacgttatgataacaagataataattccactttatttgcatctttaaaaaaggctggaaccctgtctttactaaaaatatttatttaaattcttcttttttgctcccgagtagctgggattacaggtgcctgctacttggccaggctggtctcaaacgcctgatgttggtgtttggcctaaaatattttttaagtaaatgaagatttaaatgttttcacttcccatgttaatagttggaaactttaattagcatctggtgctagttccattttccattaacctcaaagaggatggatactcttcattgtctaggcataagcagggaaccc

SEQ ID NO: 11071 - DNA, 500 bp, Homo sapiens
  source 1..500: mol_type = other DNA
cagaaaaaactagtatgtcctaggctattactattataagaaaagatttcccaacactttgggggtcgaggcgggtggatcacttgaactttagctaggtgtggtggtgtggatcgtgacactgcactccagtctgggcatcagagtgaggccctgtccagcactttgggagtccgacgggtggatcacctgaggtcaggagctggagaccagccatggtcaccatagtgaaatcccagctactcggaaggctgaggcaagagaatcgcttgtgcaccattgcactccaaaatgatgtaaataatttgaaatgaaaatcttgaggtccattttaatatgtaagttattttaagttgacaatttccaaaactggttggaattgggactcagatgagagctgccaccagcagcggcacccccatctgcagttggctcttctgctgctgcgccccggcagccaggtctgatggcccagatggcaaccactgcagctggcgtgg

SEQ ID NO: 11072 - DNA, 417 bp, Homo sapiens
  source 1..417: mol_type = other DNA
aaagcacagatccttggggaacttaacttcgtgaaggtagaatcttatctgatttggtgcagtatctccataacccagttagacagtaaatttttgttgaatttaccagtgtatggttactgtcccaattctggacacaaattctataatacatatgaaaaggagctgaaaatatatagtaatacataaatgtaaaacattattgctgcctgaatttaacttttgaagaaagagaaataccaaatacaactaattcaactctgtttatttttgacgaaaccgatttccagagatgtgagtcactcttaaggttggatttaatacaaatgtttaggaacttccgggttttagcgaaggacgaggcgtccccgtgacgtcctgctcttccaatgaacttcaggcctgcggcggagaacc

SEQ ID NO: 11073 - DNA, 469 bp, Homo sapiens
  source 1..469: mol_type = other DNA
ggccaggggtgcaccgcgcccggctaatgggattacagggcccagtacctcagtctcgcaggctggctcattggagccatgaaccttggagttcgccatgttgcccaggctgctcttgactgcctgtttttgaccaacataaacactgtgctgagacctggcggggaggtcccggcccgctccaggcactgtaccgccactgtgacgtcgtcgaaggtccgcctctgtggcgtcgccgaaggcacccccatcgaggcggggctgctgggtcttccaggagcgcccagacgcgggcaggtggccgccggtggccacaggcctgggcaggatggaagcgcccgcagagcgggcgcttccacgtctgcaggctctggctcggccgccgccacgcgcgacttcccggcctgcggggcagggcgcagcaagggccggactcggcgcgagcaggcgctgcgcaccaactggcctg

SEQ ID NO: 11074 - DNA, 451 bp, Homo sapiens
  source 1..451: mol_type = other DNA
tgggatgcagtggtgcgacctcggctcactgattctcccatctcagctttctgagtagctgggattacaggcatgtgccaccacacacagctaatttttgcgttttttgtagagaccaggtttcaccacatgggccaggatgcacccgccttggcctcccaaggtgaggcggagtcaccacactttcttatgttattaaatagcctaacccaggaagggttaggccaggggtgcaccgcgcccggctaatgggattacagggcccagtacctcagtctcgcaggctggctcattggagccatgaaccttggagttcgccatgttgcccaggctgctcttgactgcctgtttttgaccaacataaacactgtgctgagacctggcggggaggtcccggcccgctccaggcactgtaccgccactgtgacgtcgtcgaaggtccgcctctgtg

SEQ ID NO: 11075 - DNA, 386 bp, Homo sapiens
  source 1..386: mol_type = other DNA
ggacgtgccacatttttaaactgtcaggtaacgggaattacaatttttttcttcagaggaagtctctctgtgtcacccaggctggagtgcaatggcgccatctccccgagtagccgggactacaggaggcctgtctccataaaatcctacattttaaaataattgtcattatttcaatttatgaataaatattatatatcatttataaatgcatatgacattatacacaaggttaaatgcaaatatcctctgaagttggcctggctccgatcgaggaagaagccctgcctgtgaaggctgcagcctaggctgttatttcagtgtctgatcaaatattccctcactcagggcatgaagggtgggaaagaacaggctacttccgtaat

SEQ ID NO: 11076 - DNA, 508 bp, Homo sapiens
  source 1..508: mol_type = other DNA
catgccttcagtgagccgagattgcaccactgcactccagcctggggcagctattggccacctgtggctacttggtagaaaggtaaaatacatagttttaattttttttccaaaatatatatactttgttaataattacatactggtcacatattaaaatgataatattttggatatattgggttaattaaatttctacaatgaattccttttttttctttttaaaattttccttctagaaaatttagaattcacgtgctcacattcaatttcagaggactgcctttttaaaaaaaaatgttcataaaattggaaaattttaaataattgttattgcattattttcatgtgtgaatagccacataatatattatttataaaggcatacgaccttatacgcagggttatatgcaaatactccctggtccgttcagggaggaagcccttccctgacccagccgctgagcaccccgtccaatcaggcacgcagctggagcggacaggacgg

SEQ ID NO: 11077 - DNA, 565 bp, Homo sapiens
  source 1..565: mol_type = other DNA
taaagatttagttccaaaaatatacacactttattaataattacatattgctcagatattaatataatatttttgatatagtgggttaattaaatggttagaatgaattccacctgttgtctcactccgtcgtccaggctggagtgcagtggcactagtagctgggactacaggcccccgccacggtctcgatctcctgacctcgtgatccgcccaccacggcttgaagtttgactgctagaaaatttagaatacacatgtggctcacgttttatttcagaggcctttttattcagaaagggcataaaatctggaattttaaaataattgttatattattttcatgtgtgaatagccacataatatattatttataaatgcatatgactttatatacaggttaaatgcaaatgccttctggggtggacctggctcaactcagggaggagccctgcctgaaaaggctgcagcttaggtttcacagcttctgtcactcagggcctgagaatcaggactgctgggctgggaaccgtccaatcaggcacgcagctggagcggacaggac

SEQ ID NO: 11078 - DNA, 485 bp, Homo sapiens
  source 1..485: mol_type = other DNA
ttctttcagaaggctactatctccgcgaaaaaagtgcctctgttgacagcctcagaagctcactgagcccagcctaaatgcaattagagtgaattccacctgtttattcttaaagtttgactactagaaaatttggaattcacatgtgctctgtaatcccagcactaccattctgtctctattaaatatacaaaaagtagtgcttgagcctgggtgagagtgagactctgtctcaaaagttataaaatctggaatttaaaaataattgttatattcagatgtgaatagctatatgttatttataaatgcatacgaccttatacacaaggttaaggcctgactcagctcagggaggaagcccttccacctgagcacatctgtcactcagggcctgagggggcgggttgttaaacgttatccaatcagggacgccgggctgggaacggtccaatcaggcacccagctggagcggacatgacgtcttc

SEQ ID NO: 11079 - DNA, 497 bp, Homo sapiens
  source 1..497: mol_type = other DNA
tttcagaaggctactatctccgcgaaaaaagtgcctctgttgacagcctcagaagctcactgagcccagcctaaatgcaattagagtgaattccacctgtttattcttaaagtttgactactagaaaatttggaattcacatgtgctctgtaatcccagcactaccattctgtctctattaaatatacaaaaagtagtgcttgagcctgggtgagagtgagactctgtctcaaaagttataaaatctggaatttaaaaataattgttatattcagatgtgaatagctatatgttatttataaatgcatacgaccttatacacaaggttaaggcctgactcagctcagggaggaagcccttccacctgagcacatctgtcactcagggcctgagggggcgggttgttaaacgttatccaatcagggacgccgggctgggaacggtccaatcaggcacccagctggagcggacatgacgtcttccgggaggcgggcagc

SEQ ID NO: 11080 - DNA, 402 bp, Homo sapiens
  source 1..402: mol_type = other DNA
caggggcctgtgtactggggacaattaggccgtccttcttcctaatgcccctaaaacagaagccttaggatacataattcaatattatgggaatgtggggataccgcaagattgcaggcagtctagaaatcattaccaatgaaactgcaggggccttgaatctgcttgccaaaaatgagaaatgtcatttatcaaaatagactggccttagactacctcctagcccaggaagagggagtatgcggaaagttcaaccttactaagacttggaaaggatagttctcatcccttggaggatttaaaaccttagtacaaatagtcctagccatattgggagtttgcctaagagctacttcctcttgaagtaaatgaagatagtgatgctttctcttaaactttact

SEQ ID NO: 11081 - DNA, 432 bp, Homo sapiens
  source 1..432: mol_type = other DNA
gtcgtaaaatcggatattaaataatgttattatattttttccatttgttaatagccatataattgtgaacctcaaatatctgagacagatctcagttaatttagaaagttctcacgcctgtaatcccaggcgggtggatcacctgaggtcaggagttcaagaccagagatcggatcgtgccactgcactgcattcttttgagttcctgattgcaatcatctcagtgagcagagtagtgattttggggccgcaaaatttattttcctttcacacactatactatttattaatataaatgcatatgaccttatacacaaggttaaatgccagggaggaagccctgactgaaaacaccttctgtcattcagggcctgagggggcgggtcctgggacccgtccaatcaggcacgcagctggagcggacaggacggc

SEQ ID NO: 11082 - DNA, 207 bp, Homo sapiens
  source 1..207: mol_type = other DNA
ccccactgcgtatctttatgatagaataatttatattttttggggtataaacccaattatgtgtcattgccacaattcttttcacaatggttgaattaagttattgataacattatctgcaagagaaaaacaagttctccttaactatttttgtaactatttctgcaagtttgcaaagatttcataagtaatcctgttgtaaaacct

SEQ ID NO: 11083 - DNA, 324 bp, Homo sapiens
  source 1..324: mol_type = other DNA
tggtcttgaactcctgacctcaggtgatccgcccacctcattagatttaaagatttagttccaagaatatatacactacattaataattacatattgctcctatactaaaataatattttggatatattgggttattaaatggttagaatgaatttcacctgtttcttctttcttcttaactactagaaaatttagaattcacacatggctcacattttatttcagacggttgccttacaaggcaaatgccgtctggggagggcctgggtcagctcagggaggaagctctgcctgaaaaggcttaggggcctgggacccgtcca

SEQ ID NO: 11084 - DNA, 356 bp, Homo sapiens
  source 1..356: mol_type = other DNA
gtgcagtggcacctcagtcccgagtagctgggcaccatgtaggccaggctggtcttgaactcctgacctcacatgaatcattttttaaaaatagtttttaaatttaaaacatagttttgcacattaaaaaaaaaagttttgggaggtggcatccttgcaaggtgctagttgcaccgcgcgcgtcgcctcaatctccgcccgcagatccggcctccccggcggttgcgcactccgccccccggggcggttgggccgcgcgcctgtgggggcggggcccggagcaggcgaccgagccaatggggcgcggcggcggccgcggcagctgggtcgggtcccgacgggcggcggcggctgag

SEQ ID NO: 11085 - DNA, 265 bp, Homo sapiens
  source 1..265: mol_type = other DNA
tgtccacatatataggtgtgtgtgtatatatatgtgtgtgtatataggcgcctgtaatcccagctactcaggttggaatgagctgagatcaagccactgcactccagcctgggacagtgagactcaaaaaagcatatttgggcaacataattcttgcttatccaaatgattagaaagttgttaaaaaggtgtccaattgttctactttctacttttaaatagctaataagatgcattatacaactccgcctacagcctgtttccc

SEQ ID NO: 11086 - DNA, 413 bp, Homo sapiens
  source 1..413: mol_type = other DNA
tttggaaatttaccttaaaagggagtcctctcaaaggctatcactctacaagggtgagttttcaaatctaccctagggcctcagcagcatcctgagtcctaatgacggaagtaggggcaggaggaggcccaccctacgccctgtccggcgcggggcataagccctgcccctgagatcccgggtccgcaaacttgggccccactcttactgccaggaacagggtgcgtcgcggccgctgggcgaggggtgggactgcaggcaccgtgcagccgcggaccaatgagcgggggccggacagcccgtggcccaatagcggcggcgcgggcacgctaggggcgggctgggcgcgccgacttttccggaagatccggatagtgcatcccggccacggcgcgcctgctctgggctctccg

SEQ ID NO: 11087 - DNA, 491 bp, Homo sapiens
  source 1..491: mol_type = other DNA
aaaatagagttaatttcaaagattcagttccaaataaatatatatactttattaataattacatatcactcacatattagaataaggttttagatatattgggttaaattgttacaatcaatttcacctgttttaaagtttggctgctaaaaaatgtacaattcacgtgtcgcccacattttattttagaggattgccttctttttaaaatttcaggctgcctgcttaaaaaaacagaagtcccagttcaggggaggttgcagcgagttgagctcgtgccactgcactccagcctgggatcataaaatctgaaaattttgaataattggtattatattctttgcatttgtgaatagacatataatatactatttataaatgcatatggccttattcacaaggttagtgggcctgactcagctcagggaggaagccccgtctgaaaaggctgcagcttaggctgtcgtcactcagggcccgaaggggcgggg

SEQ ID NO: 11088 - DNA, 177 bp, Homo sapiens
  source 1..177: mol_type = other DNA
agccgggcatggcgacagagcgagactctgtctccaaaacaaaacaaaagattttctgtgagaacccctcgggtggcagcgcttctccagggcaaggtgagggttggcagctgctgtgcctctcacagcccttcccagcggcgcacgtcatgagtgtcctctgccagaggagccccc

SEQ ID NO: 11089 - DNA, 354 bp, Homo sapiens
  source 1..354: mol_type = other DNA
tacggaaaagcaaggcattcgtaaatctctcttttgtgcagtggcactgcctcagtctcccgagtagctgggaggccaggctggtctcgaactcctgaccataaatcattttttaaaaatagtttttaaatttaaaacatagttttgcacattaaaaaaaaagttttgcaccggaggcccagtcacccacagtgccccgggctccacccctcgcgcgcgaccggccgcgcggcgcagcgccacgccgcctcagtctccgcccgccgatccggcctcttcggccgcgcgcttggggcggttgggccgcgcgcctgtgggggcggggcccggagcaggccaccgagccaatggggc

SEQ ID NO: 11090 - DNA, 541 bp, Homo sapiens
  source 1..541: mol_type = other DNA
ctactggagtaaactggggtcccgcagggcacccttcgctctcaggctggagtgcagtggtgcgactcagcttcctgagtagctgggattacaggttttttgtatgtttacaaaatagagagggagctcttggcccctgggttaaggtcagggctccagaagcccagggtcaaggaaggacgtgcatccctgcaagaggctgcatcagacaggcatggaagaggcgccgctggggcctccttgaattcctgctgggaaaagcaatgggaaacagggggatcccaccgatctcaggggttctgttctggcctgcggccctggatcgtccagcctgggtcggggtggggagcagacctcgcccttatcggctggggctgagggtgagggtcccgtttccccaaaggcctagcctggggttccagccacaagccctaccgggcagcgcccggccccgcccctccaggcctggcacgatggcgcggatggcttcaggcgcatcacgacaccggcgcgtcacgcgacccgccctacgggcacctcc

SEQ ID NO: 11091 - DNA, 558 bp, Homo sapiens
  source 1..558: mol_type = other DNA
cctcagcctccggagtcgctgggattgcaggcacccgtggccaggctggtctctgagccaccgcgcccggcctccggccgcgtttcctggagtgccgtggcacaatagctcactgcagcttcgaactcctgggctcaagtgctcctcccctcctcctgagtagctaggactgcaggcgtgcaccaccacgcccccaaagtgctgggattacagctgtgagccaccgcgcctggcactgtacctggcacatagaggtgcctggtacgtgtttgttgaatgaatgaatgaatgagtgaatgagcgaacatgccatttcaccttatatatcttgtgaacctgccaggcccgggcctgatgtcatagcctctacccctggcccgagctccccgccccggggccgcttagcctccagctcagcgggaggtatccccgcccacggccaggattggaggatggaggcaacgcccaccccgccgggcggcctcctattggcgcggccgtcgccaggggtggggacaggaccggcggctgctgacgccatcccggccagaaaagccc

SEQ ID NO: 11092 - DNA, 43 bp, Homo sapiens
  source 1..43: mol_type = other DNA
aaatgaataagtaagtaaataaataaataaatacatacatctc

SEQ ID NO: 11093 - DNA, 608 bp, Homo sapiens
  source 1..608: mol_type = other DNA
tgagccaccgcgcccggcctccggccgcgtttcctggagtgccgtggcacaatagctcactgcagcttcgaactcctgggctcaagtgctcctcccctcctcctgagtagctaggactgcaggcgtgcaccaccacgcccccaaagtgctgggattacagctgtgagccaccgcgcctggcactgtacctggcacatagaggtgcctggtacgtgtttgttgaatgaatgaatgaatgagtgaatgagcgaacatgccatttcaccttatatatcttgtgaacctgccaggcccgggcctgatgtcatagcctctacccctggcccgagctccccgccccggggccgcttagcctccagctcagcgggaggtatccccgcccacggccaggattggaggatggaggcaacgcccaccccgccgggcggcctcctattggcgcggccgtcgccaggggtggggacaggaccggcggctgctgacgccatcccggccagaaaagccctggccagtggcgggcgcgacactatccgtgcggccaggcggaggtgagtgcgcggcggccggatgggcgggacgggcgtggaggacgccgagcaccgtggcgc

SEQ ID NO: 11094 - DNA, 339 bp, Homo sapiens
  source 1..339: mol_type = other DNA
gagctctgattgcaccactgcattccagcctgggttctggcagcccagatgccaccagcctcactactctctgagaggtgggattttaacatgcaaaggcccacactttgggaggccgaagcgggttggcgggcgcctgaatcccagcttcgtgccactgcactccagcctgggtgacagagcgagactctgtctcactcacgcctgtaatcccaggactttggggggcgcctgtagtcccagctacgccggcctggtggaaggatgcagggacactcccccaccctgccccccggggaacgcgcagcgcgaggttccgggtccgccaagctcccggca

SEQ ID NO: 11095 - DNA, 433 bp, Homo sapiens
  source 1..433: mol_type = other DNA
ctcacgcctgtaatcccaggactttggggggcgcctgtagtcccagctacgccggcctggtggaaggatgcagggacactcccccaccctgccccccggggaacgcgcagcgcgaggttccgggtccgccaagctcccggcatgcagcgcggcgatcccggcgagcaccttggcgcgcggagctggcaccttggcgctgtcgggcgccccttttcgcccgaggagcccaacggtttgaccgctgagagctgagagccgagagccgtggggactgggcgaccctcgtacgggagtgagggcagcgggccggccctgtccgggagggccgcggggtggtgacggggacgaacgggactctcgcgtctggtgcggggccgaggggtggagcccagtctggtatccgaccccggacttagaaggctataaaggcctg

SEQ ID NO: 11096 - DNA, 516 bp, Homo sapiens
  source 1..516: mol_type = other DNA
agatcgtgccgctgcactccagcctgcagtgagccgagatcgtgccgctgcactccagcctgggtgacagtgagactccgtaaaaaaaaaaaaaaaaagaaaaagttgtctcttcttacccgtttatctattcagtcgtatatatccatgtagacatttatttcccctctttaaaaaaattgttcaaaatataacacaattgtcagattgagggttttttttttttgagatcagaaaagttttctcctaaaatttcattcagaaattccaattacacgaatgagacagagtctcactctgtcacccaggctggagtgccatggtgtgatctcgtcactgcaaccatggtggccaggctggtctcgactgacctcaggtgatttggccacggatttttacaaacaaaattttagaattttaattacagtcattgcctttgttctttttttttttttttgccagacgttaaaatacatatcaaaaacacctgaaattgtcagagaatttctcacagca

SEQ ID NO: 11097 - DNA, 491 bp, Homo sapiens
  source 1..491: mol_type = other DNA
acctcaggtgattcaccaggcaattttgaatacagctgttagattctgcactcatgccttctctaatccatgtcactggagtagaaataattcccccacctctgtggttgggagctccccgaggagatgacagcttctctgccagcagcgggcaaaggaattatcaggaaaagctcattttcttctcctgtcctagggaaggcctctgggacacccacgttgggggtgggggcggtgaggaccgccacctgcccgcggctcccctgcagccaggccacgcgcgctgttgctagggcaaccacccggccaggcctgcggctgccgggaagccccctcgggagcgcgcacgggaagggctgtgggggcgctggccggctgcgacgtcagacccccgcccctcggcgcctgccgagccgcgcctccttcggtgggcagccggccggcgacacatcgtccgctcagcgccacctccccggaccctggcggttgtc

SEQ ID NO: 11098 - DNA, 558 bp, Homo sapiens
  source 1..558: mol_type = other DNA
ccaaaattttaaaaaatcagagacagagtgagactttgtcttttaaagaaaggcccccaggagactccctgcgctgatagagcctctagggctggactccgcctcccagggagccgggagcatcttggggaagggcctgtctcggacacccgggcggtgccctgcggctcggggcggggccagccgcggtggcgtgtccgcagccacctcagccctgaaaggctgctcaggccttccccagacacacgagtaagtcgtgacgggataaggcgtctaccctgacgcgggtgagaaccctcttcgacgcccagttatgagagcgtagcggcgcaccaccgccgggtctctcggagagggcgcgcccgctggccagaggaccaatcagtgcacggcaggctcgcaggccgccccccactcaggcgccggccgctggcgctgcctgctcttcgactgggcgagcttcctgccaatcagggcggaaccagcgcggcgtcggccagtagcgggaggcggtcgggtcaggccccagctgggcgcgagcgggtcggcgttgaggga

SEQ ID NO: 11099 - DNA, 687 bp, Homo sapiens
  source 1..687: mol_type = other DNA
tgagactttgtcttttaaagaaaggcccccaggagactccctgcgctgatagagcctctagggctggactccgcctcccagggagccgggagcatcttggggaagggcctgtctcggacacccgggcggtgccctgcggctcggggcggggccagccgcggtggcgtgtccgcagccacctcagccctgaaaggctgctcaggccttccccagacacacgagtaagtcgtgacgggataaggcgtctaccctgacgcgggtgagaaccctcttcgacgcccagttatgagagcgtagcggcgcaccaccgccgggtctctcggagagggcgcgcccgctggccagaggaccaatcagtgcacggcaggctcgcaggccgccccccactcaggcgccggccgctggcgctgcctgctcttcgactgggcgagcttcctgccaatcagggcggaaccagcgcggcgtcggccagtagcgggaggcggtcgggtcaggccccagctgggcgcgagcgggtcggcgttgagggagccaccgccctcccgcctgcgcactgcctctcgcccccctccggccagcccgcagccggccgcgtcatgccaggcgctgctcggcggtagggagtgcccggggccgccgcctccgcccgcccgaagccgcgcccactgcccagagccagagggatgg

SEQ ID NO: 11100 - DNA, 431 bp, Homo sapiens
  source 1..431: mol_type = other DNA
ccagtagctgggaccacaggtgcaaggctggagtgcagtggtgcgatctgggctcagctggattttttagaaaagacggggtccctgtcccagcaagtaaaatttcttttgtagagacagttctttcaggtctcgaactcctggcctcaagaagggctgaaactcaaagagtttttgaagcgtccctcggcgcagtggctccgctccacctcccattcgcgctaccaccgcggtcgcagcgccaggatcgccagggggccagcgtcgctctcccgctgctgcgcgccggaagccggaagcagggaaggcaggcttctccggggctccccagtgcgacgtcacgggggcaccccagtcccctcaggccccggaagtgacgtttgcacggcttgcgtatcgtgcgtgcgcaggccgcgccgggggcggggcta

SEQ ID NO: 11101 - DNA, 350 bp, Homo sapiens
  source 1..350: mol_type = other DNA
actgtttttaatattccttacatgggaatcacataaagaaagtaaacagtatccaatttgtgactcaaccattcatactttgtgacactggttaattatgctctgtcacccgggctggagttcagtggagggatctctgcacccccctctgtggcccagggtggtctgcttttggatcaaagtttctgaagcgtccctcggcgcagtggctccgctccacgcttccaccgtggcctcggctccaggagtcgccgcggtgccggcgtcgccctcccgctgctgcgcatcgggagccggaaacgttggtttctccggggctccccagcgccccagctttagcgcggaggcta

SEQ ID NO: 11102 - DNA, 394 bp, Homo sapiens
  source 1..394: mol_type = other DNA
tgctgtgactgcacgttacgccatacatggcatttatttactgtttttaacattccttacatgggaatcacgtaaagaatcaggtaaacaggattcaatttgtgactcaaccattaatactttgtgacgagttcagtggagggatctctgcaccggtagttgggaccacaggtgcccgccatcatcagctgcttttggatcaacatcggcgcagtcgcgctaccaccgcggccgcagccccaggagtcgccgcggagccagcgtcgccctccagctgttgcgcgtcggaagcctaggaaacgccggtttctccggggctccccagcgccccggccccggaagtgacgtttacgcgccgcgcgtaacgtgcgttcgctggcggtgccggggaggc

SEQ ID NO: 11103 - DNA, 204 bp, Homo sapiens
  source 1..204: mol_type = other DNA
agggcaggcctgctgcagggtagtaataccagcctggccagcagggtgagagccaagattggcactccagcctgggcaagagtgagactccataattctcaaatggtcactttcagatactgagtgcatttcagtctgcgtaatgtcatttcagtcagcaagatggccttcatagcctccctgttaatgaagacatcccagaag

SEQ ID NO: 11104 - DNA, 280 bp, Homo sapiens
  source 1..280: mol_type = other DNA
cctcagctactttgcagtgagcagagatcacaccactgcactctccagcctacatactgtctgtatgatcttgggcaaatcaaatggataatattaataagagtatccattgcataatatgagtatgagatcatatttactaagttattatatactaagttaactgctggaaaaggggttaataaggattccttcataactttagagataaaacatgattttcctattcattgggagacaagctggcctgcatcacgccggcgtcagcggatgacttcct

SEQ ID NO: 11105 - DNA, 452 bp, Homo sapiens
  source 1..452: mol_type = other DNA
cacctgtaatcccagatcctcccgaggtgggaggatcacttgggtcaaacaaaccaaaccatgaatatatcaaagttggtttttacatttggagtcatactgctgctaaaaacattggtgttgctatgagcattatttgcaactgtttctccagggtaatatattctcaagagaggatgaatgccaaattactttgcaaagtgattgtacaaaattatactttaaaaattttcattttcattttattttatttataaatagagtcagagactccctatggaactccttacatgtttatcagcagtgattaatatacaacacatgagcatgcacacgtgtgcgcactccctacacgctacccgtcccggaagcgtggtctccgccgcctgcctctgacgaagcttgtcccggccgcgccaccgtcggacgcccggggtcggaggtcacggcgg

SEQ ID NO: 11106 - DNA, 398 bp, Homo sapiens
  source 1..398: mol_type = other DNA
gaaataattagatgatattaaggaattgtagttaatctcgtcgcgtgtatctgttaagggctataggctgaagtatttaatgctgaaaccatatgatggtttctttaaaatacccccaaccggccgggcgctgtcgtctgtacaaaaaattttttttaattatttatttaattaaattagcttgagctgcagtggggccatgaccctgccactgcactccagcctgtcattacacttttttgtctacattttatgttaaaatatttctattataaaagggtgagtaaataaaaatatttattataaaataattctattataaaaaatatttatattataaagtgggcgtgttttaacccgtgtcagagctctcagctcattggctggcgtaaaaagct

SEQ ID NO: 11107 - DNA, 459 bp, Homo sapiens
  source 1..459: mol_type = other DNA
actttataatataaatattttttataatagaattattttataataaatatttttatttactcacccttttataatagaaatattttaacataaaatgtagacaaaaaagtgtaatgacaggctggagtgcagtggcagggtcatggccccactgcagctcaagctaatttaattaaataaataattaaaaaaaattttttgtacagacgacagcgcccggccggttgggggtattttaaagaaaccatcatatggtttcagcattaaatacttcagcctatagcccttaacagatacacgcgacgagattaactacaattccttaatatcatctaattatttcgccaatccaaatggaggcggaagcgctccgccttcatcgcctgggccccctttcccctctgagccaatcggagcagggccgagagcgcaccgggcactggcttcctttcccggagc

SEQ ID NO: 11108 - DNA, 496 bp, Homo sapiens
  source 1..496: mol_type = other DNA
gagcgagcgagcgagcgagcgggcgggcgcggggttgggctgaggcgggcggcggcggcggcggcggcggtgggctggccgcgggcgggcgggcggaggatggggcagtgcccgggctcccgctgcagccgcccggggacacgccgtgcaccctccggctcggggctttctcggcggcggcggcggcagcagcagcagcgttagcggcggcggcgagagcagcgttcccggctgcgcttctccctcaggcggggcggcgagagaagcggcggcggcggcggcggcacaccggtgtctctcccgctggaccttttttgaggaagggtgagaaaaaatattttgggggggggtcgctccggagccccggcctcccctggctgcatttcttaaaaatttgggagcctggcgcgaggggcgggtgaagttcattgcccccacttttccgggcgcggcggagaatggccgcggggagggctccccggagcctcccagtctc

SEQ ID NO: 11109 - DNA, 692 bp, Homo sapiens
  source 1..692: mol_type = other DNA
cctgggagcaggggcccacacgcgtccccgctgcgacaggcgggatcctccggcggcttccacgccctggcgcgccaactctgcccggccgcggccgaccccacgcgggcgccccctccacgcccccgcgcccccagtgcgcaggcccggccgccccagcgcgcatgccctgggctcgcgagcgcggccagcccccagccgggagggggcgggggaggagggagcccagccgtccacgtgatcccgccggccggggccgcgggggcgggagcgcgcgccgagagaggcgcggggagggcgggtgcgcgggagcgcgcgcactcgagcgagcgagcgaaagcacgaacgagcgagcgagcgagcgagcgagcgggcgggcgcggggttgggctgaggcgggcggcggcggcggcggcggcggtgggctggccgcgggcgggcgggcggaggatggggcagtgcccgggctcccgctgcagccgcccggggacacgccgtgcaccctccggctcggggctttctcggcggcggcggcggcagcagcagcagcgttagcggcggcggcgagagcagcgttcccggctgcgcttctccctcaggcggggcggcgagagaagcggcggcggcggcggcggcacaccggtgtctctcccgctggaccttttttgaggaagggtgagaaaaaatatttt

SEQ ID NO: 11110 - DNA, 383 bp, Homo sapiens
  source 1..383: mol_type = other DNA
cccggctgcgcttctccctcaggcggggcggcgagagaagcggcggcggcggcggcggcacaccggtgtctctcccgctggaccttttttgaggaagggtgagaaaaaatattttgggggggggtcgctccggagccccggcctcccctggctgcatttcttaaaaatttgggagcctggcgcgaggggcgggtgaagttcattgcccccacttttccgggcgcggcggagaatggccgcggggagggctccccggagcctcccagtctcctcggcgctgctcccaggcatctccgaccctcggtgctgtggggagccccacacttgggctcctcgccgtctcccccgcgccctcctcggggcggagggaagccgtgaagggg

SEQ ID NO: 11111 - DNA, 468 bp, Homo sapiens
  source 1..468: mol_type = other DNA
agggaatgaaataaaaagactatttttttgcatatacatttctatgttaaaaatcaaaacttaaaataatacattttagacccaaggaattaaattcatgcttcttataataaaaccccccaagcccgctcacgcccggcctggctccgaaggtctcagaatccgagcctccaggccagtagccattcctggccacgcagcgcggagccgcgagcagccaaccgggatggaacgaacccgcccgctcagggagaactaaagggtccctccagcgccggccgcagccagcatgccttgcgccagaagcccccgccctgcccgggtgcgcgcgcgcacgagtcggcgaaccggggagctgtgcgctcggcagcctgcgggcggcggcggcggccgccgacagcctctcggggacagggtggcgaagagcggcggaggaggagctggcgccgccgccgctcccctcgggcc

SEQ ID NO: 11112 - DNA, 569 bp, Homo sapiens
  source 1..569: mol_type = other DNA
attttagacccaaggaattaaattcatgcttcttataataaaaccccccaagcccgctcacgcccggcctggctccgaaggtctcagaatccgagcctccaggccagtagccattcctggccacgcagcgcggagccgcgagcagccaaccgggatggaacgaacccgcccgctcagggagaactaaagggtccctccagcgccggccgcagccagcatgccttgcgccagaagcccccgccctgcccgggtgcgcgcgcgcacgagtcggcgaaccggggagctgtgcgctcggcagcctgcgggcggcggcggcggccgccgacagcctctcggggacagggtggcgaagagcggcggaggaggagctggcgccgccgccgctcccctcgggccgcgccccgccctccgccgccacctgcgcgtcccctccgggctcctcagctccggggctgtgtggctctcggtgccgcagcggcggtgtcaccgcgtccgccaattgggagactcggcgttttggctcccgggggcgcgggacgagccgcgcggccggatctggcgagcggagg

SEQ ID NO: 11113 - DNA, 768 bp, Homo sapiens
  source 1..768: mol_type = other DNA
agcccgctcacgcccggcctggctccgaaggtctcagaatccgagcctccaggccagtagccattcctggccacgcagcgcggagccgcgagcagccaaccgggatggaacgaacccgcccgctcagggagaactaaagggtccctccagcgccggccgcagccagcatgccttgcgccagaagcccccgccctgcccgggtgcgcgcgcgcacgagtcggcgaaccggggagctgtgcgctcggcagcctgcgggcggcggcggcggccgccgacagcctctcggggacagggtggcgaagagcggcggaggaggagctggcgccgccgccgctcccctcgggccgcgccccgccctccgccgccacctgcgcgtcccctccgggctcctcagctccggggctgtgtggctctcggtgccgcagcggcggtgtcaccgcgtccgccaattgggagactcggcgttttggctcccgggggcgcgggacgagccgcgcggccggatctggcgagcggagggtgattcggcacgcgtacctccccgccgcgctgcccgcgacgttttggccagcctcgcgacgcgccagctccgagacaggccggtgtgccctgaaggccccgaaggctctcggcgcggtttgggggcttccgggagccggcggcgctgtgagcgcgcggggtggggtggactccgcgcggggggcggagaggacgtagcgctcggcccggcgcccgccccctagtgctgcccggagcctggaggatgcg

SEQ ID NO: 11114 - DNA, 216 bp, Homo sapiens
  source 1..216: mol_type = other DNA
ccatcagtgcaaaccccccgggtgagcccaggtctgaaggtggccaccagccactggcctactccaggtgggcttagcgtgagtgaaagccaggcctggggctgtggccattctagaaacttcctgggctgaaagcaagggactttgggggacaagggctggggctgctcctccagcagtggcccctgggtgtggaccaatctgtaaaatggacca

SEQ ID NO: 11115 - DNA, 518 bp, Homo sapiens
  source 1..518: mol_type = other DNA
tgcccttgagacctggggcagagaagtgggggccacaccacatgttctcaggcccggcgatgccctgcggcagccgtgcctccctggacgtctccaggggcggtcacgcggaatgctggtccccgcagtttcggcgccttccccctgggctcaggtgtaatcgtggatgtctgccaagcgcctgctcgcccccctgtgcgcgcgagtgtgagtgcgcgcgcgccgaggcgttcctcaggttgcgctgcttggaaaccggttggggggtgggggctccccgaccctcggaggagctggggcgcaggcggccaaggcgagcccagaagcccggctcctgaacgcgggcgccggcagagcgaggagtgtggtgctgtcggcggcaaggccctgggggatccgttctagggcgcgcaactccagcggggcctcggccactgggctccggggcgcagcgaggcagccgcgcacatgggctgaacccgcgcggccagcgggagcgggaggcgcgcggtgcaggg

SEQ ID NO: 11116 - DNA, 475 bp, Homo sapiens
  source 1..475: mol_type = other DNA
cccttttataatagaaatattttaacataaaatgtagacaaaaaagtgtaatgaacaggctggagtgcagtggcagggtcatggccccactgcagctcaagctaatttaattaaataaataattaaaaaaattttttgtacagacgacagcgcccggccggttgggggtattttaaagaaagcatcatatggtttcagcattaaatacttcagcctatagcccttaacagatacacgcgacgagattaactacaattccttaatatcatctattagatgatattaagtcatcctcggggtttaccctcggggtttcccaaaaataagtttatttcaatggaggcggaagcgctccgccctcatcgcccggaactccgggcggtgcccccctttcccctctgagccaatcggagcagggccgagagcgcaccgggcactggcttcctttcccggagcctggcagcgtcgtagctgc

SEQ ID NO: 11117 - DNA, 554 bp, Homo sapiens
  source 1..554: mol_type = other DNA
gggcagacatgtgtgtagcatgagcaggcatgtgtgaacctgagcgggcatgtgtgtaccgtgtgtgcatgggcaggcatgtgtatacctaggcaggcgtctgtgtgtgtacatgggcaagcgtgtgtgtatgtgtgtacatgggcaggcacgtggtgtacacgggtgggtatgtgtgtacataggaatgtgtatgcatatacacgagcaggcatgtgtgtgtacatgggcaggtgtgtgtacatgtattgtgtgtgcgtgcatgggcaggcacgtatgtataaatgcagtgcagccccgtgtctgaagagggtgtcaccgatgccccctgcctccacggagccccgctctttccctcggtctggaagacagcgagcaggaccttggtacttcctagggtaggcagtgcgtgggtccacagccctgtggttccgaaaccatgcagcccgagagactccggtgtttctgggagtgagagggctgcaggaagctttcccagcagcaggagcagcagccagagcagacacggcagcagccacggcagcagcactggc

SEQ ID NO: 11118 - DNA, 367 bp, Homo sapiens
  source 1..367: mol_type = other DNA
ctgaggaccccctgaggctgtgtcaccagcaaactctttacagactttgactctttttggtcaacataacctaaccctaaacactggggaaggtaaggctcactgcaaagtgagtagctgggcatcatgttggccaggatgatctctccagaacttctcagcatttcaggacttgggctccaggacccagtaacgcagccctggacttgaccagacaaaggtgaagttcagtctggggttcagggctgccaaagctcatagcctggagcttccctaaacggcggtgggtgtcccaggaggcggacttccggtgcactcctgcgcgtgtgcacctctccctgcgtgcgtgttcgcgcgtgcgtgctcg

SEQ ID NO: 11119 - DNA, 389 bp, Homo sapiens
  source 1..389: mol_type = other DNA
gcattcattcatttaacgaatatttattgctgtgagattgagatgtttgagataaaatcagtcagacaaggagtaaaatgcttgtgtttgtcaaaataggagctcagttgtgttttgggtttttatttttgtatatatataaaggaccccaaaggatatatgatttcccttccataatctgtaacataaaataaggtatacaatgttcatggttaacttcaccagtgagctttgtagagaactacagccatctagtttccctgggtgaggatagcttgctgaagaaataagtgacaacaccatttaattctattcttcattgaaaggttctaactttgataaggtaaaaaatggagcatttctgttatgcagcttatgagacatcttgt

SEQ ID NO: 11120 - DNA, 317 bp, Homo sapiens
  source 1..317: mol_type = other DNA
cgtatatacatcaagtgtttatcaagctgtgtggttaagatttgcacacttgtatatgttatacctcgatttaaaaaatctaaataagtaaataaagataccttcaaatctttaaacatcatctgccagtttgtattagaaaaaaagagagagaaaaaaaaattttaaaaattagcttggcatagtcccagctactcaggcagcttgcagtgagctgtgaccacgccactgcactccagcctgggcaacagagcaagacactgtcctgtctggaggtgtggacagtgtatgtaacccagtttccacctgattctggt

SEQ ID NO: 11121 - DNA, 365 bp, Homo sapiens
  source 1..365: mol_type = other DNA
gggattacaggcgtgtttatttccccttaatctctttaatgtacataaacaatggaatgaataaatcaatgaatgaaactttttaaacagctttattaaaatcatagggtggtgcaatcaccaccacaatctaattttaaactatctttatggtgctacaaaaaagcaaatccacccgatatctgggccatgatgtgaaatttgtcgtcccacgttttcaatttgtaacatagaaatggttacgtaaggatccttccacgggatcgcctccggatggatgtggcgccgggcgctgccgggcggtagcgtctcccggagtcgcgcgcgcatgacgtagagggcgcgcgatgacgcgacgcgcggcg

SEQ ID NO: 11122 - DNA, 244 bp, Homo sapiens
  source 1..244: mol_type = other DNA
tgcagtgatgccactgcactccagcaaaaacaaaaccgttattgtggctttgaggcgaactttggggtgggcagatcacctcccagctactcagtgtgccgcgattgcgacactgcgcgacagagtgagactctgtgtcaaaaaaaaattatatatatatatatatatatataatgactaatacacatgtgaagatatttaacctcagtaacttcagttaaacagcagtaacagattggcaaaa

SEQ ID NO: 11123 - DNA, 345 bp, Homo sapiens
  source 1..345: mol_type = other DNA
tgcagtgatgccactgcactccagcaaaaacaaaaccgttattgtggctttgaggcgaactttggggtgggcagatcacctcccagctactcagtgtgccgcgattgcgacactgcgcgacagagtgagactctgtgtcaaaaaaaaattatatatatatatatatatatataatgactaatacacatgtgaagatatttaacctcagtaacttcagttaaacagcagtaacagattggcaaaaccctaccccggcaggtcacacacgccttgcagggcgacttcgaccggcacttccggtcccggaaggtcgtgctttttgaccccggaagtccgggcgggcgc

SEQ ID NO: 11124 - DNA, 309 bp, Homo sapiens
  source 1..309: mol_type = other DNA
tgagagtgggtgtatatacatcaagtgtttatcaagctgtgtggttaagatttgcacacttgtatatgttataccttgatttaaaaaatctaagtaaataaggatacctttgaatatcttaaaaaaggattgaatcatcatctgccagtttgtattagaaaaaaagagagaacccggtatctaaaaaaattttttaaatattagcttggcatggtggcatgcacctgtagtcccagctactcaggcagctgaggtaggaggatactccagcctgggcaacagagcacccagtttccacctgattctggt

SEQ ID NO: 11125 - DNA, 269 bp, Homo sapiens
  source 1..269: mol_type = other DNA
gagttctgtaatcccagctactcgctgaggcaaagtgagctgagatccatcactgaactccagcctgggccaatcaatcaatcaatcaatcaatcagtgtcttttctctagaacacaccacagctgggagccctgaaccctgctggtggcaggtggctctcgccgagggctccttcaagggcggcagccctgtgcctcgcgctaccgcgcgtgccgccacctcgcgcccctgcacgtacccaacgtgccctgcgtggtcccgttacgtg

SEQ ID NO: 11126 - DNA, 489 bp, Homo sapiens
  source 1..489: mol_type = other DNA
aaaaaataatgataattttctgaatctcttgagtgagccgatatcgcgccattgccctccagcctgggcgacagagcgagacaccaaaaaactaagtacgtcttttaatctatttctccaaagaagcttctatattctactttccagccagcccctagaaacaagcagtacagaagttaactctggggtgagcaaagctggcccccacgttgtccttccgcagaacctttggtagggtaagctcccggggccacttccccccacccgcgcatccccgggcgtggccgagcacggcgcctttctggccgcgcgctcaccctccccctccggcgcaccacacggacagtggtgcccggatgtcggtgtcgccgtcggtgacagatggccgacaggggcaggggggcgggacccaggcgcggagcggcagctcctccgagccaataggctgtgagcgctgaccagctctccgcctattggaattcgccaccg

SEQ ID NO: 11127 - DNA, 352 bp, Homo sapiens
  source 1..352: mol_type = other DNA
gttgcagtgagcggagatcacaccactgcactccagctgagtcacagagcgagactccgtctcaacaaaatagacatctttttatttatttactttagagacggggtctcgtttagacatggggtctccatatgggtgcgatcatatcatagctgacggcacaaatacttgggactacggaagccatcgaaccaggttgcccaccggcggccccaacccgcctcgcaccccggcccgggtagggggctcaggggactcccggggcactcaggagggacgccccgggcggggcgcgcaggcgcgctgaggccgtgagccccaaggggcgggcgggtgcgcgcgctttctcgcg

SEQ ID NO: 11128 - DNA, 224 bp, Homo sapiens
  source 1..224: mol_type = other DNA
tgtagtgagccgagatcacaccactgtactccagccgttgcagtgagcggagatcacaccactgcactccagctgagtcacagagcgagactccgtctcaacaaaatagacatctttttatttatttactttagagacggggtctcgtttagacatggggtctccatatgggtgcgatcatatcatagctgacggcacaaatacttgggactacggaagccatc

SEQ ID NO: 11129 - DNA, 470 bp, Homo sapiens
  source 1..470: mol_type = other DNA
agtaaatacataaataaataaataaaataagttttctattaaaaattctcccttttaacttagcttgttggatggagccaggaataatgcctttaataaacaattaggaggaggcgtgagcagtgatcgcaaatcccgccttccgaaacgcaccaagggtcgagccctgcccctcgagatgttctacttccaggccccgcccctcgagacactctacctccgggttctgccccagactctgcctctcgaggcgctctaataactaggctcggcgggtggagatgctctaactccaggccccgcccctcgagcgccacaacagccgggccccaccccttgaggtgctttaacggccaggccccgccctgaaggcgttccgcccccaggcgctctaacggccaggcccagccgcttgaggctccccaacggccaggccgcgcccccgcgtgcgtgcgcggcccggcagagcc

SEQ ID NO: 11130 - DNA, 368 bp, Homo sapiens
  source 1..368: mol_type = other DNA
caccgcgcccggccaccgtgttggccaccatgttaactagaggtgttagcaacctcctgtgggccaggcccttcaggggcattacgcccctgagattgggggcttctacctatgtggaggacaacaaaccccaggtcctgaggcgctttcaggctcagtggagacagggtctcactctgtcatccaggctggagtgcagtcctggataattgtatgttgggcagtcgaactcctgggctcaggattacaggcaagagcaccgggttctcacctggcgtaaggattatgctaatacacccaggccccgcccacccgatcggcctatggtgtgggggcggggctatggaggcccggctggccaagagctg

SEQ ID NO: 11131 - DNA, 422 bp, Homo sapiens
  source 1..422: mol_type = other DNA
ccctcttctctctccgattaaatataaaagccgccgaggcgcgaagggcctcccgccgggccctcaggcgccgtcgcggcgagccggggtcgggtgcgggcgtcctggagggccggacgccaggtccgcgcaggtcctcgtcgctgagtaggccgcgatcgcgacggagggtggcactgcccagcaccacgtaggcctgggagatgcgcgtgaagcgctcggcggcctccgcgctcccggacgccctgggaataagtcctcgctcctaggcccaggctgggtgcagaattttgtggaaagccacgggcctgcagcaacctccaaggtaacagccgctgccaccatcgccagcgcatggctgccatgttgaattgattcggcaggcggtgcaagagaaaccggccaatgagaggagtcggttg

SEQ ID NO: 11132 - DNA, 420 bp, Homo sapiens
  source 1..420: mol_type = other DNA
ccggatactttttaaaagcatttaaatacttttaaaaattgttcttttcactctttttcgctctgtcacccagcctggagtgcagtggcgcattctcctgcctcagcctcgcgagtagctgggactacaggcgggtctctcttttcacccttttgacaatttttaaatttttttaaatagagacggtggggagggctgcaaggcaggagccctcggcgcccgggtgcacgggctctgcaaattgtaaccgcccggggtgggagagtccgtgcctgggggcgtggtgagccagggccggtgctggggcgcagagcagggcggctctggaggcggcgcggcgcggccggggcggggaggggtgcggcccgcctcctccctgccccacccccagccccggcgccgcggctcctttaagagcgg

SEQ ID NO: 11133 - DNA, 467 bp, Homo sapiens
  source 1..467: mol_type = other DNA
atagcgccactgcactccagcctgggccttcatcctgcaggaaaggctcccagactggaactctccaggaggtgaaggagggagttacaaccttcagccaggcacggtggctcacgcctgtaatcgcgtctctacaaaatatttgaaaattattcaggagtagtggcgatcccagccacccaggagactgaggcgggaggattgcctgagctcaggagctcaaggctgcagtgagctatgattgcaccacagcaaggcagcagggtctctggggacccatccccgggagcgatcacgcgtgcggaacgtccaggacgagaccccagggcttcgatccccacggggctgctcgtgcggggtggggcggggctgggcggggtctgggcggggcccgggcggggtggggcggggccggggtcccgggggccggggcggggccgggctggcgctgcgcagccgcggggcgg

SEQ ID NO: 11134 - DNA, 394 bp, Homo sapiens
  source 1..394: mol_type = other DNA
ctgtagtcccagattctcggaggtcgaggctgcagtgagctacggtcgcgtcaccactccggcctgctatctggaagacagacagcaccccagcaggccttccccttggggaagagctctagagtgcccccgagctccttctagatcgatgggtgggtgtccgtgctccgcccaacctgcccgggcccccggcagtggagcacggcgccaccacactggcactccgccgcccagagccaccctggcgccgctcgcccccgccggcggcacagccagattctacgcaccgcggcgcttcgcgaggggaggggcaagcaccgcgggttgcccagcctagggcgaggccaggtgcggcgctcagggcgacccgcgcaaagcctgcggggattacgta

SEQ ID NO: 11135 - DNA, 308 bp, Homo sapiens
  source 1..308: mol_type = other DNA
ctttgaaatctcatgggacacccatttactggcccacccagttctgggcaagcaggctggatcccggcaggaacgcccctcttctagccaagcagagaagctgggtaccccggagtcctggcctccgccagatgcatgagtgatcatactcacaacagtcgtgaaactgccctgtcctcccacctaagcctggaatgagggggcactggcctggtcttcaggctcccaaacctggcggttggacccggggctggggcctcaaaagtgcctttgttggcctgggctcaggaatccagacctgtccccga

SEQ ID NO: 11136 - DNA, 447 bp, Homo sapiens
  source 1..447: mol_type = other DNA
gcttccctagggcatctcctagaggaagacgctgcgtatagtagccactagccacatgtggctatttaacttattaaaataaaatttgccagtacggttttttaaaataaaattattaaaataaaatttgcaacattttttgtctctacaaaaactacgaaaggctgaggcaggaggctggcttgagcttgagttcaaggctgcagtgagctatggtcaagccatccagcgagcctacaaacctcatgctttcaggaagcataaaggacttcaggggggaggccggggccagaccacctgctctaccaaggctggaggagggccacaagccttgagctcattgcggggggggggggggcgggcagactgccagcgccttccattttctctcagcggaaaaccaatcagcaggcggtgagggtgtggccagggtcgcaacacaggccc

SEQ ID NO: 11137 - DNA, 362 bp, Homo sapiens
  source 1..362: mol_type = other DNA
accctgcggcctgcatggggctgggtatagggctgtgacctgacccacagatgcccctggggaaggcgctaggcagagaccttggcccctgcagaatgcagccctgtccagccccagctttgggcagaacctgggctgaggcgcgggacagctggcccgtatcctcacactgggcccggggcccagccggaggggcgggggcctggccactcgggccttggctggggcggatttttggcctggccgccaggccctccagggctgtcctggcagaggcccccctcgctctttctggcgggaacctcgcagtccagcagcccgggcctgggaggcttgtgagccgggcctcacagccgacgagg

SEQ ID NO: 11138 - DNA, 461 bp, Homo sapiens
  source 1..461: mol_type = other DNA
ggccaggctggtctcaggaggtcaagagctcaagaccatcctggccaagatagtcccagctactcaggaggagttgcagtgagccgagatcgagccactgcactgcagcctggcgacagagcaaaacaaaaagaaaacttgttctaattcttacaaaggtgctggaggagggcgggagtggacgtctcagcccggcccctctcctgcagactgcagtgcctccctgtcgcaccagtactatgagaaggatgggcagctcttctgcaagaaggactactgggcccgctatggcgagtcctgccatgggtgctctgagcaagttatggtgagcgccccctgccttgcacactcacctggggtgggggtatccaagcagaccccatgtctgtcttgtccaggagctcagcagctggccagccgggtccctgcagtctgctgagctgggctgttccctcctcacc

SEQ ID NO: 11139 - DNA, 280 bp, Homo sapiens
  source 1..280: mol_type = other DNA
ttatgggcagcaggagcatgtccttaaggcacagatcactcgtgggtgtcatggccatcacgggccagattttgggggcctgttcccaacaggtctcaaactccgtgtgagccactgtgcctggccccttctctgtcacccaggcttgagtgatcctggctcacggcctcccaaagcattgggaatccaggcatgaaccccgttccctaagacctccttggccgggcagtgggtcactggcggcaaccgggtccccatggtaacttggtccccaccctgt

SEQ ID NO: 11140 - DNA, 584 bp, Homo sapiens
  source 1..584: mol_type = other DNA
agtccagcctgggcgacagagcgagaccccaaaattctatgaggttctttcaaagtgtgctttgtggaaatttacccgtgtaattaattcccactgcataacgttttaattctttttccaaggcaacgacttctgcaaaaggaaggcaggattcgtgtctggccagctcctgcctggagaaggagggtcacccggggaccacttgggggtccaagcgggacaggcctccgaggtccccgccatgtgagagggagttccccccagctctccaggtcacctcccgccgacggacggaaaggccggcgcgcacgggcgtggtgcggcggggataggaggcagccacgggcgcaccccagggccagcacataatgggccgcgtaggccgggcaggcgtccagctgggacgccgccgcaccacgtgggctgcagagcgcacggggcaggcagctgccggtgggcccagggccgggcgctgcgcggccagcgtccgtgcgtgcgtgcgcgcgcgcgcgtgcgcgtgcctgcgtccaagggatgcgatcaggcggcgcggcggacagccccggcggcggggcggggggagt

SEQ ID NO: 11141 - DNA, 230 bp, Homo sapiens
  source 1..230: mol_type = other DNA
aaaactggcaggtgtgtgccaccacacccagctaattaaaaaaatttttttagagatggggtcttaggattgcaggtgcaagccactgcaccagctaatttttaaattttttgtagaggtcgccgtgcctggcccataggctggagtgcagcgagtagctgggattaccgccaccacacccagatatgttggtcaggctggttttgaacccctgacaggcatgccggccc

SEQ ID NO: 11142 - DNA, 246 bp, Homo sapiens
  source 1..246: mol_type = other DNA
aggctggagtgcagcgagtagctgggattaccgccaccacacccagatatgttggtcaggctggttttgaacccctgacaggcatgccggcccacggagtctccctctgtcacccaggctggagtgcagtggtgcgatctcggctcactgcaacctctgccccgagtagctggaattacagacacatggcctcccaaagtttttggattacaggtgtccggcagtgcgggtggctggcaggaagcc

SEQ ID NO: 11143 - DNA, 529 bp, Homo sapiens
  source 1..529: mol_type = other DNA
ttgcaaggttgaagtatttagttggagtgcagtggtgtgatcagagatcactgcagcctgctcagcttcctgagtagctggaactgcaggtgcgcgcctctgtcccccaaagtgctgggattagaggggtgaattttcctggaatgaacattgcatttcatctgacaaaggggtggaattcccatctagccgagaattccctgtgggcacgggcagccccagacgtcatccccggaccccgctgcccagcagcgcccggacgccagcgttgtccgtgtcccaacaccgaagccgctcctcccacgccgccgcggagcgggagcgacctgctttctcggaaggcgtcgcggccacagctcgccttcctgtcgctcccaggccgggcgccaggtctcccatagcaaccgcggcctccagcgatggccgccagggcaccaccggaaccctcttcgcaggcacagagaggcgcgggtacgtaacttccgctcgcgcccggcggaagccagggggcggggcttgcgtggcggcg

SEQ ID NO: 11144 - DNA, 460 bp, Homo sapiens
  source 1..460: mol_type = other DNA
cccaaagttctgggatcatcattattgaatattatgacaattgcaaggttgaagtatttagttggagtgcagtggtgtgatcagagatcactgcagcctgctcagcttcctgagtagctggaactgcaggtgcgcgcctctgtcccccaaagtgctgggattagaggggtgaattttcctggaatgaacattgcatttcatctgacaaaggggtggaattcccatctagccgagaattccctgtgggcacgggcagccccagacgtcatccccggaccccgctgcccagcagcgcccggacgccagcgttgtccgtgtcccaacaccgaagccgctcctcccacgccgccgcggagcgggagcgacctgctttctcggaaggcgtcgcggccacagctcgccttcctgtcgctcccaggccgggcgccaggtctcccatagcaaccgcggcctccagcga

SEQ ID NO: 11145 - DNA, 400 bp, Homo sapiens
  source 1..400: mol_type = other DNA
accgcagcctgggcatggacaggggctggggcttggtcactgtttagttcctgagctgtcacttggcatctgcctctccacgcaggaggggacctggcagctgcctcaactcctctggcagtacatgcatagtctcgctctgtcacccaggctgaagggccgtggcttgatcatgactcactgcctcccagcctccccagtagctgggaccgcaggcgcgcctgcacgccttggcttcctgaaggggcccggggagagggggaagaggttgctccgcgttttccgcccgcccgcctgctttccgcgaggcactgaggcctgaaaaccgcgaggccgcccacgcgcgcctgacccgccgccccaggccccgccctcccgcgcccgcccctgcgccggcccc

SEQ ID NO: 11146 - DNA, 315 bp, Homo sapiens
  source 1..315: mol_type = other DNA
gttcatgagggccacatgatttgttgaaagaaaccagagtgcactgatcaggtgggatggccagggctgcctgccactggcttcccccagccctgccccgggacaggaggaggctctctcctttcaggacctggtgcagtggcatgatctcagctcaccacaacaagtgattctcctgctgagtagctgggattacaggcacgcaagataaggagttcaagacctcttcctggctcttctcactgtgcttcaaaatgttaatgaaacgtttcccttctgaatagaaggctaacgaggcctgaatttaggaccttc

SEQ ID NO: 11147 - DNA, 341 bp, Homo sapiens
  source 1..341: mol_type = other DNA
agctgggatcacaggtgcctgctgaaacacagtctcactctgtcacccaggctggagtgcagtggctgaatcttggctcactgcagccagtagctgtaagcagtaggactggagttattactcaaataaatctccccaagaactcaggcactgagtcggtctctgagtgccacatgggctgagtcatgagtcacacaggtccaggtgagtcagtcggttgcttccacaatagagatgctatctaaactcacaaatcttgtgatctctcgccacatgactcctgagcagtcagattataaaaacgatgcgtaggttttagcagcgtccgttttacaaaaaag

SEQ ID NO: 11148 - DNA, 506 bp, Homo sapiens
  source 1..506: mol_type = other DNA
ccaggacgggttggggcctgcctggggtgagtccctccctccctgccatgcccagtgcgcactgattcagtaggagcgcccatcagacaagatgggaccaagagtccagttggctctgctgcgcgcctgtcactgccttcctgcacatctcaggggtgggaggggacctggcccaagccttaggactagaacccgggccaggcgggagtgaccagccgggacactcagggcctccgcgcgttccagctgggtgaccttgaccctccagccccctgcgcccggctgctctcccagtggtggtggggagcggtgggggggggcgcgcccaggcttttctaatccggcgctggtgggggagaaccgagggcgccaccgcccctccccgcaggtccggggccgaggggtgcggcgcgctctccccaccgcggtgcccaggtccccgggacgcaggggcgctgggtagcaagggggtgcgcaggggcgcggggcgcggggcggctggcaat

SEQ ID NO: 11149 - DNA, 537 bp, Homo sapiens
  source 1..537: mol_type = other DNA
gcgcactgattcagtaggagcgcccatcagacaagatgggaccaagagtccagttggctctgctgcgcgcctgtcactgccttcctgcacatctcaggggtgggaggggacctggcccaagccttaggactagaacccgggccaggcgggagtgaccagccgggacactcagggcctccgcgcgttccagctgggtgaccttgaccctccagccccctgcgcccggctgctctcccagtggtggtggggagcggtgggggggggcgcgcccaggcttttctaatccggcgctggtgggggagaaccgagggcgccaccgcccctccccgcaggtccggggccgaggggtgcggcgcgctctccccaccgcggtgcccaggtccccgggacgcaggggcgctgggtagcaagggggtgcgcaggggcgcggggcgcggggcggctggcaattccccgcgccgccccgccctccgccgcagcccgcgccgggggtgggggccgccgagcgccagccccccggccggccgattccccccc

SEQ ID NO: 11150 - DNA, 382 bp, Homo sapiens
  source 1..382: mol_type = other DNA
tttatctttcactgaagcataatttacttccagtaaagtacatgagtacatgaatcttttttttgccaggcgtgtgatgaactgccagcctgggaatccttcaagggcaggagcacctgctgttctgtgagcctggccaggggccccagtgcaggggcaagcgccccctcctccactggaagagagccttgtccgatcccccagccaagggcctttgcagggagccgtggccctgctggagagtccccgccggctgacagcccggagattagtctccaaggccgccataggcacgcaggcccgcgtcaggactgcgatttctcatcctggtcacgcaggcaggcggccgcccctgcccgcctgccaggagccaggctcaggc

SEQ ID NO: 11151 - DNA, 288 bp, Homo sapiens
  source 1..288: mol_type = other DNA
gaaaagtacttgatagtgggttaatttcttcactctgtcccccaggctggagtgcagtggcgtgatctcagctcactgcaaccaagtaactgggattacaggcacctgcccaaccgcgcctggccagatggtggatttgatgaaaactttccatctaccttaagtaataaacacactatgttgcaaagctataggttgtctatattttatatatatatatatatatatatatatatatggaattgttctaacatctataacaatataccgtaataaaagttatgtgac

SEQ ID NO: 11152 - DNA, 447 bp, Homo sapiens
  source 1..447: mol_type = other DNA
ctccatgtatttttcaaaaaaaatccaacatgaaaattctagaagttttctcgctagcgacaaaggcttggaggctgggtcgccacctaccgagaagcggcgggtggggggaggatggccgtcgtggcccgaatccccagtggtaaacatctaaaaatcgtcggcctcggggttgtaaagttttggagtttaacttaggtgaacagtaatgtctctccattttttgcaagtttccttccaaatcctgcaaggcggaaggactccccttttgcagagcaaggagggcgacggcccagcccggggctccccggcttttgcagcttccctgcctcgcaatttgcaaggaatgtgggcttggacggcggctggcgctcggtggggacgacgccggagccaccaccccggctcccctcccccacccgggcggccgcgcaggccccaggtgca

SEQ ID NO: 11153 - DNA, 450 bp, Homo sapiens
  source 1..450: mol_type = other DNA
taaacatctaaaaatcgtcggcctcggggttgtaaagttttggagtttaacttaggtgaacagtaatgtctctccattttttgcaagtttccttccaaatcctgcaaggcggaaggactccccttttgcagagcaaggagggcgacggcccagcccggggctccccggcttttgcagcttccctgcctcgcaatttgcaaggaatgtgggcttggacggcggctggcgctcggtggggacgacgccggagccaccaccccggctcccctcccccacccgggcggccgcgcaggccccaggtgcacctccattgacagcccttgctggagagggccgggcgccgcgcttgcctcgtcctcgggttgtagtccacgaccgccgccgccgcgttgacggggaacgcatcactcccgctgggcggcgctgcggatgcgcaggcgcaacgcgcct

SEQ ID NO: 11154 - DNA, 195 bp, Homo sapiens
  source 1..195: mol_type = other DNA
gccagtcccagctactccagaggctgaggcaggaggatcgctggaggaggctgcagtgaactgtgatagaaaaattaaatgcaatttgcgatgcatcagtgatagcttctgcgacgggaaggacaagtgtaaacccttttccttgtccctgcgagtctgcccatgtttacaccctgcaagcctgaagtttaaggc

SEQ ID NO: 11155 - DNA, 253 bp, Homo sapiens
  source 1..253: mol_type = other DNA
gcagtgagctatgactgtaccactgcactccaacttccatcattcatcattctccaagataaaaattttttttcttaagtcgccggcgcctgtagtcccagctactccggaggctgaggcaggagaatcgcttgaacctgtgaggttgcagtgagccaagatcgcgccattgcccagcaatccatcccacaatcagcgatggctgagggggtctggacctcgcgggacggggctgcacgccccacggcgactc

SEQ ID NO: 11156 - DNA, 199 bp, Homo sapiens
  source 1..199: mol_type = other DNA
ctgctgtcctggctggagtgcagtggtgcaatcatggctcactgcagcctcgagagctaatttttaaatttctttgtcttccaaagtgggcaggggtcccagctactcgggaggctgagacacgagagtcacctccagctcgctgtcgctggaggacggcctggggcggcgtaagggacacctgagccttgggctgccg

SEQ ID NO: 11157 - DNA, 228 bp, Homo sapiens
  source 1..228: mol_type = other DNA
tggccaaataatttttaaaatttgccgggtgtgatcccacctactcgggaggcttgcagtgagctatgactgtaccactgcactccaacttccatcattcatcattctccaagataaaaattttttttcttaagtcgccggcgcctgtagtcccagctactccggaggctgaggcaggagaatcgcttgaacctgtgaggttgcagtgagccaagatcgcgccattgc

SEQ ID NO: 11158 - DNA, 254 bp, Homo sapiens
  source 1..254: mol_type = other DNA
tgcagtgagctatgactgtaccactgcactccaacttccatcattcatcattctccaagataaaaattttttttcttaagtcgccggcgcctgtagtcccagctactccggaggctgaggcaggagaatcgcttgaacctgtgaggttgcagtgagccaagatcgcgccattgcccagcaatccatcccacaatcagcgatggctgagggggtctggacctcgcgggacggggctgcacgccccacggcgactc

SEQ ID NO: 11159 - DNA, 292 bp, Homo sapiens
  source 1..292: mol_type = other DNA
cgtatatacatcaagtgtttatcaagctgtgtggttaagatttgcacacttgtatatgttatacctcgatttaaaaaatctaaataagtaaataaagataccttcaaatctttaaacatcatctgccagtttgtattagaaaaaaagagagagaaaaaaaaattttaaaaattagcttggcatgtcccagctactcaggcagcttgcagtgagctgtgaccacgccactgcactccagcctgggcaacagagcaagacactgtatgtaacccagtttccacctgattctggt

SEQ ID NO: 11160 - DNA, 440 bp, Homo sapiens
  source 1..440: mol_type = other DNA
atcagatgaaccctgaggcccctggaagcttcgagtgtctataattggaagacccacttctctggactggatgctgcattgaatagggaagcagcccagccttccttctggggcagagcagtggtggggacctgtttccagctgcttgtgccccccacttcatggaggagggaccagggagacagtggctgcctgccctgaaaatcgcccttgtctgtccagcctggcctgagatactttatttatttatttatctatttatttatttatttatttattttagagccagggtctcaccctgtggcccaggctggagtgccgtggtgctatcatagctcactgcagcactgggattacaggtataccattatgtccagctaaacctgttccttgaagaaagtgtgaacctcaaatgaatgcatctgataaactcactcaca

SEQ ID NO: 11161 - DNA, 465 bp, Homo sapiens
  source 1..465: mol_type = other DNA
cactgataacattgaattaagccttaatctctttaatgtatataaacaatggaatgaataaatcaatgaatgagactttttaaacagctttattaagtgcaaccgccaacacaatctaattttaaactatgtttatgctgctacgagaaagcctatacatccacccgatatctgggccatgatgtgaaattcccacgttatcaacttgtaaagtagaaatgagccgccagtggcgtttgtgaaaagcacctggtaacaggctgacataagcataggtctcgggtccttttattgcgatcctttcacgggatcgcctccggatgggagccggatgggatcccggacgggatcgtctcgctgggagccaattttccaaaacagctgtgtctcgggagctgccgggctgcgtctccccgagtcgcgcgcgcatgacgtggcgggcgcgcgatgacgcgacgcgtggcg

SEQ ID NO: 11162 - DNA, 330 bp, Homo sapiens
  source 1..330: mol_type = other DNA
tcacgttctgaccccctgaggctgtgtcacccagaataaaactctttatagactttgactctttttggtcaacaaacctaacgtgcagtggcgtgatctcggctcactgcaacctccggagtagctgggatcatcatgttggccaggatgatctctgcccagcaacttctcagcatttcggacttgggctccaggacccagtaacggagccctggcaaagctcatagcctggagcttcttaaccttttcctgggacccgcggtgggtgtcccgggaggcggacttccggtgcactcctgcgcttgtgcacctctcctgcgtgcgtgttcg

SEQ ID NO: 11163 - DNA, 247 bp, Homo sapiens
  source 1..247: mol_type = other DNA
ttacatgtgatattttattcatagaatccataaatggaagggaaatttctggtatacaaaacttgatatatagactagagtgctggcttaggtaatccatggattccctgaaattggggatttttaggcctcaaaatgtctcttggactcaaaatacatgataatccttgtacatgataatcattgccaggttggcatgagcgatgacatcagagattccgaccatcctgattggagggaccggact

SEQ ID NO: 11164 - DNA, 386 bp, Homo sapiens
  source 1..386: mol_type = other DNA
cctcctgagtagctggaattctcctgacctcaggtgatccacctgagtagctgggactgccaggctggtctggagctcctgactttgggtgatccgcccacctccgcctggccccttgcctggggacctgccacccccacccggggcacatccccgtgcctgctcctgccgtggccagcctggccttggcagcccgagggctgggcttctgccaaaactgggcccacaggccaggcccaggcccagcagcaaggccagagggtttcccattggccactgcctggctgggctgtcccaggcgagcggagagaggctgggagaaaggcgcccttcctgcggtgcctgctggtaattggctctccggaaccagccggggacacgagggc

SEQ ID NO: 11165 - DNA, 714 bp, Homo sapiens
  source 1..714: mol_type = other DNA
gtctgagcaggatgggacgccggctcagggaggcaggtcccgggaggtgcccgcggactcagccccgaactccgggacctgggctctgcgatccttgcagagggcatggggtgggggcggccacccattgagccggatccggccaggcgcccacgctgcgccccgcccgcggggctgcgctttcccgggctgcggccgcagggctggtcagtccggcgctcccgggtcccaggcccggaaggagctaacgggctattcgcaggcgggctgggattcccccgggggaggccccactgcccggcccgcgtcatccccgccatctccacgggccgtcgcgggatagccccctgcaggagcgggcagggtagtgggcggcgcttggcggagggcagcacgctcggggcgcgcggggactgcggccggggcgagcgagggcatatcagggcagcccgcccaggccacgccccatccaggcctcgccccgtccgcaccccgccccggccctgcctagaacggcgggaccacggtgactgacaggactccagaccagtcaccacgcgcctcgaggccccgagaggctagtcggggccgagccagcggaggggctccccgttcggcgaggggcggggtctctggaagactggcaggcgggagccgtcccgttagcgccggatccccgcgggtagggcggggcgggcggcgccgtggggatcc

SEQ ID NO: 11166 - DNA, 350 bp, Homo sapiens
  source 1..350: mol_type = other DNA
tcaggtttgggatctgttagatctctcaaatgcccccagccagccctggccctacaggtgtggccccaagaagatgggctggcacctgcctggtcacatcttgaccatccagaattgtgctataaagtaacttagttcagttcactggaatattacttaatttcctctgctttttctttttaaacaagaaagtgttgaccagactccctggggcctgttgatggaattcaataaagggacgcccaggctgcagtgcagtggtgccatctcagcttctcccagagtgctgtgatcactgggtcaaaagtgctgcttctgttcccaaccacagaattctctggaattgtttt

SEQ ID NO: 11167 - DNA, 339 bp, Homo sapiens
  source 1..339: mol_type = other DNA
cctagtagctgggattgcgtcactatatatatatattatttgttcaggtttgggatctgttagatctctcaaatgcccccagccagccctggccctacaggtgtggccccaagaagatgggctggcacctgcctggtcacatcttgaccatccagaattgtgctataaagtaacttagttcagttcactggaatattacttaatttcctctgctttttctttttaaacaagaaagtgttgaccagactccctggggcctgttgatggaattcaataaagggacgcccaggctgcagtgcagtggtgccatctcagcttctcccagagtgctgtgatcac

SEQ ID NO: 11168 - DNA, 277 bp, Homo sapiens
  source 1..277: mol_type = other DNA
gatggccacctcagaggatgtgaatttccaggcatttcccacttccctagaatcttggtgactaagtggctccgaaagcggtcctgacagcatctgctttgctctgtcagatctggagaggcagtggtgtgatcacagctcactgcagccttgaactcctgggttcaagcaaagtcacacacataaataattgggtgaatccattttcagctgaagtaactgaggctcagggaggtgaccaggatcccatgggcctaggtggggtgatgtcccctcc

SEQ ID NO: 11169 - DNA, 392 bp, Homo sapiens
  source 1..392: mol_type = other DNA
acacctttaacatctaagaggcagctgtgacacagatgtctgtgagatcaccctggccaacatatcccagttactcaggaggctgaatcgctgaggttgcagtgagccgagattgcaccactgcactccagcctgggcaacagagcaagactctgtctcgaaaaaaaagatcctcttggcctctttgttaccatccatgctaggctggctggttggcccatctggagatgaaagggagggcagaagtctgtccgtgtggacagaagtctgtctgtcactgtgctggggatgcacatgggcccccatcagggcctgcctgttagaagtccttgtaaaccttggactcctgaggcgagatgcaggggaggcgcccttccctccccaggtgcccc

SEQ ID NO: 11170 - DNA, 283 bp, Homo sapiens
  source 1..283: mol_type = other DNA
tgtttcctcttggcataataatcatgaggtattattacatcctcaggatatggaaactgcagtccccacttcagaacaactggtgtaattcaagggaaaacgtttcataatgctatcatagctgattttatcgagtaggatggaatcaaacacggtgctggaaccgacccccctccccccgtcccggcctcccacgcacggggggggggggggggggggctggcggggcctctgggaggcgtggcctccggccggctcctctgctgttgccaagggaaactgc

SEQ ID NO: 11171 - DNA, 396 bp, Homo sapiens
  source 1..396: mol_type = other DNA
gagctcacgcctgtaatcgcagaggctgcagtgagctgtgactgcaccactgcaatccagcgcgccctccgccgtcaggctggatggagggaacccagaccggcgggcgcacagccacagttctgcagtgatccccgggaaggtgggcagccggcccggtgacctgcagggttgtagaagccgcagccgccgtctccaggcgactccgcctgccgggcgacccagccgagccgcgagggggcgtggccgggccgggccgtaccaagagcgcaaggggaagcgcggggctccgggaatgcacgcgcggctcgagtgggcggggcggcggcccaatggccacgcccccacccccgcggccggcgaaggcggtggtagcgcctcagtggtgtgggcctg

SEQ ID NO: 11172 - DNA, 386 bp, Homo sapiens
  source 1..386: mol_type = other DNA
gtgggcccagttggaagttgttttccaggatgtccatccatgcaaccattccctgccaccgcgtgggtggggctgggaacagagtgccgtcccaccacttagcgcgctctgtggagggacccctgcaggcctgccctggcgggccagagccctgctggctgcaccacgcggctggcacagtcagtgcagtccaggcccgggggctgcagccgtcccagtcccggtccaggccgcgagtcccggggctagcaaccgcccttgcggccccgcccataccccgcccctgtcccggattggctggggtggggggcgtgcccattggtgcccgtggcggcgcgagcccggaagcggacgggggcggtggcggaggagcctcgggtgggccg

SEQ ID NO: 11173 - DNA, 520 bp, Homo sapiens
  source 1..520: mol_type = other DNA
attctgacacactgcagagttgcctaccggcaggctcagtccgcccacagcaggagagatcctcctaagaggaagccgtcttcaggtcagaagcgctgaattctaatcctctggccaaatgactaatctctagcctcggtttgtccatactatggaattaggagcagaaaaaaacgtaagtttactttcagatgcagagcaaccttgaaggcgtgcaagccaaggcaggccagtgtcagggcctgccccgggcgccacagtctccagccagtgccgggcatccctgcggtccaggctggcctggagagggtcagagctgcccgcgaaccggggacgcacgtggcccgggccggggggcctccgcctgcaggccgcccctcgtctggcctacctgggccgaggtgctgaagagcgctggcaggccggcggggaagtgactccaacgacctccacactgcccagcgcctgctctctggggcctcgcgagagtgaccggacttccggtcgcgctcgcctccgg

SEQ ID NO: 11174 - DNA, 395 bp, Homo sapiens
  source 1..395: mol_type = other DNA
ggcatgcagccactgcactccagcctgggctagagagatccgtctcaaaaaaataaataaattcatacatttaagtaataaactcattgtgagcacagtgtctttattcgtaaagaacgaagttgttgtccctacaacctatttgctcgaggagatggcctccggagctcagagtcccctctggcctccaagggcaaggtcgggggctcgggtctgggacgcgctccacctccccggctgcgcgactatggccaggctccctgtcggagcctctgcctggggccccacctgtgcagactgtcccggaagtggccgtgatctcacgagatcccggaggcgagcgcgaccggaagtccggtcactctcgcgaggccccagagagcaggcgctgggca

SEQ ID NO: 11175 - DNA, 337 bp, Homo sapiens
  source 1..337: mol_type = other DNA
tccgcgccccgccgcaggggtcgccggcgcccccggcccgcgcccccccggggctcgtcgcgctcgctcagcagggcccgctccagcagcgactccggcagcggccgcggcgcccccggccccgggcccgagcccggctctgagcgaggccacggcggacacgggaaacggtgagcgtgctggacccggagctggactcccgcccccaccccgcacagggctcccctccactagcggatccctgcccacgggatccctccccgcgctgagctaccctctctctagggagttaccctccgggagctccgcgttcactgcgcactccgcgcgaactgac

SEQ ID NO: 11176 - DNA, 420 bp, Homo sapiens
  source 1..420: mol_type = other DNA
aagtgctgggattacaggtagcccaggctgaagtgcagtggtgcaatccagctcaccacagcctctggatcctcctgcttcagcctctggagtagctggggccacaggcatgcatgcccagctaatttttaaatattttttggtagaagtaggcagactgctttttaaaatttttttgagagacaagactttgatctgttgcctaggctggagtgcagtggtgagatcatagctcactgcagtgtcctccttaacagaaggacggccctggccacgggccacagccagcaacgcttaagcaccagggccggcgagtgccctgccgtggcacggctccagcgtcgcgctcggcagatgagggctgaaccctcttcgccccgcccacggcccctgaacgctgggggaggagtgcatggggag

SEQ ID NO: 11177 - DNA, 580 bp, Homo sapiens
  source 1..580: mol_type = other DNA
cttctcgctcctgcggggccccagctgggaccccttccgcgactggtacccgcatagccgcctcttcgaccaggccttcgggctgccccggctgccggaggagtggtcgcagtggttaggcggcagcagctggccaggctacgtgcgccccctgccccccgccgccatcgagagccccgcagtggccgcgcccgcctacagccgcgcgctcagccggcaactcagcagcggggtctcggagatccggcacactgcggaccgctggcgcgtccctggatgtcaaccacttcgccccggacgagctgacggtcagtggtggagatcaccggtgagcccccctgctcctgcaggggagaggaggaggctcgcgggggtcccgggggcctgaaaaacaggactcctgattcccttgctcaggaataatcccagcgctttgggaaaagcaaacaaaaatttttttaaagatcatcgatgaagagagaaaatgcgctttataagcggggagttccctggcgcgggtgtgcgcggctccaagtgcgcctgcgtactgctcagaagaactttccggaagtttctgaga

SEQ ID NO: 11178 - DNA, 439 bp, Homo sapiens
  source 1..439: mol_type = other DNA
ttagcactccaccctggagaggaagaaggggttctccagggtcagccagcagacagctgcatcctttgacagtccccagggtctggccccttaattcggccatcccgcgggcaggcaaaacagggtctaggactgaggcccctgccccctcctctcgtaatttcccggagaatatggggcggggcggtgaatcagcactcgcagggactgatgcagccctgatccccgccaggggtccccagcggcctcgggattagtgcactgcaggttacactacaactcccaggggcccatgcgtccgagggctgagcccagctggggagcggggagttctagccgcggccgggctcgggcggggcatgggcggggcttgcggacgggtgggcggggcctgccttcgtcatgcggcgtgggcggggccgcagggggttgtccgtca

SEQ ID NO: 11179 - DNA, 357 bp, Homo sapiens
  source 1..357: mol_type = other DNA
gcaaggctctgactctctgggcctcagctttcccaggaatgatagcccttgctatgagttatgagttgtggctcttacgaaatagcattattggccctataccctcccaaattggagagggcctcatcagagaatgctggaatatctctggggcaattctagagtgttactccgagtgttatcctagagtgttactctaaagtggtccaggaacagtcattcttgggatattgctatagaattctcgagtattggtgaagcaatagtactggctggagtgcagtggcgtcagctcggctcactgcatgcctcagcctcccgagtctctggggccatgttggccagactggaagctct

SEQ ID NO: 11180 - DNA, 506 bp, Homo sapiens
  source 1..506: mol_type = other DNA
cacccaggctggagtgcagtgtcacaatcacggctcactgcagccttgactagctgggaccgaggtactatgttcccaagatggtctcaaacagcaatctggctgattttcctgtagttccagctactcccttgagcccaggagtttgaggctgcagtgggctatgatcacaccactgcactctggtcggtctccaaaatctctaaaaaaattttttttaaagggagaggggctaatcaaagccttacatagaagcagtagtgctgggtccaaggtcagggtcaggcaatgacccagaagaatccctgggacccaggctggggttcttccctggcaccacaggacgccccagccgcggctgccgcactcgctcagcgcagcttcctgcccgcggcactccacgttgtccagcaggatggggcctcggccttggccaaaggcaaggggccgtggcacgggcagtgccaggccacagcccagctggcgcgttggcgtccacccccagg

SEQ ID NO: 11181 - DNA, 288 bp, Homo sapiens
  source 1..288: mol_type = other DNA
gagtcaggaaattaagtcctaaaagctgggactggttgctgtgagctgagatcacaccattgcaccccttgaggtcaggatttcaaggccatcctggctgcctgtaatcccaggtactcgggcctgagtgccattgcactccagcagcctgggtgacagagagagactctgtctgaccctcagctgagatgtgggtgcttggctgccctgcaaaggggtggagacctatccaggccttcctgaaacccaggaggggctgcctggccttgagagtccatgcctccccca

SEQ ID NO: 11182 - DNA, 287 bp, Homo sapiens
  source 1..287: mol_type = other DNA
ttcaagcgattctcttgcctcagcctcccgagtagctgggattacagcatgatggccaggctggtctggaactcccgacctcaggtgggattacataaatattaaaaaaatttaaatttaaaaagaagaaaaataaaattaattttaaaaaacatgtatgtactggcaccatgtatgtactagtaaaaactagttaaaattaagtcagtaattaatgaaggaataagtcaatgactgggccctaccgggacccagaaggccgcacgccccgggcatgcgcagcggct

SEQ ID NO: 11183 - DNA, 420 bp, Homo sapiens
  source 1..420: mol_type = other DNA
cactgataacattgaattaagccttaatctctttaatgtatataaacaatggaatgaataaatcaatgaatgactttttaaacagctttatgacaacacgatctaattttaaactatgtttatgctgctacgagaaagcctatactccacccgatgtctgggccatgatgtgaatcccacgttatcaacttgtaaagtagaaatgagccgccagtggcgtttgtgaaaagcacctggtaacaggctgttcacgggatcgcctccggatgggagccggatgggatcccggacgggatcgtctcgctgggagccatgcgggaaaattttccaaaacagctgtgtctcgggagctgccgggctgcgtctccccgagtcgcgcgcgcatgacgtggcgggcgcgcgatgacgcgacgcgtggcg

SEQ ID NO: 11184 - DNA, 446 bp, Homo sapiens
  source 1..446: mol_type = other DNA
tgagttaaattcattatttatctaggtattgcctattataaaataatagagacttcaagtgctttatatataaccattagaaagatttgtgcataagccagtctccataacataactgagatggggtttttttattttatttttaaaatttttaaattttttggctttgggtttttatttttgtatatatataaaggaccccaaaggatatatgatttcccttccataatctgtaacataaaataaggtatacgatgttcatggttaacttcaccagtgagctttgcagccatctaggaagaaataagtgacaacaccacttaattccttattcttcattgaaaggttctatctttgataaggtaaaaaatggagcatttctgttatgcagcttatgaggtggcaacatcttgtacttcagagattctgaagccgagcaacttgcc

SEQ ID NO: 11185 - DNA, 459 bp, Homo sapiens
  source 1..459: mol_type = other DNA
ccacccccctccgattgggagaggcagccccagggacccccacgcctgtctccgtggctcaccttttgtcccccgtggccacagagaagggaaggtcacagccaccaccttctccctggagccgcgctgtgtcttcgatgggcttgccagcgccagcgataccgtctggctcgtgcgtggtgggccctaggagcccctcaccagcaagcgccttcaatgattgagcccctgtgggtatgtgtattgaaaaatacacgcgacctgggaggatgtggcctcctgtggggcagggccggtgcactgcggggctggggctggcgctgggcaggttgggactgcccgctgctccccactcctggctctgggtggggacaaaaggccagagcctcctgcagcctccaggggcttccagaacccggagacactggcttgccctgtgacgaccccatggcgggcagc

SEQ ID NO: 11186 - DNA, 425 bp, Homo sapiens
  source 1..425: mol_type = other DNA
agcaagaactttgagggtctttgctaagacagcagctggcagcttctaaggaatagttatataactggtatccaatttctgagatgattttgacttaaacattgtgtacctagggtgcaatgctgcaatctcagctcactgcaacagttttcaagaaagaagacaccattattgccaaagattttggtaagatacaatgtatgttttctccatgtggatactagatagtaaggctatccagaagtattttgggtacttgtttaaggattgtaaaacaatgtttccatttctggatataataaatgtatttgttaatataataaatgaatagattagacccataaactatttgcagtgttgagtcattgttaaaatcaggatgaaaatatatagctgaatacttgctttgtaaacctattgatcgg

SEQ ID NO: 11187 - DNA, 549 bp, Homo sapiens
  source 1..549: mol_type = other DNA
cagtcttgtgtacacagtggtatcttgcaggcattattattgaagcttcctaggcaggcttacttcttcaaagcttgctactcatggtacctggaacacctattgacaggctgttttgggacacacccccaggctgtgagccataccattgaatgaattgtcaagaaacttcaaccttgatgacctggattataccaaatcgtgtttccattcgatgtataaaatttctataattgggaacctaattttttaaatactactcggatactcaaattaaaagtgcacgtcgaccaaatttattaagttcactgtgcgttccacctccacggacgcctgggggtggatagtatcacacaatgggtcgtacttcacctgcaggccgtccaggccccgcacgccgccctccacgccgcacaccgcgaccagcacgcggtcgccatccgggtaggtgagggggtccaggggcctcacggccaggtggcacgggagccgcgcccgcagccgaccgaacgggctcacctgcagtgtccactccttcagagttcggcg

SEQ ID NO: 11188 - DNA, 535 bp, Homo sapiens
  source 1..535: mol_type = other DNA
acctccacggacgcctgggggtggatagtatcacacaatgggtcgtacttcacctgcaggccgtccaggccccgcacgccgccctccacgccgcacaccgcgaccagcacgcggtcgccatccgggtaggtgagggggtccaggggcctcacggccaggtggcacgggagccgcgcccgcagccgaccgaacgggctcacctgcagtgtccactccttcagagttcggcgcgccgggccaggcggagggacctcagtctccgatccgggccagcgctcgcccctacctgagctgtacggcctggcttggcaagcccagcaagaccagcgccggggcaagcatggcgcgcctctctcgccggtcacttgccacggccaatcgacttggccactgcatcagctgcgtaatccccaggggcaagttgggatttgaaagctctgaactctgacctcgggatacgttaaagcggtggaaagtcgcagagctccgcctcttagaaaggcgggcgccctttgctgtgcatggtcaccttgga

SEQ ID NO: 11189 - DNA, 590 bp, Homo sapiens
  source 1..590: mol_type = other DNA
cctctgaagagaaagttagaaaactattatcattaatgctacatgttttctgtagctcaaagattcacatttgagcagctgtggggttttgatgaaagacaattatgtccttttaaatgggtcttagacatttagacattaatatacctacggacaaaggaatagaaagtagcacttttttctccactagttttcttctctttttcaagtagatgaagcaaaagtcaactgtactttgttacacttagaaacttctaaaagtgcttaagatttcacctgtaagaaggaaaaaggaccattttcattttagtaacgtttctgttctatagacagtttggataactagctcttactttttatctttaaaaactgtttttccagtgaagttacgtataattatttacttcaagcgtaagtataccaaattactttagaaatgcaagacttttcttatacttcataaaatacattatgaaagtgaatcttgttggctgtgtacatttgactataataatttcaatgcatattatttctattgagagtaagttacagtttttggcaaatcaggcagctgccgctattaaagcagc

SEQ ID NO: 11190 - DNA, 387 bp, Homo sapiens
  source 1..387: mol_type = other DNA
gaaacagaacattctgtgaaatgcagggctgtaatttatcccggggggtcaagagatatcgatgccctcccagaaggagttgccagcccactgagcagggtggttctgccctcttgcctggcactggatctcaaggcccctagggccactacactgtagtgtgcattgcaaatcatggtggagaaggtaccatttgatttaacatataacttgtgccagttagtattatttgctgcagtaattgactgagctcagtaactcccctactgaactacctctagtgagttttagtgttgaacaaaaatcaaagctagagcctaatgaaaaattttcatcctgtgttatgttttctcaatgactcagagaagggaaacccaggctgattct

SEQ ID NO: 11191 - DNA, 507 bp, Homo sapiens
  source 1..507: mol_type = other DNA
acctcagttggagaaacatgtctctaggagggaaaaaaattcaagactttcttttacatttggttggagtagttttcaaacttagtaagcctaagaatcaacaagtagttttcagaccttaatttcggaagcatgtgaaaaagcattctttattactgtattcactcattctcaccttccagagtgctctgttagcttaagattcagttttcatgtctcaaggcatggggcgaataggcccaagagacggccaagtggtttccacactttgctgcacagtggaggcaagccactgggctagcggcctcgccaaggccctgaagcgccgcgccctcctcagccccgaaggtgcgcgcggaggcctcccgccccggcgggcctggtcctggcgcctggtccaccccgccccaccgctacccgccgtgcccggctccggctccggctcaggtgcgggccgccggccgggaggagctggtgccggagcttctcaggccagggcgctgcaga

SEQ ID NO: 11192 - DNA, 507 bp, Homo sapiens
  source 1..507: mol_type = other DNA
ttcaaggctgcagcgagccgtgacaaaaaaaaaaaaaaattaatagatttataaagtccattctatgacctaaaggcaggaaggcaaattcccttcagttcggcgtcgtttcgcttcccttagctggagccacgctccagttagcaagatgagcatctacctgctgactccacagaccgtgacttgtagtcccagcccacggctggcggcggtgcggaatcctactctgacccactagggcttgccgacctctgagcaccccgggcggggccacgccccggaaatggagtcaggtctccaggccgcccgctgaagtgccttccagccactccaagcggggctggggccggcggggcgggcttgggggcgtgcgggaggcgggcggggatgcatctgcgggcgcagcgcttggggcggagccgcagcgcgaggccgcgcatctgggtggcggcggggacgcgcccgtggggagaggcggctgcggctgcggctgcggctgctggcggg

SEQ ID NO: 11193 - DNA, 504 bp, Homo sapiens
  source 1..504: mol_type = other DNA
ttataaaacctaaaggcaggaaggcaaattcccttcagttcggcgtcgtttcgcttcccttagctggagccacgctccagttagcaagatgagcatctacctgctgactccacagaccgtgacttgtagtcccagcccacggctggcggcggtgcggaatcctactctgacccactagggcttgccgacctctgagcaccccgggcggggccacgccccggaaatggagtcaggtctccaggccgcccgctgaagtgccttccagccactccaagcggggctggggccggcggggcgggcttgggggcgtgcgggaggcgggcggggatgcatctgcgggcgcagcgcttggggcggagccgcagcgcgaggccgcgcatctgggtggcggcggggacgcgcccgtggggagaggcggctgcggctgcggctgcggctgctggcgggtgttcctgaggcggcggcggcggcggcggcggcggcggcgtctccgacggaggagga

SEQ ID NO: 11194 - DNA, 562 bp, Homo sapiens
  source 1..562: mol_type = other DNA
tggagccacgcgttagcaagatgagcatctacctgctgactccacagaccgtgacttgtagtcccagcccacggctggcggcggtgcggaatcctactctgacccactagggcttgccgacctctgagcaccccgggcggggccacgccccggaaatggagtcaggtctccaggccgcccgctgaagtgccttccagccactccaagcggggctggggccggcggggcgggcttgggggcgtgcgggaggcgggcggggatgcatctgcgggcgcagcgcttggggcggagccgcagcgcgaggccgcgcatctgggtggcggcggggacgcgcccgtggggagaggcggctgcggctgcggctgcggctgctggcgggtgttcctgaggcggcggcggcggcggcggcggcggcggcgtctccgacggaggaggacgctagcgcagcggctcgcctggtactgtgggagagcggcggctggtggtgtcgggagcccagccggtgccgccgcagccgccgcctagggcggtggggaggaggagggagggctctgtgccgggc

SEQ ID NO: 11195 - DNA, 702 bp, Homo sapiens
  source 1..702: mol_type = other DNA
aggcagttttagttccttaaatatcagtatcacaagtagcaaaaattaatgagaaagttaaattttatcagatttatttttcattttatttgtatttaataatttgttgaatggtaaaaccagaatgcttttaatatgtcttgaggcctgaaagaaagttcctttgaaattaaatttcagcaatgtagttgtgtagaatttgaacaattcacaatactgactttcagtgcttctgaaagcaggaagtgtattactgacacgcagaaataatttgtcactaacccacaaactagttctgtaatgcagtgaataagcagaattggtctttgttggacatttccaattcaatatgaaagaactttgttttgcagtgtatagaagaaaattcttttaggcatgtttttaaaacttggttattgtgttaaaacactgaaattactcgaatatgttaaagactgagttaaatattctgactcagcttattaatgatatctttaaattatattacttttattcttgctcatgtgaaataaatatgaatcttatgtttgcacttatgctataaaagaaattatccttggggttaattattaattggggtcaccagatttcattaaaaatttgaaaatatcactgtttctctaaactttaatttttatttgttgtattttaagcggttaagaagattgtctaccaaatata

SEQ ID NO: 11196 - DNA, 476 bp, Homo sapiens
  source 1..476: mol_type = other DNA
cggaggtgggccgctcacctgagatcaggagttcgagtccagtgcggtgagccgagatcgcgccacggcactccaaagggagactctcaccttcaagcttgtaagtaatactaaagttctagatttgctggaagttatctccttcaatggattacagcaaaaagaaggacttgattcccggcaattttttctcttctgaactgagcattcccgaaatccagcttgctgacagtcttcgtggccgcagagacgatcgctacctcggccatggcagatctgggggtccggggcgggggttctccacgagtggaaagccctcccctcgcagcgcgctccgccactagccgcaccccgccgagctctgacctccgaagagggtccctgtggccaatggagcaatgccggctggtggcctggccgctccgccccttccctacccctcgcggagggcccgccccctgccccgcgccggctag

SEQ ID NO: 11197 - DNA, 635 bp, Homo sapiens
  source 1..635: mol_type = other DNA
gctagctgacatctccccgccagccgggctaggcggggcccgaggggcgggtggcgcgctgggcttcggcccgtcaccatcaagacttgaggaccgcgcgagctcgggaggaaggcggctgagcctccgccaccggccgactgatgagaaggggtcgcggctgaccccggccctcaggtacgggagactgccgggaaagtcgccggcgacggagggcgacgcgttggccccggagcccccacctccatcccacccgagcgcggaggtgatgccgctcttaccgtaggagcgagcgccgcgccgctaggaggcggctgaggtgcgcgcgggagactccgaagctagcgccgccgccaacagagcccaaggagccacaacgaggctgcccgcgggcgcgctgcctccagagggttgccccaccccctctcccgcaggattttgcgccggagcctgcagtcactgcgcgcgggcaggggagctgagcgccggctgctctgatttgggcccaatgggagcacggaaactccaggccagtagagaggcgggaccgccgcctttctgtatggtccaaaaagggacctctgaatccagattggcgtcctctctacctatagggtaggctcaggggcggtgag

SEQ ID NO: 11198 - DNA, 453 bp, Homo sapiens
  source 1..453: mol_type = other DNA
aaagataattttgcttcatgagcccacatattttgaaaagccagccttggccaaaggaggccagtcggctcgcggcgccccaccgggacgctcccctttcatgggctgtaagcccagcacatgctggagtttacgcctggatgcgcacagaagccctggagccaagcaggcgtgtgcgcgtttggggtcggccgcacagcccacccggcgtacggtgcgggctagggcagagccccagactcacctggcagcgctgccggccggaaagcggagaggactgcggtagaggatcctcaccgcccctgagcctaccctataggtagagaggacgccaatctggattcagaggtccctttttggaccatacagaaaggcggcggtcccgcctctctactggcctggagtttccgtgctcccattgggcccaaatcagagcagccggcgctcagctcc

SEQ ID NO: 11199 - DNA, 485 bp, Homo sapiens
  source 1..485: mol_type = other DNA
ttggccaaaggggccagtcggctcgcggcgccccaccgggacgctcccctttcatgggctgtaagcccagcacatgctggagtttacgcctggatgcgcacagaagccctggagccaagcaggcgtgtgcgcgtttggggtcggccgcacagcccacccggcgtacggtgcgggctagggcagagccccagactcacctggcagcgctgccggccggaaagcggagaggactgcggtagaggatcctcaccgcccctgagcctaccctataggtagagaggacgccaatctggattcagaggtccctttttggaccatacagaaaggcggcggtcccgcctctctactggcctggagtttccgtgctcccattgggcccaaatcagagcagccggcgctcagctcccctgcccgcgcgcagtgactgcaggctccggcgcaaaatcctgcgggagagggggtggggcaaccctctggaggcagcg

SEQ ID NO: 11200 - DNA, 779 bp, Homo sapiens
  source 1..779: mol_type = other DNA
tccctgagatcatccagccaataactgcttttgaacctgttttaggctcatccttaacactagaccagaggtaacctctatgccagtgtcatcttgtgactaaaatagtattctggagttgatgaaataacctctagggttaaaatcattaagtttagtactagacaaacacagaaaagatgcttatgaaatggtttttggtatttgtcttagtttgattatttttaaaagagatttgcagagttatagaacatatcagcagttttaatctgtttcttgtaagttacaattcagtagcttaatttttttcaataaaataaacttttagggactgtattttataaactgaaatattaaagagtttttttgatctttgaggattaattgtcataactacttaaatgacagttagcaaactgtgatatctaattattcctgtgtattaactctaatattggcttagtatttaacataaatattactgagtgtcagggaaaattaaatatcattataaattctgtcatctctgttagcaatggtaactgacactggtttttagaaacaaactacattactgattgaatgaattggtttatgaacaatttctggtataacctaggaaattctgaaatttctttaaaagattaaaaaaaattcaatctattttgtaagaaaacaagtgttatttattcatgcaaatagaactttctattattgtggcaactgatttttgtttacttaagagaacctgttggaggaagagtgtaatataagtctcg

SEQ ID NO: 11201 - DNA, 498 bp, Homo sapiens
  source 1..498: mol_type = other DNA
aaatgtcacattcttgataatttgtcccagctgtacacagtaaacattttagctccaatgagcagttatgtgagccatttgaggactcagaatatgcattgttaatatgtgttaatgcaggttatttcacaaccactttaaaaaacactactttaagaatatctctcctttactttttaaatttctggcaaaactcttacaagaaaacatttttttcaaaaatattattttatcattactttctggaaatgccatttcagaaacattagaatggatgaaagatagtttaatgtgagttaataaaattgctattaatcacttattgagaagctctgtagctaaagagtaacaaaacaactgtttatgaaaagggtaggtttaagatgaaaataattcttttgcaaaactcaccaactggagaatcctgtatttgtaataaatcaatgaggttaacttggcaacattctagttgattttaataaaaatagctgctttgag

SEQ ID NO: 11202 - DNA, 513 bp, Homo sapiens
  source 1..513: mol_type = other DNA
acttgggaaaagtgaagccccttatccagccgtccgctaattcccctactggcgggacgcgcgggcgggggcctgccccggggaatgcgaggctgcttcccttctgcgtctaagagaggcaggatcccgcgccaggacgctcgcagagcccgagatgtggcaccaggcgcgccacaagtcccccgcatttctgctccatcggagcccaggtcggagggagtcagcgcgtcctcctcgcacaggagcctggcgcgcggctcggtcgcacgaaaggtccgcactgggctcgaggcccttcctgccggcctccccacgccgggcctaggctcccgcctcctcccgtaggctgccaggcggacccagcctgcctctctctctgccttcactaccgggtcaagctgcggagggagggagggaggcagcggcgaagccctccgtggctccccacccggcgcgcgcgccagctgccacccaggcgcgcgcgcgcgttcccactcgcaccacgcaggagtg

SEQ ID NO: 11203 - DNA, 515 bp, Homo sapiens
  source 1..515: mol_type = other DNA
tcttagcaatgcctcccgcgggccacaggaactacagctggaaggatggggagatccactcctcattttatgggcaaagaagctaaggcctgtaaatattggctccaaatttggcatggaagcttatgtgctgcttttaaaaatacttttgagaaatccttcaaaaggaagaaagtgaccttggtgcccttttcgccgacagggatttgcattttgaaaaaccttgcgtggctgccggcgctgggcatgctcaaacgcccagaactggcttttttccccccacccgaaggggcaggtacgcacagctccctccgtgtgagcccagggcagaaggccacagccccgcggggcagtggcgcgccccggggacgctgccagggggcgccaggccctcagtggtggcgcggcgccggggtccggggccggggggcgctgtccgagggcacgtgcgcgggcgcgcgctctgggagtggtcgcgggcgggcaggggcggggccgcggcggcgcgcggaggc

SEQ ID NO: 11204 - DNA, 444 bp, Homo sapiens
  source 1..444: mol_type = other DNA
taagtggaactaccattgagtcaacacatattcatattatgcagtctagacctccaattaaaagaaaaatattttgagtaaaactatttaaaacactggtaatcactcacggccgggcgcggtggttcacacacggtgaaaccccgtggcgggcacctgttgtcccagctactcgggagtctgaggcaggagaatccgagatcgcgccactgcacaccagcctaacaaacaaaaaactcttcgttgatttcaatctggaaatgaaaaagaaagaaaaagaattctgactcattgatagatttgtttagaaatgtttttcttttttctgttagaaagctcagagttaaagagtggacaagagaaataacattttttcaactcttccattttctaaataaaacactgccacttatgggatattatttccactgatttagtaaacgt

SEQ ID NO: 11205 - DNA, 663 bp, Homo sapiens
  source 1..663: mol_type = other DNA
taaggaaaatattgattgactatctaccaagcactttatgcttcatataaataaaaaattgtgcaacaattttcaagaagaggtgtaattactgtttttagtttgtaggaaaaaccaaattacctgctgtttcaaagaacattggtttttattccagcagctgttgcttaagttcagtgtctacaccaagtgagctcaatttatagagatggatcctatgacactaaaatcaataatttaagaaaactgtgttgaattttatatttgtagcaatacaatatgtacaaatataaaaactatatgtatttgtatccattgttaaaaaaaagattttttttgttccctgacagatgctcaatagctttaagtaataatctaagcataggtagaccataaaagttggataacttacatgtatatattctgattgtctgaagataagatgtaagcatcgctgattagtaataataacttttaatcacagtaataaaaattgcccagtgagaaacattctatttgaattgcttattgtagatcatctctagtgtatagattttgacaactttctacattattttatactataaagcagataagccgtcatttaatttgaaagcataatggttttaccacctgatcaggtgacagatgagaaagcatctc

SEQ ID NO: 11206 - DNA, 630 bp, Homo sapiens
  source 1..630: mol_type = other DNA
agtacataggacctattattaaaatatgatgaaaatactggttatggtgatttgacaaaacaaccttcttttgtggatagtggttactacttgatacagaatagtttcatttaaagagtggtaactctagtctatcatttccctttaatgtgattctgtaaaagaaattttaattgaaaatatttaactatcaggagagaaatatgacttttccttttagtatagaattagagattcttaacatataaatcctagaaagtaatttagaaatcttgtcattatatcttcagagtaataactttaaattttttaaactggcagtgcatgacattttctgcctcattaaatgaggcatttacagagactttccagtaacaaaagttactggaacaaaaatctgttttgttgactcaatagtaatcaatattcacttttatgttgttttatgcttaagacaggaaaacctgagccttcctctttactatcagagcaaatggtaatcatgaagtgaagcaaattgattattgattactgattacttgaatttctatgtgttaacaggaataacaggttttttattttcctcaactgaggcccaaaatgagtgagatttttcaagttaactttcat

SEQ ID NO: 11207 - DNA, 506 bp, Homo sapiens
  source 1..506: mol_type = other DNA
ctctagtctatcatttccctttaatgtgattctgtaaaagaaattttaattgaaaatatttaactatcaggagagaaatatgacttttccttttagtatagaattagagattcttaacatataaatcctagaaagtaatttagaaatcttgtcattatatcttcagagtaataactttaaattttttaaactggcagtgcatgacattttctgcctcattaaatgaggcatttacagagactttccagtaacaaaagttactggaacaaaaatctgttttgttgactcaatagtaatcaatattcacttttatgttgttttatgcttaagacaggaaaacctgagccttcctctttactatcagagcaaatggtaatcatgaagtgaagcaaattgattattgattactgattacttgaatttctatgtgttaacaggaataacaggttttttattttcctcaactgaggcccaaaatgagtgagatttttcaagttaactttcat

SEQ ID NO: 11208 - DNA, 621 bp, Homo sapiens
  source 1..621: mol_type = other DNA
tttaaatatgacctaatgaactaaatatatttctgtctggtatgtttgaatgcatttatccagctctcctatcaaatacatgccaggttaaccctgtgaaggttttccttgattctgagaatttctttataagaacagggtcttgatagtgaaggttctttccccaaagtgcaaggccttctattttgattcaatatcaacataatgctttttttttttttgaaagtgacttaagtactaaagattatcctcaatagtaattctacttagacatattttggttgaagaaatttaaagagtttattttttgtaggagcactgtgctgtgatcatgaaatttttgcaaaactaacagaaaatgataaacagttgtcagtttgtcatccttgctgattgacagtctccaattgttttcagaattattagtctcacagtatttcagaattacgctgtataaaaaagtacattaaatttaaacttaataaaataagtttctgagaatatgattattcttccaaatttttttctggcctctgacttacttggatgggaaatagccaaaaaaaatatctcagatataggtaaacaaaccacacactgggatctgacactgtagagtgc

SEQ ID NO: 11209 - DNA, 498 bp, Homo sapiens
  source 1..498: mol_type = other DNA
cagctatcgtgccactgcactccagcctgggtgacagagaaagactccgtctcaaaaataataataatcacatactttatgaagaacacaaactacctaattttaacagaattagcatgaatcaactgcaaatgacaaactatattgtagttgaatgtgtacatcaataaaactgaaagtaagatactcttattttaaaaattccatgttttaaacagtttttaggacaagccattcaggcctgaactcagtattcatgaaaattagactttcttttaacagttattttaagtatggtgatattagagagtgtcccagtataaaatttctgagaatttttttctctttccaatgattagacgaattgattctttctgtgactcatcagttcatgatttgtgaataaggtatcgtaaataaaacatctgttaccatacttgcttatcatttaatggaagataagatttcaatatgttaatcatgtgtagaaagaaaatt

SEQ ID NO: 11210 - DNA, 488 bp, Homo sapiens
  source 1..488: mol_type = other DNA
aaaaggatacacttgtgcaacaagattgtcgtttatcttgacctgtttaacacgcaacagaggcccggcgcggtggctctcggcacactgcactgcactccagcctggcgacagagtctcacgtccttttaaaaacgcatctctttgccttaaaaggctgaaaataaaaaaccacaactgctttgcactttgatctgtagcgcacccagcaagttgctcactccgccgcggactgcgaaaggagcagggtggagctagggctccagcctgcggccgcgcattcttgcgtctggccagccgcgagctctaagggtcggccccgcccggtccgcccccgcggctccctgccaggctctcgcgggcgcgctcggggtggggcctcgcggctggcggagatgcggccggggctgcgcggtggtgatgcgagcctgcagggcggcgcgccggggcagccggagccgcgcgccgcggcgctgtaatcggacacc

SEQ ID NO: 11211 - DNA, 325 bp, Homo sapiens
  source 1..325: mol_type = other DNA
cccgatgtttaagagaagtaattttcacttaaacatcaaagtcagttccagagtttaacgagtgtacctgaaagtaatgctggaaaaatacctctgatgtatttctgtaggtgtgtcaaataatttaaaaggatacacttgtgcaacaagattgtcgtttatcttgacctgtttaacacgcaacagaggcccggcgcggtggctctcggcacactgcactgcactccagcctggcgacagagtctcacgtccttttaaaaacgcatctctttgccttaaaaggctgaaaataaaaaaccacaactgctttgcactttgatctgta

SEQ ID NO: 11212 - DNA, 422 bp, Homo sapiens
  source 1..422: mol_type = other DNA
tttcatagaccatacacttagattacttagatgtttatgaaatgaatatacactgaatttaatttataattgtcttagcagatagggtcccttcaaattttccactgccccactgtggcatagattgctgcaagaatctagtccttgcattacatctatccatagctagcatctcatatatgaaacactcatatagtgaagtaagtactattattacaatgtgcattttatagataggaaaactgatgcacagagtttaaaaactgggccaggtttatgcagcacttagaactctggtcagcacaagctgaagctattgtaggtaatgtgacgcattcctgtgcaatacatgtggtgtttacagggcctctgggcctcgtgtccagggagtgttctaaatgtttaaagtattccaatcagaa

SEQ ID NO: 11213 - DNA, 376 bp, Homo sapiens
  source 1..376: mol_type = other DNA
gtatacgtacatacacaccaacatgtgtgaatgtgttgtgtgcacgtgtgtgcctgtacaagtccacatggcatatttacctgtcagggacaggctatggacaatgactgtttcttggactttctcttaaaaagtcagatcagacaagtttattttgtatacttttcgtgagtttggcagtttgtgaaaaaaaaaaaaaacctgctctgagcccatggggcaggggcggtctctaaacccctagagaacctgtgtgccaaatagatatataaacacatgtattttcctgtttaaattgagccactgggatctggagctccagcttccaaattgaagctggcctcaggccaggtgaccttacagtcttaccgtagct

SEQ ID NO: 11214 - DNA, 415 bp, Homo sapiens
  source 1..415: mol_type = other DNA
gtggacaggggcactgtttatccatctcagagagatacaggggcaagtatccctcagcatccattaaggatccacctctgggtgcaaagacaaattctctgaatcaagtgaggggtcaagctggctgtcgtgtacagtgtatacgtacatacacaccaacatgtgtgaatgtgttgtgtgcacgtgtgtgcctgtacaagtccacatggcatatttacctgtcagggacaggctatggacaatgactgtttcttggactttctcttaaaaagtcagatcagacaagtttattttgtatacttttcgtgagtttggcagtttgtgaaaaaaaaaaaaaacctgctctgagcccatggggcaggggcggtctctaaacccctagagaacctgtgtgccaaatagatatataaacaca

SEQ ID NO: 11215 - DNA, 323 bp, Homo sapiens
  source 1..323: mol_type = other DNA
cctctgtccaatggaaccacagggctgggaagattgtccctgaggctctgtcctcgccaggtgagccgagcagtacctgggcgtgggaccgctggcacaaagggcacccagccccggcagagagtgccacctgctttaaagcaggcactggatctgagacgcgagccaagtcctgggttggagcctctgcagcctgtggatgcccgctgggcggctggccgtcccccgggagccccgcggggctggtccgctccgcctgcgcacgccgggcggcgggagcgagccggcgccgactttgcctaagaagccagacggagcctctc

SEQ ID NO: 11216 - DNA, 334 bp, Homo sapiens
  source 1..334: mol_type = other DNA
attcttaaggtgaaaagcatagacatttaaaactatgtattttcattcacttcaaaagatttcttatttagaaacatgtttttacattccctaatgtttggggatggtatgattcaattattttgacttcattcagatttgcaaagctttgttgataaatttgtatataaaatggagagacattaaaagcacaagcaatttgtgagtctgacagtttccaagtatgacccagggatatattgagaacttattaaatctatttatggatgtaattgcaccaagccaagtatatggtttgatgatagtgaataagtctcatgagatctgatggttt

SEQ ID NO: 11217 - DNA, 555 bp, Homo sapiens
  source 1..555: mol_type = other DNA
ttatttacacaaacacagtgccttggaaaatcaactctggaagtccatagcagttgaatcctaaggtattgcacatcctaagttttctaatacctgctttaaactttgccagttaccttacctgggggaaattacttcaacattcctaaatttgaagtaaaatttaggaattgctttaggacaaaggatttgcctttaatttcatttgaccaatttgcttaagtaaataatttatcatttctatcaaatttatgagacagtcacagatgaacttttttttttcaggctcttgaaacacacttttcttaaaagagtttaaaaataacataagacttaattttgaaaaaaaccttatggcaacagtgaaaaacagaatttggattctggatggttacaaatagattattttcaaaagaagttggatttattcaacttaggtcaatttatcttggtaagatgacagactgcatccctgctgggtcttgtttttaattagcaaggtgaaaggtgaattaaaactgacttctgagaggcttccaggagcccgaagagagg

SEQ ID NO: 11218 - DNA, 566 bp, Homo sapiens
  source 1..566: mol_type = other DNA
atcaaatatctattcaagtttattggtatcttaacataataccattgttgacctattgtgttaagcttatttacacaaacacagtgccttggaaaatcaactctggaagtccatagcagttgaatcctaaggtattgcacatcctaagttttctaatacctgctttaaactttgccagttaccttacctgggggaaattacttcaacattcctaaatttgaagtaaaatttaggaattgctttaggacaaaggatttgcctttaatttcatttgaccaatttgcttaagtaaataatttatcatttctatcaaatttatgagacagtcacagatgaacttttttttttcaggctcttgaaacacacttttcttaaaagagtttaaaaataacataagacttaattttgaaaaaaaccttatggcaacagtgaaaaacagaatttggattctggatggttacaaatagattattttcaaaagaagttggatttattcaacttaggtcaatttatcttggtaagatgacagactgcatccctgctgggtcttgtttttaattagcaag

SEQ ID NO: 11219 - DNA, 636 bp, Homo sapiens
  source 1..636: mol_type = other DNA
attttaaaacataattctcaaaaagtttttaactattagcatttaaaatacagaataagaaaaagttatcatagttgagatcagtgtttaccatttaactctccactatcaaatcaaatatctattcaagtttattggtatcttaacataataccattgttgacctattgtgttaagcttatttacacaaacacagtgccttggaaaatcaactctggaagtccatagcagttgaatcctaaggtattgcacatcctaagttttctaatacctgctttaaactttgccagttaccttacctgggggaaattacttcaacattcctaaatttgaagtaaaatttaggaattgctttaggacaaaggatttgcctttaatttcatttgaccaatttgcttaagtaaataatttatcatttctatcaaatttatgagacagtcacagatgaacttttttttttcaggctcttgaaacacacttttcttaaaagagtttaaaaataacataagacttaattttgaaaaaaaccttatggcaacagtgaaaaacagaatttggattctggatggttacaaatagattattttcaaaagaagttggatttattcaacttaggtcaatttatcttggtaagat

SEQ ID NO: 11220 - DNA, 363 bp, Homo sapiens
  source 1..363: mol_type = other DNA
ttaattaatgagatgtgatgcatagcattccagaagctggaaaaccatagacgtttttaaattctgagtatcttgagaatcccccgttgtaatttataattctcaaaggactaacaaggctttaaaaccttcagtggttaaagttgtattgatgaggatatatagacacacacacactgaattgtaaattttgtaggtagcagaattcagatttttaaaatcaaaattgcacccaaaaatggctataaaattgccttgggaagtaaatttatagctacatgcctcattctgcttccccggagccgaatgaagcagggagataaaaggaactgcttcttaagcaccactgcagcagaccttgtt

SEQ ID NO: 11221 - DNA, 312 bp, Homo sapiens
  source 1..312: mol_type = other DNA
tacttgtttcagatcagcagctcatgaatttaattaatgagatgtgatgcatagcattccagaagctggaaaaccatagacgtttttaaattctgagtatcttgagaatcccccgttgtaatttataattctcaaaggactaacaaggctttaaaaccttcagtggttaaagttgtattgatgaggatatatagacacacacacactgaattgtaaattttgtaggtagcagaattcagatttttaaaatcaaaattgcacccaaaaatggctataaaattgccttgggaagtaaatttatagctacatgcc

SEQ ID NO: 11222 - DNA, 468 bp, Homo sapiens
  source 1..468: mol_type = other DNA
gtgtccttgtaggactcaaaagagatgatgtgtgtaatgctcattacatagtttgtcatgtagcaactgttcagttaccatcatcatcatgattaacaatattaattatactcatgattacttatgcatttgttttcttgtgaaaaagagtggtgacacagaaaaccctgaagttttcacgtgatgacattttccataaaaattggcttcaagaacattaaaataaatgtccaattgcagaatgtcaatctgcctgacagtgtaaatctccttaaagcaatttaattcagattaaaaagataacttggcttatgcagcagaatgaaggatctgtttcaaattagttttaatattatttagcccctcattaatagttaaagtgattattaaaaatatctctataactattgtagtttgagaatctttttgctacagagcaatacaaaacagaggcctgctgttttaaac

SEQ ID NO: 11223 - DNA, 725 bp, Homo sapiens
  source 1..725: mol_type = other DNA
aaatttgaaaactttaccttacaattagtcatgtgtttgaagtaaagatcaataacacaaatttgctcctaacttgaaaataaaataaataaaatcaggtctactgttttgattatttttgcaggggacaaattacagtttttgcactcaaggaaactccagatttccactggctgtgaaaagattacaaattaatggctctaaagtgctttgaaaatataaatctctatataaataataaaacattattatagccttgtaagaacttcaaaaagtagtgttttacctggtaatttcttactttcatatgaaatcttctcaggacatcctaaaaattaaaagcagttatactgaataatttaagactatacaagcagttataatagaaccattatgttaaaagactatccacttcaccctataatattgttattatagaattaaagcaacaggattacaagttatatactcattcatgtattattttgcaatgtgtgcatattctcaaactaagaaatacatgacatgagaataaaacagctaaaattatgatttcttgtctcaagaagctctaaatgtgtacaacatttttaaaataaatatttggatgtgctaaataatcttaaggatattttgaagatattatcttagaattgtaaaaaaaattgagattatttctgacactggaatgtttttattaatgattcagcactaaatcttagacc

SEQ ID NO: 11224 - DNA, 338 bp, Homo sapiens
  source 1..338: mol_type = other DNA
tatttttgcagaatctgtagaagtgagatatttctgcattacttttgcttaaagaggatcctctattccaattgcataggatccaggttcatcaaaacttagaattatatacttaaagaggaagaaaggattacattctactcgtttttatctctcagcgcttggccagggtccacgctgctggcagcctccgcgcagcagggatgaacttctgcacgcttgggacccctctttttagaaagactgagtctctcccaggacagctgctgccacaaactctagcgcggctctcgggggaggcagcagcgccccctgcctcccggcctggcccctgcggc

SEQ ID NO: 11225 - DNA, 632 bp, Homo sapiens
  source 1..632: mol_type = other DNA
ttgcttgtacgtggtcaatgcgaaagggggacttctaaaattttagcatttcactatataataacactttattttttaatatattcaaatttctggatctagtggagttcacaatgaaatatatatatatatatatatatatatatatatatgcacatgtgtcttttaaatattgctgtccctctttctgtagtttaaaagttctggctaggttacaaaagacagcaattgttaaacaacttaacattaaatattaaagactaaatgtagcatttaaagcattaagtttaattgtgtcttcatataattcagtccttggttaatacaaagttagtatattagagtacaaaaattaatgaagtttcaatttggaaattaaacagtatgtgtttctagacatagaaagatgcctggaattttgattttatctgtagctggcagcctatttcctatttatttatttatttttaagaagaaagaagaggttcgataattcagcagtcccctataatcttattccacccaagaaatttgggagaatgcgaaaaagcagcagcccagcattcccggatattgaattccttagagcaggagcgtctgcctcccgcctgacccagagattgttctgcaca

SEQ ID NO: 11226 - DNA, 367 bp, Homo sapiens
  source 1..367: mol_type = other DNA
cgagcgtctgcctcccgcctgacccagagattgttctgcacaaaccctctccagtcgcgagtacggctgagctgcgtactggcatgcggtcagccccctgcccagggaccacaggagagttcttgtaaggactgttagtccctgcttacctgaaagccaagcgctcgcagagctttaaatgcatgcactgcctaaggatttcagagtgaggcagaggggactcggctgggaagagctcccctcccctccgcgtctgccaccgggcagtggtccagcgtgcagccgggagggggcaggggcagggggcacttgcgcgcttggccatttcgagggcaaaataagttctcccttggatttggaaaggagc

SEQ ID NO: 11227 - DNA, 546 bp, Homo sapiens
  source 1..546: mol_type = other DNA
ttctcttaaacttgggaagttctggccagcattatgagaggagattgcttttaagatattataaacatgagctttcttatttctttttctcaattctgagaaggatagctaagataaattttagtcttgcaatacaataattttattctagctatcattattgattgtagtagctgtgaaagtctgcttagagagatacagtttctattagtcaaactattacctgctacatgaagaaatctattcttttcgttccgttttattccactgttaccaaattgaatatatttgagaaagaaaatgcttagaacgtgttatgaatctcaattctatcacttataagctatcctatcctgaaagtcatattaaatttctccagacttaatatctcacatgaaaatataagtataaaaatatatttgtaatatgaactatagaagtacacttgataggtgcttattaaatataaactgattgccctagtagtaacaatatcttactatcaatcatgttaattaaaatacatccattaatcaaatgctttct

SEQ ID NO: 11228 - DNA, 399 bp, Homo sapiens
  source 1..399: mol_type = other DNA
aagcaaagcatttgtaaactggttgtaatcatttgttttcgttatgaaagtactccaaattttgtgaactgcaaccgggtagttcagaacacaggctttggagctgaggcttcaattctaattccacctcatttgtaataattgtagcgatgcacttagaacttatgaacattaaatgagtttaatatacgtaaaacatttacctgtcccaaaggcttatttatccttttcgtttataagggtattaaaacgcgtttttccacaccgcggctccctcggctcggagccacagacagccggaagtgacgcgtacagccagcacgctgggccgccagcgggacagacgagcgggagggtgcggggagctgggggcggggcgcggccgcagctccgtttccg

SEQ ID NO: 11229 - DNA, 716 bp, Homo sapiens
  source 1..716: mol_type = other DNA
tccgcagccaatgcggcgccttggcccgcgggattggcggcctcggtcgtgacgcgacctgggcgggccgacttgcgacggaggcagcgggtccgggtcgggggacctgggaggtgatccgcagcgctgcgacgggaccgcgcgattcctctcccacgcatctggcccgcgttcctgggcctcggcaccggatcccggcgggggtgtggacccagggcccactctccccggcgcggccagggccccccagcgtgcgagcgcctaggggatgccgaggtttggcgggcgcgggaccaatatgggcagggccgaggcgggattctccctctcgtactcctgctgcagttccggcagagagcgcggggagagcagcggcgggagctgcggcgagcacgccggccctggggtagatgttgcttgggtcggccccggcagcgacctgaacccgccgccctgcgggaggggtgtgcggagcgctgggctgtgctccggcaacttcactcctcccgccgccactggggaacgtagtggttcttccaagaaaactttttctcccttgaacatgaaggaatactgggagtctctcccggggcgaggctgtgctagccgggggcgagcggcgggcggcgctaccctggcggcccagaggggcggagagccacgcggcgccaaggtgggagctgcccgggcgggggcgtcccgctgagagtctgcca

SEQ ID NO: 11230 - DNA, 432 bp, Homo sapiens
  source 1..432: mol_type = other DNA
tgaataaagttatttgtaccgccattcaatcttctaagataaagcattgctgttttatcagaaagtcctgagcaaacaaacatgatttgtaaaatatataacttgtaggtcagatatgcaccgtactaaaggtacaacgttccaaagctctcttcagtctcggcgctatagtgccctgagaatccagcgtggctgtatatttatccatgattcgtgccctagagcctggaagaaagcgctgggttgcttagtcagcacgtggcaaactgccattctgtcctcgttaagcgttaaagcaggattgtttttaagatgctttcagccaggtgcaaggctatctgcagtccgcagccaatgcggcgccttggcccgcgggattggcggcctcggtcgtgacgcgacctgggcgggccgacttgcgacggaggcagc

SEQ ID NO: 11231 - DNA, 456 bp, Homo sapiens
  source 1..456: mol_type = other DNA
tattatttgccagtagaatgtgaaactgaagattctgattcagtagcattttctaaaatgggtttttgacactttataaatttaaccatgacaacaaacattcataaatggaaagatttattcctaaacactccctcaaaatacagctataaattctaggaagtcttatctgatgaaaagtttccaacttcttaaataagaggatgaatctaactaaattctttttgtattcttaatacaatgtttgactctgacagaactcaagtttcatcttgtgctttgattgccaaatgtttataagtaaattgtatttactttactcactaagtaaaaatccaaataataagatcctattcattcaccctgtttttaaaaagaggtacctttctgctcatggcacctcacatgggatggcaagcccagagaggagctcatttaaattcctgaccttccttg

SEQ ID NO: 11232 - DNA, 527 bp, Homo sapiens
  source 1..527: mol_type = other DNA
tgacatgttaatttgaaatctaaatctttatctttgataactagttcagagtcagtgtaaacatttggtctttccttccacaaaaaaatgaaacagtgtatttaaaattaaaaatgaaacagtatattttatttcagaaggtaaaagcaaaatgaattaatctgtgaaactaagtcaatcacattatgatcttctagaacttaagcatccctggggtattcaaataacttgggagtgtgctgcggcatacctgtcttttgcggtaccgtgggcggagcgcggcctgcccagaatcctgggtcaggcgccaagctccccagcatcatgcaggaagctgcagcccccaggcccgcagcccagaatagagccggggcccaagacgcccactggagacagggtcgggtcccactaccgcgcaggcccggctcgcccccgacgtcaggcacggggcgggacccttgcagctgtccgtccagtcccgttccccggaaagtgaggggcgggaccctcgcggctgcgaatgcggg

SEQ ID NO: 11233 - DNA, 609 bp, Homo sapiens
  source 1..609: mol_type = other DNA
cagtgagccagggcactggactgggactcaggagactctggttccaccgatgcagcctcaggatgttaaacatacggggttttaaagtgctaagagcatgggtttaaaaacaaagcttgggtggcccatcaggcgaggctttctcggcacccgaggctccagcctgatctcggtcttatcctgcgaccgggctggttctggcgggtcgccagggtgggcggcggccccagccgggcgccccggcggcaagagcggcaggctgcgcccctggcccgcgcctagcctggggagagagctgggcgggcggcgggagctgctctcgcgggccgcggccctcgccctggctgcaacggtaggcgtttcccgggccggacgcgcgtggggggcgggggcgggggcgggggcgaggccgcggcgagcaaagtccaggcccctctgctgcagcgcccgcgcgtccagaggccctgccagacacgcgcgaggttcgaggtgagagaggtccgggcgcgtctggcctcgaagggagacccgggacgtggggcgcggggcgggagtggccggacctccacccagtgcccccgggccccgcgactcgtgcgccgggccgcc

SEQ ID NO: 11234 - DNA, 495 bp, Homo sapiens
  source 1..495: mol_type = other DNA
agctctgagtttgaaagtctccggtttcaaagccatgaaacttatgcagtgagccagggcactggactgggactcaggagactctggttccaccgatgcagcctcaggatgttaaacatacggggttttaaagtgctaagagcatgggtttaaaaacaaagcttgggtggcccatcaggcgaggctttctcggcacccgaggctccagcctgatctcggtcttatcctgcgaccgggctggttctggcgggtcgccagggtgggcggcggccccagccgggcgccccggcggcaagagcggcaggctgcgcccctggcccgcgcctagcctggggagagagctgggcgggcggcgggagctgctctcgcgggccgcggccctcgccctggctgcaacggtaggcgtttcccgggccggacgcgcgtggggggcgggggcgggggcgggggcgaggccgcggcgagcaaagtccaggcccctctgctgcagcgccc

SEQ ID NO: 11235 - DNA, 558 bp, Homo sapiens
  source 1..558: mol_type = other DNA
atgcagtaaaaaacaaagtgattttcttcttctaaacttatgcaataaactaagtatagaatgtagactagaggatacaacaaacctatttcctctatgttcataagaagtaagaaaagctctgatgtcattgctttacacctcagtttgaagtaaaaatattaaatgttggaggaaattacaactaatgtaatatgctaaaacatgctatgtttattttactaatttgaattaaaatgtaagaatttaaaatgccgacgtctgaagttttaaaatattacacactttgaaatagcatttgtaccttgaaataatattttttaaaacttcctttttctttcattccatttatcatcaaataaaggatgaacagatcagaaaaatttctcctagccttttcaaaggtgtgagtttttgtattaactgtattaaatgcgaatcccagaaaatttccacttatgtgaactttgaaagacgtgtctacataagttgaaatgtcctttctagagagggaacagcgccggggcgtgggctgagcacagccgcttcgctctcttt

SEQ ID NO: 11236 - DNA, 651 bp, Homo sapiens
  source 1..651: mol_type = other DNA
tgtcagaggacctgacccaagctgggaccctcctaagggggcgcttccgaacacgcgcgtcgaggagggcgttccaggagcagcccagctggaccgaggccgcgtcgttcctgggcttactattcccagacccggactcccgattccggagtcacggcccaggacgctcctccttaggcgggccgtcagtcccgggtgcgggcttagacgcgccaagaaggagattctacgagcaattccctcctcccttcttagtacttaggcccaaggtcgggtgtgggagcgctgctttctaggcagctacggcagccgggggggcaataggcccctggcgctgtggggccccgcatcccacaatccccgcggctagcctgtgtggctactggcggcagctagcgggctgcgaaagcgagcccagcgtccttgacagcagcccacgcgtcggggcggggcttgagcccgctgctttaaaaggtccgcgcggccggccccgcccctctggtgccgcgattgccgggctgcgcacgcgaggccgggggccttgccgctgcctcccgggctggggcacgagtgggggcgtgaggggccgacgggctcgcgcgcgcgccgtctgctgaggtccctcgggaaggaggagagcgcctgacgccg

SEQ ID NO: 11237 - DNA, 553 bp, Homo sapiens
  source 1..553: mol_type = other DNA
attccaaaatgcattcttaactcttaaaagattttggttacttatcactattctgtctacttttctgtaattgagaaaagtatttgtcaactcattttttctctctgtgacagctcagtcatttacaaagttttattttatacttttttgtgctaaaacattgtgaaaattaacatttctttggaacacaactttttcattataaattaaatactgatataattgcaaagtaaacaaatgaatttccataaagctaatttatctttatattttccatactcttcaaattcttgttacattttcaattttgtttgaaatatcatatggtattttaaattgaaatttactaattattttttagccagtggataaagagaaattaaaaatttgaacaaattaattcaatttttacttcacttctcatttgaaacctaccaaaagaagtctctctctttttttttgctcattaagacgtcctacaccttagcaaaaagatcacacatatttcttcaatgctttggagccatagtcatgtactcaaaattaaacactt

SEQ ID NO: 11238 - DNA, 586 bp, Homo sapiens
  source 1..586: mol_type = other DNA
tctcgagtcataaacatctttaactgtctaataaaatcaaccactacaggagtgcctattatggcctggagtagagttcaaaatatcctcttcctcctgaagaaacagatttttttttttttttggagaggcatgttccaacttataaaattaaaatatattcacaagcattttaatttgatctttaatctctgttttacaggaaaaaaaaatgagatgttactttccactccttcattgttgaaataaaaaggacacaaagtgacctggaggcgttctgcggtggcgctgccgtcaaggccggggccgcctggccagaccctccctcagacgccccccgggtgcagctgtcctcagccggtggggtcggcagtgaccgcgggaaaaccccgcttgctgtgcgacccagggcgcgctgagcaggggctgcggctgccgccgctgtccggctccggttccggccccggccccgggcccggccagagctgagtccggactcagccaaagcccagacgtccgaccagtggaaaattagtgcagggccggcagtctggtgacgggcggggccgggctccggcgctaactg

SEQ ID NO: 11239 - DNA, 548 bp, Homo sapiens
  source 1..548: mol_type = other DNA
aaagtgactgaaaatggaaatttgcttttgtttccctgtttgtaatgttgaaaccagcaatggggtgtttgaaatacaatgctttcccccaacttatgaggaaacgtctgactttaaattgaggacagtccgtcgcctccaagggcccgggcggaggcttagcatatgcgagagcccgggagcagacagcgccgcagtcccggcgaggtcccggatctggggtcaggatccgttcctgctccttccttcagaccccagcttaccctggaaatcccggcacctacatgctccggcaccgggcagccgcgaaagcacggcttcccccggcctgttgacaggacggccgcctctctcagctacggcctctacgcagtagaggtaccgcgtctgcaggtcgggtttccggggccggatccggctccaaggcgcggagctgcggcggttgaagatttgaaaacgcgtcacgcggccgcggcgccgatacgcgcgccccgccccgtctcacgccacgcgccgtgccccgcctcgcgctctcgcgctgcgcgccc

SEQ ID NO: 11240 - DNA, 662 bp, Homo sapiens
  source 1..662: mol_type = other DNA
caaaatatcctcttcctcctgaagaaacagatttttttttttttttggagaggcatgttccaacttataaaattaaaatatattcacaagcattttaatttgatctttaatctctgttttacaggaaaaaaaaatgagatgttactttccactccttcattgttgaaataaaaaggacacaaagtgacctggaggcgttctgcggtggcgctgccgtcaaggccggggccgcctggccagaccctccctcagacgccccccgggtgcagctgtcctcagccggtggggtcggcagtgaccgcgggaaaaccccgcttgctgtgcgacccagggcgcgctgagcaggggctgcggctgccgccgctgtccggctccggttccggccccggccccgggcccggccagagctgagtccggactcagccaaagcccagacgtccgaccagtggaaaattagtgcagggccggcagtctggtgacgggcggggccgggctccggcgctaactgcatcaacacagagccgcgccaactctctgaggctgcgccaagacctgaagcggcggaccgagagcccgggtctgggcggggcgcgcagcgcgagagcgcgaggcggggcacggcgcgtggcgtgagacggggcggggcgcgcgtatcggcgccg

SEQ ID NO: 11241 - DNA, 505 bp, Homo sapiens
  source 1..505: mol_type = other DNA
tgtcacatgtctgtggtcccagctatcttgagcccaggagcttgagctgcagtgagccgtgttctcaccacttgcactccagttggggaatacatacatacatacatacgtacatacataaatataaaatcagagtaatagttataatcaaattcttgaccaaaggatcagataatacatgtgaactttgaaaaactaaaaaatacaagtattactttatgtagataactattttattattgttttatactcaagaatttctatcattttgaatcagaggaaaatggagttccccaagagttaagctaccctgggaggacttttcacactgtattgtaaaaaaaagtggttttgttgaataattcactagcactgtattcagtaactactaatctgtggtaaacagaacagctctttaagtaacggcccagttggtgcatctcggtagaggacctcacagtcacgaggtcgcgacggtccgtgccgtcgtggagacaagcgggag

SEQ ID NO: 11242 - DNA, 539 bp, Homo sapiens
  source 1..539: mol_type = other DNA
aatacatacatacatacatacgtacatacataaatataaaatcagagtaatagttataatcaaattcttgaccaaaggatcagataatacatgtgaactttgaaaaactaaaaaatacaagtattactttatgtagataactattttattattgttttatactcaagaatttctatcattttgaatcagaggaaaatggagttccccaagagttaagctaccctgggaggacttttcacactgtattgtaaaaaaaagtggttttgttgaataattcactagcactgtattcagtaactactaatctgtggtaaacagaacagctctttaagtaacggcccagttggtgcatctcggtagaggacctcacagtcacgaggtcgcgacggtccgtgccgtcgtggagacaagcgggagtcccagctgactctcctgcgcgcgcccttgcctgcgcgcggggggcgagtgcaccgggcgctcgctccctgccgagctcttgtcgcccgcccgagcctttgccaggggatgaggtgggaggc

SEQ ID NO: 11243 - DNA, 388 bp, Homo sapiens
  source 1..388: mol_type = other DNA
agtgaagggcaagcaattttctgtcattgaaattacacaaaaaagaagaataacctacatagaagttcctatctcttatcttcctgaatataccagtacactattagtttgttctaaacttttcttatataaaaagtagctgaatacttttagggaaatggattgttttgtctgaatcatccagataattcaaacaattcattttcgccctctgtcctactcaggacacaattgttaacagcaagcccttgtggaccttcagtcgtgcactgcattaggccgcgcgacgactgcggagcgcgtcccccacgcccgcgtggtgcgctctggggcggccccctagcggcagggcggggcggggcagggggcggagaggcctggcgcacag

SEQ ID NO: 11244 - DNA, 454 bp, Homo sapiens
  source 1..454: mol_type = other DNA
aaaaaaataaataaataaataaaaataaatgagtcttttgtttgtagtgcaaactgatttccagggtgtaaatattcccaacatagtggaataaactactaacttttcgcaaattcaaactactaacatggtatgactgagtctggaattatatagaaaaatcattaaaaattgatgcatttggagtatttattatcttgattttcagtaagttaaaaaatttctaattatacgattggcagtgtttacaggagttcaagaccagcctggccaacgtggtgggaagtgcctgcaatcccggctatttcactggccagtatgagccagctcccaatctagaagagataataatcctgaaggaatgtcaaatatttacctgataggtcattctttgtaacaatgaaataaacatatttcatagagggcctctatagggctaattggaaatctgcct

SEQ ID NO: 11245 - DNA, 483 bp, Homo sapiens
  source 1..483: mol_type = other DNA
ctgcagtctcttttgaaaggcaaattgtcttaattgctgtgctaaaagtataaactactgtatagagaaaaaaatattaattgcatggctaagaaaagacctcttgaaagacatggggtctgacggttgactcaacaacccctttccatgggaggacaggcctcccatgtggccgggccttatttcaatcttaaacaaccagggctgtggtttttgagaaagacacatttgcatgtatatcataaggtatcctttcatttgttttatttctttaatctacctaaattaagacctgaaaactcaagatcttccaagttatgagcaccttttctataaacagatagtccagttttctcagctactcaaagagatccttcttgctcctttaggaaagggggattcctagacctctccaaacctgatgcacagatgccaaggggtatagaagttccggtccttccagctgctgggattcttctatag

SEQ ID NO: 11246 - DNA, 328 bp, Homo sapiens
  source 1..328: mol_type = other DNA
ctttaccttctcccacgttaaaaaccacttctgagaggggtgattattgggggttttgaaagcacagaggtcttatagagaccaaaaatatgtgcctatcttcataactctgggtacgtgcatgtatatgcacatatacgtatgcatgtctcatataagttttgttgcttctgccaacgccgccgtcagccagagcgggaggtgggagaggcgggtcctgcagccccgagagccccccgcggctgcagcggcagctgtcacctcctggccgagcctcctgggcagcccctccgccctctcccgactgcagcgggggcagcgctttggc

SEQ ID NO: 11247 - DNA, 426 bp, Homo sapiens
  source 1..426: mol_type = other DNA
actatcccagtttcagtaattttatatactcagaagctttgcaaacactttaaaagactatataaaacctttaaaatgagaagtacatctatgtattttttaaataaaatattaaggatattaagccattgtaatgatgtaaacaaaaagtcaagcttttattgggtagttacaaaagttataattagattcttttttgttccttttttgcctgaataggaaaaattaaattaacagtttttttttccttttaaccgtgaacctttaccttctcccaggcgttaaaaaccacttctgagaggggtgattattgggggttttgaaagcacagaggtcttatagagaccaaaaatatgtgcctatcttcataactctgggtacgtgcatgtatatgcacatatacgtatgcatgtctcatataagttt

SEQ ID NO: 11248 - DNA, 494 bp, Homo sapiens
  source 1..494: mol_type = other DNA
cacttctgagaggggtgattattgggggttttgaaagcacagaggtcttatagagaccaaaaatatgtgcctatcttcataactctgggtacgtgcatgtatatgcacatatacgtatgcatgtctcatataagttttgttgcttctgccaacgccgccgtcagccagagcgggaggtgggagaggcgggtcctgcagccccgagagccccccgcggctgcagcggcagctgtcacctcctggccgagcctcctgggcagcccctccgccctctcccgactgcagcgggggcagcgctttggcgctcccaaggactccccgccactctccccacaaagcagcggcggtggcggcggctgctgctggatcttcacactgcagccagcagcccaggacgcccccggccggacgatgggtacccgcgcctgagcatcccccgggcaggcgccaggcgcgaaggcagggggcgaattcctgattccctggtggaccca

SEQ ID NO: 11249 - DNA, 580 bp, Homo sapiens
  source 1..580: mol_type = other DNA
cactttcttccaacaaagctgagtgataaagtgaatcacaatgaggaagaatagtccatttttatgtattacacaattaattaattattaagtcacctatttacttggataatttatcattgtattatcattaaaattagatcattagtttggataatacagaactcagggaaaaaattattcttaggtttcattgttaaaaattgaataaacgttttttaaacttgttttaaaattactgtttagaactcatgtggatgcaattttaagagatgcatctcttaagacacaattttaagaggtgcatctcttaaaatcacattaagttaagtaagccaaatcttactatagaactttctcatcatatattcaccattagatagattcagatatgtgttcctgaagtctttagttagtgtctaagtagaacagaggagttctacaaccatactttttatttatcaaacggaaaaaaagaaaggaaaaagatgtccagattctcaccatctgtctgttcacacttcctctgcagtgactttgaagtgtttgtcgagatccttctgactcacgtatgcccgag

SEQ ID NO: 11250 - DNA, 337 bp, Homo sapiens
  source 1..337: mol_type = other DNA
aacaatcatggaaaatgtggttgcgcgtttatgagaatgttgtataccaaatccccagaattttgcgttgtctttttctaaaaccttggaatattaacagttaactttactttaggaaggtacacaatttgaacaattcctctcagaaattcaggaggtcaggaattcaggaccagcctggccaagatggtgaaaagtggcaggcgcctgtaatcccagctactcgggaggctgaggcaggagaatcgcttgaacccgggaggttgcagtggactgagactcgcttccatatctcatgggaacttgttacaaatgagggatcggtgttttaataagc

SEQ ID NO: 11251 - DNA, 319 bp, Homo sapiens
  source 1..319: mol_type = other DNA
aaggtacacaatttgaacaattcctctcagaaattcaggaggtcaggaattcaggaccagcctggccaagatggtgaaaagtggcaggcgcctgtaatcccagctactcgggaggctgaggcaggagaatcgcttgaacccgggaggttgcagtggactgagactcgcttccatatctcatgggaacttgttacaaatgagggatcggtgttttaataagcccccgggtaatcttccggaaccctgcggacgcggggcgccagcaggtggcgctggacgcgcaacggacaaggaggcggggcctgcagctggcttggag

SEQ ID NO: 11252 - DNA, 367 bp, Homo sapiens
  source 1..367: mol_type = other DNA
ttttggtctggttaataaaccacctagagggataatttttaaacttaatttgttgaaatggtactttactaatgtatgaaaaaaatttccccaaatttgagaatttttggtaagttgattttatatttgggaaaagataaaaggtacttttactgctctcaggggatcccctaatctctgcagtccagggtctttttcatgaaagggcatttccgaacattttattcccaaaagaaaaaataggcttgactattctaaagctgcttcagccccgcaggggagccaggcggatactcagccggcgcgcaaagctgcggagccgcgtgtgtggagctccccagtgcactcactgctggccggtgctctg

SEQ ID NO: 11253 - DNA, 370 bp, Homo sapiens
  source 1..370: mol_type = other DNA
tctccattttaacattaatgcagctattcccgaggctgaagcgggaggatgccactgcactccagcctgggggacacagtgagaccctgtctcatgtccgtccttccgtccgcttaggatttaatttttagttctcaaacagtaataaagataatgataatcttgaccatacgggatgcctcacaacagtcctattttacagatgagaaaagtgagactttctgattcaataaactgactcaaaagccttttaacattctgtacaatacctttgtttatttaactgtccagttgggccactaaagttgaggtgcatcctgcaggctccttaccgcaagcctgcaaactcgccctgccgggcgcggagtgc

SEQ ID NO: 11254 - DNA, 291 bp, Homo sapiens
  source 1..291: mol_type = other DNA
tcgtatcaaagtatgaaaggtttctaggtactctcttctggtcctgaaaagtaatcaagagagagaggacatcgtgtcttaaactccaagaagctactttctgacagttgtaaacaagctagatcctgacattattttcaataaaactttgtgcggccgctagttttaaattcatggtctcctggaagctgaagattctttttaatagataaaacgccttctctccccacccgtggggtgcaaagcacagcgcatggggctggtggcgccaacgcatgcgccgctgtactg

SEQ ID NO: 11255 - DNA, 335 bp, Homo sapiens
  source 1..335: mol_type = other DNA
aagataaaaggtacttttactgctctcaggggatcccctaatctctgcagtccagggtctttttcatgaaagggcatttccgaacattttattcccaaaagaaaaaataggcttgactattctaaagctgcttcagccccgcaggggagccaggcggatactcagccggcgcgcaaagctgcggagccgcgtgtgtggagctccccagtgcactcactgctggccggtgctctggttcctcgggccctcggcgccacgagctgtccgggcacgcagcccctagcggcgcgtcgctgccaagccggcctccgcgcgccctggctgttcgcgatcca

SEQ ID NO: 11256 - DNA, 489 bp, Homo sapiens
  source 1..489: mol_type = other DNA
tgtataaactatgatactttttcttctttttattttgaaaaatttctaagatacagagaatttgaaagaatatacactttgctttcgaagtagtaggcatcacaacacttcagcatcctttattttttaaaaaatcagatcattgcttattcattcactaataaaattagttcaaatatctaatagctagctatactgtactttagctatatcaaagccccatacaaatctgggctgtttggtttttctactttttgcctagataaacactttgaggggaaaaaaaatccagatttaagaatttttgctaacctcaagtcacctgggtacttaggtatccaactcaaaactacttttagttttgtttcgttttgccttttttttttctttaaccgataacccaagcaggatgttgcctgcggctggcggcccagtggattctgggaattgtagtcccagccatccagggcattgccgttcagaagcctc

SEQ ID NO: 11257 - DNA, 506 bp, Homo sapiens
  source 1..506: mol_type = other DNA
actatgatactttttcttctttttattttgaaaaatttctaagatacagagaatttgaaagaatatacactttgctttcgaagtagtaggcatcacaacacttcagcatcctttattttttaaaaaatcagatcattgcttattcattcactaataaaattagttcaaatatctaatagctagctatactgtactttagctatatcaaagccccatacaaatctgggctgtttggtttttctactttttgcctagataaacactttgaggggaaaaaaaatccagatttaagaatttttgctaacctcaagtcacctgggtacttaggtatccaactcaaaactacttttagttttgtttcgttttgccttttttttttctttaaccgataacccaagcaggatgttgcctgcggctggcggcccagtggattctgggaattgtagtcccagccatccagggcattgccgttcagaagcctccggtgtacctcgctgggaacgcac

SEQ ID NO: 11258 - DNA, 440 bp, Homo sapiens
  source 1..440: mol_type = other DNA
agatagatagatagatagatagatagatagatgatagacagataatgtttgtatattttgcaaatgtggatatgtgtttgtatatataaatacaaaacatatatatgtggaaatgtacttgtatcctcattgcggatattgagatcatccaggaaaggtgttaaaccaatggtggactccaggcatgatctgatccagtgtccagatggatcaccagaacctgtttctttttctgaaacaacatgaggtggggttttctgagaagcagatgccaaagtaatttttaaaatgtcaagtattccacttttcctggtgtacagaccccctagtaagtggtggtctgggagaattatagcatatatttgtagcaatattgacccacgtgttgtgggtctcatgatagtgagtaagttattacaagatctgatggttttataaag

SEQ ID NO: 11259 - DNA, 659 bp, Homo sapiens
  source 1..659: mol_type = other DNA
tcctcaggatgcagtctagatcaatatgccaggaatactatgggaaaactgcaacatttgttttttaaatttttttaaataatttttttagagaaaaggtgagtgcactgatgcgatcatagctcactgcagtgatcgtttttgaaaaacaaaacaagataattcctggtcaaggacaagttttctggggcaagattgctcaaatttcagtcattctggaaccacctgtgtactatttatatttctgaaaattgtcctttttgcacagatttattttaaaagcatatatcgttgctattacatcattgtaactactggttatatttttccaatacgcattaaaataaattcataactatgaaaataaaagacatttatgtactacccaaaacatacctacctgctgtgagtttcacggccttaccactcattgatcgcacaaccactcccatggagtgcagtgggtggacttctgtacacatattcaagtagtgagaattagaatccaggtctttctccaaaaaacaacaatgtagtaggaaaagtgttgatttgggagaagacctcagtcaagtccagtggaccaactgtacaggtattcagggcccaggaagctggacccatgcactatgaacattctacattctggctagaacatt

SEQ ID NO: 11260 - DNA, 416 bp, Homo sapiens
  source 1..416: mol_type = other DNA
actcctttaaaaaagagtggatcaaccactctcctgtaggggcatgacttggcacaatttgcctaatatgagctctaaccaccaaaaattctgcaaataatactccatttgcatatgacaaatatatattgcagcatgcatgatggtcccatccagtgctcttaaaaaattgaattgagcatgatgaggtgcatccccttgattaatgcattgcaaatcaatatctttctgaaaagacagtgtgttgtgaattgccttgacagcatatgcacggttactttggctgcaatgctgctgcagcacacatcgtgtttggaaaaaaaaattagattttttggagaaaataattgagctgttaaagctattgatactgaatgttttcctttgagttcttctcaacaattccactgagatta

SEQ ID NO: 11261 - DNA, 547 bp, Homo sapiens
  source 1..547: mol_type = other DNA
gagacaaggatgagggaaacagcatgatccctgccttctggagggttacagttgaagcttccgctgcttctgcaccgcacccagtccaggaggcagtcctggcctcggcccgtttccaccccggtcccttcgtgatcctcccgcgcgcgggcggggcgggggaggagcgcgggggcggccgggaggggcgcggccgggagggggcgccgccggggcgcgagccagacacagcggggagccgaggtcgtgctaggatcccgcgcccaggggccttcgtcgagggaggggcgtggcggcggcagcaggagggcagcaggagctgtcaggctggcggttccgcgccgcggctccttctgcgctgcgcccgcaactctgggctgagctcgccccgcgcactcggcgccaggcgactcccgcaccttgtacccggcccgccgcgctctctccgttacaaaggagggaaaatgagccgggcggcggcggcgcggcgcggggccaccacggcggcggcgagcgcggccgcccccggcaccacgtaaaccgcccc

SEQ ID NO: 11262 - DNA, 427 bp, Homo sapiens
  source 1..427: mol_type = other DNA
tagtaatgcctgaaatctgttgatcctgtgtttttttaaggaccaaatcaccgacagacacaattaattcattaatgtagatattatctttcttttaattgaagctttatctcttccattgtcaccatcactaggcaggtgaggctgacaggtggcttttcggttgcctccattctttaaatatatttgaattcgaactgcaagtaaggaaatcgaagtatactagaattgatttccagcctgaaggcggatgctgaattcagaccagcagtgacactccaggatttccaccacgtgtcgtcggccggcagtggatgccccctgtaggatccctataagtgcccaggcgactgggagtcgccccctgccaggcccctagcgtcgggctgcgaagggctgccacgagggggcacctctgcgccgctcc

SEQ ID NO: 11263 - DNA, 374 bp, Homo sapiens
  source 1..374: mol_type = other DNA
aagatgagcaagacttacgcacacaaattattaaaatatggtgcaggacgttttaatatgtcagggcagtcacatatattaacaaccctaagagcaattagctgctctcataattcttgagtcgtgtgttagttttgtaacctgaaggaaaaaaaaaactcatgttttaatgagggtgggggtcaggccaggagcctctggcacactccgtctggccgccacctgtgagccgttgatgtgcgggaaggggggatcctcgctggtaggaggcaggtcccaggcctggcaagggttgaccccggagggctgggccggggcggcaccccaggagcacctgcccacgaggcggctgcgcggacagacgttccagcccc

SEQ ID NO: 11264 - DNA, 577 bp, Homo sapiens
  source 1..577: mol_type = other DNA
ccacagctacaagccatctccctgtagattctggctttctatagaaaatgtcattttctcactggtttaaacaactttaatttaaataaagatttaggatatttagttactggaaagaataataccaaaatgagggttttttcctttctttaaaacaactttcattattgaaaatcttttaatattaaaaagtaagttgtttatcttctaaaattctgagtggcttacccagaaggctattctatataactaagataccttaagtggtatagttttcaactgttacatacagtgtagctttaaaaagaattttttccttagcatgtactctgtaaacaatatgaaaataggttataactgaaatgtctagtaatatttctaaggaaatagcaaaagtaagttttaattttccagaaataactttgattattttatatacttgaataacttattactaatgtggactcaagcataattaatttcacatttttaaattaaagcaattttttaatggaacggaaaaacaccagcttatcttacaaacattataaacttgtctaaatgccctttcaaaggt

SEQ ID NO: 11265 - DNA, 499 bp, Homo sapiens
  source 1..499: mol_type = other DNA
gaggcttaatgtgattatttgattaatttgtattttttccaatagactaattatacccccagagtctagtcttcaatctaaccaaattaatataaaataaaaaatgaagtcatttagtgtaggtgagatgataaataaacttgtagtgtcttcctatagaaaaggtcaaattctttggctagtcttgtaaaatttgtttttaaccaaagtcatcacagaattagctgtaataactaaagaaaaccctgacatatcacccatatgtcaataatgaaagagtagtcagtaaattaacattgtgatgtttatatagacaatagaaaacattgtcaatataaactgaaaaaagcataataaacagttatatttatactacatttgcaactaaatgaacataattataaatttggatgaaaagaattgctttaaggtttatatatgtttttatttttttaataatgcattattttgtgattttaaaaagttactgtaggcaaga

SEQ ID NO: 11266 - DNA, 532 bp, Homo sapiens
  source 1..532: mol_type = other DNA
tctgcaggtctcgtggcatctaaagaaacttttatgaagaatgctagagttcttgctagagctgatctactctcttaaaaactctaaaattgattgtttactgagaagtaaatatagcttcttaaactaaaattgtgagtagtagtagtagtacgaattccacatttgggaattcagccaagtgtagatctaataaaaaaacacagtttaataacagtttatatagcctttacattgtattgggtattgtaagtaatagatgtgcataggttatacgcaaatactttgccattttatataagggacttgaggatccctggatacaaatctaggggtcctgggacctccacaaatgccaagggacaagtgtagtttgacctttttggttttactaatggttagaaaagttgacaccaataataattggacatattctggacagtgtccatcatttaaatttaagctattttgtttaattgtttggtcatgaaacgaaactgggtttctctcttgaaatgaaacacgaattgaa

SEQ ID NO: 11267 - DNA, 579 bp, Homo sapiens
  source 1..579: mol_type = other DNA
tgttaaatgacggggctgacctcaccgtcctacccttcggtatgaggccggcgtcttcacgacctcgccaaccccagtccccgagggcttatttggggctgtcggagtccccaagacgtggccccggagaagggtgaggtgccacagttcgaggtgccccagtaccctgcgtccggacagggggcggtgctcacgcccaaggccccgctgacgcgatgtaggccgagatcacctcaggcgctcgcggtgcaatcacagagcgcgccgtcgccgctcgagctcgccctgagatccctccgctcagcgccttcaacgccgtgtcccggcaccccgcacccgtaccactgtgccacaggcgcagcccgcttcctcaggtgcaacatcccgccccattctgtgacgcacggggtggcgcgcgtgggacccgataggagacctggggcaaggccccctgtggacgtgggaggagcggtgggccttcagtgtttccgacggagtgaatggcggcggcggtgacaggcggcaacctcttgtgatccgtctggccgccggccacctggtccagctgcccgcaggggt

SEQ ID NO: 11268 - DNA, 517 bp, Homo sapiens
  source 1..517: mol_type = other DNA
ttaacattgattaaataaatgaatccgggcttctgccgctaaaaacatgtacatttattttggaaaatctgttttcgtaaaacctcatttgttaaatgacggggctgacctcaccgtcctacccttcggtatgaggccggcgtcttcacgacctcgccaaccccagtccccgagggcttatttggggctgtcggagtccccaagacgtggccccggagaagggtgaggtgccacagttcgaggtgccccagtaccctgcgtccggacagggggcggtgctcacgcccaaggccccgctgacgcgatgtaggccgagatcacctcaggcgctcgcggtgcaatcacagagcgcgccgtcgccgctcgagctcgccctgagatccctccgctcagcgccttcaacgccgtgtcccggcaccccgcacccgtaccactgtgccacaggcgcagcccgcttcctcaggtgcaacatcccgccccattctgtgacgcacggggtggcgcgcgtgggacccga

SEQ ID NO: 11269 - DNA, 456 bp, Homo sapiens
  source 1..456: mol_type = other DNA
atttgttacaccatatgtcttaatatactcttaacccaggccttgggtaggggaggtgctatattacattctacctcaaaggaaaagaatatacttcttgattagtatacttataaaattcattaatttccctttaacattgattaaataaatgaatccgggcttctgccgctaaaaacatgtacatttattttggaaaatctgttttcgtaaaacctcatttgttaaatgacggggctgacctcaccgtcctacccttcggtatgaggccggcgtcttcacgacctcgccaaccccagtccccgagggcttatttggggctgtcggagtccccaagacgtggccccggagaagggtgaggtgccacagttcgaggtgccccagtaccctgcgtccggacagggggcggtgctcacgcccaaggccccgctgacgcgatgtaggccgagatcacct

SEQ ID NO: 11270 - DNA, 289 bp, Homo sapiens
  source 1..289: mol_type = other DNA
taacatcctcttagtatgctagacagcgtttgcaaacagctgtgaatccctttccctgcatacgtaatcctctttgctcaaagagtttccacccaaaaagtggctatggtttctctgtaactacaggcaactagatgtggagatggttcagagaggtcccacccgtacgggctgccgcgagtgcctctctggccgctacagcgagggggggcagggaccgtcaccgctttctagcccggcccagcttcctgtggcaaggtctctggagtcgggcctttgaaaaagagct

SEQ ID NO: 11271 - DNA, 524 bp, Homo sapiens
  source 1..524: mol_type = other DNA
cccgaggtcggcagaacccgtggcttgcgtcctcaaacacatctgtaccgcgaagctgagacttacggttctgagggtaagggtcggtggacccagcaactccgcagttccgcctccgccgcccctgcctctacagccgagctggtgacctcaggcccacccacccggacggttgccccttcctcgccggcccgggtgcacccgccaggcggaggctgatgtggccgagggtgcgcactggcggcccgcgggaagcgctgcgtgagccgaaggcgcccgcggcgaggctcagactgggtgggcgccccccatccctctccggccgctgcgccgcctcactcgggggaggggaagagggggcggtggctcttgcctccgcctcgcggtcaagcccggctcatgttccagccttgcgcgccgccgcctccggctccggctccggctcagccgctggcaccccccaccagcccctgagagactgcacaggaacggcagcagcccggccgccgacccggaagctcttt

SEQ ID NO: 11272 - DNA, 474 bp, Homo sapiens
  source 1..474: mol_type = other DNA
aagaatacaggggagcgctccattcttttgttttggtggcagaagctgcaaaaataaagcccgaggtcggcagaacccgtggcttgcgtcctcaaacacatctgtaccgcgaagctgagacttacggttctgagggtaagggtcggtggacccagcaactccgcagttccgcctccgccgcccctgcctctacagccgagctggtgacctcaggcccacccacccggacggttgccccttcctcgccggcccgggtgcacccgccaggcggaggctgatgtggccgagggtgcgcactggcggcccgcgggaagcgctgcgtgagccgaaggcgcccgcggcgaggctcagactgggtgggcgccccccatccctctccggccgctgcgccgcctcactcgggggaggggaagagggggcggtggctcttgcctccgcctcgcggtcaagcccggctcatgttccagccttgcg

SEQ ID NO: 11273 - DNA, 422 bp, Homo sapiens
  source 1..422: mol_type = other DNA
cctctttgctcaaagagtttccacccaaaaagtggctatggtttctctgtaactacaggcaactagatgtggagatggttcagagaggtcccacccgtacgggctgccgcgagtgcctctctggccgctacagcgagggggggcagggaccgtcaccgctttctagcccggcccagcttcctgtggcaaggtctctggagtcgggcctttgaaaaagagcttccgggtcggcggccgggctgctgccgttcctgtgcagtctctcaggggctggtggggggtgccagcggctgagccggagccggagccggaggcggcggcgcgcaaggctggaacatgagccgggcttgaccgcgaggcggaggcaagagccaccgccccctcttcccctcccccgagtgaggcggcgcagcggccggaga

SEQ ID NO: 11274 - DNA, 468 bp, Homo sapiens
  source 1..468: mol_type = other DNA
ctgttttccaacagttttgaattgaataacagccagctactaatcggtatactcttcagagtccacaggcttgacatcttaggctgtaaaatgtctcaatttcaatttctaatacatagatgtcagtggatggcattttctgaaccctttgtcgatgtccataaacggcatggagtctcactctaggagtgtagctgggattaccccagagcccgccacgcagctcatgggattgcaggcgtgagccaccacgccagacctggattgccagattattgcatgggatacactcacgctaaaaaaattgtttgaaagtcacatttaattgggcgtcctgtattttacccggcaaattctaggcctgagaccacggaactgcagcaagctcccagtaattccgggtgctgcacttccggtcaggcggtcgggctgcggggccctggggccagctcaccgccggaagtctcc

SEQ ID NO: 11275 - DNA, 568 bp, Homo sapiens
  source 1..568: mol_type = other DNA
attgtactttaatttgtttgtgtaacagagtaagcaagacatatatttaaattgaaaaatgtaagatatttcttagtattctggggaatggtccagattccccaaaagggaatggtttataaagttaataatactcttttttagcttttattttttcccctggaaaatataaaatatgggtttaaaagaaactggccaggtacactaagaaaacttttttttttcattctttaaaaatctaagtaaatattaacactagaactcatcatttgcatatttatttgttattaaagccccagaaaatgtatcttactgacttatgatgatgatgtatttgatgaatatgagtcaaaaattttgctaagccttatctcctcttctgctctaagaaaagagattgtagttgaaagcatatttttattgcaattaaattctcagtttttataaacaagggataatgttcaaacacagtggacagtgcattatggactatttttttagtatgatattcttttctttcagaacaggaatgttccatatttatttctaaaacacaaagggaccctgc

SEQ ID NO: 11276 - DNA, 342 bp, Homo sapiens
  source 1..342: mol_type = other DNA
atataatgtcttggcgatctctggatctcatttcaatgctgcctttcagggaggcattgaggaagcgtgcctctctgttagcgtaagtttatcactcagtcagctgcagacattagaaaaaaacttcaaaagtctgccgtaaaacttagaatggcaacctcggttttttataataaaggccaccgctttagtcatggcttgctctacaaggacactttaaatccatgccccttatttcaagggaatcactggaaggcccactgccccaggggacaaaggtcctctgagtcagaagccacagcaggactgagggtgcctggggcaagcgccatcccatgccat

SEQ ID NO: 11277 - DNA, 264 bp, Homo sapiens
  source 1..264: mol_type = other DNA
tgaaaacacatccatggtggttctgtatgcttcttattacaagaaaatttccaacaaaaaactatttcttaataacttatgtattaccataattattattcccgacgttgtggtatatcctatagatgaattcatttctctggagagtgaattactgagtcacatgcttcactgcagtatggctatgtgacattcctaggccgactaagaatccctaagcctagctgggaaggtgaccacgtccacctttatcagagagctcac

SEQ ID NO: 11278 - DNA, 396 bp, Homo sapiens
  source 1..396: mol_type = other DNA
tgcctctatttttttttaaagagaactttgaaaacaagaaataatctcattccttctgcgacatttttttccagaaattgagtcggtagaagtcactgggaacaatcactcaacgaatattcactgagtgcttacctgtctttggtaactacgccaacgagagacagatctgacggaagctactttgatcctcgcagggaggacaacatccgccctactgagctcccttttatccaataagagagaggtgccgcccccgagcggctcggcggagaggcgcggtgggtgacagaagctttcttgtcccacccaagggggcggggccgcagggggcggggccgatcgatctcctccggctccgacgtcctcggcctgccgggtcccgggtcctttgcg

SEQ ID NO: 11279 - DNA, 598 bp, Homo sapiens
  source 1..598: mol_type = other DNA
tgggacgcggtgcttagtccccgggaaccgacactctgcgtcccgctctcgcggcccggacggcagcagcgcagggataagacgagcccagggctgcactggacttgtgggatcccccagaagggccctgccgtcgagggaccctgatctctgcgcgcttcggcggcgcccgggtggcagccggtgtcccgccgcgtccctgagaggcttcggcctcgtccgaccccaggctgaagatcaggtggctcggggccggcaggttacctgcagcagatgcagctgggccacgagacgccgcggcaggtggagcgcgagcgttggtgaaggccacagtcactgccgccaggcgatcgctgccccacatcgtcccggagcgtcgctctgggttcgcccaccctagcgccgcaaaggacccgggacccggcaggccgaggacgtcggagccggaggagatcgatcggccccgccccctgcggccccgcccccttgggtgggacaagaaagcttctgtcacccaccgcgcctctccgccgagccgctcgggggcggcacctctctcttattggataaaagggagctcagtagggcggatgttgtc

SEQ ID NO: 11280 - DNA, 331 bp, Homo sapiens
  source 1..331: mol_type = other DNA
ttataaacaggctctagtgaaaactgtacaaactacatgttcaaaaattagtgtgaccagctgatgggctccgtgagggaccaaggtttgatgcctgtaatcccagagaccagcctggccagtagatcgtgccactgcactccagctgccttggtggggctccggtgcagaagcgcagcgtcgcctgctctggactcctgcaggcgctccgccaactgcagcgatctctggagccggcctgtcctccacagagatagggggcgctgtagcagagcgcggccgtcgagtccgcgtggtgccgctctcggagtggggaggcggcaagaggacc

SEQ ID NO: 11281 - DNA, 404 bp, Homo sapiens
  source 1..404: mol_type = other DNA
ctcccacccttgggatcccgtgggggacggtgtctcccctcccccaggaccagggaggtcctcccagccggagagagaattccgtttccaaccgagactcaccatttgtgtatgcgagtcgtttttaaatgtctcctcgtagaaaaactgaagcatcgggttacagggtcctgggagcccccacccacattctgcggccccacacggatggacccacagtccttccgctccagccctggaccccgtctccctgcacgtccgggcctcaggaggcggggagggtcgtcccgcgccgctcgctcatccccgaggggcccctgcaacctctccgcgcgaagacggcttcagccctgcagggaaagaaaagtaacttcgcttttctcgcgaggagggaagaggaggga

SEQ ID NO: 11282 - DNA, 546 bp, Homo sapiens
  source 1..546: mol_type = other DNA
gggaaagttagggtaccctactctggcgcgcagagggctccgggggcgtccggctgcagactggaccgggcctttagccggggaaaaggttcgcgagtccgggccccgaggacagagaccttctctctcacccctggaggcgcaggatttaaccccccaccccccaccctttgaaagggaggttgagttttgctcaggtcgaaatcagtttaaaacttaaggatgctatccccttcctgaagttattctttaaggagactcccacccttgggatcccgtgggggacggtgtctcccctcccccaggaccagggaggtcctcccagccggagagagaattccgtttccaaccgagactcaccatttgtgtatgcgagtcgtttttaaatgtctcctcgtagaaaaactgaagcatcgggttacagggtcctgggagcccccacccacattctgcggccccacacggatggacccacagtccttccgctccagccctggaccccgtctccctgcacgtccgggcctcaggaggcggggagggtcgtcc

SEQ ID NO: 11283 - DNA, 439 bp, Homo sapiens
  source 1..439: mol_type = other DNA
cagcagttactaaccacttaataccatatcctctgtctaaaaggaaaagatagggcaaactttttctttatttttttaagagaagagaactctgggcgaccctgggtttggaaactctcagcgaaagccggaaattttttctagcccccgactcgtagaagggagctagggagcccggagctcggagcactgccgggactcggccgctgcgccacgagcccccagccccgccggggggtgggtctccggcagagttggcttcgcgggtccctgcccccaccccgcacggtcgccccagctgcctccccggctggggcccccagcgccggccggagcccagcggcccccgtccgcccccagcgagcggcgcgggcggcgccctccgccgtccctccgccctccgccgctgtgcccaccccctcgccggagagagtgctgg

SEQ ID NO: 11284 - DNA, 564 bp, Homo sapiens
  source 1..564: mol_type = other DNA
agcactggcctgaaacctggattcgaatctctgccatgtattagttatgcaaactttagccatattatttaatctctatgcctcagtttcttcacctttaaaattgagataaaaataatctctacctcaggagattgttgtgaagagtaattaagttaacccaataaatattttaaaataaatgtttttaaatgttttcatctaaaaccagtgtgaatcagttgtggatgtgagcacacacaataaatatcagtacttgctgttagtttttaaaatatcagctatttaaggtctgctgcagccctggtctgctctgcaataaatgaatttagcacttattggggtgctcaaagaagtcctatccctgaaagacattcttaaaggcttctacaaggctgggtttgtctataacaagacaatggggctttctgcagccctcaaaactctcaagtgaggaaaaattgttaagccttcagattttacatagcttattaaaaagcatttcagatagaaaaggcggtgctgtaatttcagatctgagaaatgaaattagagcttgctgtg

SEQ ID NO: 11285 - DNA, 471 bp, Homo sapiens
  source 1..471: mol_type = other DNA
cctaggtacaatgcttgtatatatggatttctgataaagaattaattttcttaattagtgtattttgcaagaatcaatattattttctttaaagcaaaattaagaatgcctctgttctccagatattgggatatctagtaaatattattaatttgctcccttaatcataaacatctagaggctaggaatgcctacctttctgagaaggcagcccaaaatggagtcactctggttcgaatgtctctgactcttcttacaaggacacagattacagacactctaatgacctcattttaacttaattaaccttatctccaaatacagttacatttgattgcactgacatattaatacttaaaaatctgcctggtaaacagtttctaagcagtgattcaaatttattgatatttttggtaatgttattgattaaaaaacatttcagatccttctaaactcaagaaaaaagaatgt

SEQ ID NO: 11286 - DNA, 554 bp, Homo sapiens
  source 1..554: mol_type = other DNA
tctttgtttctgacaccctcaaagtgtcaccaaatccttttgtcacaatcagcctttttccaaaacgtcttttactaacgtattctcacagcagctagactaggtctaataaaacatttaaaaaaatagcccttttctgttcatgtttctcaaatacaccaaccagatgcctgttctgggtgaatatcatgactgataatggtttaataccactctccttgggatatttgcatttggcaagcatttggctaaaaggaagaacttccaataatggaatattcagtcatttcagacagctttaataatctagtatttctcaaatcacatagttagattatgatatgatatgacagacattaatatagtcataattccaaatgttttaatggtttcattggactttagaagtagtaaactttcttagttctccttttcccattattccgtagcaatcgtagaaaataacttctgcagggacaaatatttacctctatatgtaaccagtactagaatagtcagtacctagaagccactcttctttgaaaaggattatc

SEQ ID NO: 11287 - DNA, 271 bp, Homo sapiens
  source 1..271: mol_type = other DNA
ggaacccacaggattcttgtgtggataaatgaaatcatatatttaaagctattagcagttcctgacaggtacgtgttagctatcattttgtaaagtccttttaaaattgttctgttcctttccccaatttaactaaactgccaaaagttgaaaagccttcgattttagaaaacccagcgcgcccggggtagtctcgaggaccggcgatcgcagtggtcgctccgccggcgtccagaagactacagttcccagcaggcccagggacaggata

SEQ ID NO: 11288 - DNA, 331 bp, Homo sapiens
  source 1..331: mol_type = other DNA
tgcctcccagggcgtgcctgccagcctccgctgaggctccctagtgctgtcccgtgagccataaactcacctccctccggaatttgcattctccggggaggggacagggctcccagaaagctgtctcccagtcctcccggactcgcagggtgagccccagccctgactggagcgagacagcagccgcgagcgcagccccactcgcgggccggggcgactggggctggcgcgaggcgcacggagctcaccagctcgcccctccctctcctgggacaggagggggctgactgccacctcctctgccgcctgtcgggaggcgggcgggggtggg

SEQ ID NO: 11289 - DNA, 378 bp, Homo sapiens
  source 1..378: mol_type = other DNA
tcttctaaatttttttcaaagttttcaacttctttctcagagtaatgaggaactgcgtagttttccttctaacagacaggaccctcagctgcaggtctgttggaaggggggtgcctcccaaggaggcagtctgcctgttctcagatgtccagctgcctgctgggaggctgtcagacagggacatttaagtctgcagaggttactggtgccctgcccccagaggtggagcctacagaggcaggcaggcctccttgagctgtggtgggctccacccagcttcccggctgctttgtttacctaagcaagcctgggcaatggcgggcgcccctcccccagccttgctgccgctgtttgatctcagactgctgtgctagcaat

SEQ ID NO: 11290 - DNA, 425 bp, Homo sapiens
  source 1..425: mol_type = other DNA
acggagttccactctgccgcccagactggagtgcagtggcgccatctgggctcactgcagctcctgcctcagcctcccgaggggctgggactacaggtgcccaggtgatccacccgccttggcattctttattggtggctacacagttgtcaaaatttatcaaactgtcacctacgatatattataagcctgtattaaatgtaaattagaactcgattgaaatctgtgtgtataaatataaatatacacttatttacatttctaatctaatcctgaacttcatgccttcaagaggtggattccctcagggcgtccgtcaacttttcaacttgggcggcggggtgacagtccccgtgcatgaatcagccacccctcaggctccgccccggcgggggtcggccggacgctcgccccgcataaagcgg

SEQ ID NO: 11291 - DNA, 618 bp, Homo sapiens
  source 1..618: mol_type = other DNA
ttcttaaactactacttatccggagaaaaacaaggtattttaaaagaatcttccttcaatggttttggaaatgaaaacaccatttaaattcaaggaaataagttaattgctgatagattattagcagagtattttcatgtagatgtaaaatgttattttgttctctgaaatagtatgtgatctatatacacttacttttataataatacttcattacaaaaatttccccattactcactggtctaattggggagttaccagattcattgtgacagttacaggcaaatttcatgtgttgttggaaaaacgctcacaagtaatacgctagtttatttctgattaataagactgtttacacatttaaacaatccattatttataatgaaattatagtgatactttttatatggttcccttttaatactcatccaaatgacctcaaattaagttaaatgacataaaacagttttggaattgaaagtaaggattggaaaccccaaattttacactttaagtattttagattatatactgacaaaactcacaacctgctgaacaggtgtttggagtcaaatgcttgacttaatcatattagtgaagattaggaagaagctttaa

SEQ ID NO: 11292 - DNA, 321 bp, Homo sapiens
  source 1..321: mol_type = other DNA
actttagttacagttaaagggaaagttttattgcatgtaaacttttttcagcaaataatgaatccactgcctacatccaggaaggttcaggagccaggaattcaaaatccttggtgtcaagtgtcacccaaaacttagggttgtgaggatgcagatgattatttaataatagaaaatgttcttgcaacttgcaaaactaattgcaccaacctatatatgtaattagagaaaagtaattacttttgcaacaacctatgtatgtaattagggaaaagctatatctagcatatttttaaaactctttgagagcacaaacaaaaa

SEQ ID NO: 11293 - DNA, 433 bp, Homo sapiens
  source 1..433: mol_type = other DNA
caagtgtcacccaaaacttagggttgtgaggatgcagatgattatttaataatagaaaatgttcttgcaacttgcaaaactaattgcaccaacctatatatgtaattagagaaaagtaattacttttgcaacaacctatgtatgtaattagggaaaagctatatctagcatatttttaaaactctttgagagcacaaacaaaaagtaaaacttctgctgttcagccccagcccagccgtcccccgcgggcgtggcaggtcctgagtcagggcctgtccgtggccagctgggcgattgagcagcgacccgggcaggcctcctgggttgcaggctaggaagctggggcacgctggcgtgacaagcgtcccggagaaagccaagccctcggggagctggggaccgcagcagggctgcagtcacatcctgcgcgggt

SEQ ID NO: 11294 - DNA, 427 bp, Homo sapiens
  source 1..427: mol_type = other DNA
aaaaaccacgatttcatcgtattctcacgataaatcctctgagataaaatgaaattctaggattaacctcactgccttgtgtaagcagtatttcaataagctttgtgtaagttaaaaaaaaggtcctttggtccccataacaactaaaagtctttctagagcagtaacagggaactaactattcagtgcctctgaccagaggttcggattacttgtttgtaaactgagaaacctggacaaagttttctctaactttccctgaatcgtggtgagagggccccaaccatcctcttggtggtcacagcgacccgcgggctgcgagacccagaatcagagccgcagtcgaagccgcccccttttccggacgccccgtccgctcctggaaccgggttcagcaacactccaatgagcgccgtggtgacgccat

SEQ ID NO: 11295 - DNA, 350 bp, Homo sapiens
  source 1..350: mol_type = other DNA
gtcgtgtcggagtgccagaccatcccccaaaagaccctctttggaatgagcgacttccccgtgactcggtctagtctagagttcgcaaagcctatcctccctgtagccgggtgccaagcagcctcgagcctgcaggggcggggaggcgggctccggctgcgccacgctatcctccaccctacaagtggcctacagggcacacctgctttgatcgccggagatctgcaaattctgcccattccaaactccccttgaaagcctcaaaagtgcaggctcctcccagctgtggctgcccgggcccccagccccagccctcccattggtgggacttttgccgtataaatagggca

SEQ ID NO: 11296 - DNA, 379 bp, Homo sapiens
  source 1..379: mol_type = other DNA
aacgggtgtggtggcgggcgcctgcaatctcacgccactgcactagagcttgggcgacagggtgagactccctctcaaaaaaaacgaatttttttggcacatcgacctagccaaacttgcgtaaatacaagtgagagtcagactcttttaagtgttaagactggtttcactcctgggttggatgccagcaatccatcggctggatccactggcccaggggcagccagactgaccagccaggccaccagccctaaggctcgcgtccgggccaggcgggtacccccccatggctctgccgcagccgccgccgcccgccggggcgcgtgacccggtgaccccggagcactgggcatccggacccccctcgggcgtccagggc

SEQ ID NO: 11297 - DNA, 531 bp, Homo sapiens
  source 1..531: mol_type = other DNA
gtgagactccctctcaaaaaaaacgaatttttttggcacatcgacctagccaaacttgcgtaaatacaagtgagagtcagactcttttaagtgttaagactggtttcactcctgggttggatgccagcaatccatcggctggatccactggcccaggggcagccagactgaccagccaggccaccagccctaaggctcgcgtccgggccaggcgggtacccccccatggctctgccgcagccgccgccgcccgccggggcgcgtgacccggtgaccccggagcactgggcatccggacccccctcgggcgtccagggcgcctggggaaccggcacggcggagcagcggcggcggggctggggggaggccgccgagtcggccgcggccgaggaggggcaggcggaggtcgggggcgccgcggccgcggggtcaggttccccggcgggaggcgcaggtggcggcctggggagctggcggccgctcctcgcctggctgcagcggcggcagccccagtgctgcccctgtgcggcg

SEQ ID NO: 11298 - DNA, 357 bp, Homo sapiens
  source 1..357: mol_type = other DNA
actgaaggccagcccgcgtgaagcgtgcttgtagcgcatctgaagcgcctgaagagcaaattgcaaatcgatctatagctcctgaccgtctgcagctcatcactgtctggaaacccaagcctttaaggcttcgcagctcccgcggggaatgaacgtgatctttaaaaaaaaaacgtcctcaccgagggtcccacacctgagccaggcgcggtctccactgggtgctccgcagcccggagtggctccggacgacagcccgctcagcggacctttcgccaggctcgcagactgtgagccaaatcccagcgtgctccgcgggctagggggtgcggtggccacgctgcagtggcccgccgc

SEQ ID NO: 11299 - DNA, 280 bp, Homo sapiens
  source 1..280: mol_type = other DNA
aaattcggtgttttaaatgtcacatttttgtgttctctaccactatcaagaaaaggaaaaaagactgcgcccgcagggcccgcgggggcccaaagggcgcgctcaggcgcccggaacccgagcgggggagggggaggcggcggcctgttggccccgggacctccacgtcgcgcgcaggccactaggtcgcggggctcatcctgcgtgtcccccgaccgcggcgggccactgcagcgtggccaccgcaccccctagcccgcggagcacgctgggatttggc

SEQ ID NO: 11300 - DNA, 232 bp, Homo sapiens
  source 1..232: mol_type = other DNA
gtgatgagctgcagacggtcaggagctatagatcgatttgcaatttgctcttcaggcgcttcagatgcgctacaagcacgcttcacgcgggctggccttcagtgcttttgccgctgcgaggcacatgaactgcagaggcagaggtacaggagctgcagaccgtttgcggcaaccacaccattcccgctatagcagtggagtggagggctgcagcaacagtttgtggaaactg

SEQ ID NO: 11301 - DNA, 491 bp, Homo sapiens
  source 1..491: mol_type = other DNA
atttacagtcgtctgactaggctattttactactcagtaagctgtagaaacgtttggtaatgtaaatgagttttatctacagaatgcaaatttgttactttacagatacaacctgtaaagcagataataataaacattacatttcagtgctctatagaatagtaagcagatttgcctcttcttattaaaagagttataaaaattttgaccaatgttcattttatatttctaccattgtcttcttgaaaaattattttttaagagcaggaaaggtagaagacctcctcatccctttctctttggcagtgagatcttaaggtcaagaaggccacaccagacttgggcctacgtcttggccttccaggtcagcagagtggcctgggacttgggttccggagccaacacccgaacaggaaggggccttgccccaggccggagaggcccctcgcccacggccgagggggtggggcggcctcgcctcgggccggtgc

SEQ ID NO: 11302 - DNA, 264 bp, Homo sapiens
  source 1..264: mol_type = other DNA
tttgggtctttactcaaatcataacatatgtgcatatccataacacacatcgcctggcacatagtaggtactcaataaatgccagctgactctaaagtctctctttacagttggaaggagcaaaatgggacttttggctgaaagtgctgagctcctgcggtgggggctgaccgcaagccacgccttctgtgcacctggtcggcccagctagctgccgacccggcggggaggggcggggcgggccaatcggcgctgccccagcag

SEQ ID NO: 11303 - DNA, 437 bp, Homo sapiens
  source 1..437: mol_type = other DNA
ttcatcctgtaattacgtattcatactagaatcatgtattggaacctaacagaactaatatttctttctgtccgtaaataaaaatagatcatgcacctggtgttcatcaggagaggggaaagagcatttcttgcctggcaggaactcctgccaaggaaatgaccttcccccgtccccgcctcacgtctggccttgcagaagtccggagttccggctctgaactggagctccccgccattcccgggcgggtgttaggagcaaactcccaccccaaaacaaggaggcggccttgaacccgggcggcggggctcggcgggactcgtcagcgccctgctgcggcacccgggccgctcaggtaagtaggaggcgtgtgcgggcggggccgagcgggccccaatccgtacgcgaggcaggaaccgcccgccgcgcccccgaga

SEQ ID NO: 11304 - DNA, 453 bp, Homo sapiens
  source 1..453: mol_type = other DNA
aaacgtatcaagcacagtgcagagcacttgacactcattatcacatttaattttaagctacctatgaggtggacgttcttttacagaagaggaaggctggatccaaacccaggcagcctgactttaacaagatgctgcttgacagctgcctgacctacagcaagccagcatgtaaaattggggtaaggctacccacactccagagattgtgttgattaaatgcgttaacatagtcagcacaggcaaagcacacagtcagtactgcataagcggtgcttcattattcatcctgtaattacgtattcatactagaatcatgtattggaacctaacagaactaatatttctttctgtccgtaaataaaaatagatcatgcacctggtgttcatcaggagaggggaaagagcatttcttgcctggcaggaactcctgccaaggaaatgaccttcccc

SEQ ID NO: 11305 - DNA, 482 bp, Homo sapiens
  source 1..482: mol_type = other DNA
gatgtactcatttattgtaatggtatcaatcttgatgggtaaatttcattttacttttaaaattgtattttaaattattccttcatgttacggttgttagagtaaaaacggaaaagaaaaaaactacacttcttccctttgagttagacgtgtctaagtccttaagtcttagctaggtgtaactgcctgcggtcccagctactcaggaggctgaggctggagggtcccttgagtccgggcagactgaaaaaaaaagtattacgaggcacaggatgtttatttattcctacgtcctgttataaaaagtagtgattccaacgtgaaatatttacacgacgttctatgtaagtttctcactggaatagcgaaagtttcacatcatgagcctaacccggaccagggccaggcccagggcggagcctccgcggccccgacgcagggactcggcctaggcggaggacggggcggagcgcggccggcac

SEQ ID NO: 11306 - DNA, 496 bp, Homo sapiens
  source 1..496: mol_type = other DNA
tggttctttataaaactgatatttgttgaaaattgtcaagtgtgaccatttctgcctacatattgtagggtggcaattaaatacaaaccattagaagcttatttcagatgtactcatttattgtaatggtatcaatcttgatgggtaaatttcattttacttttaaaattgtattttaaattattccttcatgttacggttgttagagtaaaaacggaaaagaaaaaaactacacttcttccctttgagttagacgtgtctaagtccttaagtcttagctaggtgtaactgcctgcggtcccagctactcaggaggctgaggctggagggtcccttgagtccgggcagactgaaaaaaaaagtattacgaggcacaggatgtttatttattcctacgtcctgttataaaaagtagtgattccaacgtgaaatatttacacgacgttctatgtaagtttctcactggaatagcgaaagtttcacatcatgagcctaa

SEQ ID NO: 11307 - DNA, 502 bp, Homo sapiens
  source 1..502: mol_type = other DNA
tagggtcatatactatacactcactacactatagccaagtggtcagtgcaggttgaatttaattaattaattattttttgagatggatgtcacccaggctggagtgcagtggctgcaattctcctgcctcagcctcccgagtagctgggacgccaggctggtcctgacctcaggtgatccacccacctccttgaatttatttaatagctaaattgctcttcaaggtcttctgtctttataaaaccaaatctattctttatcttttagtaaaattagatgagctggcaaggttgtgaagaatctttacttagttaagatttatggggtgccttccaaatggcatacaaagaaatcaaatcacctgaacttttcggtctctatatatcaagatcccaagatcctatttcaaataccatttcctctgtgaaatcttcctcaaaccgaatggtgtgatctttttattgtataaccagtatggtctaatttcattcgtctataagtt

SEQ ID NO: 11308 - DNA, 661 bp, Homo sapiens
  source 1..661: mol_type = other DNA
ttacacacacatatatatatgtgtgtatatatgtatatatgtgtatatatgtatatatgtgtgtgtatatatgtgtatatatgtatatatgtatatatatgtgtatatatgtatatatatgtatatacacatacacacacatctatttatctgtctgcatttctgagctatttttaaagaagttttagacatcatgacaatttatcccttaatgtatcacttaagagtaagaattttttttacataaccacatttatcattacacttctatattgtcaagtaatatctagtacaatactgtcttttctagctgattaaaaaacaggattcaataaagttcattcacatgttgcatttaaatgttttattttcatattaaaatttttcaagtctaggtcaagattttacaagctcatattgcaaaattattacaggtttttagaagcaaatgtatccacaactgtaacagattaggggaaaaaaagagcattaagagcttttaaatcttatattattactttgatcatataagaaataattgtgacatttcatgatattgacactatatattactgaatggatcagttaatatataaccagtttaaaggacctgaaaatatattttgaagtttgaaatgatccctatataaatagttagccg

SEQ ID NO: 11309 - DNA, 360 bp, Homo sapiens
  source 1..360: mol_type = other DNA
tatagaatagtaccatcaacctgtgaacaaattctctgatcaccaaaaggtaaggcaaactgacaaattgatccctttttaattttgtttttaattaacagaactaaacctaacggaaaaggaacgtacagttcctgccatgtgccggtctcttctgaagaaaatggcagagagttggctactgtaaaagccctgctccaaactcttggaaacagtttgtggccagggggcgagcctgggcgggaccccagcccacgcgactcggagccccgtcccgtcacagccgcgggcaccggtgccagggcactccgtggtcaccgtgccagggacctggagttcaggacgcgtttccattccagt

SEQ ID NO: 11310 - DNA, 374 bp, Homo sapiens
  source 1..374: mol_type = other DNA
aataaaatctgttaatttgaggctatttaatactattcagaaacttctccaagcagtactatggcaggcttgcaggtggccttgacctggctcgggctagcttgcccaaccctaggacccagcttgggcccttgctccacctctcggggcaccaggccggcgccgttgagcgagccagcgctgcgcagcacgaagcgggccgccttcatcttgacgcccacccggcctggcggggactgtggctggcaggctgctcggagcagagcctggttccgagggggcgcggcgcgtccgggcgaggactgcaggtgcgctggctggcttgtgcgccccggcctgggactggaatggaaacgcgtcctgaactccaggtc

SEQ ID NO: 11311 - DNA, 316 bp, Homo sapiens
  source 1..316: mol_type = other DNA
acattctaatgtgtaatacaccacagatgtgcaagaaatatgatgaaaactttttttggccttataattccagatttttaaaagctgggacttcttttttcttctagaaaaattgggatcaatcagacctataagtcattgtgtacaacaggtagatctgagctttatttctatttaaatgaccttaagcccctacggagcggcgccaccccctcctggcgagaccgggcgcggaagacgcggagcggaggccctccctcaggaggggcgcgggcgtggagggcgtgggcagggggcggggcgagccccgcagact

SEQ ID NO: 11312 - DNA, 537 bp, Homo sapiens
  source 1..537: mol_type = other DNA
tcaatcaacgttaatgaattaaactgattagtaataagtgctttttgctgcactgtcttataaattttgattacaaggtcatataagcaaattttcattaaaatgcttgtttatttattaccgtggaagatgaatatacgtttttgatctaaaagtaggcgtgccagcaatatttgcaatctcgatcaaagcttttggatccagtgtaaagtggagctccccatcggtccgagggcccagtagcccctggtatcagcagaagccagcagcttccctggtggggccacctgccctcaggtgacgggcttgcacacggccaagttacctctgcccacgccgcagaggccgccgctgctggacagcgcagcggggtcacgtgtccctgtccagccactgccccaggatctgagccctccccggctgcagggcagaggccgctggatcacgcgcaccccggcggccaaggctgggcccagccaatgggcgggcagcatccacatgacccgcgccggcgggagggcgtggggaggcaggcca

SEQ ID NO: 11313 - DNA, 437 bp, Homo sapiens
  source 1..437: mol_type = other DNA
acatgtctctgagcagcatataagctccttgaagaaagggaccttattgttgaataaaggaatggcatttatagatataatctggaacatgtatcaacatttacaataatactcaatttgtgtacgtatattccataatattcatccatatacatccatatattatatatagagttccatgaagttcactactgtattcaaaatgatattcaaatgctattcaaacaattctaaatgatatattttgaacaccataaaatgttacacaaatccataaatagcattactgtataataacctgtaaaaattctatttaaaaagctattttaccacaaagtaattctaagaccttatagccaggcaaaaaaatctgcattgcagtcacactgtagtctctctagagttttacacattatgagtctcttatagtcaggaaa

SEQ ID NO: 11314 - DNA, 513 bp, Homo sapiens
  source 1..513: mol_type = other DNA
tctaattgcctccttccagaaagtaaaaataactgtaaaacgactctatttttatcattaacaatgttgacaataaaataaaatcaattggaattgtaattgggtagtttatattgtaatcaagatttgccaaaccactaacatttgcatatatttgaaagcattacagtagcttctgttttcaataggaaaaaatgcattactgtcagtcaacgattcgttttcagaacacgctgctgcgttctgaaatttgtacaatatatggaccgagccagaacagggtctgattttctttttctgtaccaccccccagtggggtggagcccaggttctaagcacaggcaacccggcgggaagcatcggcggccggccgggcagaggcgcctccctccccaacggccccgggcgccacacagcgcggcccccggctgcagctccggctgggattggaacacacgccagtagaagccgtgcgcctgtgacgtcagggggcgactgaccaatggggaggca

SEQ ID NO: 11315 - DNA, 617 bp, Homo sapiens
  source 1..617: mol_type = other DNA
gggtccagaccgagaggatcttcaggtctcgtccacccaatctcaagcctctggaagggcgggctgccggcgacctcctccagtcccgggacccggaacccgggaccctggacgccggtgcgggcgggcctgccctcctctgtgcctggcccccagtctggccctcctacctgttgaccaggcctgaaccacgcaccggggctccgctagagaagggtataaatccccttgcaaataataaatggattaataataacaaggtatgaagttctttttatagaaaaaaaggtataattagaggataatttatgctatatccacttttaatcattacaggcaaattgttctgaattttatagcagcaatttgaacaaagtactgctctaattgcctccttccagaaagtaaaaataactgtaaaacgactctatttttatcattaacaatgttgacaataaaataaaatcaattggaattgtaattgggtagtttatattgtaatcaagatttgccaaaccactaacatttgcatatatttgaaagcattacagtagcttctgttttcaataggaaaaaatgcattactgtcagtcaacgattcgttttcagaacacgct

SEQ ID NO: 11316 - DNA, 478 bp, Homo sapiens
  source 1..478: mol_type = other DNA
ttcgttttcagaacacgctgctgcgttctgaaatttgtacaatatatggaccgagccagaacagggtctgattttctttttctgtaccaccccccagtggggtggagcccaggttctaagcacaggcaacccggcgggaagcatcggcggccggccgggcagaggcgcctccctccccaacggccccgggcgccacacagcgcggcccccggctgcagctccggctgggattggaacacacgccagtagaagccgtgcgcctgtgacgtcagggggcgactgaccaatggggaggcactgccctttggagacaaaccattcgactcgtggcgtctgcatcaagtctgaaaggaaagcaggcggggggagagcagattcccccctccccctctcctctctcactatatctctttatattaaatatatatatatattagagaagagcgagggagagggagaaccacctccacccccctct

SEQ ID NO: 11317 - DNA, 356 bp, Homo sapiens
  source 1..356: mol_type = other DNA
attaataaaagttaattttaattagcagcaattaatacgttttctgctaatatcctttaggattctatgacttagtatttaagaaaatgttcataaacaagttttttaaaacaggaaaatgttgtgaaattacaatcgtacattttcagctcagcaacccatttgcagtgcaaaaatagggtcataatggctgaattagccctactggacagtttcagatgtaacactctgtaataattatattgcaggctggattaggatgctattatcataatctggacgtttacaattatctgtaatttgcaaagccatcactaaacagtgacagtaataacagctaattttgctggcaatat

SEQ ID NO: 11318 - DNA, 328 bp, Homo sapiens
  source 1..328: mol_type = other DNA
tgaacatagttaaagagcctttattccaatgtcttgaaaatagatgaaaatattaaacagaagttatatgtgtttaagacagtaatttttaaaagtcattataaggactttatctcctgcaaaggaagttgcctctttccccaaagagcaaattttcaaaacatgtaagttaccctttggtgcagcccacgggggcggggcccaaacatgtgcacttttgaggcttctgagacatcacagagccttgtgctgtggcttctgcgatgtctttggaatttactaaaaagcgcgggcgcgtaaaactagttgttgctcccgaggccctggc

SEQ ID NO: 11319 - DNA, 418 bp, Homo sapiens
  source 1..418: mol_type = other DNA
aaattttaggccaaatttaatttaaattatgttggagcatgaccaaagttggttgttggtgacgccatcaggatttgctgaaggcaaaagatagagctttgtaaatttctagattcctcgttcttaagactatttaaccagaatctccagggtcgtggtcctggaaacaacttggatccttcagcagccaacttgactctcactctgatccctaaagcagggtgcagtaatactcttttctcaggcaacggcccaccacagaccctgtgtcgtcaggacgcaggccagaagaagccacgacgaggcgcaggcgcgactccacgagggccacgcccctcctagagaaggaccgccaaaccggatagaggtcgcgcgccctctttcgtctgccttgcaagttcgcagaagtgcgggaacg

SEQ ID NO: 11320 - DNA, 571 bp, Homo sapiens
  source 1..571: mol_type = other DNA
ctggtttgagttgcaaaaatttatttcttttatgcaatatactaaaaaatcataattaattgaaaaatataatacttcatatgtaaaggactccaccaaagatgtcacatcttttaattcatttggagatcaaagaaatgcaaatgctatttgtcctgttaatgactgtagcataggatcctacacactatgttgctggtttcctagtcttcagcaagaaagtgtaggagagaagtgttcaacccctgctcctggatgtggcaaggaagaggaggaaatcctaagtctgacacacaatgtcatgtttaaattcccctttctccaaaatgtaaaataaatcttgttatgctaaggaaaagccagtattcgcgttgatttagaagactggttatagaacgatgctgtgtctcagaaacacttaaatactacgacgaaatgtctgaatgcctacagttatttggccatcctgaaaagtgcaacttatcctgacgtctcgaggaatgagtcactttgctcaaatttgatgagtaatatgatctgcagacggaagcaggccgctccggataaaatt

SEQ ID NO: 11321 - DNA, 476 bp, Homo sapiens
  source 1..476: mol_type = other DNA
aaatgctatttgtctgttaatgactgtagcataggatcctacacactatgttgctggtttcctagtcttcagcaagaaagtgtaggagagaagtgttcaacccctgctcctggatgtggcaaggaagaggaggaaatcctaagtctgacacacaatgtcatgtttaaattcccctttctccaaaatgtaaaataaatcttgttatgctaaggaaaagccagtattcgcgttgatttagaagactggttatagaacgatgctgtgtctcagaaacacttaaatactacgacgaaatgtctgaatgcctacagttatttggccatcctgaaaagtgcaacttatcctgacgtctcgaggaatgagtcactttgctcaaatttgatgagtaatatgatctgcagacggaagcaggccgctccggataaaattgcgtcatttagaacccaattgggtccataccgtctcggaaactctca

SEQ ID NO: 11322 - DNA, 493 bp, Homo sapiens
  source 1..493: mol_type = other DNA
tgcatgctctccaagcattgactgtagtccacatataattttactatttctcaatttatttcggtgctgatgtaattagtaaaatacgatttaagagtgttatgatactttttaaaaatcgtgatgtcttttcttcatcaaagagatacttaaaagcacataatcatcttgtggaggcaagttgacaaaatcctttttgagattctaaaaggaatctttgtacttaaaatgtttaaggaccactgatgtattttggcttcatgtatcaattagatttagattaggctggagttgagctcacctcagcctcaaggcttcccaaagtgttgggattacagttattaatagatcttataaggacattttaggagcctgggcggagctctgaggctatccttaggcgccgccccggacaccccgcggccccgcccctgtgcgcgctggttggtcctcgcaggcatgatgaaacttcccgcacggtcggtataagcgc

SEQ ID NO: 11323 - DNA, 401 bp, Homo sapiens
  source 1..401: mol_type = other DNA
tgcctcagccccggctgggggcctgcgcacggctgggtcccacaactctctgagacctctctcagctgttgcttcctttggaacagccgctgctgctgtcactctcccagcaattgacaatgtatgccttctcacccagcgctgagccccactgggtgaaggcaatgccttctctcctccttgagcagggagaccatcggggtgcaacctggttgggaggtgcagggcctggccagagcgggcctggccacgggcaagggacagcgacccccgggccaggacaggtgagagcggcgcaggcccgggcccggcgtggcggaggtgcgcgtgggcgccagagagccaggagcggcccgcagaggagcccgcgccggccccggtgcccacctccgcgccgcgcg

SEQ ID NO: 11324 - DNA, 162 bp, Homo sapiens
  source 1..162: mol_type = other DNA
aaagtgagaccctgtctcctctctctctctctctctctatatatatatatatatatatatatattttaattatctgggctcaggctgaggtgggaagatgctgcagtgagctatgatggcacaattaaattacgcgccagactgttttcgctgcggagcgct

SEQ ID NO: 11325 - DNA, 419 bp, Homo sapiens
  source 1..419: mol_type = other DNA
aggaaatctaagaggttgtaactatcactttttctagcctatataaggtaggtcagtaaggtagcaaaagcacatctgttgttttgctccttcaacgattcttcctgggggaaaaacatctggaaggaatctctgggagattttcaggacaggtagcatgtcttctcacagaatgtctgctgactgattatgtcagtataatttttataagaaaacaattgaatccttctttgggtcatgtttttttttttcatttttggcatatattcaaaagaaggctctgagacaaaaagtggatattctgtcccgtcacttaatacaaaaccatgcttatcacattttaaaaattctagacaggcctggcttggggtcaggacccagtgtgccactgcactccagcctgggtgacagagtgagac

SEQ ID NO: 11326 - DNA, 473 bp, Homo sapiens
  source 1..473: mol_type = other DNA
ctgttgccaggtggcaaagtctcatctgataagattgaaatcaggagagtgcttcacctcacctcttggtggggagaaggccacccctgggagctgctctgccctggtacctgggaccagggccatgcaccattgcgaacacctgctccgacccaggtcctgcaccagggatttcccaccagctgactcatagatgaagtcatatgtcaggtgagtctcggctcgagaggcattctcttgatcaattcaagtgaaaaagacaggcctatttttgcatgttataaaacaccgagaaaaaaatatcaggatgattgtcatggtcttctttacattttcctgtatttttcaatttaaaataatgcccacgcactcctccgtctgcagggggcgcaccggccgccaccgctcactccttcaggatgatgggcggggcctcgagtggctggccgccctgtccatcacgacatcccgcc

SEQ ID NO: 11327 - DNA, 423 bp, Homo sapiens
  source 1..423: mol_type = other DNA
tggccaggctggtgttcgcatttgtaaaatcttacgtcagtgcggaggactcgcatattactattaatatattaggccagcgttttgtcactgacaatagagtttgtatagtcaaatcacatatgcttccaggactcctcctcgaaagagtaaagcttagcgtcctgccccaggccgggcgcccctgcaggcggtgtccacaccgccctctccgctcctgcagaccgggtcctggagggcggccgggcggtccacgggccggtgtcgcgccgccagagagaacgcggcaactcttcagccgactctggactcctgacctggcgcgaccccggaagtgggcgggcgcgcgacctcgaagccagcaccgacgcggcgcacccccaggtcgcagcgtcctggcgaggctggccaatgggcacgggg

SEQ ID NO: 11328 - DNA, 603 bp, Homo sapiens
  source 1..603: mol_type = other DNA
gaatagggtccgcccagccccaccgggcaggaggtgtcctgagtcagcctggcgttcagcccagtgctgtgcacttgggtgacaggtggggcccctgcactgccaccagtagcatatgtcggagctctgggccctgaccatctgccaaagcccttgctgcgtgattctcgaaaacaaccaggatcccctgcaccaggcaacttcgctagcctgtgggcgttccagggcaggggacgggggcggcaccttccaggtgtgcaggcgagatgacaagtgcggtccctccttcctccctccccgcgagcaaacagcctgggggtggtggggaaggcggcgtgcccagcccttcatcgccccatcacggccctggccgccgctgcagctggggcgccactctgcactcacctgggcccgcgccgggcggggcgaagtcgcggtggtaggtcctcggcgtccgggaggagcggaccggccctcccggggaccgggcaagagggtgggccggaagcggcatcaggccccgtgcccattggccagcctcgccaggacgctgcgacctgggggtgcgccgcgtcggtgctggcttcgaggtcgcgcgcccgc

SEQ ID NO: 11329 - DNA, 521 bp, Homo sapiens
  source 1..521: mol_type = other DNA
gaacgttccgtttcaacgagggcgccgatacgggctctgacccaggggtaagcaaaacacctggcagaaactgaggagacgcggcaggtgcccagtatttagttatttgtaagcactggctactacccccgccgcagctgagcaccgcgcaggccgcagctgaggtgcacacccgggtgtgcccggcagagggctggcgttggggcggcctgggacccacccggccccgccccctctcaggccccgccctccccctcctccaccggtagggggacctcggccggcctgggaacccgggcgggggggggggtctccccgccacgggaggtctagagagcagcggcggcggggcggggcggagtgcagaggcgccgccggcggggcggcttcgggagggcgcggcccctttaagacgccccgccggccccgcccccgagccccgcctcccgccgcccacgtgaccccggtcttgtgactgggcccgggagggcgggggaagcccgcggctcgcgcccgccccg

SEQ ID NO: 11330 - DNA, 577 bp, Homo sapiens
  source 1..577: mol_type = other DNA
acgtgcacctgtaatctcagctactcgagaggctgaggcaggagaatttgcagcaagactgcactccatctatctgggggccaggcaggatggctcatgccaggcaggagaatcgcttgggaagcggaggttgcagcaagctgagatcgcactggcatttattaattttttgatatatcaggagctttcaaaacgagggccgatgcccccacgggtccctctaacttttggggtcagtgaggggaatgtggccccttcccttggtccccaaaacgcagggcttgaaggaagccctcatggaggaagtgggcctcggggtccccggggccagcaccacgcgaactccagggtctcgggccctacgtcgccggagctctgggagagccgcgagggggcgcaccgtggcctcgctgccctgtccgccacaggtggggtgaccccgcccactcggggggcccgcttccctctccgcccaccccggccgggccccgctcaccaggccgcctcaggtgggtacgccacgcccctccggccctgcggccccgcccccgtctgccccgcccgcctcaggtggggc

SEQ ID NO: 11331 - DNA, 802 bp, Homo sapiens
  source 1..802: mol_type = other DNA
ctccaagaagctgagggcagtggcctcacttcgaggaagtggtgacactgcgggccctcctggttacaaggaccgggcactgttggaccacgtggctccatcatgatgactccagtgagctcaggccgcccagggggcagtcgatgaacacgcgcgcgagggctctgcgagtggcctcgagcgtccggcgcctggtcctggtcccggtccccgaggcccccgggattcttcccgagcgtgcggggccatggagcgcgtcccggggaccgttgcatccggaggcggccgtcgtgcggctccttcccgcctcgagagtgaggtggccgggccttgacgagaaggcccacgcctgccgcgggggtggctcgcgatggcagtcggggttcgagtcccgcctggggggctgctcctgctggagaaaacgcctccctgagggcggcggcaaacgcgcagcgaggccccgtgccgcgccagaagccaccctgagaaaggggcaccgggacaccgaggggttcccactttctcctcagcctgtgacgcccgcgtcctcgggtgggttcgaggggcgcctgggcacggccagccgaggctctcgagagcccccctgaggcagagcccgggacctcgcgctctcgcctcaggctccggcccacgctcccgcccggccgccaggcgcgcaacggaaagcgcccccgccccgccccgctccgcccactgcgtgacgcgcacccggccgagccaatcagagctcgtggcgcgcgccccacacgccggccccctccgcccctcagcttaagaaagg

SEQ ID NO: 11332 - DNA, 566 bp, Homo sapiens
  source 1..566: mol_type = other DNA
aaatacttctcagcaaaactaggtttaaattacaggtggtaattattgcaaaaatgactctagggttagtaaatatgacatcatttaattttttaatccttggaacaatgaatggcatgaggcaggtcccattatgtgcatttcacaatttggaacactttgtaaggtaaataaactcatgggtaggcagcctgccacagcctccagaacttgctggagttcagaatagcaacgttttagatctgtcattttccagaaacatctctgcatgcatagtttttactcttaaaaaagaaaaaaaatcctggagctgagttttggtctctacccaacatagaattctaggcgttggttagaatattgacttcggctttttgagaagggaaaattagattcacaagtttcaaatattgcagcaaagtaattcttatctgactttgaaatcttttccataccaaaaacatcagtgagcctgccagtggcaagattcccggtggctgaaagcaccagctcagagcaaacgtgcgctgggctgcccggcgacttccgcgaggtgctccagcagc

SEQ ID NO: 11333 - DNA, 351 bp, Homo sapiens
  source 1..351: mol_type = other DNA
ttgcagtgagccgagatcgcgccattctgggacagagcgagactctgtctcagcagcagcagaggcacctggaggagagccccaagggacctgcaggcggcttgcagcgcagcgcacgcccctggggacgctgagtcagagccggcggcatcggatccaggcgcgcggcgcggctgacgtgggccggggtcgcgcagcgggctgtgggcggcggcggcggcgcgcagcgacagagcgtcccccggcgaggacgagcgagcacggcgcccgcacctccccgcaccgcccgcgctgcgcgcccggaggagcgaccgccgcagttctcgagctccagctcccgctccgggcccc

SEQ ID NO: 11334 - DNA, 307 bp, Homo sapiens
  source 1..307: mol_type = other DNA
gatgacatcaagcccacggcaggggccgggtgctcaggcccctctatcaagaaggggcaagaggctgggcacagtggcttacacctgtaatcccaattgcagtgagccgagatcgcgccattctgggacagagcgagactctgtctcagcagcagcagaggcacctggaggagagccccaagggacctgcaggcggcttgcagcgcagcgcacgcccctggggacgctgagtcagagccggcggcatcggatccaggcgcgcggcgcggctgacgtgggccggggtcgcgcagcgggctgtgggcgg

SEQ ID NO: 11335 - DNA, 517 bp, Homo sapiens
  source 1..517: mol_type = other DNA
aggagcttgtttcagaagtaacatggtatggcctggcctgaggcctctctccatccagttttgatggaggtagctctgcctgccatgtggatccagcctcggaggtaaagcagctgcagaatcaatggggcctttctgcacctgggcggccacttccagaaagcccacccggactttctttctctccattctgcgggccgagaagaaccccagggaggagtgggggtggcaaaccctaccctgcctgccaccttcagtccagtggtggacaacctggagccaactcgggaagccgcgcccccccccaggtgcccaccgcccccagggtacccgggcattccccgaggcctggctcctgggaggagactcagggtcctagaacctgggcgccggcccggccccgtcaaggctgtcggggatttaaagggccgggacccacccggacggcggacgcccctccccgtgcccgcgcaggccgcacccacttgggggcggcgcgccggggcctggtgctcgg

SEQ ID NO: 11336 - DNA, 444 bp, Homo sapiens
  source 1..444: mol_type = other DNA
tgatcatagctcactgcagccatgaactctggggctcaagtgatcctcccacctgattacaggctacagccaccgtacccagccatgagcttttggttctaacctttcttgtttggtaaaattgtatgcagaatggataataaggtcagtggagcacacccgttgcacagacgagcttggtgtggacacatcactcaggagcccagagcctcggggtcaagacagagggcgaccgcgcgctgggtcccggggccagctctgctctcccttcccgggctcggggccagacccttgaagaccccaacccgcgggatccgggccccgcgcgcccgaggcaggcgtgcgggcgacgtagcagcgcaccccgccccgccccagcgtacgtggcgggggcgcgcacgcacgcaggcgcgggggcgcgcagggccgggccggcacggcggc

SEQ ID NO: 11337 - DNA, 175 bp, Homo sapiens
  source 1..175: mol_type = other DNA
aaagcacttttaaaagctttcctttactgctatgcccagcattgaccagcccctggctaacacggtgacagtgagccaagattgcgccaccgcactccagcctgggtgacagagtgagactctgtctcaaaactcaagaggctgaggtgggtgaatcacttgagtccaattgtgc

SEQ ID NO: 11338 - DNA, 433 bp, Homo sapiens
  source 1..433: mol_type = other DNA
tagtcccagctccacggggggctgaggcgggaggatcgcttgagcccaggggttccagtccagcctgggctacagggtgggggctggggatgctccagaatttgggggccttgccaagttcccccttgggagccgagaaagttcctggggggcttcaggggcttcccggaggctccctgcagggagcagcgctgaggtagactggctctgaccttggctctctgaagggagaaaaacttaatcgttcttcaacacttcggctcacggagtgggacgcccatgccgcttcgccagcacttgccaggcgttccgtggggcagcatctcctctgaagggccgccgccaatggaacggcgtacccggactgcgcgcccgagctgtgcgcatgcgcggaccgtccgcgcggtcgcaacgcgcaggcgccgtgtccact

SEQ ID NO: 11339 - DNA, 530 bp, Homo sapiens
  source 1..530: mol_type = other DNA
attggctcaatatttagtctcccaactgttgagcaaccagacgtgattggtttttaaacagcagtttgggggcagaaatgaattagttaagccaaaatactgactggtcctagacataaatcatcttttattagaggctaatccccaacatcttctaatttcttggttgtgatttttcagtgaaagaaattaaaaagaatttaaatcactgaatattcataataaaaattgaagtattttcaaacttcagtttttatctcagaggttaacgtcctatgtaagttaatcaatatctatgcttactaatgaggactgctgaaaaccagctgttgtgctgagaacatcagggcctctggcagaaggcctggtgaccgacagaagattacttttctatagaatctttttttatagaaacctatctgaaaaagtttattctgaaaaaaataatattctgaattgttttataatttttttttaaattaaggaaaagtgtggcctaacatacattagtggataaactgaaacagttt

SEQ ID NO: 11340 - DNA, 262 bp, Homo sapiens
  source 1..262: mol_type = other DNA
cttacctatcatgatttattattttagtttagttgcctggagtgcagtggcgcaatctcagctcactgcaagctgtgcattctcttgcctcagcctccggagtagctgggactacaggcgccttgctgggattcttatttatttatttatttatttatttatttatttattgagaaggcagtggcgtgatctcggctcacgtgctaggatctatatacatatgttcaagatgcctcagtggcactggtggctgtccacgggg

SEQ ID NO: 11341 - DNA, 260 bp, Homo sapiens
  source 1..260: mol_type = other DNA
agagagacagaacctgagctcacctcagcctctcaagcagctggagccactaactacatgcacacacatgtccctgcaggcacacatacacacacatggcccaccgtcagcacagatctgtgtggtcacagccctctcggagctccggtgagcacaggcaggcagagccggaacccagggctgcccctgtcttgaggggctccttcaacataagtgcccattgatactgcagaagcccctgtgagaatgggaactaatca

SEQ ID NO: 11342 - DNA, 552 bp, Homo sapiens
  source 1..552: mol_type = other DNA
ctctcattgcctctcaaatgaaaagaacaaacccttgctgattagtctacttttatttgcagaaataactttttctgtaaaggaccagatagtaaatattttagactcctagaggccataggtctctgttgcaactactgaactctggttaaactttatggacactcaaatttgaatttcatgtaattttcacttcatgaaataatagtctccttttaatttttttccagctatttaaaaacgtaaaagctgtaaacttgaggtcaggtggtcaagaccagcctgaccaacaccagcctggtggggtgcttgtaatcccagctactcgggagtctgaggcaggagaatcgcttcagtgagccgagatcgcaccactgcactccagcctgagtgacagagtgagactccatctcaataaataaaataaaaatgtaaaaccccgccccccttttttttttttttttttctctgtcacccaggctggagtgcagtggcacgatcttggctgggggcgcagacagagtttcactgggtctcgatcgacctgtgatc

SEQ ID NO: 11343 - DNA, 399 bp, Homo sapiens
  source 1..399: mol_type = other DNA
cacaggcgagcatcctcggctgcaagtgcagcacacccagggcagccctgggcttcagagagcgcacactgcctctgaggcgctgcccgtgctgtggtcctccggaagcacagtcttccatagcgtgaccccatctctttcctgtcttgagcacaggaacagtgagatcctgtctctatttaaaaatatacatatatatatttttaaaaaccaggttagttgcagctacttgagaaggctgcagtgagctgtggtcacaccactgcactccagccctggaggagccagcagggggagccccggcctggagtgtctctgcggggtgagtccgcagaaccttccctgaggaagagggagtggtgtcatacctacctcggggtaactgtggccgaccgcagc

SEQ ID NO: 11344 - DNA, 387 bp, Homo sapiens
  source 1..387: mol_type = other DNA
agcctctaagcctgacagggtgggagtctggcctcggatctccagagatccaggaagacccaggctggcgtgcaggggccccatcttggctcactgcagcctctgcccccggggttcaagcaattctcgtgcctcagcctcccgagtagctgggattacagcccgagtagctgggattacaggcatgctcgcctggccgccaggccgccggccagcgtcagcaggggcggccagtgtcaccctgcccggggacagcacccctgtttcgtggcgaggacacggagggccaagggggcggggccgggctgccctggccacgcccggaccgcctgctccccgcccagggcctgcacagttggcgcccaccggcatcagcgtgaagggagc

SEQ ID NO: 11345 - DNA, 615 bp, Homo sapiens
  source 1..615: mol_type = other DNA
ctcgcctggccgccaggccgccggccagcgtcagcaggggcggccagtgtcaccctgcccggggacagcacccctgtttcgtggcgaggacacggagggccaagggggcggggccgggctgccctggccacgcccggaccgcctgctccccgcccagggcctgcacagttggcgcccaccggcatcagcgtgaagggagctcctcgctggctgccgacggggctgcagggctcgctagccgctcacctgcgtgtgagcgcggagcccgcagtacccgccgtccgggctcagaggacgtgactccccgaccctgcgcccggcagtccccgggggccgtgcgcccggcccaggctcggaggtccagcccagcggcggctcaggctgcgcgcctggctcccagcctcagtttccccattggtaaagcattgacggtggttgcggacggcttctgcggacagagccttgggctccgacgtctgcgcgggtaccggcagcacccccaccccgaagggagggcgggacctggatctcgcgaccgctgccccaggtccccgcccccgggccctaccgggctgaggtcggcaggccccgccccccgcccacgaggaagtggct

SEQ ID NO: 11346 - DNA, 323 bp, Homo sapiens
  source 1..323: mol_type = other DNA
cccggacacgaggggacggggccgatttgtgggcggggccttggcgccgtactaaaacccagacggggtcgacctctttagagggctggcccctacggttctctggggtggccaggcagtgaccagcgggcttcctgggggcggagctgagggtctctccgcagccttcgcgggagcgggagctgtatggcaagactggccaagcccttcgactgctgcactgtgtacactccgcagacacacgtgtctttcctgcctcccacgctccccaagaagtctgggagcgcctggtggacagggtgggcctgagcccagcgccagca

SEQ ID NO: 11347 - DNA, 422 bp, Homo sapiens
  source 1..422: mol_type = other DNA
cgcgggagcgggagctgtatggcaagactggccaagcccttcgactgctgcactgtgtacactccgcagacacacgtgtctttcctgcctcccacgctccccaagaagtctgggagcgcctggtggacagggtgggcctgagcccagcgccagcagatctcggtgctcagcggcggcaagagtgctcgcagttctgcaccactggcggtgaggcttgcccctcctggcttccttcactcctgcagagatggcactgcatggggatgaggggtgggggcggccccttgacatctgggccttggtgctcactggggcacccgtcttcagggccgggattccaacccagcctgcaggacagctgagaaccagcctgtccgttctgcctccctgcagagcttggagtcagccttgaaggacctcaa

SEQ ID NO: 11348 - DNA, 369 bp, Homo sapiens
  source 1..369: mol_type = other DNA
cccaaggcgcatagtctgtgacaagagaatgatcgcttttctagacccagggttcgagggccctgaacgtggcgccgcctcctctcgggagggtgcagaccaccggtctcccggaagctcctggagcttgggtagctgcttctcgaagccccgccctacccgcgcggagattgcggctccagagccgccggtgggtggcaggcagggccacgcgtcttcccgaacgggcgttgttgcctggcagcagacgggcaagcctggacttaggcggcgcgcaggacggtccgacttcgtgcggaggcctccctgaggtccgggtccttgcggccactgcggccactgaagcggcggcggcggctggcccaggag

SEQ ID NO: 11349 - DNA, 460 bp, Homo sapiens
  source 1..460: mol_type = other DNA
agttactgctctgtactgcgcactccacggttgacaatcgttattcccattggcaaatgagaaaccttaagtcctcctaggcaggcctggctgaaccgacgagaggcaggcgggcccggcacaagcgcgggacgcggtgactccatccagatccggctttctaggccggccagagcttccgaaactcctcaggagtgactctgggacaccacagtcctcagtttccccatcgggacaattgggcgtcgaggcccaggcctggctctcagccggtgcggacagcctccctctgcgctgctctcagagacgcgcacgggctgaggggacagcggaagccggacctgggccgcccctccaggcctgcgggccaccggcgcccgcccctcacctaggcattgcggctccggcggctgcggcggcggcggcggcgcctcgaactgacaccggaaccgctcctggg

SEQ ID NO: 11350 - DNA, 263 bp, Homo sapiens
  source 1..263: mol_type = other DNA
aatcaaactctataaggtagaatcaggtcaccagtggaatttgcaaaacctgactctggagggctcctgagtctcggccccaaggcgcatagtctgtgacaagagaatgatcgcttttctagacccagggttcgagggccctgaacgtggcgccgcctcctctcgggagggtgcagaccaccggtctcccggaagctcctggagcttgggtagctgcttctcgaagccccgccctacccgcgcggagattgcggctccagagc

SEQ ID NO: 11351 - DNA, 636 bp, Homo sapiens
  source 1..636: mol_type = other DNA
gttattcccattggcaaatgagaaaccttaagtcctcctaggcaggcctggctgaaccgacgagaggcaggcgggcccggcacaagcgcgggacgcggtgactccatccagatccggctttctaggccggccagagcttccgaaactcctcaggagtgactctgggacaccacagtcctcagtttccccatcgggacaattgggcgtcgaggcccaggcctggctctcagccggtgcggacagcctccctctgcgctgctctcagagacgcgcacgggctgaggggacagcggaagccggacctgggccgcccctccaggcctgcgggccaccggcgcccgcccctcacctaggcattgcggctccggcggctgcggcggcggcggcggcgcctcgaactgacaccggaaccgctcctgggccagccgccgccgccgcttcagtggccgcagtggccgcaaggacccggacctcagggaggcctccgcacgaagtcggaccgtcctgcgcgccgcctaagtccaggcttgcccgtctgctgccaggcaacaacgcccgttcgggaagacgcgtggccctgcctgccacccaccggcggctctggagccgcaatctccgcgcgggtagggcggggct

SEQ ID NO: 11352 - DNA, 345 bp, Homo sapiens
  source 1..345: mol_type = other DNA
ccctcacagtttcaggcactgctaaggcttaggggttccagccaggcaggaggactacaaaaattaaaaataaaattttaaaaattagcccagcacgtgacttcctcggagagacccgcccctcctcagagggtcttggcccgggtcccggggctcctgcgaggatcacacaggaactcacttgaagtgtccggcgcagtgcactccgacggggagccctgcccggtccccgcggcgaaccaggcgcgcaggcgcaatccgcgtcgccgactcacgcggctggcggctagctgggactagcggaacggcggatggcagtgcctggacaggcgcaagggccggcgc

SEQ ID NO: 11353 - DNA, 372 bp, Homo sapiens
  source 1..372: mol_type = other DNA
ttccagccaggcaggaggactacaaaaattaaaaataaaattttaaaaattagcccagcacgtgacttcctcggagagacccgcccctcctcagagggtcttggcccgggtcccggggctcctgcgaggatcacacaggaactcacttgaagtgtccggcgcagtgcactccgacggggagccctgcccggtccccgcggcgaaccaggcgcgcaggcgcaatccgcgtcgccgactcacgcggctggcggctagctgggactagcggaacggcggatggcagtgcctggacaggcgcaagggccggcgcgggctccgggcgctcccggcatccctcgggcggcggcggcggcggcggcgaggcgaagcacc

SEQ ID NO: 11354 - DNA, 286 bp, Homo sapiens
  source 1..286: mol_type = other DNA
ttcaaaaagcaaatctctgggttcagatctcttttttgccatgaattaatttgggcaatgaaggccttgtttttcaaaggctggctctgagatattacagccaagaacatgtttcctgttgcttggaatcagtctctgtcttagagaaatcctaagacttcttattagtctataatatgatgctccctgtaatcccggcacttcgggaggccaaggctggaggattgcttgagccgagtttagaccagccttgctcaacttcactcaaatgtgaagcccagcaggg

SEQ ID NO: 11355 - DNA, 282 bp, Homo sapiens
  source 1..282: mol_type = other DNA
gggcccaaatgaggacagtacagccaggatggcccatctggtgacaagtgcgtcaagtctgagtgagacacttggcaccgtcactaggagggccagtcctccccggtcacgtggctaaggtaaagacatgaagtgcttgttgtgaagattaaataagctaataatgtcaagtaaatgttagctttgcagctggagttactcccagcaagctgttacagcagtaattgcattatgcaccttttttctcactcttccgtttcagtaccagtgaaggacaagaaa

SEQ ID NO: 11356 - DNA, 255 bp, Homo sapiens
  source 1..255: mol_type = other DNA
agccgagatcgcgccactgcactctagcctgggtgacagagcgagactctgtctctaaataaataaataaattaattaaaataatcaaaattgaattctgtcccagctacttcggactccgggagttcaaggctgcagtcagccgtgatcggtaaccccagaactacgcttgtaccagcgcggcctcttcttttaaggtagagagcccaggctgaggcgcccctctcttggatggggcgtgcattccctacccag

SEQ ID NO: 11357 - DNA, 415 bp, Homo sapiens
  source 1..415: mol_type = other DNA
tattttgggggtaatttacataagccacacaattatccttttaattaagatctaatattctttttttgagacagagtcttgcctcagcctcccgagtagctggcacgtctcgctctgtcacccaggctggagtgcggtggcgcaatctcggctcaccgcaaccgcctcagcctcccgagtagccggggttacaggcaggcaggtgatccacccgcctccagagtgctgggattacctcttgaatcatagaataattctaaattatgttacgattaaggcggggccctgtccatcacgtggctgtctccggccgttgggttcgggcccactcgcgcgggcgccactctctttgtctgacaagagagtcgtgaagcctccgcggtcctagaggggccgctggctgggacgcttcgct

SEQ ID NO: 11358 - DNA, 374 bp, Homo sapiens
  source 1..374: mol_type = other DNA
ggaggtaggtaggagcaaaatatttctttaacttatatcactgtgatgtatggtaatcccagcatttggcgggcggatcacctgaggtcagggggcgcctgtaatcccagctactcgggacgcaggagaatcgcttgaacccgggagtcagaggttgcaggcatgaaaaccagtaatccgtgttcgcttgtcactgtggcctacaggttccatcgagcgctcgctgcagagcccgcaccacggccaccgtcgggcaggatggtgaggaactgctccagcaccagcagctccaggatctgctccttggagagcagctcgggtctcagccaccgacgacagagttctcggagccggctcagcgcctcttccggtcc

SEQ ID NO: 11359 - DNA, 231 bp, Homo sapiens
  source 1..231: mol_type = other DNA
tcttgtaatgtacatggaagcacttagttttaaaaaaaaaacaaaactttttcggatcacgaggtcaggagttccagaccagcgccgaaatcgcgccactgcagtccagcctgggcgacagagccagaccctgtcggttcccgcccttgccggagctcggccaccggctcggacgggcggggctaggacgatcagcgagatgcacctcaccccatcaggcgcctaggcctg

SEQ ID NO: 11360 - DNA, 293 bp, Homo sapiens
  source 1..293: mol_type = other DNA
ccgaggtcattgcacgctggagtgcaatggtgcgatcccggctcactgcatccttggctgagaccaggctggtctcgaggtgatccacccataggcttacaagcgtgggaccccgcgccgagacccccttggccagggaagccctgcgtaagcaacgcccctctcttcaaatcccgaggacacgactccgggccctgccaccttctgataggctcgcgagaccgaggctggagagccgccccccattggccaaccggcgagtcccgcgcgccacctcctgggagatgtagttc

SEQ ID NO: 11361 - DNA, 418 bp, Homo sapiens
  source 1..418: mol_type = other DNA
gctggagtgcaatggtgcgatcccggctcactgcatccttggctgagaccaggctggtctcgaggtgatccacccataggcttacaagcgtgggaccccgcgccgagacccccttggccagggaagccctgcgtaagcaacgcccctctcttcaaatcccgaggacacgactccgggccctgccaccttctgataggctcgcgagaccgaggctggagagccgccccccattggccaaccggcgagtcccgcgcgccacctcctgggagatgtagttccgggaacagctggcccctgcgactcgcgggtgtgacgttaagatgtcggccttctgagccgattgcgggctgtcagcattgggggtgggggaaggcgcaagctccccggccccccgcccccttccccgccccacggaaag

SEQ ID NO: 11362 - DNA, 502 bp, Homo sapiens
  source 1..502: mol_type = other DNA
taggcttacaagcgtgggaccccgcgccgagacccccttggccagggaagccctgcgtaagcaacgcccctctcttcaaatcccgaggacacgactccgggccctgccaccttctgataggctcgcgagaccgaggctggagagccgccccccattggccaaccggcgagtcccgcgcgccacctcctgggagatgtagttccgggaacagctggcccctgcgactcgcgggtgtgacgttaagatgtcggccttctgagccgattgcgggctgtcagcattgggggtgggggaaggcgcaagctccccggccccccgcccccttccccgccccacggaaaggggaggagcttgggtggctccgtttgcctcgcttcgggggccctggagacgtccgagtcactgagggtgggctgggactcggggcccgcgtcccatctccccgccgattggtccgccccccgtgcgaggtgaggtcctccgggacggtttaaccccgttg

SEQ ID NO: 11363 - DNA, 595 bp, Homo sapiens
  source 1..595: mol_type = other DNA
ggctggactcgtgcggggattacggcgtgcccgcgtttacgtaaataaactcatttaaataaataaaaacgcaggtaagagctgcggttcgaacaggtttgagcggcgtccttcaggcccaaggacgcatgagggtgccgtccccctcccaccaccctcgccctgggcccctgcccggctcccagctcggtcctcagaaggccttgcccggcgcttcccttttaggccaaggcaaagtcccaaaaggcaccagggcacggtcgccggctcctgacggcggggccctcggtccgcgagggcacccgggcctccgcgcactctcggggaagcgaactaccgtcggccgcggccggacgccgcctccttctactcccccccacggcttccgggtactcaccgaggggaggggcgggcctggccgctgtcctgggggccaccacagcctctcccgggccgctgtagacagccccgaggccggcgcttctcggtggcacttccggcgacggagtgcagggtcccgaatgagggccccccctcctccgcccaggcatgagggtcccggatgtgggtgagagccccggatgagggtcccgga

SEQ ID NO: 11364 - DNA, 466 bp, Homo sapiens
  source 1..466: mol_type = other DNA
aaaaaaaaaaaaatatatatatatatatatatatatatatatgtgtgtgtatatatatatatgtgtgtgtatatatatatacatgtatatatatgtgtatatatatgtgtgtgtatatatatgtgtgtatatatatatatggagcaaagatcagaacttttagagtcatgccaaggtctcagttactgttttataaaaggtgaagttattcttgatctaatcatagaagccctaattattacaaaaactcagaattttataactatctagtgttatttgaaaatactgcccattcaacgacaatcactatttttattgtaactattacaattattgtcatcaagaaaaatagaaggaggcggtataaagggaaattcatccctttttccccgccctgtgcacctcctcggagcggacaagctgaggaggaggaccccgaagcggagcgcagctccggaaggcgggt

SEQ ID NO: 11365 - DNA, 347 bp, Homo sapiens
  source 1..347: mol_type = other DNA
aatctccaagaagctgatacattttgaaaaaatatataaaatgccacacttcaggttttcttgtgtttaatttgaaacgtccagtaacattaaagaacagcatttgatttgcttaaacaaagtagtaacagctgaagtttttcgatcccacaacttagtgggtcccacccactgggtcgggccgcctccttgcagggagtctcaaggatgggctggcgtcagggaggggcccagggggcgctttcccaacactggtcgttcgaatcatggacgcgcgggcccagctcctcctccgtccgggaccctcatccggggctctcacccacatccgggaccctcatgcctgg

SEQ ID NO: 11366 - DNA, 377 bp, Homo sapiens
  source 1..377: mol_type = other DNA
tttcgatcccacaacttagtgggtcccacccactgggtcgggccgcctccttgcagggagtctcaaggatgggctggcgtcagggaggggcccagggggcgctttcccaacactggtcgttcgaatcatggacgcgcgggcccagctcctcctccgtccgggaccctcatccggggctctcacccacatccgggaccctcatgcctgggcggaggagggggggccctcattcgggaccctgcactccgtcgccggaagtgccaccgagaagcgccggcctcggggctgtctacagcggcccgggagaggctgtggtggcccccaggacagcggccaggcccgcccctcccctcggtgagtacccggaagccgtgggg

SEQ ID NO: 11367 - DNA, 472 bp, Homo sapiens
  source 1..472: mol_type = other DNA
aatgtaatgaagatgggaagatatttatcaaattcaggcttcattcagcatctgcacaggagaaatcatgtatgtactgcatgtggtaaagccttcagtcatagctcagccattgctcagcattagtgttaaactcttaataccagtgagaaatcttacaaatgtattgaatgtggcaaatttttcatgctattagtattttcataccttagtcacatttggagaattcacatgggaataaaattccattgctgccatgcaaaaagattataaatgtaataagcatgtatgtttaactagtctttgtcatatcagaatataaataatggagagaaaattgttgattatttgtttatgaaattgttaatacatagtcccaatctttttcattcctttatttaatatgtattctaagtagtacgtttatttttacttttttattataattttgatattaaaaagaacagagatg

SEQ ID NO: 11368 - DNA, 387 bp, Homo sapiens
  source 1..387: mol_type = other DNA
tctaacacctatgttatattctaggagttcatttactctataagtgtatatttttagcaaatattgtaccagacactttgcaatgtttcctgagtggattctggagtaacactgggccacccagttgagacagactgccttcaggctggacgcggtggcttgcgcctgcagtcctagcactttgggaggccagagagaccctctgatgggagacagaacaagacttctctctctctttctcaaaaaaaggatacgcctcgcgcaaggccctcgcagccggaatagtcgcgcattgaccgactggactcaagccccttggggcagggctgggcagtcaatcctggggaagccctggtggtcttcgcctcgccgggttcggaacagcag

SEQ ID NO: 11369 - DNA, 210 bp, Homo sapiens
  source 1..210: mol_type = other DNA
gcttttaaaatacatcatgaatgctttaatacaggaatgaatgtctcttcatgttatgttaccttatgaggaattaagtggcagaacatgatttctattattttcctcacagtgtggctgaccatgtgtacagtaccctgctaggaaccagggtcatgagagctcaatggctcgtttttttcatgattcctcatagctgcagctatagtt

SEQ ID NO: 11370 - DNA, 577 bp, Homo sapiens
  source 1..577: mol_type = other DNA
tgattgtaaatgatattatgttttttatttggtacatagaaacagaagtctttttgtatattcttgagattttatacattgacaattatgtcacttgaaaatagagacaattcttttatttcctcccagtataatgtcaaataaatgtgttgaatttttgaattgttcctaatattaggaaggaacatttggtctttcatcatcaagaatgatttagatgtttatcaaatggaggaattttctctccctagtttgctgaatttttaacataaaagagtactgtaagtactcattatcatgctggcttgataggccagatccaagctggcaaaaataattatctctttcttctttttttctatccatggaataaaaaattaagaggaaagaatgttaatagaatcgcattatttcttcaaaatacgttgtgagttttaaaagtattacctaccttttttatgtacatgtgcacaacgtgcaggtttgttacatatgtatgcatgtgccaatcatttaacattaggtattatttttttaaatctaccactcatgttgcccatggtttaggtgaacataa

SEQ ID NO: 11371 - DNA, 282 bp, Homo sapiens
  source 1..282: mol_type = other DNA
agaaggggccactctttggcaaagaacctgtctaactttctatctacggcaggacttttgaaagctacagaggaggtcctcttgccaacagaatcagcagctgaggcacagccaagagctctggcttgtacagcaccctgataggggaggagctcatgccaatggctccattgagttgtgtatgattctacatagaatattaactcaatggaggagaagcctcttccgactgcaggcagagcacgggggccctgctactggctgcagctccagccctgcctc

SEQ ID NO: 11372 - DNA, 269 bp, Homo sapiens
  source 1..269: mol_type = other DNA
gttaccttctgaggaattaggtggcagaacatgccttctactattttcctgagtcccaagcaacgattagtctattgctgagagtaattagtctattcaggagagctctgccaacatggcacatgtatacatatgtaacaaacctgcacattttgcacatgtaccctaaaacttaaagtataataataataaaattaaaaaaaaatagagtttttgattaagttgtttatgattcctcatagaacatgaactcagctgcagctgcagcc

SEQ ID NO: 11373 - DNA, 260 bp, Homo sapiens
  source 1..260: mol_type = other DNA
aaggggccactctttggcaaagaacctatggcaggacctttgaagggttaggggtccccttgccaacagaatcaccagctgaggcacagccaagagctctggcaccctggtagggaccagagcccagggctcacctctgccaatggctcgtttctgttgtttatgatacctcatagaatatgaactccaaggtggagaagcctcttccaactgcaggcagagcacaggtggccctgctactggctgcagctccagccctg

SEQ ID NO: 11374 - DNA, 540 bp, Homo sapiens
  source 1..540: mol_type = other DNA
cactagtgtactttcaatgtatgcatgtttttagatctaaagtgagtcacttgtagacagaatatagttggatcctattgaggggtctaatgtatttacatttaaaacattctttgtggttaccatggtgattacataaaacttcctaaggttataacaatgtattttaaattgattacaatttaacttcagtttcattaaaaacatttatgtcacaaattacatctttttatatcatgtacccatttacatagacatagttatttgttatgctttggtcttttatatcctataaaataattaaaagaggagctaccaggttttagatttgtacatatatttacttttaccaaataactttatattttcatattttcatatggtttctagtcactttctagcaataaataaataaataaaaatttttttttaaattttggcttttgttgttataactttaccaaaattatttaaagtaactttaccagcattgagttttattgactaaagtcacccggattatttcatgggtataaaccc

SEQ ID NO: 11375 - DNA, 447 bp, Homo sapiens
  source 1..447: mol_type = other DNA
ctataaaacacagtctgcaagagtcttgattagacagcctttaagccccaagtcacatgtctctttcttaccacatgatctgttggtgagcagttggaaaattcccaggtacagattttttcagaaaatgttatttgacttggctacagaaaaataggttttaaacagagataggctttctaaaaagaattatttttatttgggaataaagcattttattcaggtaggtaaagaaagtttaaaaaaataatgagaaggattacatatttgttttggaatgattatccttggctataaagatcaataacaagactgacagcagtgactgatttgtttactgattgttcacagaataggaaaaaaataaggacagccataattatttgccaattgtcaatttgaaaagggtacctggcttttctactggctgccgctgtagacccacct

SEQ ID NO: 11376 - DNA, 446 bp, Homo sapiens
  source 1..446: mol_type = other DNA
tggtacttgagttcccatataacaaaatacaacctgacttagtatgtaaacgaactgaagcctaacttactttattttttataagctgggtttcagccaatcacggccgagctaatgccccaataaggcaaatgcctcatcatatcatttaaggcagacacctagatgttagctaatgaggtgatttctctactttcaggtcatactgctggacagagctctctgaacctctttttgaactgttctttgtgcaaatatccagagttttttttgttttaaacaaatattcacaagaaaaggagggatatagataattccctgaaacaggtgagcatattaaaatggttgctacttttcaaattggataccaaaaaggcaatggcttccaggccccaggtcctgccccgcgcctaggcctgaaccaaccccctcgcggttccggcgcg

SEQ ID NO: 11377 - DNA, 398 bp, Homo sapiens
  source 1..398: mol_type = other DNA
aatgccccaataaggcaaatgcctcatcatatcatttaaggcagacacctagatgttagctaatgaggtgatttctctactttcaggtcatactgctggacagagctctctgaacctctttttgaactgttctttgtgcaaatatccagagttttttttgttttaaacaaatattcacaagaaaaggagggatatagataattccctgaaacaggtgagcatattaaaatggttgctacttttcaaattggataccaaaaaggcaatggcttccaggccccaggtcctgccccgcgcctaggcctgaaccaaccccctcgcggttccggcgcggatacccagcagcttccggtcttgcgcgctcaggccgggcaacgtccgtgcgttgggtcctgaac

SEQ ID NO: 11378 - DNA, 430 bp, Homo sapiens
  source 1..430: mol_type = other DNA
ttatccttgatcatggtcgcctgtcaccatgagggagatacagttctggctctggccccaaatcctatagtatgtaattctggtaaattctttcctcagcttgtaaggcctaagagcatcagactaaagcaagtcgatgcttgctctgtaatgcacattccctctcagcatcagcactaatttgcttaagatgatgctgtagctctcttacgttcagcctttgggaaagagagagagagagatgaagatgtatcctggtctctccaacctgagagttcctctccactccagcagtacagaaggggagggcagatttcattaagtagtaacttggtatttaatcagctgaaggacagtgaacaacactgatctcttgtcctctgctccagtggcaggttcctgcggcggctgctggcggaggagagccggc

SEQ ID NO: 11379 - DNA, 360 bp, Homo sapiens
  source 1..360: mol_type = other DNA
tgtgaggcttcctcagccacgtggagttcactgaatgcctctggcatctcctctgtgaagagtctggagagactcctggctctagcaggctaggtggccatggggacaggcgtcacagttctccctgggcctgacggaggagtctgtgctattctcccagccaagaggagaggacatcccgaaatcaccacaaattctgggatcttatacatacgtgcacacacacattcttctgtgggtaagcttgctcaacaacagagggttggttattctgcagaactcattctttaacagcaggcctgctgctgctccagctgcaattcttttccccttcatgaaggctgccaggaatgaaaaggg

SEQ ID NO: 11380 - DNA, 422 bp, Homo sapiens
  source 1..422: mol_type = other DNA
cactaatagtgtgatatgatcactttacacaaaactagtctgtgacaagtggataaaaatagtatttcatcactattttactattttacaggctttgaataaccttttctatgaatggtcttttcatgtctttgctaagtttacggtgcacttagaattatcttataatttgtataagctctcaatataattttagtaagatgcttttttgataagagaggtgccaagaaaatttctctttggacattctgggaatcataggaaggttgcaaggctaagaagcttcactggctggagaatgttctcaagaccccctccttgaatccatggagagcaccagagaatgctgctgcagggaattgcccacccgaatctcatcatgaatttccacatggtgaataagtctcaggagatctgatgtt

SEQ ID NO: 11381 - DNA, 434 bp, Homo sapiens
  source 1..434: mol_type = other DNA
aggtttcatcatgttgcccaggctggtctcgagtacctgacctcaacctgaggtgatccaaccacctttgtattcggagggtctctctgcaaatagcccatcaacactgaagacctggttttcaaataactggcttcgtctgtgtaaaacgagtcttgttgtatgcattaaccagggaggctgcaaaaggaggatgcggctatttctgcttccatcatggaaggctgtcctccagacacagcctctggcaggatcggatgtgggagagtgagggtcccaccccagctggggtctacccaggtccatgttgtggtccagactggaagggtgacacatcccaggcgcttgccactccagagatcaactctggactcagctctgaatttgcatatcctgtgtgtactcccctgggcagggccccaggacccaggata

SEQ ID NO: 11382 - DNA, 449 bp, Homo sapiens
  source 1..449: mol_type = other DNA
tgggattataggcatgaggtttcatcatgttgcccaggctggtctcgagtacctgacctcaacctgaggtgatccaaccacctttgtattcggagggtctctctgcaaatagcccatcaacactgaagacctggttttcaaataactggcttcgtctgtgtaaaacgagtcttgttgtatgcattaaccagggaggctgcaaaaggaggatgcggctatttctgcttccatcatggaaggctgtcctccagacacagcctctggcaggatcggatgtgggagagtgagggtcccaccccagctggggtctacccaggtccatgttgtggtccagactggaagggtgacacatcccaggcgcttgccactccagagatcaactctggactcagctctgaatttgcatatcctgtgtgtactcccctgggcagggccccaggacccaggat

SEQ ID NO: 11383 - DNA, 400 bp, Homo sapiens
  source 1..400: mol_type = other DNA
aattctgaaatctgaaacatttccggtcccaagcatttcagataagactcaaaagtcttgaaagcataacgaattttatccgtattcattggtcccacaagtcctggcttctgacccggatcactgtgagaccctgagcaagcaagaacttgctccaggcctcagtttctgggggaagccaggatgataatcagccatgctccaattgtaaatggatttcctcttccaccaggctggagtgcaatggtgcaagcaaagctcactgcagcctctgactccagggctcaagtgatccgaatagctggggctacaggtgtgccccaccacccctgggaatcgggggtcttccagtatagggaaccaccgagatgcgggccctccgaagtcctagagagggcgc

SEQ ID NO: 11384 - DNA, 385 bp, Homo sapiens
  source 1..385: mol_type = other DNA
tcccaggtactcaggctgcactgcaactgagtttctcccatgaactgcgtgccttaccctgcaaggcaaagatgtaaaagtgtctgttgttactctgaaaactccttttaaacggctataatagcatatgtcccttgtccacgggccaagtattctgagagaagctaccgtggcagctttgggaaacatacaattaccaagtactatattgcttgataataactataattactactgaaatcgaactttcatgctcccgttagtccctgcattaactaggggcggactgggacctccaagctggaggcttgaaaactcaagggcaggcgcctggctcccgcgctcctagagaggacccggaagcgcggcgcggtcccggaagacg

SEQ ID NO: 11385 - DNA, 546 bp, Homo sapiens
  source 1..546: mol_type = other DNA
agatacaggtgaagctttgctcctgcagctcacctcctgcagtaacggcccagttcctaacaggccatggactggtatctgtctgtgccccaagggttggggacccctgccttattataggtctttagacaataaggtacatgttcttaggacctcttggccattggtcactcatatttgtctcaaaataaatgtcttcaaatattttacagtttgattgttttcatcaacgaagtattaaccacagcgttccatgtccataaacctggaccgaggagctgggcccaagggtatccagtgacctcgatccaggtttatggacaaggaaccctgtgcttatcccaagggtactcagggaccttgggctctgaagtccacgagggtgaccgaggtggctgcctcagcccatgccctccctgccccagggcgtcggggttgggtgagagaaccgccgcagccttcatctggtctgaccgtggtaaaaacagaaagagtccctggcttttctttctagaggggccgctacggccccgcactacttttccg

SEQ ID NO: 11386 - DNA, 202 bp, Homo sapiens
  source 1..202: mol_type = other DNA
ccaagtagctgggattacaggcgcatgtaacaccatggagtgcagtggcgtgatctcggctcactgcagccaggctggtctcgaaaatgtatatacccgctcctgcattttgttataaatattactcaaagtgatctagtcagcctgccagctactgagattgcgccattgcactccagcctgggtgacaagagtgaaattc

SEQ ID NO: 11387 - DNA, 482 bp, Homo sapiens
  source 1..482: mol_type = other DNA
tgcggtcaccacggttgccgcgtctagtagctgggattacaggcgccatgttggccaggctggtctcgaactcctgacctcaggtgatccgcccgcctcgagtgctgggattacaggcgtgagcctccgcgcccggccggtaagatttttacaagaaacaaaaaaaactcggtttgttcggaggcaagttttaaatcagggttcattttttaatattgatgaatccttcaataattgtcccttcgcgagccagcctgagaagcgcgggctcgacatccccgcgcgcccccgccgcccgcccccaaggccggcgacgctggagcacatgtcctgaggcccaggaccgtggtcggccgctttcgcacattcgtggccagcagagggcgcagccggccagcccccgcagcgaaagatccccgagtgccgcgtcagcgatcgcgctccttgccctcgccgcctgccagccgccctgagtcactccc

SEQ ID NO: 11388 - DNA, 291 bp, Homo sapiens
  source 1..291: mol_type = other DNA
gcagtgagacaacactgcactccaatggtgaaaccttgtctctcgggtcccagcgctgaggcacgagaatcagcctgggtgacaagagtgagactccctaatttattgcaaaaggaaaatagtattttgaaggctggctctagagagaccccctttgtaaggggtcttacacgattattcacatgcgcagtgggtgtacagcaaaatgcgcatgctccctacaggggaaagtccctactggagagcgctcagcttgaatgagctcatgcggtcaccacggttgccgcgtct

SEQ ID NO: 11389 - DNA, 331 bp, Homo sapiens
  source 1..331: mol_type = other DNA
tgcaactttcacaatgtcaggcaccgtgttggtcacaggggataccacaggatcagtgcagtgagctgacatcaggccactgcactccagcctgggtgcagctgaagaggccaggccggggccagatcaggcagggccttgcagggaaataacacgacatgtcattccttctgcaacagaacacccgctaggcaccgaggcccagagggcgtcgggcgtccccgcaccgagtgccgcccgccgcgacccgggaactgcctgctccccggacgccaggcccgccgcacgccgcggggacaccgaacatgcgccgctcgccttacggaagccg

SEQ ID NO: 11390 - DNA, 390 bp, Homo sapiens
  source 1..390: mol_type = other DNA
ccttttaaatattctgtaaacagttctctttaaataaaatatatgttttgccatgacagacggatttgtcttacaaaggccattttcccgaaatttgtgttttccacttaaaattcttggaggggaccatgttaaatggggaagccatgtgccgcgagaagcagcccatggtgccagagtccactgctctggtaagtgcccaaatggagggacccttaaaggggtgctccagccctgccggggctaaagtgctgacagtgcagatagtggtcctctccgtgctaccgcactgtgggtacttgctgctccagcagggcacgcacagcgtccgtggagggaaaggccttttccccacctcagtcctgggggctccaagtagtgtgattaccc

SEQ ID NO: 11391 - DNA, 603 bp, Homo sapiens
  source 1..603: mol_type = other DNA
cacggtgattggcttgcggctagcgggaggtgaagaaggccgccttgtccgattggcccgcacgcagtggcgccggtcacgtggggggcgacgtttcgcgccaatttcggttggccggccacagtccaccgcgcggagattctcagcttcgagcccgccaagcgcggccgcacggccctcggcagcgatggcaccgagcccgggagggcgtcctgcgcggggagcctcccggggaacacctgtcgaggccagaggcagggtcgagctgcggcctggctaaggcccacggggcctgggaagcgtgcgcaccccccaggacctcaggagagtcttaagggctctgggctcccgtgcccaggttcccgcgccctccccaggcgcgcgtaggccccgggggcgggcaggccggggccgctgcgcgccgggattggccgtttgaggccgccctccgagcggaagtggagccacagtgtccttccgcgcggcggccgcggagagagctgcggcccgggggggcgtgcctgggatccggagcttcgctcgggcccgggtggctggactggctcccgccctgggcggaggaatcccgagcgctggatcccc

SEQ ID NO: 11392 - DNA, 335 bp, Homo sapiens
  source 1..335: mol_type = other DNA
gtgttcatatgtgaaaatgcatcactgaggcttttctttaataaaacaagccaagctgaaatgacttcttaaccttttctgtaacatgaaatgtaaaaccgtaagtttaagacaaatcttagatcgcttaaacctatgaactaattaataatatgagcatttaaataagtgggcataactctttttcacaagtctgtgggggatccagcgctcgggattcctccgcccagggcgggagccagtccagccacccgggcccgagcgaagctccggatcccaggcacgcccccccgggccgcagctctctccgcggccgccgcgcggaaggacactgt

SEQ ID NO: 11393 - DNA, 463 bp, Homo sapiens
  source 1..463: mol_type = other DNA
agcgatctcaagcctcagcttcccgagtagatgggattacggaggtggtgagccaccgcgccgggcctcacgtttggcggaatgcaccccccaagtggaagtcctgggagggagctggcgcccacccggcccgacgggaccccgctcctggggactcgtctcctggccacatcccggccgccactgtccccgcggactggcgggtggaaggacgtgaaggatcctgcgacacaggctggccctgggcgcccctcccgcccggcccctccgcccggcgaaagtcgggcctgccccgccctgcggccccggggctcctccgcccgcgccagctcggaccgcgggaaacccggcgcctgcactacccacggtgattggcttgcggctagcgggaggtgaagaaggccgccttgtccgattggcccgcacgcagtggcgccggtcacgtggggggcgacgtttcgcg

SEQ ID NO: 11394 - DNA, 589 bp, Homo sapiens
  source 1..589: mol_type = other DNA
cgggattcctccgcccagggcgggagccagtccagccacccgggcccgagcgaagctccggatcccaggcacgcccccccgggccgcagctctctccgcggccgccgcgcggaaggacactgtggctccacttccgctcggagggcggcctcaaacggccaatcccggcgcgcagcggccccggcctgcccgcccccggggcctacgcgcgcctggggagggcgcgggaacctgggcacgggagcccagagcccttaagactctcctgaggtcctggggggtgcgcacgcttcccaggccccgtgggccttagccaggccgcagctcgaccctgcctctggcctcgacaggtgttccccgggaggctccccgcgcaggacgccctcccgggctcggtgccatcgctgccgagggccgtgcggccgcgcttggcgggctcgaagctgagaatctccgcgcggtggactgtggccggccaaccgaaattggcgcgaaacgtcgccccccacgtgaccggcgccactgcgtgcgggccaatcggacaaggcggccttcttcacctcccgctagccgcaagccaatcaccgtg

SEQ ID NO: 11395 - DNA, 338 bp, Homo sapiens
  source 1..338: mol_type = other DNA
ccaacctgaggaaacacttgaaccctcctcacctggagagcagttctaagaacccaggagacctgagctcggatccccagcttcccaatgtggaaagggggttaattacactaactaccccaccccgagagggagtctcgctctgtctcccaggctggagtgcggtgtccggaagcgatctcaagcctcagcttcccgagtagatgggattacggaggtggtgagccaccgcgccgggcctcacgtttggcggaatgcaccccccaagtggaagtcctgggagggagctggcgcccacccggcccgacgggaccccgctcctggggactcgtctcctg

SEQ ID NO: 11396 - DNA, 603 bp, Homo sapiens
  source 1..603: mol_type = other DNA
ccgggcccgagcgaagctccggatcccaggcacgcccccccgggccgcagctctctccgcggccgccgcgcggaaggacactgtggctccacttccgctcggagggcggcctcaaacggccaatcccggcgcgcagcggccccggcctgcccgcccccggggcctacgcgcgcctggggagggcgcgggaacctgggcacgggagcccagagcccttaagactctcctgaggtcctggggggtgcgcacgcttcccaggccccgtgggccttagccaggccgcagctcgaccctgcctctggcctcgacaggtgttccccgggaggctccccgcgcaggacgccctcccgggctcggtgccatcgctgccgagggccgtgcggccgcgcttggcgggctcgaagctgagaatctccgcgcggtggactgtggccggccaaccgaaattggcgcgaaacgtcgccccccacgtgaccggcgccactgcgtgcgggccaatcggacaaggcggccttcttcacctcccgctagccgcaagccaatcaccgtgggtagtgcaggcgccgggtttcccgcggtccgagctggcgcgggcggaggagc

SEQ ID NO: 11397 - DNA, 450 bp, Homo sapiens
  source 1..450: mol_type = other DNA
tcagggcaaccaggccctgagtgaggatgccccagcccttgaggaagagcgaggggagcccaggcctctcccttcaggcctggcgtccagacactggtgtctgcacgagcggctgccagcaggtatgcagagctgtgggcctgggttacctcagagcaccctggggaggcccaggagtagagcacagtcccctctgggccccaaagagctggaagaggcgcccaccagggtcctgcagggctgtagctgccctgcatgaacaaggtctccagccatagcgcgtcctcgccaggcctctggggggcagggagggcacagggcaagcggcctgcctttcctcacttcccccaacaggggagggcaaaggaggccccacctcccattccccactcagcggcagtgccctttgtggggggaagcaggaggctggggacagtccccctccagctc

SEQ ID NO: 11398 - DNA, 374 bp, Homo sapiens
  source 1..374: mol_type = other DNA
aggctgaattactcaccctcaaaccccctcagcggggtgtggggcctcctgagcctcacacccggctcctgcagcctctgcagattaaggtctgggggccgtggtccctgaactacacattggcggccaaaaaaatgcaggctctctctggatgcagtctccctcaagccttcaaggaggtcgggtgacccaccctggccgggcgatgcctataggggctacccccttcaaggtcggcgcatgcgcaggatcagcccaacaagggtggtaattacaccgctccttatatatagatgtagaaacaaacttttaaaatataatttcattctgcgagcctgggaaggggcagtgacttgctcttaggctctgccagg

SEQ ID NO: 11399 - DNA, 378 bp, Homo sapiens
  source 1..378: mol_type = other DNA
atcaatactgcttaggagccgaaaaacaaattggttcttttcaaaccatataagtcttatctatagggactcctcagcagtccccacaagggaccttcaaagggtctcctccggggtaccactcagacccgcccccgccacccgagcgcggggagcaggaaaactagcggcagccgagacgctgctcacccggcgctcggcgccatcttggccccgccccctcgtgggagcaggtcctggcagagcctaagagcaagtcactgccccttcccaggctcgcagaatgaaattatattttaaaagtttgtttctacatctatatataaggagcggtgtaattaccacccttgttgggctgatcctgcgcatgcgccgacc

SEQ ID NO: 11400 - DNA, 286 bp, Homo sapiens
  source 1..286: mol_type = other DNA
cgcggtgactcacgcctgtaatcccagcaggcgcctgcagtcccagctactcgggaggctgagagggttgcagtgagctgagatcacgccactgcactctcgtgcacgcctgtattccagaaccaggggttcaagactggggcgagctatgatggtgcccctgcactctagcctgggcgacagggcgagactgacttcaggagaccaagactggagccaggagttccagaccagtcctgggtggtgcgcatctgtggtcccagatactcgggacgctgaggcggga

SEQ ID NO: 11401 - DNA, 353 bp, Homo sapiens
  source 1..353: mol_type = other DNA
aggcgcctgcagtcccagctactcgggaggctgagagggttgcagtgagctgagatcacgccactgcactctcgtgcacgcctgtattccagaaccaggggttcaagactggggcgagctatgatggtgcccctgcactctagcctgggcgacagggcgagactgacttcaggagaccaagactggagccaggagttccagaccagtcctgggtggtgcgcatctgtggtcccagatactcgggacgctgaggcgggaactgcactgttctgcagtgcccgccaggaggctggagcccagccaggcagcctcctcgggcacacggtgaaggcgccggaactacagctacctcc

SEQ ID NO: 11402 - DNA, 586 bp, Homo sapiens
  source 1..586: mol_type = other DNA
ctgcgaggcttcccttaacactcgaaaggggggcccgtgaccaggcgaccacgtcggcaacgaccaggaccccggcaccaccacggtgcccagagccgtgccggccaccaccacgctcacgtcgcgctggcccccgtggcccggcgtggcccacacctcgagccccgggcccaggcgcaggggctgcccctcacccagcccgtggggcaggtagcggcctccgggaaggatgtgatccgagtgcccgtgggtccccaccactagcgtcacgtctcccggggccacgccctgccccgccagcgcccccagcagcgcctcccgagcccaggggcccccggtgtccaccaggatggggccacgggccgcctcctccagggcggcctctgcgccgccactcccgcgcggggactctcggtggctggaggccgggccccgggtctggggtaggaccagggtcacggagccgtcggcgcgcacggcatcgcccacaccctcctggggcaccagcagaggggatgccccgcacagcggctcggtccgcatgaggctgctcctggcagggaggtgggcgaccgtcctgtccctc

SEQ ID NO: 11403 - DNA, 287 bp, Homo sapiens
  source 1..287: mol_type = other DNA
gtaatcccagctactcgcgaggctgaggcaactcaaaaaaaaaaaaaagtagcatttgagtaccttttttttccttttctttctggagtgcagtggcaccataatagctcactgcactctgcaactgctgagctcaagtggcgtgagttacaggcgtgagccacggcgcccacaccagcgggcatcctggctcaggcggaactctggctccagacagtgcgcctctcgctcaggcactgaggggcggggagccactgtccaatcctcatgctagaggcggggctagc

SEQ ID NO: 11404 - DNA, 284 bp, Homo sapiens
  source 1..284: mol_type = other DNA
tcggctcactgcaaccagcgattcttagctatatgaaatatatgtttgttgaatgaataaataatttgaaacttctacttgattaggctgcaatacaggcgcgcgccaccgcgcccggataatttttaaatttttttccccagtgctgggattactggcgtgagccaacccgcctggcgcagcccccgcctgcattctcgcagcctcagagcagcgggaccccgccccctcctccacggtccgggcacccgcagattccggggcctcggcggccacgccccctc

SEQ ID NO: 11405 - DNA, 214 bp, Homo sapiens
  source 1..214: mol_type = other DNA
cactgccccctgccttcaggatgggaggccttgaatgaatcttttgttctgcggcaagcatcaaagctgcagcagctgctggggctggctggctgggatgggcgggagggcccggcccgatttcccttgctggaccctctaattatgaggggttcatggaaccccagcgggggcaacttacccctggctcatcggaagctcgggcttcagaagg

SEQ ID NO: 11406 - DNA, 249 bp, Homo sapiens
  source 1..249: mol_type = other DNA
agctcgggcttcagaaggtcagtctcctccgggtgcactgataagggggccccagcccctgtcatacatgggggtctgccccgtgcatggcttgaaggtggaggaaaccaggttcccgaccatggtctatgagctgattgatctccccaaggctcagggactgaaggaggtctcagctgcagcaggagagaaggctgcctctgcctctagacgctgacagaggcaaaagggggcagtgagcaggcctgg

SEQ ID NO: 11407 - DNA, 259 bp, Homo sapiens
  source 1..259: mol_type = other DNA
gcctgagccctggctcctagcagaggtctcagagcctctgtgacctgtcccccaggagtgtgaaaaagcaccttgtcacctgcaaaatgctctttgaacatgaggcgcgaggctggagtgcaatggcgcgatctcagttcactgcaacctagctgggattacaggcgcctcactgccccctgccttcaggatgggaggccttgaatgaatcttttgttctgcggcaagcatcaaagctgcagcagctgctggggctggc

SEQ ID NO: 11408 - DNA, 334 bp, Homo sapiens
  source 1..334: mol_type = other DNA
gaaaggcaggtgcgcgtttcctatttttccaccaagcgcttaagagaatggactcgcggaggccattggggcacggcccgggaaggctcctagtgtcagggccgcctcaggtccctcgggttccacacaggcgcccgccgctgcccttccgggggcgcccagggcgccacgtttgagtcacgccgctccacagcctcgtgtggcctcaagctctcaggcgtcctgccctctcacgtgggcttgggcacgcgggcggcccgctttagccccgcccccacccaaggctagtgaagccggctccgagccattattggcggggccccgcctcgggccc

SEQ ID NO: 11409 - DNA, 552 bp, Homo sapiens
  source 1..552: mol_type = other DNA
aaaaaaatcctaaaatcctaaaatttaaatttaaattttaaaaaagtctatacatgagagggagctcatgtgagtttcccccagagtgaggattttcaggactgataagctccagggcccctcagagtggggacgcagtgtggtttccccccagggtgcaggtgtttcaggagtgcggcccccccgacccggtgcctgcccgcaaccgtcgagccccgccgccccgggaagaggcgggccggctgtggtcgatggtgaccgaggaggagcggcccacgacggccgcaggcaccaacctgcaccggctggtgccccggggccggggatggttgtgggggtcgcgctccagctcgccccgccccctctcgcccgcccaggtgtgggagctccgcgagcgtctggcccggatgcggggcttctgggcccggctgtccctgacggtgtgcggagactctcgcatggcagcggacgcctcgctggaggcggcgccctgctggaccggagccgggcggggccggtgagcctcgggggcgtcggggggcagcagggggc

SEQ ID NO: 11410 - DNA, 363 bp, Homo sapiens
  source 1..363: mol_type = other DNA
cttttatattattgtgagatgaggaggccccgcccccgccccccacctcctcacctgagatcagggcgggagggattaggtttaagctatatccccgggcccccagcacctgccgggtctctggacctttgcctcgctcccgggtccgggaccaggaccgggacacagaggcaggtcgcagcgcggacataactgcagccacactcgggaatccggtactcggccgcgggaccgctccgcgggccagagaaagagcgagccggacagggggcggggcccgaggcggggccccgccaataatggctcggagccggcttcactagccttgggtgggggcggggctaaagcgggccgcccgcgtgc

SEQ ID NO: 11411 - DNA, 348 bp, Homo sapiens
  source 1..348: mol_type = other DNA
tcacctgttacagtttatctgtgaaatgtatatttatatatctttccatctgtagcaagttcttcttggacaaggcctagctacaattctctaagccttactttttggtacatagggctatgtatttagtacatagggctatgcccaaacagaatgaagctgtataagttttccattctgggcaggtcttcgcaggccctgggctgtgtatgcatctgcttggcagggcctgccaagcctaacagagaggacgtctccgagctgcagctgaacatccacagctgtgaagagcaggcagcctgtgggcaaccagctgatgcggtgagcttttctcatcatctgtgaggg

SEQ ID NO: 11412 - DNA, 441 bp, Homo sapiens
  source 1..441: mol_type = other DNA
ttgtgagatgaggaggccccgcccccgccccccacctcctcacctgagatcagggcgggagggattaggtttaagctatatccccgggcccccagcacctgccgggtctctggacctttgcctcgctcccgggtccgggaccaggaccgggacacagaggcaggtcgcagcgcggacataactgcagccacactcgggaatccggtactcggccgcgggaccgctccgcgggccagagaaagagcgagccggacagggggcggggcccgaggcggggccccgccaataatggctcggagccggcttcactagccttgggtgggggcggggctaaagcgggccgcccgcgtgcccaagcccacgtgagagggcaggacgcctgagagcttgaggccacacgaggctgtggagcggcgtgactcaaacgtggcgccctgggcg

SEQ ID NO: 11413 - DNA, 397 bp, Homo sapiens
  source 1..397: mol_type = other DNA
ttggagggaaatatacttaatttgattcactaagttaggcccaaataaagtatcttgtattgctggcctctgtttctgaggtcacatccatggcttctgcactgctagggcagaggactgctgttggtggctgtgctttgggcccgagcaggccagtgggtcatgcatgctgggctggctctcaggtcgctgggtgaggggcgggacgccctttcttagggaagcccggcaccccttgctgtccagggaaggggagtccttctagcccctgactgcccctcccctggcctccccaggcctagccagggctgggttctcacccacctgtgccgccctgccttgttacctggaagcacagccttggggactgagcaggcctgacaacatgttggcacag

SEQ ID NO: 11414 - DNA, 534 bp, Homo sapiens
  source 1..534: mol_type = other DNA
ccatctccctggtgactgtgagctgggggggccccaacggtgctggggggaccacgctggctgtgttgcacccagaacgtggcatccggcaatgggcccctgctcgccaggcccgctgggaaggctctggggccagcagcccctgcgcttccctgagggctcctgggaggcctgtgggagcctcccgcccagctcagacccaggtggggccggggcgaggggtcgggaactggccacccatctggtctccgtgcccagggctctgccccgccgactcctgcccccattctgcgggcagacctggccgggatcttggggagacctggtccctgtccacgtccccctgacactgggatggccacatgccctgcagagcccgcaccagcccccaggcaccgagagcacgagggggggccagggctgggcccaagctgtgcagacacacagctcacccccatggggggccgtcctggtgggcgtcactccccacccacgctgcacaccggccccagggccctgccgcctgggcctcca

SEQ ID NO: 11415 - DNA, 336 bp, Homo sapiens
  source 1..336: mol_type = other DNA
gaccgttcccagctaagtcttgaactcttgacctcaagtgatctgcccaactcaagcctctcaacatgctgggatgataggctggagtcagtggtcagcctcctgagtagctgagaccaggctggtctcaaatttctgagagcctgagtgggtgccagagggcgcgcctaggctcaggctggctccacccgccccgtgcctccccgtgcatcgggctgccggtagctccggccgcccggcggcggcagcagcagcagcagcaccgggagagccccgcaggcggactacaagtcctggcaggccgcgcgcggaccgcgcatgcgcagtggggaccgg

SEQ ID NO: 11416 - DNA, 311 bp, Homo sapiens
  source 1..311: mol_type = other DNA
ttaattcaactcagacattggctctgcaagaagggcagtggcctgcctgactctagccaggccaattctccattgttcctgctaagccgttgccatcacctatgacaagggagacagcgccgcgtgggacccacgtctgggtgaggggcaggacagagccctttcctagggaagcccggcaccccctgctgtccagggaaggggagtccttctagcccctggcccctcccctggcctccccaggcctagccagggttgagttgccgccctgccttgttacctggaagcacagccttggggactgagcaggc

SEQ ID NO: 11417 - DNA, 376 bp, Homo sapiens
  source 1..376: mol_type = other DNA
ctcccttggccaccagtatcttatagaatatccataatatagattcataaataaaccatttccttcaatagtataaataaataaaccactgctataaatggtggaatttctgagttaatacatatgatacaaaacttgatatatagagttgggcagtttccgatgatttccagtcctcaaaatatctcttggactcaaagatgccttagggcagagaaaagctctgccaactttttcatcaagtcaacatgcttcaagctttgccaggttggaatgacctatgacatcagagattccgaccttcctgattggaaggaccggactctgtcggcgcctggcagttcaggtgaacaacagtaacttctcagagctgtta

SEQ ID NO: 11418 - DNA, 582 bp, Homo sapiens
  source 1..582: mol_type = other DNA
aatgcattgcattttttaaaactgcgcagctatgcaaattattttaaaggccaggcacagtgcattacgcctgtaattccagcgctttggggggccaaggcgggcggactgcttgagctccggagttccattaaaaataaaataatataaatgcattcaagtccacggccctgtgatgggatgtgggcagggcctgagacaggccgaacccacttgcctcggcttcaaggcgcacctaatgggcaccggatcgctggggcgctgaggatgccgctccggggcctccacgaggcggcctcgccacgcgcctcggccatgttccccccggttggacgccgagagggcgcgcgagaggggcgaccgcgagcccagctcacctcgagctctcagctcgctccaaggatgcggatccgcctcggggactgggaaagttccctccacggctcccacaggcgccccgcctcctgggctcccaagttgtgctccaccctttccgggcggggcggaaaaaatacttccctctgtcaaaggtcgagtccgtgacgtcaaagagcctggaccaacaccggactgcgttttttc

SEQ ID NO: 11419 - DNA, 612 bp, Homo sapiens
  source 1..612: mol_type = other DNA
gacaagagaagggaggcctgtccctgcctgcttctgtaccttactctggagaggatgggcagagcctcctatggagggagccctgtgggtcaccaaagctccagtgaccacctcagggaggcttcctcaggatctcgaacctgcggaaggaggaccagtctgtgtacttctgccaagtccagctggacatacagatagggaggctgtcgtggcagtccatcaaggggacccacctcaccatcacccagggtgagtccagctgccctggcaccaaggaaccttcctggttgggaacaacctcctggggctcccctatgcctgagttcctgcaactcagaagttgaggcccagagatccaggtagagggggctccagtcctgggactgccctggcctgggacagggcttctccaagctctgtcccctcctgtgtagggcagggaggtcagaggggaccctgcagatccagtctcactgtgtaggggaccgtcagccccctcaccccttgagtggtccctgcaccaagggagcaggcctggggtgggaagaggccagctgggctgtcctggggactgcatgggagcccctgccagggatgctggggctgagcgcc

SEQ ID NO: 11420 - DNA, 469 bp, Homo sapiens
  source 1..469: mol_type = other DNA
cctcctgtgtagggcagggaggtcagaggggaccctgcagatccagtctcactgtgtaggggaccgtcagccccctcaccccttgagtggtccctgcaccaagggagcaggcctggggtgggaagaggccagctgggctgtcctggggactgcatgggagcccctgccagggatgctggggctgagcgcctctggggtgcagcagagcacagactcaggcccgcctttcctctccctgaaagagcctgcgctggccttggacagggtgggaggggcccagccagccaaggtgaggcccagcccctcagcaggaagatgggcactggggcccttgggcagggctgacagtcatgcaaggcccatggctgaaagtctttcagtcattttagatgaaagactgaaatctttgcagagaatgcccgctctcactacttctattcaacacaggatttgaagtcaggccggcacc

SEQ ID NO: 11421 - DNA, 352 bp, Homo sapiens
  source 1..352: mol_type = other DNA
ggggcaggggccaggctcccacctccagggtcccataggggtgggtgccgccatctcttccccctccaccctcccccatgcctgaagagtgggagacccaggccagaggtcagtccagccacctgtcacacgactgcctgtgttccaaaaacgtgagaatatcctggagacggggccacttccacgggcagtccttccacaaggccggcttcctcaggatctcaaacctgcggaagtggacaccccccagggtgagtccagctgccctgacacctgccttgcccaccgcagtgtggtgaccactgatgtcttcacatttaaacccagtggtctggattgagagctgttagca

SEQ ID NO: 11422 - DNA, 417 bp, Homo sapiens
  source 1..417: mol_type = other DNA
gcacctaaggcccttttgcatggggaaggtccccggcccccacagccctctggggagcctcaccctggtggtctccccgtcccctggagaagaacaaggccatgggtcggcccctgctgctgcccctgctgctcctgctgcagccgccagcatttctgcagcctggtgagtacccaggaccgcccaggtatggtctctgcccaaaccacaggggcaggggccaggctcccacctccagggtcccataggggtgggtgccgccatctcttccccctccaccctcccccatgcctgaagagtgggagacccaggccagaggtcagtccagccacctgtcacacgactgcctgtgttccaaaaacgtgagaatatcctggagacggggccacttccacgggcagtccttccacaaggccg

SEQ ID NO: 11423 - DNA, 518 bp, Homo sapiens
  source 1..518: mol_type = other DNA
gagggagcccttgtccaaggaagcttctggatcagccaagggctgtatgaagggacagcctcctgtcctgcactcagaagttgaggcccttcagccaggcccagacatctgggttgagggggctccagtcctgtacccactactgcaagtcacgtggcctggggcagggcttctcagagccctgtcccctcctgtgtagggcgggacgtcagaggggagcctgcagacccggaccattagccccctcaccccttgagcaaggtcgtggtgcctgcaactgcatgggagcccctgccagggatgaatctggggcgcagaaggacagagattcaggcctgcctttcctctccctgaaagagcctgcgctggccctgggcagcaggtgggaggggcccagccagccaaggtcaggcccagccccccaaggtcaggcccagcccctcggcaggaggacggggaccgcggcctttgggcagggctgtggcactgaccacaagggaggcccttttgcaataggg

SEQ ID NO: 11424 - DNA, 467 bp, Homo sapiens
  source 1..467: mol_type = other DNA
gggagtttaaatataacccgcgatcccacccaccgtaggcgggggacgggagctggtgtgaaaaggtctccttgacacccgacccttgttcgtgggcagcgcctgcgcacacccttttgggcttgcgcgggtagaggcagcacgtgctgaaactggcgccccgccccccgtcttaggggttgggcctgtgacgtcgctaaacgcagcgtgcgtcagcgcgatccggaggggcggggcttcctgacgaagggcctgcccaccttcttagaagcgcttccgagggagcggaggggcacccccttgaaatattctctgctgaattggggaaaaataaaaagcactaaaacagccgatgttgtccaacttcctcactggcccgtcagttcgcggcgcggcgccacgccgacttatataccagcgagtgtgggcggggacgggggttcggtccgcgctgggcccccccagct

SEQ ID NO: 11425 - DNA, 549 bp, Homo sapiens
  source 1..549: mol_type = other DNA
ctcttggtgcggtggcaccgtggggccgccccctccgcccgactcatctttgagcggcggcggcggggccggcaccagaaacggctccttctccgccgccccttattccgtgccagtcggggtaacgagggggatcagggggcctaaccccccctgcctgggcgcgcgcagctctgctcttcacgcctagtctcgcgcccaagcgcgcacccggccgcgagcgcgcacggtgagcgcgcgttcccttcgcccgggaaccacgcatgcgcactccgccaccaccctggttgcgcgcgcgggagtttaaatataacccgcgatcccacccaccgtaggcgggggacgggagctggtgtgaaaaggtctccttgacacccgacccttgttcgtgggcagcgcctgcgcacacccttttgggcttgcgcgggtagaggcagcacgtgctgaaactggcgccccgccccccgtcttaggggttgggcctgtgacgtcgctaaacgcagcgtgcgtcagcgcgatccggaggggcggggcttcctgacgaagggc

SEQ ID NO: 11426 - DNA, 536 bp, Homo sapiens
  source 1..536: mol_type = other DNA
cctgtcctcggcccagcactccgctggcagggagaccgggcggcgcatctccccgggaaaacggcgtagactcgcttcttctggcagaagctgggggggcccagcgcggaccgaacccccgtccccgcccacactcgctggtatataagtcggcgtggcgccgcgccgcgaactgacgggccagtgaggaagttggacaacatcggctgttttagtgctttttatttttccccaattcagcagagaatatttcaagggggtgcccctccgctccctcggaagcgcttctaagaaggtgggcaggcccttcgtcaggaagccccgcccctccggatcgcgctgacgcacgctgcgtttagcgacgtcacaggcccaacccctaagacggggggcggggcgccagtttcagcacgtgctgcctctacccgcgcaagcccaaaagggtgtgcgcaggcgctgcccacgaacaagggtcgggtgtcaaggagaccttttcacaccagctcccgtcccccgcctacggtgggtgggatcgc

SEQ ID NO: 11427 - DNA, 368 bp, Homo sapiens
  source 1..368: mol_type = other DNA
tcagggatagcggttcaagtcggtgtccctgagccacaggcaacgggtgccaggactggcagcgctgctaatgggcggaaccagctgccgcagcgactccgcaagccctgagcactagctccacccgagggcggtgcgctcgcggggccgaggcgcatgcgcaactggaaacagcgtctgcgtttccgcagctgaggtaggcggcggccgcggcgcccctgtcctcggcccagcactccgctggcagggagaccgggcggcgcatctccccgggaaaacggcgtagactcgcttcttctggcagaagctgggggggcccagcgcggaccgaacccccgtccccgcccacactcgctggtatataagtc

SEQ ID NO: 11428 - DNA, 478 bp, Homo sapiens
  source 1..478: mol_type = other DNA
cccagagttggaattgcaggtatgcgctaccgcacccgtgccagatatctactttttatacaaattaatatttcagggaactcggagtccgggatggggtcggcgaccctcgcccgcactcatacaggccaactccggtccgagtttggagctggaccgttaccttaaagctgccccatttatggccaggtggggcgtgatggcgcgcgcctgtaatcccaggagaatctcttgaactgcggaggttgcagtgagccgaaatcgcgcccctgcactccagcctgggctacagagagaggctccccatttggcgccccagaatagcaggactaagattcctctgggtaactcagccatagcagagtttttggccctgatgaggacccccccagcaacacttcggcttgggggcggtgccaaggctgtgagtgcttccaacacttcggcttgggggcggtgccaaggctactccgccccc

SEQ ID NO: 11429 - DNA, 245 bp, Homo sapiens
  source 1..245: mol_type = other DNA
gcctcctgagtagctgggactgcaggcacactgatttaaactctttttttgaaaaatttaaacatagtgagttggactgcaggactggatctgagcgaagttcgactcctctccctgtcccagggaggggagaaaaggtctgagctcacaggagacccctcaagaggtgggatgagggcatgggtcgcagcagccccttactgctccctcccttcctggcctgtggccaaacaagatggagaggc

SEQ ID NO: 11430 - DNA, 160 bp, Homo sapiens
  source 1..160: mol_type = other DNA
gcccaggagtttgaggccagcctgggctacatagtgaaccatgatgatgccgctgcactccagcctgggcaaccagatttttggcctcaaagtcagaaactgaggtgggacacctgcccaatccagtgacgtcagcctcgtctgctgtcagaagggggcg

SEQ ID NO: 11431 - DNA, 222 bp, Homo sapiens
  source 1..222: mol_type = other DNA
tgcgcctagcctaaattttttggtagagaccatctcgctatggcccaggcccaccttggcgtcccaaagttctgggattacaggtgtgagctaccacccaggctggagtgcagtggcacaatgcctcctgagtagctgggactgcaggcacactgatttaaactctttttttgaaaaatttaaacatagtgagttggactgcaggactggatctgagcgaag

SEQ ID NO: 11432 - DNA, 511 bp, Homo sapiens
  source 1..511: mol_type = other DNA
caaaaaattaaaattaaattaaaaaattaaaaaagtaaaaagtcttttccaagatgtgattttaattctctgcgtaggatttattacagaaactaagctctataagaatattttgtttgagtgtctagaacgtgcctgaaacctagcagacactcagtgtttgttaaatgaataatcgaataatagtccacctacttctaaagttggaagacccagagtggaatcctgggccacgcaagcgaatgaaatgacatttataaagcactccctttagagcactggtctagtaaagcacatgacactctacacagtctagagtaagcctgctacgcacgcgcggggcacctcctctgtctcgcgcgctaactttgcagccccgccagcccggagcccgagtgccgaggactcactcgctgctggggtctctgccggccaataggagaggcctgaggcctgaaggcggtggggcggggcattggcggctccagcaaccggaggccgtcccagggag

SEQ ID NO: 11433 - DNA, 324 bp, Homo sapiens
  source 1..324: mol_type = other DNA
tccgagtagctgggactacaggtataattttttaaatttggtcacgaactctagctggaattataggtgcacacttttaaaaagcccacagcagggactgggaacttctgggtgggcatgcagcagccaatggcagcaattgactacaagtaagggaatccctcgccccccctgcagcccctccctgcaagagtggggctagggcccggcagtttggggcccccaggagcagcagcctaagcagtggctgcagcaactgcaacagcagcggctgtggcaggcctggccccgggccagctggcgggaagccccaggattcctggt

SEQ ID NO: 11434 - DNA, 273 bp, Homo sapiens
  source 1..273: mol_type = other DNA
atgtttgaaaattttcataataatccacttaggctggagtgcagtggcacctgagtagctggggctggagtgcagtggcgtgatctcgactcactgcaacctccgtccgagtagctgggactacaggtataattttttaaatttggtcacgaactctagctggaattataggtgcacacttttaaaaagcccacagcagggactgggaacttctgggtgggcatgcagcagccaatggcagcaattgactacaagtaagggaatccctcgccc

SEQ ID NO: 11435 - DNA, 499 bp, Homo sapiens
  source 1..499: mol_type = other DNA
cgctcggaggcgcagggcgttcggcagcaaccctggccgccaggtgaaggggcgggcccgactcccgggccgggcggggcccggggtggggctatgcaatgagggacccggttgggcccggggcccggctgcactcaccagcctgggtgatgtctgacaggtcgtagctacgggccgcgccccgggggaagtgcttggtcccggtggccacggcctcctctagggcccgctctgcactgcgtctccccggcagacctggagacccgggcacggaggtcgtggctgccgcctcctcacccccggcggcgagtggagccgctacggccgccgccatccgctcccggcggctcccgctgcctgactgacgggaccggccgtcccctccttggagccgccgtagttgcctcaagggggagggagcggtgtccgggaccggacggaccaatcgtggccccgagacgcgtcagccagtgggggtggagctccggcgccggagtct

SEQ ID NO: 11436 - DNA, 496 bp, Homo sapiens
  source 1..496: mol_type = other DNA
taggcggtgagatcctttctaagcctcctgtccaggggagctcctcgggtgagacggcagaccgtgcaacgctgcacctacaccctccctcctcgagctgggcatctccaggctctgggaagccccccgcccgcccccagcccgggggtcccgagacccctgccagaggcttcacagtcggaggtccccccgctgccccttcagctgcgacaaccgccagtgcactggcctcaagcaccctggacgccggctagactgcagcggcgaactgcgttcccggccggccaggggcttagagccgtccctcagagaagaggcaggtccagattcccttcggaaggactaggcaccccctgcttgcggtccctcgagcgtcgagactccggcgccggagctccacccccactggctgacgcgtctcggggccacgattggtccgtccggtcccggacaccgctccctcccccttgaggcaactacggcggctccaaggagg

SEQ ID NO: 11437 - DNA, 581 bp, Homo sapiens
  source 1..581: mol_type = other DNA
cgctcggaggcgcagggcgttcggcagcaaccctggccgccaggtgaaggggcgggcccgactcccgggccgggcggggcccggggtggggctatgcaatgagggacccggttgggcccggggcccggctgcactcaccagcctgggtgatgtctgacaggtcgtagctacgggccgcgccccgggggaagtgcttggtcccggtggccacggcctcctctagggcccgctctgcactgcgtctccccggcagacctggagacccgggcacggaggtcgtggctgccgcctcctcacccccggcggcgagtggagccgctacggccgccgccatccgctcccggcggctcccgctgcctgactgacgggaccggccgtcccctccttggagccgccgtagttgcctcaagggggagggagcggtgtccgggaccggacggaccaatcgtggccccgagacgcgtcagccagtgggggtggagctccggcgccggagtctcgacgctcgagggaccgcaagcagggggtgcctagtccttccgaagggaatctggacctgcctcttctctgagggacggctc

SEQ ID NO: 11438 - DNA, 295 bp, Homo sapiens
  source 1..295: mol_type = other DNA
tgcagcagagctgatgctgcccaagagcacacctggtcgtttggactgggaagttctctgtaccttcaagtagttggaagaggtcacttctccttggcctagtctggcccaggtctttgggagtccgaggtgggcggatcacgcatgcacctgcagtcccagctactcgggaggctaaggcacaagaattgctcactgcactccagcctgggtcacagaatgagactctgtctccccggagatactccctcactggacagagtggggttcccgaggcctgggagacggcctctgc

SEQ ID NO: 11439 - DNA, 239 bp, Homo sapiens
  source 1..239: mol_type = other DNA
ctgtaccttcaagtagttggaagaggtcacttctccttggcctagtctggcccaggtctttgggagtccgaggtgggcggatcacgcatgcacctgcagtcccagctactcgggaggctaaggcacaagaattgctcactgcactccagcctgggtcacagaatgagactctgtctccccggagatactccctcactggacagagtggggttcccgaggcctgggagacggcctctgca

SEQ ID NO: 11440 - DNA, 111 bp, Homo sapiens
  source 1..111: mol_type = other DNA
cgacagagtgagactctgtctcggcacgcctataatcccagctactcggtgccattgcactccagcctgcctttagttacttcagggctcgagttcttgtttggtctttca

SEQ ID NO: 11441 - DNA, 220 bp, Homo sapiens
  source 1..220: mol_type = other DNA
ggcacgcctataatcccagctactcggtgccattgcactccagcctgcctttagttacttcagggctcgagttcttgtttggtctttcaggggcccgtgtccgagcttagggaggggccggagaagcaggcggcgtcacaggtcgctctgcaggcgcccgctgcagcgggcggagtctggctggcgtccgggaacgcccggaaggggcgaggccagcggc

SEQ ID NO: 11442 - DNA, 404 bp, Homo sapiens
  source 1..404: mol_type = other DNA
gtgaggactggcctttcaaaacccatgtgatccaagtccttcggtgaccaaacgggccggtgcccagggaggaccatgacttgtccagggtcacccagcgtccagcagccagcaggagtcacaccactgtggtgcctccagctttgccactggggcaggagaggggagggggcacccatgtctctgccctcccccacctgatgggaactaggaggccccgccccaaggtcaaaaaattgattgttttgggagagcacagccccttgtgctctggcctggacccgggggccacgtctggaaggctggactgaggccaggactgtgcccccacccttgggggtggtgaggagcagccttggttcaggctgcctgccaggactgataaggggccctcctagggctcc

SEQ ID NO: 11443 - DNA, 320 bp, Homo sapiens
  source 1..320: mol_type = other DNA
tgtgtgaacgtatgtacacatgtgtaagcatgtgtacacatgtataaactgaggccaggagttcaagaccgagagatggagacacaccccctttggtccctctctcgtgtggcagaaccgggctcagatctctccccaatcctgctttaaaaagtaagggggtagaggcctgtaattctggcattaccccgtctctataaaaaatttttttttaatccaggcgtgctggcacctgcctgtaatcccagttgagctcaggagttcgagcctggcagccaatcggcggcgccgttggagcgggggatccggcctcccaattg

SEQ ID NO: 11444 - DNA, 394 bp, Homo sapiens
  source 1..394: mol_type = other DNA
gcgacagagtgagaccctgggagaatgttagcacttaatttcccagtattgtgataccaaaaatttaaaaattagctgggcatggtggtcccaggtgcagtgacctacaatcgcgtcactgtaccaggcggtggcacacgcctgtagtcccagctacaggcaggagaatcgcttgcacccgggagagagactccgtctcaatggctctcaatatgagttgttatttctcgaggccggccccgtccaggagctccgccccctggtgaggggcgtggcctcctcagggccggggcgtggcccaaccgggaactggggcgtcgaactccccttcccagtctggagccacccattccaggcggggcgggaggctgatcacgtgaccagcgagcggtct

SEQ ID NO: 11445 - DNA, 680 bp, Homo sapiens
  source 1..680: mol_type = other DNA
ggagccagccgggcccctggggcccgggcgccgagcctgcgggctgggccccccgggtgtccagggcgccgcggccaggccgcctggggccgcccgcccgcgcctgggagagagcacctccgcgcctcggggccggggacctcgttgcggagccgtaagagagcggctcccacgggctttctgcgggcgcggcggggcgggcggtccctgcgctggagggagcagcggctcggggctgccttccccgccgctgtcacccccacccgcggcggacggctaatggggcgcagccggaccggggattatccggggtgagccctattagcgcccaatcggcttttcccaaatcctgtaaacagccacccgggccggttctggggaggtggggccgggggtggggtcacccaccctacaggtctctgccccggtgacggttgcctaggcaacctccccccacccgccaccatcgaagctgggggtgtgtgtggagggtggggtgaatttcaagaggcaccgccccttttaaaattaccccccccgccccagttcctgccgcgggtgtcctgcccgggctgtacttcccgctccgtttccggggggcgggaggaagagacgtctctggtgccggagaccctggttgtgcccggggacggcggccgcgccgccccttccccctcccc

SEQ ID NO: 11446 - DNA, 409 bp, Homo sapiens
  source 1..409: mol_type = other DNA
gcagtgacctacaatcgcgtcactgtaccaggcggtggcacacgcctgtagtcccagctacaggcaggagaatcgcttgcacccgggagagagactccgtctcaatggctctcaatatgagttgttatttctcgaggccggccccgtccaggagctccgccccctggtgaggggcgtggcctcctcagggccggggcgtggcccaaccgggaactggggcgtcgaactccccttcccagtctggagccacccattccaggcggggcgggaggctgatcacgtgaccagcgagcggtctcaccccacctcctccagtcccagaggggggataagcaaaccctttgagtacggtttgcgtccacaaagcccaagtgcgaggcagttggtctcgcccagccgggtcctgggc

SEQ ID NO: 11447 - DNA, 510 bp, Homo sapiens
  source 1..510: mol_type = other DNA
ggatgagcttctggccttctagaaggaatgaactggaggaggcccaaaatggcctctcctgaggtggttatctccagataccttttgttccctaaagcttttttaaaaaaatgattattgtggtaaaatatacaacaaaatttggagactttaactgtctctaattgtcaggatcccctcctcagttgaggctctggcaatgagtgactgctctagagatcatgaaagagaagtaaggggtagctctccttttttgctctaggtggccacctgcagtcagtgacaggctggtggcttttcatgtcatggaacacaccaccactggaggtcccaggggaggccagcctggccttgggttgcctctgagcgcctggactctgagcaggcctcggcttgtcatgggctgctggctcagctggggctgatggtcctggagttgatgggagctgcagcaccaagccgggcccccacccgcttgagtcctctgcctggggccccagggatgcgcct

SEQ ID NO: 11448 - DNA, 571 bp, Homo sapiens
  source 1..571: mol_type = other DNA
cctcacttgagtggtcaggagttctagaccagcctggccaagaatcgagccgagatcgcgccactggactgcaacctgggagagcaacactctgtctcaataattaaataaataattaaaaaaataaagaggctcctgagagtcaacttatttgcctgagccactgtcatccaggcgggcttcctggaggaaaccggaccgccagggaggccgcggcctcggtcccagaggtcgcgcgtcgcggggccgggggaggtgggggagaggaggccgctctggggccgatcccgcccgcagctgggggcccccgtcacgtgaccagccgggcgcccaggtcacgtgtcggggcggggagggtcgggggcgacgggcgtccgggcagtggcgcgcgcggcacgcgagcagcgcacgaggagaggtggcgcgggccggagccgcggagggaggcggcggcggcggcggcggcggcggcggcggcggcggcggcggcggcggcggcggcggcggcggcggcggtggaaggggcggccccgcggccccgcgtccgcgtcacgtggtgcgaggcgggcag

SEQ ID NO: 11449 - DNA, 166 bp, Homo sapiens
  source 1..166: mol_type = other DNA
tagaactcctgaccactcaagggagtagctgggactacagcaccacacccaactaatttttttaatttattgtatttgtagtgcagtggcggatgacaggcatgagccgccacgcctggcctctcagactgaaaccccctttgtttaaaaaaaggacttttcaaga

SEQ ID NO: 11450 - DNA, 632 bp, Homo sapiens
  source 1..632: mol_type = other DNA
cagcctgggccacagagaccctgtctcaaataaatgcatgcaagtttccattcaataaaatgcatgtgcaatatggtggagctgttgtgaacatccccatagcaggtcctactcatttcagaagggaactctgcagaaactatgcccatctgggcagagcccccactccactggcctgagcctccccaccttgcccgccagggggcggcaagtccctgatccggggtcgcctgctgacccgtgaagcctgggcttagggctcacagcgtgggtccccaggcggacagcttcccgtgaactgcaggggagtcccgggacgctgtcctccagcgaggtggggcagttccccctcggtcctcgggccacagggacattagactagggggtttgccagccctgcccaggcctcttctgaccagaggagctgcgacggacgcggagttcaggccccttggcgaccgcggtctcctgccgccggccgggaactccgccaggcctagagcctccccggctcggacctggttcccgccctcggccgcccgccagttcccgaggcgtacacgtgtagatcccgtcacgccccgcctcgcgcagtcgcccttgcgctcagggaaggggcggggcggctcgcg

SEQ ID NO: 11451 - DNA, 441 bp, Homo sapiens
  source 1..441: mol_type = other DNA
cagatgtcaaggtgcatgtgtgtcctgcacaatggactgtgtgctctgtgcactaaggctgggtgcggtggctcacgcctgcaatcccagcacaagaccgcctgtagtcccagctgctccagaggctgaagcaggacactgcactgctcttgccccatggtcaacattgtttctagaacatgttgggattgtgggaagggagaccactcatttgcccctccctaaagctgggcttccagacccagctactttgcggaactcagcaacccaggcatctctgagtctccgcccaagaccgggatgccccccaggggaggtgtccgggagcccagccttaccggctgcactcccctcccgcgacccagggcccgggagcagcccgtctgcagcagccccctgctctgaccccgggtggcccccccggccagagccgcagagtcc

SEQ ID NO: 11452 - DNA, 317 bp, Homo sapiens
  source 1..317: mol_type = other DNA
tcaaatttcagcacttggaaggccaaggcaggcagactgcttgatttctgcaaaaaattagctgggcttggtggcatgcactggtagtcccagctactccagagggaagacacctgaccccgggggtctgcgctccagcctgggtgacagaacaccctgtctcaaaaaaaagaaaaaaaaatttttttttggtcaatataagagtcatagttttgatttttcccttattactagtgaagcagaacagcttttcaagattcttgcgcctcagcctcctgagtagctgggatccaaatgctgggattacaattctgcag

SEQ ID NO: 11453 - DNA, 733 bp, Homo sapiens
  source 1..733: mol_type = other DNA
gcgcccactagagggtggtgggcgcatccaagagcggcatctagagtccgcagcaaggtcagagcgggctttgtgtgcgcggtgaacatttacgtgcacgcctgggcggcccctggtgccagccgggttcgggcctgtcccgggggtccctgggccccagccccgacatgctcggtcctggacagcgcgcaccgccacggcgcacatctgggcggtcccggggttcctgagctccaatcagcgcgcccggggctcactcgcggagcccccgcgttgggagagctgcccccgccccccgcgcgcccctccctcccgggcccggcgccgcccggcccagttccagcgcagctcagcccctgcccggcccggcccgcccggctccgcgccgcaggctcgggctcccaccatccccgcccgcgaggagagcactcggcccggcggcgcgagcagagccactccagggagggggggagaccgcgagcggccggctcagcccccgccacccggggcgggaccccgaggccccggagggaccccaactccagccacgtcttgctgcgcgcccgcccggcgcggccactgccagcacgctccgggcccgccgcccgcgcgcgcggcacagacgcggggccacacttggcgccgccgcccggtgccccgcacgctcgcatgggcccgcgctgagggccccgacgaggagtcccgcgcggagtatcggcgtccacccgcccag

SEQ ID NO: 11454 - DNA, 391 bp, Homo sapiens
  source 1..391: mol_type = other DNA
ctcactgcaaggtcagtagctaggattacagctggttgcgcgcacagtaggtccccaacactgagccccctgggcggcgcccactagagggtggtgggcgcatccaagagcggcatctagagtccgcagcaaggtcagagcgggctttgtgtgcgcggtgaacatttacgtgcacgcctgggcggcccctggtgccagccgggttcgggcctgtcccgggggtccctgggccccagccccgacatgctcggtcctggacagcgcgcaccgccacggcgcacatctgggcggtcccggggttcctgagctccaatcagcgcgcccggggctcactcgcggagcccccgcgttgggagagctgcccccgccccccgcgcgcccctccctcccg

SEQ ID NO: 11455 - DNA, 540 bp, Homo sapiens
  source 1..540: mol_type = other DNA
gtatctgaaactttccaagctccaatttcctaatctgaaaaattgaaatagcagggataatttatcaaacctttaggcgttgttctaaagtgcccattaaatgctcactgaaaaggagtctcagctctcagtagagttcataggctctcaaagcgaccctgggcccagatcggcggccaatggctccctccggtggcggaagcgaagagcgatccccgcagcgggtgaggggggttggaggactagaactccagaagtcccgtgacgcacctggcccaggtgtccctttagtggggtggctgctcaccgcacctcggagctcggactggggtccggcccctgcaggctccgagacccgcggcccacgtcctgccggagacgcttgtctgcagggctgcattgcatccccgggcgcacgtggagctggagcagcgcaggctggggatcgggcttctccgggcgcgccatggggcggggccgaggacggggaccaatagcgcgcgcgtgctggtgggggtggggacaggctccaggcctggc

SEQ ID NO: 11456 - DNA, 496 bp, Homo sapiens
  source 1..496: mol_type = other DNA
acgctattaccctggtcatgagcagggtgtctggtttgcacaacagaaagtctttatgcaaatatgcagaatgttgcgggaatgtcatacctatggctgacgcaccctaggtttcaccgcaggaccccggctttctctgagcctgcagacagcaccagggagggcagttccccagctctgagcacccttccctcctccccgggctcctgggagcccccgggccctcaatccccaggactatgtggccacggtggccgacgcgtggtgctggcccgggccagcggggccttgccccctgagcggctgagccgggggtctgggggcacctctcagctgcaccatgtggacgtgtggcccctcaacctgctgcggccccggggtgggcccggctatgtggatgtctgcggcctcttcctgctgcagatggcaaccatcttgggcatggtgccggctccggatcttcctgtgcctggggcctcgggaggcgcctggggcg

SEQ ID NO: 11457 - DNA, 747 bp, Homo sapiens
  source 1..747: mol_type = other DNA
ggagggtggggatgctgagggccccatcacagccctcaccgccagccgatcccgcccgatacccgggccccacgctgctggttcatggggtcactccagtcacctgcacatgcccctgcctccagggctaggtagagagggcccaggcaggcggcctatcctgatccttggaggaggaggaagaggaggccactgtggcccgtggccctgcccttgggacgtggagcccaggggaggtttgaaggggatcctgggcttgggcatcacgcccacctcagagggaccccagcacactaactctgggtggctgtccccaccgtgcaggggagggagtccgcagcctcccttcactggtgccttgatgctaggggccaggtgggctacctcagtttccccattttggccagactcaccggccctatttttctaactctgctgaccatgaataaaagaccaatctgcagaggggtggagatcggagccttcagcctcccgccgcgaggctgccacgtgcagggctggggtgcggggcccggacgcatccgtggacttggaggctggctcgggcccgcacctcccatccccagctgcccgcaacccccagtgactcgggatcccccggagagccctcccctctcggcaggagggggctgactcagggagaatggcagtttagggcctagggggccacgtgaccctcccccaggaatgtggtgacgtcatcggaggcgtggtcgtccccaaaat

SEQ ID NO: 11458 - DNA, 279 bp, Homo sapiens
  source 1..279: mol_type = other DNA
catgccgggcccagcttcgcggccagcatttctacgccgtggagcagactggagtgcagtggggtgatctctgctcactgcaacctcagcctgccctggttcaagcgattctcatgcctcaggctcccgagcagttgggattacggccaggctgttttaacaggcacagccccgtgatagtgctgggacctgaactcagatctgctcaagtctttcaccgaatcacatgcaggaggctgcatgcaggaggctgcagaagctcccagcccatcctggacc

SEQ ID NO: 11459 - DNA, 386 bp, Homo sapiens
  source 1..386: mol_type = other DNA
gctgggatcacaggtgtgaggcctttgcccaggcagctgggattgcaggcgtgagccatctcagctgtattaagtctcacactcaattcactgagaggggccttggtgttactcccggattttacttaaagacggggcgtctttgtcgaggaaaagcaggcatttagtgcgcaggcacccaattttggctggatatttggagcccacgccctgcccgaggaggggacgaaatcacccccggtgaggtcaggacccgacacatctggggtcgcgcgatcctcgactcccggccagagggccgcctcccgaggccgcgcttggcccagccgaggtccgctcgagccgttatcgtctcgaaaagccgcgcgagacttgcgagatccgcg

SEQ ID NO: 11460 - DNA, 358 bp, Homo sapiens
  source 1..358: mol_type = other DNA
ggggaccccgctgcagcagccctgtccacacgggtgaactcctggagggcggggcggggggcaatctgcgcgggtcaggcccctcggagcaggctgggggcgcccgagccaggccgctcccacctgccagccgcgtggccaatgaatgctaggcctggtgatgtcatgccccgaccggaccctggtgacgaaagtccgaagtcacagacccacccgcgggggttccagaagtttccactgccgccgcggagtgcggcctcgcccagcagccttgcgcgtgctgtcgtggccggggagaccgacagggtgtccggcactggagtgcgtctgggccccggggtctccgggtctcggctcc

SEQ ID NO: 11461 - DNA, 527 bp, Homo sapiens
  source 1..527: mol_type = other DNA
gaggcgctgcggggcgctgcggggcgcgcggcggttagagcgagcgtgtgcgcacgcgcccaccccacgccgcgccccgcaccgccgcgcgcgcgcacgcacgcccgacgctggcctgcgccggccgctctcccacgcggggtctcgggggctcctgagccggccgcctccaggaagcaggcgccgcgcggtattgccgcatgcacctcggtcgtggggaccccgctgcagcagccctgtccacacgggtgaactcctggagggcggggcggggggcaatctgcgcgggtcaggcccctcggagcaggctgggggcgcccgagccaggccgctcccacctgccagccgcgtggccaatgaatgctaggcctggtgatgtcatgccccgaccggaccctggtgacgaaagtccgaagtcacagacccacccgcgggggttccagaagtttccactgccgccgcggagtgcggcctcgcccagcagccttgcgcgtgctgtcgtggccggggagaccgacagggtgtcc

SEQ ID NO: 11462 - DNA, 423 bp, Homo sapiens
  source 1..423: mol_type = other DNA
acacctgcgtggcacagttcgtctggagggtgaggactggggcagggcctcccagagtgctgggattacaggcaccgcactagtttaataattcataattacgaggggttcaccctccgaggcccgagtggctgcttttgcgccacctggcggccgtctccagcgagcggagcgcgggtgaccgtgcctgcgggacccggttcccgtggggcgagcgggcgtggggcccgcccagcttggagagccgggaaccgcgcggcccagggactggcaagactccggattcaacccctgcgaggccccgcaacccggtgcccgcggtccctggcggcggcgcccgcgtgcccgaggcgctgcggggcgctgcggggcgcgcggcggttagagcgagcgtgtgcgcacgcgcccaccccacgccgcgcc

SEQ ID NO: 11463 - DNA, 398 bp, Homo sapiens
  source 1..398: mol_type = other DNA
ctccagtcaggacaggtctaggcctgcctctgtaatgtcaggttctggggacaggagaggacctcagattcaaccacgatggccatgggagctgtgcttacctctccctgcccaggcatggccatgtcttcagggcatactcataggacaataagaagggttattttctggagtacggaggcacgatcttggctctctgcaacgcgaagcggcaggtggtaccctcccgggggaccctcatgcctatgggctgccgggccagggagaggcaccccctccctctgccctttggcctgaaacaggccctgcgccccaagtcatgagggaagcttccagactgactcaggctcaggctggcccctgatccccagtgtctcagggaccaaaggtctctggca

SEQ ID NO: 11464 - DNA, 356 bp, Homo sapiens
  source 1..356: mol_type = other DNA
gctttgtctcaaaataaaaattattttttcatgaaatgttgagggaaatctcctgctttgataaaatcccagtacctggaacaggaacatcatccaggctggagtgcagtgtcaccatcatggctcactgcagtgattctcctgcctcagtctcctgagtatctgggattacaggtatgaagctttgcaggcacctgcctgcctgaggtgttagcaaatctgcagacccgccctggtagttccctgtttgtgacatacacacacttagccctgaggctggactgacaggccgacctggctggtggactccagcccaagcctgccagctgcctgccggggtgggggccttggcggca

SEQ ID NO: 11465 - DNA, 364 bp, Homo sapiens
  source 1..364: mol_type = other DNA
tggtgaattgtggaattatttcattatatatattacaatgtaataataatagaaataaagcacacaataaatgtaatgtgccgttgaggaccactgctccaccttttccccttgtgtctgtgtctggaggaagaggataaaggaagtcctaagctcgaagaagtgaaacttagcttttaccatggtaaccacaatcacgtggctggctgcatgcctgggcccaggaggagggaggggcgctctttcctggaggtggtccagagcaccgggtccacgttttgatggaggttatctttgaaaggaaaagcaggcaacgtgagctgtttttttcacccggcatggcagacagtcaacctggcaggac

SEQ ID NO: 11466 - DNA, 330 bp, Homo sapiens
  source 1..330: mol_type = other DNA
cttttccccttgtgtctgtgtctggaggaagaggataaaggaagtcctaagctcgaagaagtgaaacttagcttttaccatggtaaccacaatcacgtggctggctgcatgcctgggcccaggaggagggaggggcgctctttcctggaggtggtccagagcaccgggtccacgttttgatggaggttatctttgaaaggaaaagcaggcaacgtgagctgtttttttcacccggcatggcagacagtcaacctggcaggactcagacggactcccagagccagtgagtgggtggggctggaacatgagttcatctatttcctgcccaca

SEQ ID NO: 11467 - DNA, 311 bp, Homo sapiens
  source 1..311: mol_type = other DNA
gtaaaatcagaagccaggcgcggtggctcacgcctgtaatcccagcagtttgggaaaccgaggcgggagggtctcttgaacccaagagtagtcccagctactcaggaggctgagtgacgcggccagacccatcacgctttcaatagatattcccgcctttttgccccacaaggctccaaagcgcgaggaggccctagaagctgcagtcaaggacctggttgccctccgcctccagccccgcccgcgctccccgcggcgtcggcgcctgcgcagtgcgtggcgcgccgggagtcagagcctgggcgggacgg

SEQ ID NO: 11468 - DNA, 387 bp, Homo sapiens
  source 1..387: mol_type = other DNA
ggagagagctggagttgagtcaccccccccccgtctcgccctccaaacgtccttgggggaggggagcgtcccgatgggacccctgtcagggggctgccacccgcactgccgattcgcggacagcgcccgcaggcgtgcagatctgtccctctgcactcaggttcaggcgcgtggtctcggggtggggaacccggccccctggagttgcgcacaccccttcagccgaaggccccagcgcgcaggcgcaggccgggagaggcaggcaccctccaatcgtcgggcgtccttcctcctccgggcggccgcccgcttccccatgaatgaacattgacgtcaatggggcggggcgcgcccacgtgaccccgcgcgctcccctttataaggcgg

SEQ ID NO: 11469 - DNA, 207 bp, Homo sapiens
  source 1..207: mol_type = other DNA
tgtgtgtgcttacacacacattgttgtgtaccacactttttggacaccagcggatgcccagaactgggtgtgctcataacacgcgcgcgtgcaacatgcacaagccatgtacatgtacacgcaggtgtgtgtgcatacacaagccaacaggcaaatacatatccaggctgggagggatgggaggcatcgcctcggggtctcctaccc

SEQ ID NO: 11470 - DNA, 195 bp, Homo sapiens
  source 1..195: mol_type = other DNA
aagacccagattgtggaatctctgtgtgtgcttacacacacattgttgtgtaccacactttttggacaccagcggatgcccagaactgggtgtgctcataacacgcgcgcgtgcaacatgcacaagccatgtacatgtacacgcaggtgtgtgtgcatacacaagccaacaggcaaatacatatccaggctggga

SEQ ID NO: 11471 - DNA, 451 bp, Homo sapiens
  source 1..451: mol_type = other DNA
aagtgacttctaagtcattcaaagtagctaggagcctccccctagaacttcactctgtgggatgcaaggtggggggtaggggcagccgccgcttcgccactttccgcatggccacgctgccaccctccttgtcacggtgaccacgattgtatgacaataaaatggtttcacttcccaatggggagaaatgagacacattatcttcccctttccccagagaggatctctaagccctgtggcaatggggctgaggagggctgctggctgtgcgcccctaccccacccctgccaagcggaggaaagaagccgctgctcaggaccgaggtgggcagcagcacggcctcctgactcgccctgggcctcgcttttccctggacctgggagtcgaggtggagagagcctgggcaccgcccccgcgaagcctgctctggattggcggagactgcgatcc

SEQ ID NO: 11472 - DNA, 486 bp, Homo sapiens
  source 1..486: mol_type = other DNA
tgctgggatcacaggcttgttattagagcaggggcagcgctgcacccacccgggtcccagctcaccaggatcagcgtggggtgcaggggccttgtgcacccggggaaccagggtgctcaggcacccaagatggagagatcttggcctccctctggatcctggaggaggggtacttcagggcagtgggggacccccggagcgtggggcactccccagccgggacacagggcggagtctcgccagtagggcttgaggccacccagctgcccagggcgcaccccgacccccggccccgccagcagggcacgagtccgctccggatccgtcccgggtttcttccgcgtcgccggggtctccgcccctcgaagctgccgccggagcgtcgccgggggagccacgcgtgccacccgaacccctgaaccgatgggcgccccggcccgcgtcgccaacggagctgcggcgctgccccagcgctgaccgacgtta

SEQ ID NO: 11473 - DNA, 407 bp, Homo sapiens
  source 1..407: mol_type = other DNA
ccaccgtgcccggccaggccaggctagtgctgggatcacaggcttgttattagagcaggggcagcgctgcacccacccgggtcccagctcaccaggatcagcgtggggtgcaggggccttgtgcacccggggaaccagggtgctcaggcacccaagatggagagatcttggcctccctctggatcctggaggaggggtacttcagggcagtgggggacccccggagcgtggggcactccccagccgggacacagggcggagtctcgccagtagggcttgaggccacccagctgcccagggcgcaccccgacccccggccccgccagcagggcacgagtccgctccggatccgtcccgggtttcttccgcgtcgccggggtctccgcccctcgaagctgccgccggag

SEQ ID NO: 11474 - DNA, 399 bp, Homo sapiens
  source 1..399: mol_type = other DNA
ggaggagaaccggggatcccagcccagatcgcctcccgtcccgcccgcagtggggtcggcgattcccgtgcagcagagccccccgcccagtccggcccaggtggacacgctgcaagcgcgctacgtggggcgactcacgcagctcttcgaggagcaccaggcgcgctatggtgtccccgcgtcctcacggaggcgcgccccaccgcctggcctcgcctgtccgctgggtgactcacgcctgtgattccaatcgagaccagcctgccactgctctccagcctgggtggtgaccttgacattcctggagatgccccggaccaggccctgccccttccagcacctgggacccagtgggtggggctagccaggcagccagcccagactggtgactgacaggcc

SEQ ID NO: 11475 - DNA, 362 bp, Homo sapiens
  source 1..362: mol_type = other DNA
ttggagacaagaaagcttttcgccatgttttataggggcaaaaagaagatgctgtgatcacaaaggcagcccctggagcttctccgggcagtccccaggcctccgtcccgcggcggactcctacactctctgggcagggctgcggccaggacccgcccccgcgtcccgcccgaccctccgccagggtggctcagcccagagtccctgtctcccgcccgccggcccgagccgccgcccctcccccgcctcccgtgcgcccgggacaatcctcgccttgtctgtggcgccggcatctggagctttctgtagcctccggataggcgtagccccagccaagctgctccccgcggcggccgcacagc

SEQ ID NO: 11476 - DNA, 243 bp, Homo sapiens
  source 1..243: mol_type = other DNA
ccgttggagaccaagcgtggggcttccagccactccggaatgccactgcactccagcttggagacaagaaagcttttcgccatgttttataggggcaaaaagaagatgctgtgatcacaaaggcagcccctggagcttctccgggcagtccccaggcctccgtcccgcggcggactcctacactctctgggcagggctgcggccaggacccgcccccgcgtcccgcccgaccctccgccaggg

SEQ ID NO: 11477 - DNA, 565 bp, Homo sapiens
  source 1..565: mol_type = other DNA
gaccgggtctcggccccggggccggtcggaggctgaggccgcagggggcagcagcagcggcagcagcagcaggaaccggggtccaggccccgaggaggtcatggtggggagcgggcccagacagcacccaggatcctgggatctccgctacgcgcctggatcccagctccggaggggagctctggaaagggggcgctcgggctgctgtgcggccgccgcggggagcagcttggctggggctacgcctatccggaggctacagaaagctccagatgccggcgccacagacaaggcgaggattgtcccgggcgcacgggaggcgggggaggggcggcggctcgggccggcgggcgggagacagggactctgggctgagccaccctggcggagggtcgggcgggacgcgggggcgggtcctggccgcagccctgcccagagagtgtaggagtccgccgcgggacggaggcctggggactgcccggagaagctccaggggctgcctttgtgatcacagcatcttctttttgcccctataaaacatggcgaaaagctttcttgtctccaa

SEQ ID NO: 11478 - DNA, 296 bp, Homo sapiens
  source 1..296: mol_type = other DNA
ctgataactgggaacaggttgcagagcttagccacaggatcacgctccaggctgttggccagcagtctgatcaaagatcaacttaggaggaaatttgcccctgaggcgagagccactgcgcccggcccctggtcccagttctcaccacagcggccgagttccattccaggctggatggagcccagagctgtgggtctcctaccatcatgaaagctgagtcagagatgggggccccggtaagtctgccccccccaccctcgtggggcggggagcccggggcagcccagaggctgggg

SEQ ID NO: 11479 - DNA, 441 bp, Homo sapiens
  source 1..441: mol_type = other DNA
tggcaggtttcccgcctggggtgcactcccaaaatggtttatgtaaataatattgaatgctttttgaaaaacgtgagacccaagaaaccccgatactagtttgctgcggagtgcagtggcgcgataactcactgcagccctgcctcagccgccccagtagctgggagtacaggtgcacgccggttgatttttttaaaaattttgtagagatagggggcttcggacgtgagctacgcgccgggctcccgatcctgggggctaaccgccaagacatggcctccagtttccctagggaagcctccacagaggaaggcacactggggaaggtctccctgcgcgcagtctgcgggctggagggaccggccgagcctgcgcactagcgccccgccggcgctgctgaactgagaggaaggggcggggcgtcgccaggtcgtgccagca

SEQ ID NO: 11480 - DNA, 365 bp, Homo sapiens
  source 1..365: mol_type = other DNA
atcttcccccccaccttggcctcccaaagtgctggcattacaggctcatgcattattattgttattattaagacagagtctgctctcccaggctgcagtgcagtggcgcgatctcggctcactgaaatgctgggattacaggaggccgatcagtactttttaaaaacttttaggttcacgtacaggtttgttatatagataaacttgaggtactaagccacttccaggtggcgtggcgccgcgcccctcctgcaggccagtggggtccccgtgccccgcaccgggcttcgctcggccccgcctccccgcctagggtggctcctgcgcagagagcggccccagaagaagcgcttcctcctccctct

SEQ ID NO: 11481 - DNA, 447 bp, Homo sapiens
  source 1..447: mol_type = other DNA
gaaatttttgtatatcatggcttatccaaaattctgacttgactctgtattttcagactgacctaactgattgaatttagcgcaatgtttctagtttctcctaggtcagacgaatgctgtgccacggcagctggttccaaggccagcttggcgtttggaaacggccattctctctaccgagactggtggaacgggcctgcagtcccagaattttgggagtcttacaaataaaaaaattttaaaaattagtcggacgtgcatgacccgagatcgcgccactgcgctccagcctgggcgacagagtgagaccctgtctctaaaagaggcccctgcaccgcgtctgcagcccgggcgcccgctttccgccccgcgcgccggaagtggccgagtcccgtcggccctgcgggcctctctccgtcgccatggaaacgaaagcggccaagtaga

SEQ ID NO: 11482 - DNA, 260 bp, Homo sapiens
  source 1..260: mol_type = other DNA
caaaacttgggtccaggctggccttgggcccagcatgggagtctcatgaatctgtgattctacaggctggaggccagtggcctgatatagcctgtagttgagattacaggcctggtcctgacctcaggtacctggaaggaacgcagcgctttgatccaaagagcaaagcattcgcggacccgaagaagcagggacctcctgcggagctcgcaccctagctctgccgccaccccggaccacctcgccgaatttgaaaaggc

SEQ ID NO: 11483 - DNA, 683 bp, Homo sapiens
  source 1..683: mol_type = other DNA
agtttcttgggctgttccgctgaagcggcgacggcttgggcgaatgggggctgccgggacccccagcgctaccgccgttggggtgcgttcgggtgcgacgctggcaccgccgctgtccgggtgtggggcatccacgcgcgcggccccctgagagggtcagggcccggtcctcgctgggcgcagagggatcagagtgttgccgtccaccgtcggggcgcctcccacgcacgctgctgcggggggcctgggccacgcaggggtcgggtgtgcccggggcggcgtctccgcggcgctgcgctcggccaccgcgggcgatcgcgatcccagcgggagaccccccccacccccgcagccctccccaggtgcgcggtgccgggggaccccgggcgctgccctccagcgccccctcggggccgggtctgtggccggcgcgaccgcggactttgtcccgaggggcgggggtcgccggtcggcccgcggaggggggagcaggggccggggccgcgcgcgcgaggccgggccgcggccgccgcgccctggggctgcgactccggctccggctcgggctcgccatggctgcggcggtgccgtgaggaggagtccgcgtcctcggtggcggcggcggcggccggctccaggccgggttttggcgccgcccgcctgctgcctcctggcggctcctg

SEQ ID NO: 11484 - DNA, 923 bp, Homo sapiens
  source 1..923: mol_type = other DNA
cggggggtgaagcgcctgcctctccaggaggagccgccgccactgccgccggcgcggcggagctggggctggtggcgctgtggtgccgccggctcgggggagggtcagagcggccaccggcggcggcggcggcggcgcggcccggctccggccaggcgggcgggtggccgggcaggcgcccgcgctcgctacccccggccggccccggccgccgcccccggctgtcaccggcccgggccgcgccgccgctccggcaccccgcgtgtggctcccggcgcggacccccgggtttgtttacgtcccggggagcgccccggggccacccgcgcacctcgcggccgccgcgctgcggacctgttcctccgtggcggacccccgcgggggctctttggggaaacttggcgaggggcggcgggggtgccccgcgcgcagtgtcgctgggtcccggtgtcccggaccgccgggtgcgggcgcgggaggaggaggctgcaactttcccctaggcaggccccgttcccccgggtgcccgggcagtgtacgctgcctccccgccgccggtccgagccgcgatcgccgcgcgcctgggggctccggcggcccccggtgacctgcggcgccgggtccctttgccctctctgcagggcccgccatggagcgcgcggcgggtgcgctcggagatgccttctcgggccgggttctcgaaagcagagccccgggggcccgttgggaccgtggcatgccgggcggtggtccgcgcgcggagtccccggcgccgcggggggaccgtgccggggctccccggcccgcgcccgagtcgccgccgtgcccaaggggcgagtgcctgcctgccaccccccgcccggaggagcggcgcacccttagggtccgccccgcacgtgccagctcggcgcccgcggcgccgg

SEQ ID NO: 11485 - DNA, 222 bp, Homo sapiens
  source 1..222: mol_type = other DNA
acccggggccaggcgcggtgggtcgaatcccagcggttcgtgaccagcctggctgcctgtaatcccagccactgggcccccgcctgccaggggctgcaaagcccgtgctcgcatgggaaccccccgagacacaggttctggcccagcctcagatagaggagcgcattctctgggtctcagcccaccaggccagggtcccctggccctcagggacccaggatg

SEQ ID NO: 11486 - DNA, 258 bp, Homo sapiens
  source 1..258: mol_type = other DNA
cattgcactccagcctgggtgttgaaccagatttggtctgatgcagttctcctcattcttgagggattagggatggagacttcatgctgagcagggcactgagtccccttctgagttcaaatgagttctggggtcaatagtggactcgactgtcaggagttcaagaccagcctcagctactcgggagctgacaggagaatcgccactgcactccagcctaggtaacagagcaggactccatcaatctcagcggttgaa

SEQ ID NO: 11487 - DNA, 342 bp, Homo sapiens
  source 1..342: mol_type = other DNA
ataacctaaccctaaacaggggaaggtaagtgcagtggcgtgatctcggctcactgcaacctcagcctcccgagtagctgggattacaggcaccatcatgttggccaggatgatctctaacttctcagcatttcaggacttgggctccaggacccagtaacgcagccctggacttgacagggttgccaaagctcatagcctggagccatttaaaatggcccctaaacttggcttcttaacctttagccctaaactgtggtgggtgtcccgggaggcggacttccggtgcactcctgcgcgtgtgcacctctccctgcgtgcgtgttcgcgcgtgcgtgcttg

SEQ ID NO: 11488 - DNA, 323 bp, Homo sapiens
  source 1..323: mol_type = other DNA
ctgtagtctcagctactcaggaggttcaaggccattgaacttgtcttttctaaaaatgcagtgttcaggcaagagaggtggaaacctgtgttctctctctgcgctcagtcaccgagtcacggactgcctcacactacgagacggtcctgtcttatggagcatcagcggggctgctcggtggcacgaagacgcccgcggcaggcacggagggccacctccccttcagggacgtgagcatctagctgcactgatttgttccagcctcaggctcatgaatattcagcaggctgcttgcccctctgcggagactgcgtatgcgtcgc

SEQ ID NO: 11489 - DNA, 269 bp, Homo sapiens
  source 1..269: mol_type = other DNA
caggaccccatgtcaaaaaaaattatttttagagacagcgtcttggctgccagctcctggccgcaggtgactttggcatgcaaagggccgctctgccctccattaagacagagtctcactgtgtcacccaggctggagtgccgcggtaggatcggcaatgaggacaggtgtgagctctttaagtaccaagtgcgctaagagggagcaaaggttagcgtctcacccctccagtctccagaatgcagtttccaaattacagcattttctaa

SEQ ID NO: 11490 - DNA, 505 bp, Homo sapiens
  source 1..505: mol_type = other DNA
gctgatgcaccggggagcatctgtgatcagacccccacgcagttttctgggttggaatgcccttgcaaccaaccacagtccttcctgagacagagtctcgctctgtcgccccactgcagcctccagctcggcgagttaactggaattccaggcccgtgaagctcccagatcccaagggtccctcacaggcttcgatcccggcccctatcatggccaagctggacctctgtgggcgcggcccctctcccaccccttaccgctgggggcagctcccagggcgggtcactgccgcgctgccgctcgcagatcagacaggtccggatgcccttgcaaccgcattcccgaaggacttcgggggtctcggcggcagccgccgccatcgcgccgtccgcgtggccagtgcgcaggcgcggccgtgggggccgctgggagttgtagtccgcgccgggcgggggcacgaggcctgggttccgcttccttccgggttaacgcccacgggctcgcg

SEQ ID NO: 11491 - DNA, 545 bp, Homo sapiens
  source 1..545: mol_type = other DNA
cagctccaatcctgacaggcgggggcgggcaggctttgcaccctgagacggggtgtcactcagtcgcctaggcgcgatcatagcgctgagggatcctcccgcctcagcctctcgagtagctgggactagaagcgcgcgccagcccctctaacgatagcggcaggtgcccctaactgtccgggctcccttcaggggatgaggcccctcggggctcccggcgagcgggtggggccacgatctccggacaagcgggccgttggggagggtccccgctcttctccccgaccgcccggtcgctcttggggcgcccgcgctgcattagcagccgcgccgagagggggcccatggcgaggaggcgcagcccgcgctgacccagtcggccaccccggcgtgtggcgtcgccctgcgtctcctggagcccggcactggcgtccgcggtaactgagcccaggaggcggcgccgcgcgagcccgtgggcgttaacccggaaggaagcggaacccaggcctcgtgcccccgcccggcgcggactacaactcccagcg

SEQ ID NO: 11492 - DNA, 491 bp, Homo sapiens
  source 1..491: mol_type = other DNA
tatacctgggtggcttgctgcccacatccaccaagtgcactttgggaggctgaggctggaggactgctggaggccaggagttcaataccaggtgtgatcacatggctggctgcatgatggcgccactgtacttcagcctgggcgacagagggagacgctgtctctaaataataataataatatataaaaagatatcctgcagcacagcctgggcagggggcttgacggctgctagccgcagcgttcccgctcagccaggactaggaggcctctgtaggggcagaacagccctgccggcgctctgagcatgcgccgaaaagcgcccacggggaaagccatgccgggggggcgggggcgggggggggggcggtgcgctcgccactgacgcatgcgcagaggcactggctctcggggttttctcgcgcctgcgcaagatcctccagcccaacagggcgatgagccgatccttgagcgggtttgccccgccggag

SEQ ID NO: 11493 - DNA, 305 bp, Homo sapiens
  source 1..305: mol_type = other DNA
cctatgtgcccggcaccggggtggggtatccggtgcagcatagtggggctggagggggcccgtgggcatggcctctgtcgcctctgcctccatcgctgctaggcccctaaccacctggtccttcctgctgtcacctccaggcagtccaatggacacgccggcttccagggccaaggaggcttggatggagccgctgcagcccaccgtgcaccagggcgtggcgcagctgaaggacttcatcaccaagctcgtggacatcgaggagaaggacggtgagcgccgccctgcacagacccgcccacagc

SEQ ID NO: 11494 - DNA, 545 bp, Homo sapiens
  source 1..545: mol_type = other DNA
tgataccagtcaggtcagattcattattacatattcattactattatatcacatctgtggtcccagttctagaccagcctgcagtgagctatgattgcaccactgcaaaatgcatacatacatacatacatacatacatacatacatacatacaccaaccaatacaaaaaatacatattttttttcttctgattctaaaaaacataaaaacagccaggcacggctcatgcctgtacctgaggtcctgcaatcccagctacttgggaggcgggaggtggaggttgcagtgtcccccacccgctcctccaggggcgcccccctcgagccaccgcgccggctgcccggcgagtgtcagcgcctcctcacaggccccgcccctcacgcggccaatgagagctgcggccccggccggcccctccccgccctggggaaccccggtcgcggattggccggcccgggcgcagtgtcccccgcacgtggggcgggggcggggtgagtggagtggcagcgaagccccgcccccgccgccccgcccccgccccggc

SEQ ID NO: 11495 - DNA, 237 bp, Homo sapiens
  source 1..237: mol_type = other DNA
acgccatacgtgttgggaggctgaggcccgcagatcacctgaggtcaggagttcaatcccagctagcagtgagctgagattgcatcactgcactccaacctggtgcctgagcctggggcacaaggggtgcatgcagccaggccaggccaggggccccaggtgcctagctgaggaactgggctgtatcccatgctagccaatggctgtgggatctcggccagagcctttacctcgcgt

SEQ ID NO: 11496 - DNA, 282 bp, Homo sapiens
  source 1..282: mol_type = other DNA
caccagggccccagcaggatgcctgggtcccctgctcctgcttggccaaagggaagaggaagcagacccaggctggagtacagtggtgtgatctcggctcactgcaaccgctgggttggccaggtacctgccaccatgcctggatcttgaaggcccaccttggcctcccattgagcagaagcacaggctgtgtggaccactcaggcggccccctccccgggctgctctcgccagggcctgggactccaggggacagacttgcaggcaccagggggaccccca

SEQ ID NO: 11497 - DNA, 421 bp, Homo sapiens
  source 1..421: mol_type = other DNA
ttggagttgagttgaattcaacgtaaatgaatcaagttgaactgaactgaacttggggaggtctgagctctccaaccagcaaggctggacacaggccaagttgccaatcctgagtcggggctgctcgtcccccacccttccccagagagatgaggtgggagttcccaagctctggctccagagcccccggaccctctgggcagtctgtcagcctagggtcaggctgcccaacatggcccggcccgggagaactgtgcctaccgccagggtgggacctcccatgccaccacccccagtaggctcctaagagaggggccaggggctggactcaggcctcccacccatgcccatggggcatagagttgccgggaaagacctcccaggaagtgcccgtaacttggggctcccattatgtgcccca

SEQ ID NO: 11498 - DNA, 339 bp, Homo sapiens
  source 1..339: mol_type = other DNA
attgcaccactgcactctagcctgggcgacagagcaagactggaaattccccagggaagtacctcggctgatttgcatgtggaggacttccccacctcatgggcagtgaactgcagtcatctgtttaggcctttccatggcccaccaaggccttgtcctctcttaggtccagagctcatatgcctataatcccagcattttgggatgccaaggggtcacctgaggtcaggagttgtggtcactgtactccagcctgggtgaaaaaaaaagagaaagaaagtatcatgcttttctgcattctgtctccaaatttgcgacacccaagcctgcaggtgtgtc

SEQ ID NO: 11499 - DNA, 366 bp, Homo sapiens
  source 1..366: mol_type = other DNA
atgaacacgtgcatttacattcactgtcagtagctgggactacacctcaggtgatccacctgctggcacattctgtaaatgaactgaggaaacctcagtgccacctgggcctctaagatgtatgtggcagagactagaacttctatttaacaagagaaagaagtaggagttctgtggctatccagtgcccctaatgggcaccctgctcttccctctggtgccaccagcgaagccatggggtctgcccagtctcctagacggggatggaggaatcctgcccggagcccagccagtggggcacccaagctctcctggggccctgctgctccccccagggcacagtacgcgatgcagccccatggcaca

SEQ ID NO: 11500 - DNA, 274 bp, Homo sapiens
  source 1..274: mol_type = other DNA
ttgtcttggaaaatccaatggaagtttcctgtacactccagggtcaggaccagcctcacggttgcttcattatgttggcgtaagaaaaaaggaacaggccaggcatgatgacgtgcgcctgtggtcccagctactcggctgcagtgagctatgatcacaccactgcactccagcctgggcagccactctgttgcccaggctggagtgcagtggcatgatctcggctcactgcaatcaggtcatggtgggaggaggggagcccctgctcctcatc

SEQ ID NO: 11501 - DNA, 470 bp, Homo sapiens
  source 1..470: mol_type = other DNA
acctgggtggcttgctgcccacatccaccaagtgcactttgggaggctgaggctggaggactgctggaggccaggagttcaatacccctggctgcatgatggcgccactgtacttcagcctgggcgacagagggagacgctgtctctaaataataataataatatataaaaagatatcctgcagcacagcctgggcagggggcttgacggctgctagccgcagcgttcccgctcagccaggactaggaggcctctgtaggggcagaacagccctgccggcgctctgagcatgcgccgaaaagcgcccacggggggggggggcggtgcgctcgccactgacgcatgcgcagagacactggtctcgctcggggttttctcgcgcctgcgcaagatcctccagcccaacagggggcgatgagccgatccttgcgcgggtttgccccgccggagtaatccggaagaggcctctt

SEQ ID NO: 11502 - DNA, 470 bp, Homo sapiens
  source 1..470: mol_type = other DNA
tattttatatattttattatacctgggtggcttgctgcccacatccaccaagtgcactttgggaggctgaggctggaggactgctggaggccaggagttcaatacccctggctgcatgatggcgccactgtacttcagcctgggcgacagagggagacgctgtctctaaataataataataatatataaaaagatatcctgcagcacagcctgggcagggggcttgacggctgctagccgcagcgttcccgctcagccaggactaggaggcctctgtaggggcagaacagccctgccggcgctctgagcatgcgccgaaaagcgcccacggggggggggggcggtgcgctcgccactgacgcatgcgcagagacactggtctcgctcggggttttctcgcgcctgcgcaagatcctccagcccaacagggggcgatgagccgatccttgcgcgggtttgccccgccggag

SEQ ID NO: 11503 - DNA, 479 bp, Homo sapiens
  source 1..479: mol_type = other DNA
tagtataactattcttattttatatattttattatactgacctgggtggcttgctgcccacatccaccaagtgcactttgggaggctgaggctggaggactgctggaggccaggagttcaatacccctggctgcatgatggcgccactgtacttcagcctgggcgacagagggagacgctgtctctaaataataataataatatataaaaagatatcctgcagcacagcctgggcagggggcttgacggctgctagccgcagcgttcccgctcagccaggactaggaggcctctgtaggggcagaacagccctgccggcgctctgagcatgcgccgaaaagcgcccacggggggggggggcggtgcgctcgccactgacgcatgcgcagagacactggtctcgctcggggttttctcgcgcctgcgcaagatcctccagcccaacagggggcgatgagccgatccttgcgcgggtttgc

SEQ ID NO: 11504 - DNA, 483 bp, Homo sapiens
  source 1..483: mol_type = other DNA
cccagctactggggaggctgaggcaggagactcacttgaaccaggagccagaggttgtagtgagctcacgccactgcactctagcctgggccccgtgctagactgtgtgtgtgattaaaatttaagttagagacagtctcactaaagtgctaggattacaagggctaagaattctagtcattcattcactcactcattcattcattcatgaataaacagtttggtgacctgcggtggtccccaggtggccgggatgcagtacctgcacggcgtcctgggccccatcacctgttcctgtcgtggccctggcgctgaccgcgacctcctctgcccgccccgttccacgcaggtgctccgggctgcaccgcccgcagaccgaggccgaggtgctggagcagagcgcgcagacgctgcgcgcccacctgggggccctgctgagcgcgctcagccgctcggttcgcgcgtgccccgccgtggtgcgcg

SEQ ID NO: 11505 - DNA, 479 bp, Homo sapiens; identical to SEQ ID NO: 11503
  source 1..479: mol_type = other DNA

SEQ ID NO: 11506 - DNA, 556 bp, Homo sapiens
  source 1..556: mol_type = other DNA
actgataccagtcaggtcagattcattattacatattcattactattatatcacatctgtggtcccagttctagaccagcctgcagtgagctatgattgcaccactgcacttcatttcaaatgcatgcatacatacatacatacatacatacatacatacatacatacaccaaccaatacaaaaaatacatattttttttcttctgattctaaaaaacataaaaacagccaggcacggctcatgcctgtacctgaggtcctgcaatcccagctacttgggaggcgggaggtggaggttgcagtgtcccccacccgctcctccaggggcgcccccctcgagccaccgcgccggctgcccggcgagtgtcagcgcctcctcacaggccccgcccctcacgcggccaatgagagctgcggccccggccggcccctccccgccctggggaaccccggtcgcggattggccggcccgggcgcagtgtcccccgcacgtggggcgggggcggggtgagtggagtggcagcgaagccccgcccccgccgccccgcccccgccc

SEQ ID NO: 11507 - DNA, 258 bp, Homo sapiens
  source 1..258: mol_type = other DNA
gtgttgggaggctgaggcccgcagatcacctgaggtcaggagttcaatcccagctactgcagtgagctgagattgcatcactgcactccaacctggtgcctgagcctggggcacaaggggtgcatgcagccaggccaggccaggggccccaggtgcctagctgaggaactgggctgtatcccatgctagccaatggctgtgggatctcggccagagcctttacctcgcgttcagcactcctgccgagggggcttcctg

SEQ ID NO: 11508 - DNA, 371 bp, Homo sapiens
  source 1..371: mol_type = other DNA
gctctggctccagagcccccggaccctctgggcagtctgtcagcctagggtcaggctgcccatggcccggcccaggagaactgtgcctaccgccagggtgggacctcccatgccacacccccagtaggctcctaagagaggggccaggggctggactcaggcctcccacccatgcccatggggcatagagttgccgggaaagacctcccaggaagtgcccgtaacttggggctcccattatgtgccccaaccttggcggggaggctcaccctgtccaccttcacgctggagcagcaccatctggctggtggtggccctcagcaacggtgggtgctcggcctgcgggcctagtctgaccatggtgccaccct

SEQ ID NO: 11509 - DNA, 444 bp, Homo sapiens
  source 1..444: mol_type = other DNA
tggagttgagttgaattcaacgtaaatgaatgaagttgaactgaactgaattggggaggtctgagctctccaaccagcaaggctggacacaggccaagttgccaatcctgagtcggggctgctcgtcccccacccttccccagagagatgaggtgggagttggtcctgaaggcgaagatgcctcggggccatcaagctctggctccagagcccccggaccctctgggcagtctgtcagcctagggtcaggctgcccatggcccggcccaggagaactgtgcctaccgccagggtgggacctcccatgccacacccccagtaggctcctaagagaggggccaggggctggactcaggcctcccacccatgcccatggggcatagagttgccgggaaagacctcccaggaagtgcccgtaacttggggctcccattatgtgcccca

SEQ ID NO: 11510 - DNA, 512 bp, Homo sapiens
  source 1..512: mol_type = other DNA
tagaaagtgagggtcactcccttccacacaagggagtgaattgagggtggggatctgagctctctgagcaaaagctggacacaggccaaattgccaatcctgagtccctctgtcatgtggacctgcctcatcctccatccttccccagggtggggcctgagaatctgagaaccttggggagtttgcttgagcggaaccaaaaacagacaccaactcctcctaggttggttttttgtttttcccactctgtcatccaggctggagtgcagtggtgccatcttggctcactgcaggtcctaaaggaagagtcgctacattggggactttgtccctggggcagcctggatcctgaggctgccccgcctccttcctcagcccctccctggtcaggcgctcctggtgggtgggggcactgggctggcagattctgcccccaaacctgtccaaccagttgtttgagaggagggggtagctgggcagcaggagatgccaggaacagcttcccctcagac

SEQ ID NO: 11511 - DNA, 526 bp, Homo sapiens
  source 1..526: mol_type = other DNA
gggagcccccctcccagggcgccagggggactagaaagtgagggtcactcccttccacacaagggagtgaattgagggtggggatctgagctctctgagcaaaagctggacacaggccaaattgccaatcctgagtccctctgtcatgtggacctgcctcatcctccatccttccccagggtggggcctgagaatctgagaaccttggggagtttgcttgagcggaaccaaaaacagacaccaactcctcctaggttggttttttgtttttcccactctgtcatccaggctggagtgcagtggtgccatcttggctcactgcaggtcctaaaggaagagtcgctacattggggactttgtccctggggcagcctggatcctgaggctgccccgcctccttcctcagcccctccctggtcaggcgctcctggtgggtgggggcactgggctggcagattctgcccccaaacctgtccaaccagttgtttgagaggagggggtagctgggcagcaggagatgccagga

SEQ ID NO: 11512 - DNA, 493 bp, Homo sapiens
  source 1..493: mol_type = other DNA
ataactattcttattttatatattttattatactacctgggtggcttgctgcccacatccaccaagtgcactttgggaggctgaggctggaggactgctggaggccaggagttcaatacccctggctgcatgatggcgccactgtacttcagcctgggcgacagagggagacgctgtctctaaataataataataatatataaaaagatatcctgcagcacagcctgggcagggggcttgacggctgctagccgcagcgttcccgctcagccaggactaggaggcctctgtaggggcagaacagccctgctggcgctctgagcatgcgccgaaaagcgcccacggggagcggggtgggggggagcggtgcgctcgccactgacgcatgcgcagaggcactggctctcggggttttctcgcgcctgcgcaagatcctccagcccaacggggggcgatgagccgatccttgggcgggtttgccccgccggagtaa

SEQ ID NO: 11513 - DNA, 394 bp, Homo sapiens
  source 1..394: mol_type = other DNA
catcagtgagctgtccctgctggaggagcgcttccgggtgaggggtgggctggacactggcccgtgtgcccaggcctgggacagccctggcctgtttcttcggaggtcctcagaggcggcgacttccaccacaggctccaggacatgtggactgaggggctgtggagcgtctgccccatgggacttctgtagtgctgcagggtccctcgggtgctgtgggccagatccgcggtgattggcaaggcctggtccttccaggcctctgggaggcagctcaccccagggtggccgtcaggagttcaagaccagcagctactcgggagctgacaggagaatcgccactgcactccagcctaggtaacagagcaggactccatcaatctcagcggttgaa

SEQ ID NO: 11514 - DNA, 319 bp, Homo sapiens
  source 1..319: mol_type = other DNA
acctatgtgcccggcaccggggtggggtatccagtagtggggctggagggggcccgtgggcatggcctctgtcgcctctgcctccatcgctgctaggcccctaaccacctggtccttcctgctgtcacctccaggcagtccaatggacacgccggcttccagggccaaggaggcttggatggagccgctgcagcccaccgtgcgccagggcgtggcgcagctgaaggacttcatcaccaagctcgtggacatcgaggagaaggacggtgagcgccgccctgcacagacccgcccacagctgttggcatttgccaggccc

SEQ ID NO: 11515 - DNA, 402 bp, Homo sapiens
  source 1..402: mol_type = other DNA
cacacaccggggcctgtcaccaacatggcacatgtatacatatgtaactaacctgcacgttgtgcacatgtaccctaaagtataataaaaaaaaaaaaacatgggctttgtaattattgagctgagtctaggttccagcacgagcactagtgggagcttgagcaagttcttataatacctcataaagttaatatggggattaaaacataatgtaattatacaggtgtagtaaattacaaagaagaactagtagttaataatgtgctaataacccatattctttacagaagttactgtgaatgccttagaaatttataatagactctttgatttctttatattactaagctctccattatatacttcaagctcatttacagttatcagggaaagagttcagga

SEQ ID NO: 11516 - DNA, 261 bp, Homo sapiens
  source 1..261: mol_type = other DNA
gagaaacccatgctgcccctgccccagtatctagcaacaggctttcatttgtaaataagcatgcaatgcttggcatatggtaatgactcaagaaatgataactatcaatatttccctatgctattattctcatagaataatgaacatactatgacaaataagttaaaagaattatggcttaaatcttttgaaattaaagcagaagaaactatcaattagctacttttaaattaatgctcagactgtctcaatttcagcgtg

SEQ ID NO: 11517 - DNA, 584 bp, Homo sapiens
  source 1..584: mol_type = other DNA
taaatactcaataaatagtacactacttggtaatgggtgcgctagctattgaaattactttaaacgtttttattttttaaaaattcaataaagtcaggaaaggggataataaataataaataaaaagataataaatagtataaaaagtatatcaataatcataataaatttaacaaaatgtattggttagaagacaaaaattttttattcctaaaaatgctttttgctttaatgtttttaatattaatgtagctatctattttcttttcttagttttatttttaattgacaaataataattaaaatgcatttatggttaaaatgtgatgttttgatttatgtttataatgtggaatgattaaatcaggttaataattaagaaatcaccacctcacataattatcatttttgtgtgtgaagaaaacatttaaaatctacactttcaggcacggaaagacaaattctccatgatttcacttctatgtgaaattttaaaatgttggacttacggaagtaacgagtaaaatgatggttatcagccttcctttcaaggaatgagtaactccggccacttgtaccagcag

SEQ ID NO: 11518 - DNA, 275 bp, Homo sapiens
  source 1..275: mol_type = other DNA
atatctcaccaactatttgtagagaaaaaaagattccctactcttataacggcagtaggagggcagtccttcctgttgtatggaaaccaaaccttaaaatctgagtttggggctcattccccctgggagatgtcacccattcgagaagtagttcttctcgggttggcattgcgtagcgaggccatggcccaaggcctgacggagaagctgcgatagtaccctccccgcgctgggactaggggccgggcgcgtgcgggcgttgtcccggcaaccag

SEQ ID NO: 11519 - DNA, 603 bp, Homo sapiens
  source 1..603: mol_type = other DNA
aacaggtttttaagaaaggggcggcgggggcggcgcagcaccctgcaccaccccggcctggggagcccccctgcccagtccggaaaccccggggtcccacctgcggacttcgaagagcgtatcccgagctcgcggtcgccccgccgccgaccccgggtcagcctgtaaatgcagtagcaggcgcccgcgccgagcagcaggcccgccgccacccagcccgcgccccgggggccacccatgctgccgccgcggcagagccgcagcgccgggccagggcaggaggctcgcgggggccagcgcggaggtctccagcgcacgcgggcctagccgcctcactccagcccggcgcgtcccggcggcttctcccaggcgaggcggggcggtgcggggcgctgcacaccgggaggggggggtcggacggtgcgccccacgcggagacgccggggcccgcaacccagagccgagcttcccgtctcttcccccggggcgtgaagcaaccattcctccctcccgcccctggcagcggagcgcggggcggtgccacgcccagccccgccccctggttgccgggacaacgcccgcacgcgcccggcccctagtccc

SEQ ID NO: 11520 - DNA, 423 bp, Homo sapiens
  source 1..423: mol_type = other DNA
atggaaaccaaaccttaaaatctgagtttggggctcattccccctgggagatgtcacccattcgagaagtagttcttctcgggttggcattgcgtagcgaggccatggcccaaggcctgacggagaagctgcgatagtaccctccccgcgctgggactaggggccgggcgcgtgcgggcgttgtcccggcaaccagggggcggggctgggcgtggcaccgccccgcgctccgctgccaggggcgggagggaggaatggttgcttcacgccccgggggaagagacgggaagctcggctctgggttgcgggccccggcgtctccgcgtggggcgcaccgtccgacccccccctcccggtgtgcagcgccccgcaccgccccgcctcgcctgggagaagccgccgggacgcgccgggctggagtga

SEQ ID NO: 11521 - DNA, 402 bp, Homo sapiens
  source 1..402: mol_type = other DNA
ttatttgactcctagcaggagatcttttaaaaaacaattaactgtatcctaatgaagagtgattaggagttcatttattcattccataaatattgtgcactcattgtgtacaggctacaatgtgaatcattactctgggggcacagagtcaaatttgtgactcagttggattgagtacaagtgttggctcactgccaagtagctgggattacagccgcctgccaccattacaggcatgatagcagtttcaggatgatgctgcctctctaacttggagaggcagctgccaggctagcataaattctggcataccagaaaaaatgactaatgatttaaagcagtggttctcaaccctgcctgtataacttttaaaaattatctagagaactctggtgtagttta

SEQ ID NO: 11522 - DNA, 584 bp, Homo sapiens
  source 1..584: mol_type = other DNA
atcattttaaaagtagatcacacagtgaacaaccattaatattcaatacgtactgtacaacatttcaaattagagtttataccaggatcctagcgccataggctgtaagtattcaagcgaggcgggccggggcaggccgcgtgctcccaggcgcttcatggcttcggcgccccggcccacaggggcggccatcttggtgggctggagaggcagcctgaaggaggccaccgctggccctgctggcgacgactcgccccaacgatggcgaggcggcgagagctgaagcgctgcctgcagctgctggcgtcctcggcggagccagcgcggcgggctcgggttaggaagaacccgagcgcctgccgcggtcgcccctcccgctacgcggcggcgctttgcgcggggactctgtggccggaagccgcggaactgaggcggcgcgcgctcccggccaccccaagcgcgaggtgagtccgcacccccgcgctcgcaccccgccgctctggccgcgcgcccgcggcccgggatcccgagtgtccggagctccgtggcggtctctgggcggagcaatccacactgctgagcct

SEQ ID NO: 11523 - DNA, 537 bp, Homo sapiens
  source 1..537: mol_type = other DNA
ttttttgccaagataaccccagttacttcttgaaacaactaatttcattctgcagtttaaaaagcaaatccagtaagaaactcagaatcacaatcgtatgctctttcatagttatcctagcgttaaaaaagatgcaaatcattttaaaagtagatcacacagtgaacaaccattaatattcaatacgtactgtacaacatttcaaattagagtttataccaggatcctagcgccataggctgtaagtattcaagcgaggcgggccggggcaggccgcgtgctcccaggcgcttcatggcttcggcgccccggcccacaggggcggccatcttggtgggctggagaggcagcctgaaggaggccaccgctggccctgctggcgacgactcgccccaacgatggcgaggcggcgagagctgaagcgctgcctgcagctgctggcgtcctcggcggagccagcgcggcgggctcgggttaggaagaacccgagcgcctgccgcggtcgcccctcccgctacgcggcggcgctttgcgcgg

SEQ ID NO: 11524 - DNA, 343 bp, Homo sapiens
  source 1..343: mol_type = other DNA
gtcagcaaatgcagaatagtttggtctgttttttgccaagataaccccagttacttcttgaaacaactaatttcattctgcagtttaaaaagcaaatccagtaagaaactcagaatcacaatcgtatgctctttcatagttatcctagcgttaaaaaagatgcaaatcattttaaaagtagatcacacagtgaacaaccattaatattcaatacgtactgtacaacatttcaaattagagtttataccaggatcctagcgccataggctgtaagtattcaagcgaggcgggccggggcaggccgcgtgctcccaggcgcttcatggcttcggcgccccggccc

SEQ ID NO: 11525 - DNA, 301 bp, Homo sapiens
  source 1..301: mol_type = other DNA
gaaaagatacatgtatttataattagccagctggactcagtttagatgaccccaattttgttggcaatatcccagttttgttgggtcagcaacaaagttgatcccaattttgttggcaatatccagcttatgccttcttcctgcatcaggcctaatcagggcaacagtgaacacatgttaagggaggagaccacccctgggccttggttatattatctacagattgcagacattgtatagaaaagcactgtgactgttagagttgtgagcccgctcggctcttgagacaggagtcttgcca

SEQ ID NO: 11526 - DNA, 267 bp, Homo sapiens
  source 1..267: mol_type = other DNA
ctgagttagaaaagcatttgcaattttcatgcctgtaatcccagctacctgggaggctattgcaccactgcactccagtctgtaaagtgtccaacttttagcaattagtgaccttaccaagggcaatttcttttcctttaaaggcagtgacttatgaatattattccactgttttcaatcaattccatcgtgagatatggcttctgcagactccccaattcatttaaggtggagcccacctccctgctctgggacctcaggtcgcga

SEQ ID NO: 11527 - DNA, 366 bp, Homo sapiens
  source 1..366: mol_type = other DNA
tcccagctactcgggaggctgaggcagatcgcgccattgcactccagcctgggtgacagatcccagctgagtaaaaaaataaataatttgtctaaaagtaaagtagtttgcaacatttcttccaaaaaagtactgatttatcattgacattactgagttttttttgttttgattaaatactctttaatactaggaaaggataatttcttggcaattattttaaaagtatatgctgtatcactgttttgattttatttcctgaaaaaattaattgccttgaaacatatttattccatgcgatatacactctgtcaagttgaacctgtgggaagattttgttaagaggagaaacagaaatgcttctgc

SEQ ID NO: 11528 - DNA, 400 bp, Homo sapiens
  source 1..400: mol_type = other DNA
taggtacttcatatttgttgacttattcacttacttatactagaatttcattcctttttaaggctgaatatccattcatatgtagatggacacggacatggatgtacaaatatctctttgccagaaatcgaattgctaggtgtaattatttttaatttcctgaggaatcaatcatactgtttcattttatccagcagcacatgcaagggttggctggacccaagggtctaataatagctatcccacttaaaaaatcaggttgttttctatattctggatattaactctttaccagaaatagattaccttcactatatttgtagggcgttttacaaacactgtaaagtcccagggctctgtccggactctgaagcactgcataaaggggtctgtctgagcc

SEQ ID NO: 11529 - DNA, 534 bp, Homo sapiens
  source 1..534: mol_type = other DNA
cacagtgactcacgcctctaatcccagagttttgggagactgaggcaggtctctacaaaaaaaaatatacatatatatatatataatatatttaaaaactttaattgtgaaaatataatgaaattagtaagttattttctaatttactaatttcgaacctgtttcttgcttttgactgcagtcttagaaggaagcatatagtaggaatacaattgattttattatacattaaaaaattaagtcccagatataattgggaatataattagtaatagcacgacaaatattagctgctattatcatcatcaagttaaacacaaatgtatcacaaatacacgtacgtaattctccgcaaatgtatatactagtcgtcgatattacttaaataggttcagattaatacataaagcagtaagaacttaaagataatataaaaagaactgcttttaaaggttatgttctatgtattgcgtggaatataatcctttttacaggaagggggtgggagggtgtgagactggcctccacaccacg

SEQ ID NO: 11530 - DNA, 587 bp, Homo sapiens
  source 1..587: mol_type = other DNA
tccttgctaaggcataaagccagagggaagtatctagatgcaaaacaagctatttcctatctaattttttttcaaactcctggactcagcaattctcccagcttggggtaacgtgttacattattctacttaataaaaagcaaaagttgttttataaattctaacttaaatgcccagaaaataacttatcatgcattgccttgtcgtgcaatagtcaatatttgcaaaccaagtgttaatcaaagatttttgaaaattaaaaaaaaaaaaaaactcatactcacattgtcctcaggatttcctgttttcagtctctataatgattgtaattgaaaagataagtcaggttttttgtgtttttttttcattttaaaatcataatacgcaatgttttccacttgaacgctataccttgcaaggcgacaggaatgccacctggagaaccaagacgctttggcggcagggatgcccgcgccccggcgtcccagcgcggagggtggcggcggggcctggccctagcggggcggggcgggctcgggttaccgggagtcgcggggcgcggccggcactgcccgcggcgcctcctc

SEQ ID NO: 11531 - DNA, 427 bp, Homo sapiens
  source 1..427: mol_type = other DNA
cagattgaagtccacaatttaaatttatgtataacaggtagtatgtacaggatcttctactcctagcaataacctagccagtattatccctattttatagataaggaagttgattctagtgtttagtcgctagtaggtgcctcacaaataaatacacgtgaaagcctaatgctaaaagtagcattatttttactagaggctttcggtttaaagcttgcacaaaaaatagtaattccatttcccacaacgtcggaaaaaaacgacaacaaaaacatcttttgacaatattagtcttctcaaggtttctaaacttggggcttgggttcaggggtcattggaggcccacgggacccccttaacccctgagactagagcggcggcgacgctcggcgtacgcgctgccgtcacgccgcagcccggcagcgca

SEQ ID NO: 11532 - DNA, 316 bp, Homo sapiens
  source 1..316: mol_type = other DNA
atagggtaattccgggataaattagcctgaaaacagttcctggacaattaaccatctttgtatagtaagtgtaacactggccgctgttttcaaacaaactataaaattctgtgagctcagctctgtggatcttggcgtgcctctgcaaagatgcagaggtcgccaccaggatcctggggttgtctctaggatccctgtggtccggggtcgtcactgtcctctgcgcccctgggcactggcagcgcgggccgggcagcggggagggaggcgggaagcagagcgggaggcgccccgggcttgcgcgccgcggtgctcc

SEQ ID NO: 11533 - DNA, 358 bp, Homo sapiens
  source 1..358: mol_type = other DNA
tttgtatagtaagtgtaacactggccgctgttttcaaacaaactataaaattctgtgagctcagctctgtggatcttggcgtgcctctgcaaagatgcagaggtcgccaccaggatcctggggttgtctctaggatccctgtggtccggggtcgtcactgtcctctgcgcccctgggcactggcagcgcgggccgggcagcggggagggaggcgggaagcagagcgggaggcgccccgggcttgcgcgccgcggtgctccacgagggatttgccgccttcagctgcagcagctgcagcggcggcggcgggaagagtgtgccaggcgagccggaggggtgctccgcgctcccccgccct

SEQ ID NO: 11534 - DNA, 377 bp, Homo sapiens
  source 1..377: mol_type = other DNA
gctcagctctgtggatcttggcgtgcctctgcaaagatgcagaggtcgccaccaggatcctggggttgtctctaggatccctgtggtccggggtcgtcactgtcctctgcgcccctgggcactggcagcgcgggccgggcagcggggagggaggcgggaagcagagcgggaggcgccccgggcttgcgcgccgcggtgctccacgagggatttgccgccttcagctgcagcagctgcagcggcggcggcgggaagagtgtgccaggcgagccggaggggtgctccgcgctcccccgccctccttccgggagcgaggatgcagacgcaggggagttgcagcgcgcgaggctccgtgagtgtgtctcctgcgcgctgag

SEQ ID NO: 11535 - DNA, 383 bp, Homo sapiens
  source 1..383: mol_type = other DNA
cccaaaacaagagccggataacattgtcccaccggtggggaaatccttccccgaggccggaggcggcgttgaccggagcctgcgcactggagcctcctcagcccctagtgggcgtcgagtgacaccccaaccgggttcacccagcgctggaggccagactgggctgggagggagttcgttcccaagccctgctctcaaaccttcggtggattgttgaatgcatctgttgtcagaaagacgagcctccgcggagaggcggcgggcggcagccccaagcaaaatggcgccgggcagcttcatcccctccccctctgcccctgcggagcgggacgggcgtaccccgtgcacttgccgccgccgccgccgccgccgcggccgccgcc

SEQ ID NO: 11536 - DNA, 700 bp, Homo sapiens
  source 1..700: mol_type = other DNA
tattcaactttgatttatatagtcaacattttaaaaaaaatttgctttactgcttaaaaaactattgttactaatttattttttagtatgtgaactttttattatgaaagcacacttcagttttaaaaatccagttggaaatacttattgtctgggtaataggaccatgtcagttttattaacttaaaattatgtgctttagtcagtctaaaggaaacgtgtcaattatcttttaattaagttgaacaatcctttcctaaaaggacaaatatattatctctgctcgctgttcacttgtactgtactgctaaggaggagggggaacactagatattaaatgtgtctttaattaaacacaatcaagaaattaaaacaaaggttaaacattttgaaatctatacatcggggttctggtttaatatttcattcttaagtgacaaaaatgattcactgagccatattttttagggctagtgaaatagaaacagccaagggttgcatatctgtttattacagcctgtgacgtgattacccaggcttctcaaattatctagtatatttaattcagatgttcaagatttcttgtttgtattttattttgctaaattgaaaatcatcttgtagaaccatgtagttctaccttaaaaaagaaaacacccctctgctttaaagaaatggtacttcctgctttcataaacag

SEQ ID NO: 11537 - DNA, 592 bp, Homo sapiens
  source 1..592: mol_type = other DNA
tttttacattgaatctctttcattagttacaataaaatggaaagcaaattcttttttttttttttttttttaagaagtctcactctgcagtagctgggactacaggcgcctgccaccacacccaactaaggtccgatcgcgcccggccggcaagcaaattcttatactcagagagctcaagcatttgagaaatgagtattatatcagagctatatccatgttctaagacttggaagaacttagcacagattatggccagatcttctaatctatttgattatgtcctggcatattagacattattctaaattttaatacagccccaggcttatgtaagagtctcctatactattttatttataacaaacttgtcactaattccctttgatatctactgcttaaataaatagcagaataagagcctctaaagattctcacttgaaatcagaggcatttaacttgtggtgattttaaaatatgtccagcattctttgataatcctcccttccagaaagggacttaattccccttctttaagcatgtgctgtacttatttctgatgattagaataaaaggcattgaagtttctccc

SEQ ID NO: 11538 - DNA, 420 bp, Homo sapiens
  source 1..420: mol_type = other DNA
tcccagctactcgggaggctgaggcaggagaatcgcttgaaccagcgatcgcgccattgcactccagcctgctaccccccacccccaaaaaaattagcctgggtgcggtgggctacttaggtcgaggctgcagtgaactgtgttcacgccaccgcactcaacctatgatccggtttcttgaagcccaggatcaaatgtagaacaatatttagtccctaaagtgattctctgaggcaatcgctgccttagacttcctaaagatctaaagaactcttagatgccgctggtgcgactcaggcgcggtcgcgaggaaggcagggtgaacgcgcgtaggctgggagtccgcgttggggcgctccctggcttgcaggccgctccgagtgggtgggccgggggcggggccggcggcagggagcggac

SEQ ID NO: 11539 - DNA, 678 bp, Homo sapiens
  source 1..678: mol_type = other DNA
ccatattttacaattttagaaagacaaaaatatgtgtatcatggtcatcagtattaccatataagcatattgtgcagaaaacggtaaaaagataggcaaagaacctttcttcagagcagcactggctcccaaagggcacccactggaggcaagagaggttccagacgctctcccactttctgagcgaccagggccgtccgaatcaggtacctcaaagtgccactgtcctggtgccaccgccaccttcccaggaggtgtgtgtcacctccgcaggacctggagttaccttgcctgctcactagagccacctccctagagaaatcaccgcctcctctaggaggtcttacaagggcctctaatctaagccgcaggaactcccccgggaggtctgtgccacctcaatgggccaccaatgtcccctcccagggacgccagggccgtctcaccggggctgcaggagaggcgccgatctcgccggctggtagcatctcgcctccgcgtccattcgcagccagcgtggcctgtggagtctggctaaggccagcgacacactcactacccagcctcggaggccgtaggactgagtgccacagcgacttcctctcgatgtctcactcagcccagagaggccctgcccgtgcagccgccggccgtgctctgttcctccccctcctgacc

SEQ ID NO: 11540 - DNA, 280 bp, Homo sapiens
  source 1..280: mol_type = other DNA
tatatatctctgtgcacattaagaggctgtcaagtccacaggtcctctacacaaagggttaaagaaatatctaaagatactgacattcagatattgcctaaaatataaatttaaattattcatattgaatttaaggcgtatcttaaagttccatcattgaatcccttctctggagctccataggggagggtgcccgcttcctgagtggccgttccgacctccggtcaggagggggaggaacagagcacggccggcggctgcacgggcagggcctctctgg

SEQ ID NO: 11541 - DNA, 514 bp, Homo sapiens
  source 1..514: mol_type = other DNA
gatccaccagctgagaattcgtctgctcccgaggctgagcagggcggggtgaagaccttaagtgcttgctttttgcccgttgaccagataaatagaactatctgcattatctatgcagcatggggtttttattatttttacctaaatatgtctctttttggtaataacaaacgtgttttttttaaaaagccttgtttttctcaatacgcctttaaaggtttttaaattgtttcatatctggtcaagatgagatttttaagcactttatttttaatttgtaataaaagtttacaacttgattttttcaaaaaagtcaacgttaataaaggtcttaaataataataataaaatgatgccagcacttcaagccttgttaatcattggatcaacaagtaccgagctagggggcccagccctggatcgcggacagtgacgttggtccacgtgagctctagaaattccaggtccgggtccagccacagggcagtcaggcgtgtcacgtgaccgcgccggc

SEQ ID NO: 11542 - DNA, 137 bp, Homo sapiens
  source 1..137: mol_type = other DNA
accacaatgtgctggtttaaagcgaggctcaaatctggagaccacagtggcctcagcaaagggaattccttttgtaacagacaaatcctaaggagcttaggggagaccaggagtgagtgagttctcacgagatctga

SEQ ID NO: 11543 - DNA, 381 bp, Homo sapiens
  source 1..381: mol_type = other DNA
agcaaaatgtgctctccggctgtgggctggagctggagccgagagaggcaccagcctccggcctgagaaggagtggagtggaaaattttctagcacacctttcagagcaccgggaagccagctgcaatactcctttctattcaaactgtacaaattgtttgaaactagcgtccagtgcatgcacactgcaggccctgaatcaacgcaggcgactggcccacaggtggactgacgggctcgatgctgggcagtgtttcctgtgtgcccagagaaataaagttcctaactaaatgccacaagcgagtgactggtggcaggaaacttaaatcatgtaaaaagtttgttttcaccaaaataactcagaccttttgcttctaaaga

SEQ ID NO: 11544 - DNA, 636 bp, Homo sapiens
  source 1..636: mol_type = other DNA
aaacggctcaggggctaggcccgttagcgtcggttctctgagagccggagatacgcaccgcgcggggaacccgggggtccgggggccctaacttttgagttttgcacgccccgcagcctgatgggaaggtagctcgtagcgctccaaactcgctctgggaggcgaggtcaccagggtcccttccctggctcgggtgggggtggggggcgcaacccctcacggctcctccccaccaagccgtcgggaccccagcgggggcgcctcgcgttgggcgacagggacggaagcaagggctgcctgcaaaactttcggtcctcccgcgtcgggcctatccccgtgtgccccgacccctgcgccccaggcttgggcggcgccgctgcatcccggctgccgggcgcgctgcagccttcgctctcccgcacgcggcgctcgcccgtccgcgctgcccctccccggcaggcgggcggccccggcgggcgggcgggcgcggactgcaggtgcctctctgctgcccctggcggccgcgggcgcgcgagccccaccgagccggctccgggagcccgagcgcccgcccctcctccgctctcaatgtcggaacgttccgaagatgacgtcggatctctcggctgctgctgc

SEQ ID NO: 11545 - DNA, 401 bp, Homo sapiens
  source 1..401: mol_type = other DNA
aggaatcggtaagtttcacaacttccttcttccagagaccaccagactgcatctctgtgagggtgaggatgggtctcactcatctttacaggggcacagctgttccatgacaggcaatattggtaacaagtaatacatatttgttaacaattcttacaacgaaagagaaaaggcaaatgcagtttatctgagtctgacacaaacaatagtttagataattctagtaaacaaaaggatttgttaaaaagaagtaacagaagactttttaaagccttctttaaagggtgctggctagagctgaagtgaattctcccaggaatcagattcctggccaaaggttgcctgcgcaaacccgggccaccctcgctggaaacggctcaggggctaggcccgttagcgtc

SEQ ID NO: 11546 - DNA, 343 bp, Homo sapiens
  source 1..343: mol_type = other DNA
gtccagactgggaggctctgactcaactccccactggcctctcctcccctagctggcagaggaatgggagaggtggtccaagcccagctgcaaggggacaggccaggagacacatcttgtgccctggcacagggctgtgccttcacagccttcttcgagggctggagtggagtcagagggcagtcttccacctcaagtcagcctcgaggaggggtctgctcccagctctcagatccatcatgggtggactacgcacgtccagctctttaaggtaaactctgagctgatcaaagaacaaacagtcctgtggtgtttggagtctccctttcttgcatggcaacaa

SEQ ID NO: 11547 - DNA, 561 bp, Homo sapiens
  source 1..561: mol_type = other DNA
tacacgaatatagaccttagcttcttgaaggtcaccgagggcctgtccggccacgccttcatttttcaaccatggctgcgatggtaactttgaaaataaacctaatttccatacgaatatttggtgattgttttgcaattttaatcaaaggcccctaacacatctgtgccaatacattataaattcataaaaaagttgagatctgttaagggaaggagaggtcagcttcggtgtagtgagctcagctgtggtgagctcgggggtctctgaggccagcgcccccaagctgcgcaggagcgggcgtgggcgcccccgggtcagggctcttcgcagtcgcgcgggtccggaagcgcggcgcgggcccaacgagcgcacgcgtacacgcgtgcgcaggggaagacccgcagggaagggggcgcggcgcacgcagtatggcgccagtcgactcggccaggtgcggcctgaggagaagcctcccggtctccgccccggcccaccgccgccgctccgccccgccccgccccacggccgcccgggcccgcctccgagcccggccagcgc

SEQ ID NO: 11548 - DNA, 525 bp, Homo sapiens
  source 1..525: mol_type = other DNA
aaagactagtcagtgtcgcaccctgtcaaaggcttggccgtgaggactgaacgctgcatcagatgaaaggggcccctcagcctcagggatcgctggatccttaatcccgggaagatgggcagtaggaggctcctcgccccctagccggtgggcggaaggtcccaggcggggcgggcgaaccggctcctcgtggcactgggggaacgccccctccaggccccgccctcccgcgcccgtgccgggaactcgaacttaggtaagcgcccgggtcacgcgccggggctgccccgctgcctccagcttcccagagctggcgtctgggaggaagagcgcgtgcatcacgtcctcctccccgccccgcctccgcgcactgcgcagcgcgctgccgcgccccgccctttctcggcccccggagggtgacggggtgaaggcgggggaggtggggagtccgccagagctcccagactgcgagcacgcgagccgccgcagccgtcacccgcgccgcgtcacggctcccgggcccgc

SEQ ID NO: 11549 - DNA, 496 bp, Homo sapiens
  source 1..496: mol_type = other DNA
tccgataaaaacctcaatttatttttaagctattaagtgaagtcatcagacgtcattacacaaagactagtcagtgtcgcaccctgtcaaaggcttggccgtgaggactgaacgctgcatcagatgaaaggggcccctcagcctcagggatcgctggatccttaatcccgggaagatgggcagtaggaggctcctcgccccctagccggtgggcggaaggtcccaggcggggcgggcgaaccggctcctcgtggcactgggggaacgccccctccaggccccgccctcccgcgcccgtgccgggaactcgaacttaggtaagcgcccgggtcacgcgccggggctgccccgctgcctccagcttcccagagctggcgtctgggaggaagagcgcgtgcatcacgtcctcctccccgccccgcctccgcgcactgcgcagcgcgctgccgcgccccgccctttctcggcccccggagggtgacggggtgaaggcggg

SEQ ID NO: 11550 - DNA, 433 bp, Homo sapiens
  source 1..433: mol_type = other DNA
taattaatcagtcattgctgacagtaaggcacaggatattttctgaagcattaatttttgtttcaatagttgatccttgtttggaatataatgtgttacaatgtagtggtacttagtattaaaatcaaaatacctttttattcatctttcaattttaatacttttagcatttcaaccattatttgaagggttacttactgagtattttaggcccaaaattttcagcttgataacttagtcctcaagatgagtttaatttgactggtaaaagtcttcctaataggatacctaatactgtggctcttagaactagctacaaagatatttcatatgtttatgtctcataatgatgtcattttgtctcagtatcacaatttttgaaaaattagttcaaagagagaaatgcatttctgacacttttaaaatgtataat

SEQ ID NO: 11551 - DNA, 482 bp, Homo sapiens
  source 1..482: mol_type = other DNA
taattaatcagtcattgctgacagtaaggcacaggatattttctgaagcattaatttttgtttcaatagttgatccttgtttggaatataatgtgttacaatgtagtggtacttagtattaaaatcaaaatacctttttattcatctttcaattttaatacttttagcatttcaaccattatttgaagggttacttactgagtattttaggcccaaaattttcagcttgataacttagtcctcaagatgagtttaatttgactggtaaaagtcttcctaataggatacctaatactgtggctcttagaactagctacaaagatatttcatatgtttatgtctcataatgatgtcattttgtctcagtatcacaatttttgaaaaattagttcaaagagagaaatgcatttctgacacttttaaaatgtataattaggtttgaatttgttttgttttcaaaaattaaacaaatgatccttcag

SEQ ID NO: 11552 - DNA, 313 bp, Homo sapiens
  source 1..313: mol_type = other DNA
atggcattaacaagatatggctcttaataatgtttggaaaaggggaaaaggtattagacattgtggcagagattgataattatctcccctgggctcagaccctctttggccctccaaagtgttgggatcaaatgtttacttggcacgtgactgctcaaaataaatattacatttccctaatagcagattctagagttacaatgttctattggtcaaagaaatcattagtgagtagtggccacgctggaaaatgcaatttgccacaccaaaagaaggaagggaggggaggggagcttcccttctctttttcact

SEQ ID NO: 11553 - DNA, 646 bp, Homo sapiens
  source 1..646: mol_type = other DNA
cttgctcttgaaatattttatttacaatgatatgataattgtagaaaatgaagtatgcgtacttaaatagaatttaattgacaaaagacaattttctctacttcaaaattgtaaacatttgcaaagtaagcctcatttcaaagtcaaagccttctactttaaaagcacacattagtaattctatttttctttatactgaagtatttcaatttttggacatacaagtcaaaaatcctatttaaaagagatcaactaactttgataggtgcctctcaataaatggagatggggtagcatttctttgtccaaaaactagattctagactcctggcaccacctctgcgggggttcaccatggcgaagcggggcgagtggccagcccgctcctggacgcgcggacaggtggacacgaaggcggcctcgctgggcctccctccgcctctcccggcccgggcgcgcagccctgcggtggtctgacaggcgggtgcgcggcgccagccagcggaggttgccatggtttccgggggtcacgtgggcgcgctctcctgcgccccctcccgcgcaccgcggcggggcgggggcggggcgcccgggcgggggagaggcgcggccgcggctggagcgggaggagcaggagatgctgcca

SEQ ID NO: 11554 - DNA, 222 bp, Homo sapiens
  source 1..222: mol_type = other DNA
cggctcaacaaacttaggtgaactgaacaagagaaaggacttctagttcttgagcagcgagcaactctggctgtttgattgggtgctgcaagaggcttgggccgctctaagaacaaggcttgagactacgaacccacaatccatttcggggacaaagtttggcttgggtccccggacatggcagttctgcagtccagctgggcggggctcaacccccagggg

SEQ ID NO: 11555 - DNA, 744 bp, Homo sapiens
  source 1..744: mol_type = other DNA
aattttaaatattcagtacttgtaccattattttcattttgaaaatgtatctatcttataatgatttggctttataacttataaagacatgtaacttactttatcctttaaaataatattttactaacaatattagcgtgtagctacatatcatatttaagaaacagcaaagccaattgaaataaaatattatagcagtagtaatctccaaaagtaatacaatgattactgattgaagttttatacccgagactaagctactataatgaaatgtttaaaaaatattttagggtattatcaccttaggtcaatctgattattattttgaatgaatgaatgaatgaaatgaatgaatacccaaatgaatgaatactgaagtcatgacaatgtttaacaccttgagatgctcacaacaaacaaactatttaaaattcactgtggctcacagtaaagatgcagtgggtttctatttgtagaacaaagaatctcaatcaaaaacctatatatgactaaaatattctcaaatgcaattatcaaggctttagaaagcatatatactttttactatgtatttttttaatgtttggcataagtgaccaacaaaccagaatagaatacacatttttaaaatactaatttacacatattctatttaagaataaatttagcctttttaaaagtgtcctttatataaaacccctgctatacataagtgaatacactgcatctctctgcagtggagag

SEQ ID NO: 11556 - DNA, 485 bp, Homo sapiens
  source 1..485: mol_type = other DNA
gaagggctttatttttatgcttataaatgtgaactttattctgaaggaacaactgaatatgcttttcaagtatattatatctaaactagcaataaaatctgtccagctctactttaaaacaaggcctgttctagagcttacacttttgaagagctcgaacgctacaccccttcgtcaagaactgcggcagcagccggtggctgccaacgcggtccacagggtttgggctcccgaaacttcagggaagctggtacccaagccagggggcggggagtggtgttgggtccacctcgctgtccaggtgcggagcagcgcagacccccactgcagaagttcccggactgtagctgcagccgctccagagcctcgagctccgaggccagctacagcgacgctgccgccgccaccttccatgttggcaggtgccgggttgatgtcgtcagcagcagaacggctccgcccaggtggtgacgcagaatcccggc

SEQ ID NO: 11557 - DNA, 349 bp, Homo sapiens
  source 1..349: mol_type = other DNA
tattaactcgtcttatgtttgtaaactcatgagagatgaatgaatattactcactcttctaaaatcttccactgattcctaattcacaagtaatgaatgaatcaccatgactaagatcttacatactagggaaaatcctctgcatgaaatgcattgagttataaaatacttataaaattggtttcctggatacattgtacaaaatgaaaaagtcatcttccagcttctttttgcaatttatcagtatttatcttagaagaaagaaatctaggctcttacagcgtcaatactgttagttgagatgtggaccatctatcagtttgtaattaagtaccccaggagtgccaat

SEQ ID NO: 11558 - DNA, 414 bp, Homo sapiens
  source 1..414: mol_type = other DNA
aatccaaacgtctggatttcaatgtgcagctaagcttggaattactggaataagtaaatccaaagattccaaagcaccaattgtattaactcgtcttatgtttgtaaactcatgagagatgaatgaatattactcactcttctaaaatcttccactgattcctaattcacaagtaatgaatgaatcaccatgactaagatcttacatactagggaaaatcctctgcatgaaatgcattgagttataaaatacttataaaattggtttcctggatacattgtacaaaatgaaaaagtcatcttccagcttctttttgcaatttatcagtatttatcttagaagaaagaaatctaggctcttacagcgtcaatactgttagttgagatgtggaccatctatcagtttgtaattaag

SEQ ID NO: 11559 - DNA, 554 bp, Homo sapiens
  source 1..554: mol_type = other DNA
ctctggagactggggccagagaatcacttgaacctcaaaaaaaaaaaaaaaatcttccttatggttaatttatgttcaaagatttttctattttttctgttacatgtgatccagaatattagtgataaattaagaaaaagcaccaacttaaatgtgtttttgaatgttttatattctataattatcaattttcaacatttatttactattccccaaataattgttaccaggatagtacttttattaaattcctgatacgttgtcaatattgaaaaaactcaacaacttaggtaaagtttactgtctcttcccagcccatggacgggaacgggaacctaggttctccagaacaaatcttaatttccagccccgccgcccggcgccgctccttagacctggaccccggcaccctcccgccggggccgcacttagcagtggaaagtctgtcctaactcattctctgactcgcgccgcctgtgacctcagccgggacggacccgcgggcgggagcctgcggggcgtgaggcggggtggggccctggctcccctccccc

SEQ ID NO: 11560 - DNA, 289 bp, Homo sapiens
  source 1..289: mol_type = other DNA
ttcatacaaaattgcaaagttcatgacttcattgggtgaagtaagcctttgaagatctgtattttggagcctcttctgtatttacttcagaacactaacaatcaggcgagaatgttctggtttatcaaatgcattagttttaacaaagattgtccaggagaactcctaaaagactttctagaaattcaaggacttattaatatagaaacatgtggtatgagagcacctgtggcaggctcccagagaccacggacctcttcctctaggcgggctctgctcttctttaagg

SEQ ID NO: 11561 - DNA, 368 bp, Homo sapiens
  source 1..368: mol_type = other DNA
attttggagcctcttctgtatttacttcagaacactaacaatcaggcgagaatgttctggtttatcaaatgcattagttttaacaaagattgtccaggagaactcctaaaagactttctagaaattcaaggacttattaatatagaaacatgtggtatgagagcacctgtggcaggctcccagagaccacggacctcttcctctaggcgggctctgctcttctttaaggagtcccacagggcctggcccgcccctgacctcgcaacccttgagattagtaacggcccctgcgtggcagccagtaagagtctcagccttcccggttcgggaaaggggaagtttcctgagatcggttgggaaagaccgca

SEQ ID NO: 11562 - DNA, 569 bp, Homo sapiens
  source 1..569: mol_type = other DNA
ctgaaaaaatattcctacacaaaaacctattttctggtccagccaggatgtggagtctctaaatggagattacttttcagactcctaatcgccttattattattattttctttaaagaagataaacacactgagtatattttggcaatacaagcctggagctagtttttacaaaaatcttagcatgaggaatgtataccttataccttgctacttggtagtttttaaatcaaaagtaggtggtataactcctgatttgaataaattgttttttaattaaggcatttatgggacgattggacattttaataatgactcaatttttgatattaggaggttatttttagatattaaggtgtgatcatgaaatgtggttatattttttaagagtctttaaagatatgcagtaaaatacataaagacagtatgctatatgagatttgcttagtaacttggattcttatgcatatatttgaaatgttctataatgaaaggttttagaaactctaatttctttatgtttggctttccccaggggtcccacagcctgctgagagtcaaggactcctc

SEQ ID NO: 11563 - DNA, 513 bp, Homo sapiens
  source 1..513: mol_type = other DNA
aacatttctctaagaggtcaatgtaataatcttttattgatataggaactctggcactgaaagcttgaataacccaaggtaatgatgtcgtcaccaagggaggacaaggaacccaaatcccttgactcccaagcttactgcactgaaggtcctaggaatcgccccttggcactttccccacaaactcctgggaccaagaactggaactaggtactgcttgttagaggaggcagctgcgccgcactggctccgctctccctagaaagtgagtggcagtcattataaacgtgtttcaactgtaaagagacttaagttctgcgtgggtctaggtagctcgtcaccaaatgagcaacctcccactggagggcgccttccggagcgcgcgtgttttttgctacaccaggcggaggaaacaagcgctcgctgaccccgggggattccaaaccgttactccgcccgccggggtggggccagcgcaacggccgagcctgcgcagccagccggctccggggg

SEQ ID NO: 11564 - DNA, 397 bp, Homo sapiens
  source 1..397: mol_type = other DNA
agaggaggcagctgcgccgcactggctccgctctccctagaaagtgagtggcagtcattataaacgtgtttcaactgtaaagagacttaagttctgcgtgggtctaggtagctcgtcaccaaatgagcaacctcccactggagggcgccttccggagcgcgcgtgttttttgctacaccaggcggaggaaacaagcgctcgctgaccccgggggattccaaaccgttactccgcccgccggggtggggccagcgcaacggccgagcctgcgcagccagccggctccgggggccccgcgcactacacccagaaggcagctctccgcggggcggcccttggacttccgcctcccggcctccggaaggcagtgcgcacgcgctcgctgcgactccggcgc

SEQ ID NO: 11565 - DNA, 659 bp, Homo sapiens
  source 1..659: mol_type = other DNA
tgtgattattttatcatttgtaagaataaaataataataataaaataataagggtggctaacttggtaatgtgcatttaaacattttgtcaaattgatcttttaagcataatagaaacaggattgagataagaattaaaaacttaaacattttgtgtaaaaaatgctaataatcaaaataataactaccatttagtaaatgcctatagtgtctttggaaaccttatttaatcttcacaatcacctgaaactaatatctggttaaggaacttgcccaggatcattcctttaaaaagaccttattactcacaaatgaagtaaacaaataatatttagtttgtttcatagtttccttaactataaattgtaaaactcaactgaaataggcaatacctttgaatttcacaattttttaattttacaaggtaaaaaaaacaaattttaaaattctgttgggtaggaaatatttctgggaaaaaaaatatcttgccttgtaagtaaaaaattgactaattgattcataaactgagtcaattttgttactttttggcaaattaaaaaataaagctcttgtttacttacctaaaatcctgccttttttgatcttaaaaggtggtaacattcagttcggagctcactcatctgtaaattgcatcactg

SEQ ID NO: 11566 - DNA, 295 bp, Homo sapiens
  source 1..295: mol_type = other DNA
ctcaggtgaaaaacaagtgtgttaaaaatttttttttagcatttcaagaagagaagattatctctaaaattaactaattagttaaataatttttaaaataaaaagaggagtcttttaagtgcattaaaccacccactggtggtttaatctcacaaggaacttgaggaagcaatcttcatcatcacttctgctgatcaaagtctcaagaccacattgcagtcttttcattgttgtaaaagttaatgagagttaattattaaagctgacagaagtcttacatagcctatatatagac

SEQ ID NO: 11567 - DNA, 558 bp, Homo sapiens
  source 1..558: mol_type = other DNA
aggagcctgggaccctgtcacaggacagctataacaaacactaaatttaattattcatatctaaatctgaacataggcagtaatttctaaccagtgtttagcccttccaataaatgtagaattaagtttattcacactatatagacttattgcaaggcaagaatgagaccttagactttcgtgctcaatcttgaagacaatgtttttcaacccttttcaacagattctctctttttaccagggagatgtgtttctcaactaaagaaatagaagaaatgtgttctctacccatcccttatatggcatttgaagataataccaaaggttttggcctcatggaaatactaataatactccatatggttatgcctagcacaaccaagagcttgttgaacttgtcacgctttactgtcgataatgtgcattaagcaaacgctagttttatttgtttatttcatcttctaagtataagaatacattgtcgtacgtgacaggaacgcctcgtgcggtagaaccgcgcgggccaatcgcgctgctcccgggtaggctgcgcctgtg

SEQ ID NO: 11568 - DNA, 523 bp, Homo sapiens
  source 1..523: mol_type = other DNA
ctgtgtcaactcttccacggcggtgtcatttgaggaattacctgagctaaagccatcatctggagtgcaatggcacgatcccggttcacggcaacctccttccgagtagctgggattacaggcgcccgcggaagtagattttttaaaaacagaactggacgttcaattcaatgccgtgaataaatgtgtgcgcaaagaattgcagggcgcacagagcttctcctccttcctaggaagacttctaaagaacaaacacgacaggtcgaccctgttttccgcggtaggtcccgccggccccctggctgggcaaccttccgcccccctcgctggacggccccgccgcgcgccgttctgggacgcgcaccccggggcggacccgccctgggacctggaagcgccccagccccgcagcgatcgccgccccggggggtgggaccgggacctcacccggtcctcgcagagttgcggccgcccgccccttcagccccggctctccgtatgcgcatgagcagaggcgcctccc

SEQ ID NO: 11569 - DNA, 428 bp, Homo sapiens
  source 1..428: mol_type = other DNA
gggtagcagaatgggtggtggggtcccgtcaccaacctcttttccctaaggtggtgtcaccaggcacactgtgttgttaaagtgcctctcatgagagatttccacttcctggctgtgtcaactcttccacggcgaggtgtcatttgaggaattacctgagctaaagccatcatctggagtgcaatggcacgatcccggttcacggcaacctccttccgagtagctgggattacaggcgcccgcggaagtagattttttaaaaacagaactggacgttcaattcaatgccgtgaataaatgtgtgcgcaaagaattgcagggcgcacagagcttctcctccttcctaggaagacttctaaagaacaaacacgacaggtcgaccctgttttccgcggtaggtcccgccggccccctggctgggcaacctt

SEQ ID NO: 11570 - DNA, 448 bp, Homo sapiens
  source 1..448: mol_type = other DNA
aaatacccttgaaaaagcttaaaggcctgtaagagtggtatcctgatttgtaaatgttgtgtaaaaatgagcatctcattcatgagcttctagaaatcctaaatgttttttcaagcaaccaataaacttacccattgaaactgcacagatttgaaatggagatattaatccactgacaagtgaataaaatgtaagatttaggttcatttctatactataaaccttcctcgtaggagaatgaaatttcaaaccacatggattcaaccttgccattatggttagttgtacttgctcacaaggtaaacagaaatttatagctggtaagtatcaagctgtctgaaaatggcattattcctggctattaaaattggttttagagaaaacaagaaaaatatttgctgtaaaactgagctctatttcagttaaaacttaagtgacttcacaaatc

SEQ ID NO: 11571 - DNA, 289 bp, Homo sapiens
  source 1..289: mol_type = other DNA
agagatgaagatgtctgggaattatgcttctaatgaggcaaaggagaagcaccttgttttcctatagatcttcaagaagacttataaggatttgtctttgaatccacaggactgggttcaaattctagtttgaatgtgtcctccttgtataaaggagacaagaatgtctctttcctgtttcctatttcagccttggaaaaaatacacaggaccaatcatgggtgatgcaccctgggagcatgaatccagggtatagcctagggtcccccaaaagctgagccagactact

SEQ ID NO: 11572 - DNA, 390 bp, Homo sapiens
  source 1..390: mol_type = other DNA
ttggaaaatcttaattctcgatttacattgccaaaaaaaaaaaaaagatttcgaagaaagtgctttttaaaaaagaaaaaccccgccgccacacgcgctcgcaggctgacggaggttggcggtggggcggccgctcaggtgaggggccacccagtccctcgaggcgccggcggctggagcccattcgctgccgtcgcagcagcagggcagagggcgggagcggcgggggcgcgcgccggcgcggggccagcctcgcttcgccagggtcgctggcggacgcgcgccgcagtccgagcctcagacgcgcgggcgcgggggacggcgcaggggccgcctggctggagcagaggacaccggcggtccagggtcctgggcagtcgcgccagggcg

SEQ ID NO: 11573 - DNA, 287 bp, Homo sapiens
  source 1..287: mol_type = other DNA
gatcctgattggaaaatcttaattctcgatttacattgccaaaaaaaaaaaaaagatttcgaagaaagtgctttttaaaaaagaaaaaccccgccgccacacgcgctcgcaggctgacggaggttggcggtggggcggccgctcaggtgaggggccacccagtccctcgaggcgccggcggctggagcccattcgctgccgtcgcagcagcagggcagagggcgggagcggcgggggcgcgcgccggcgcggggccagcctcgcttcgccagggtcgctggcggacg

SEQ ID NO: 11574 - DNA, 239 bp, Homo sapiens
  source 1..239: mol_type = other DNA
gggcaagttcaaattgaagttagaacagacccttgaaggatgaacctgtttctttttcattcctgccccagcaccttggaggctgggggtggattttcctgaattagagaactgggaatcaggctccgctgagctcactaagcgctggagcgatcctgattggaaaatcttaattctcgatttacattgccaaaaaaaaaaaaaagatttcgaagaaagtgctttttaaaaaagaaaaa

SEQ ID NO: 11575 - DNA, 429 bp, Homo sapiens
  source 1..429: mol_type = other DNA
aactagttgaaactgatcaagagggtaaggggctattgcaactacccaaattcgctattgtagtataaaagctttaattaacagcatgtataggaatgcaaagctatgttctaatgaaactttaaaaagcagacacaaatatgaatgtcatataattgtcatctgtcgcaaaactttttttttaacctttgaaaaatgtgaaacccattttatgaaatgccacaattttaaaaagatgtgttacgtagtaatatatgtcccatgcccaggagaaaggggcgcggccgcgccgggcaccaccctccaatcgcagcccccagctccaaggaactcagcgcaggcacgcacgcacacacgtctgtcgcggctcatgctctattgcgcatatctcctgagcgaggcggaaaatcctcaccccggcccgcgggt

SEQ ID NO: 11576 - DNA, 624 bp, Homo sapiens
  source 1..624: mol_type = other DNA
attcttttatatctgcacaaaaagaaaccctttggcagaaagtctctaagctacattcaaagataactcttctagagttaaaagagcaaaaccattttacaacatatgaagtcactatgatatagaataactaggttttaaaactatggctgttaaataagctttttcacatgtaaagtgaactgtttcctgtataaagttctcatcttaatgaacctatgagagtgttgtaaagttatgaactgtatcctattcttgtaatacttatttaagaaaaaccagagttttattacttgataattttccaaattaaaatttagcacatagaaggattcagttataagttcaggaatcagtcctggttctaccactggcatatgacttgggcaagttactttgtgcctcagtccctaatttgtaaaataagcacttactggatttgtaattggcctttttattaagataattctattagaacacattttctgtaagataatatatacgtaatactagaagttggctagaatttgatgatattaaccatgtattattttcagtatttattgagttacatattacagttatattatctgtaatagaaaggaagataaacttttttttttt

SEQ ID NO: 11577 - DNA, 495 bp, Homo sapiens
  source 1..495: mol_type = other DNA
tgccttattccccagcctcggtgggcggctgggctagaccctcctggcactttccctgcccgcccaggccccgccgcagaagctgcccgagacccgggctctaatccggcgcccgtgaaagccggctgtccctgcggcgaccgtggcggacaccgaggccagcctgggctcacagagctgaggcgctggcgaccctgacgatcggctcgggtcggcagcttgggcccggcccctcaccgcggcctcccggagctggcacccagctcctcacaggcaggaggtagccgctggcgccaccacctcaggatcccggcgccctacgcgcacgtggaaaactgttgttgctgctagggctgtgcgccacttccggcttcaacccccgaaaaggcgagcgcaggcgcaggggctcgagaggcctggacctgtggcgcatcctcagtgaggagggccgccctgcatccgtcgccggccccggtctccaggggcctcacccga

SEQ ID NO: 11578 - DNA, 446 bp, Homo sapiens
  source 1..446: mol_type = other DNA
tgaacacaacagtgtgtcccatggacgctgcgtcaactgagcagactagttttgtatgccttattccccagcctcggtgggcggctgggctagaccctcctggcactttccctgcccgcccaggccccgccgcagaagctgcccgagacccgggctctaatccggcgcccgtgaaagccggctgtccctgcggcgaccgtggcggacaccgaggccagcctgggctcacagagctgaggcgctggcgaccctgacgatcggctcgggtcggcagcttgggcccggcccctcaccgcggcctcccggagctggcacccagctcctcacaggcaggaggtagccgctggcgccaccacctcaggatcccggcgccctacgcgcacgtggaaaactgttgttgctgctagggctgtgcgccacttccggcttcaacccccgaaaaggcg

SEQ ID NO: 11579 - DNA, 414 bp, Homo sapiens
  source 1..414: mol_type = other DNA
taattcagagtaacagaataaaaccttgttctccgcagactaagcagaagactagtttataattctggctctgacactaaactttcaaggtcttcctcaggagaatacctcgcggggggtgtaaaactttactgttttaactgttaacaccggcgcaagaagggcattgctagctaaactgaactagcgccttccctccgtcttgccgcgggcgacgggccacgtcgggtgaggcccctggagaccggggccggcgacggatgcagggcggccctcctcactgaggatgcgccacaggtccaggcctctcgagcccctgcgcctgcgctcgccttttcgggggttgaagccggaagtggcgcacagccctagcagcaacaacagttttccacgtgcgcgtagggcgccgggatc

SEQ ID NO: 11580 - DNA, 617 bp, Homo sapiens
  source 1..617: mol_type = other DNA
aaaacatgcatttttaaaactgctttttgatttttcatgtatgttctttcagaaatatttctgtgttttccaaatttctggtaattaataaaaatgttttacatgtatggcttatatagtatattttcctgggaaatatcctttcagagttaataggcctaagaataaagatagtcttttaaataatttaacttattacaatcgaaatatttccccagagtggtaaaaaatgtacccattcatatgtagctcctagatttattacatcatataaagagaagtcagtgagtataattagaaatacatatttttaaaaagtaccccctaatatatgctttattttaaaaatctggtatctatagagaactcttcttaaataatgcagtcattgctgaacttcagagatgtttttaatatttaggaaatccttatcagtagtgtgtcctctctatttgcagactgaaaacatatttctctcctaaaattgagaaaacttgtcaaaaattcccaataggaaaacatgcaagcctgtttcatttatttgtatatagaacagacagtttgtttcagccaaccagactggagcagggagtggagggtgttcagttattaatgac

SEQ ID NO: 11581 - DNA, 484 bp, Homo sapiens
  source 1..484: mol_type = other DNA
cgcacctgtaattgcaagtacttacgagtacctggttggcatccagcttgttggagcaccatcaacattttaaaccacattgaattaggataattaataacattctttgtaggttgtaataactgtaatcctagcactttgggaggcctaggtgagcggatcacgaagatggagaccatctttgctaacacggcctgtagtcccggctacttgcagtgtcgctctggcgacagagcgagactccgtctcatgtaccatttgagggcaaaagcttctttacctggaggcagcaaaactgaatagttttcctgagtgctcatgagtaggagtaatctctgtttcctggcttctaaaacaagaggaagagctgaagacacagtttcatagactttcctgggcgggcggtcttttccgccgggggcggagcttcgggcggccagcgcgcgacggggcagcggggcggagcttgccgccggcggagggc

SEQ ID NO: 11582 - DNA, 286 bp, Homo sapiens
  source 1..286: mol_type = other DNA
agtcacaatccagaatggatgttacaacgactccctgggaaggctttccagatgttttaaattgcaggaaaatgaatttagaacataagcagatatctacacatcacaaataaagagtgttagtaaaatccataatgctttctgttagaccggagactcctgtattcatcagtcaacattaatgtcctttgttgttcacctttacacagaacagcgagagctatccaccgcccccactgcgctcacccggggtcgagagggtggcgcggcgcagatgttgaaattt

SEQ ID NO: 11583 - DNA, 341 bp, Homo sapiens
  source 1..341: mol_type = other DNA
aggttgtgagaactgggcaaatctgtagagtggagagcagtgcagctagctcaaagctgggagctccaagagcttccccggcggaggggaaggccattccatggcattttctccgccatcccatggcccgctgggccaccacccgtggggcccagtcgaacccaggtggccccagagctgaagggctcctagggtcagaccagaggtccgagccccctgggtcttgatttgccgcgcccacttccgggatggggaggccaagtcccagcgtgctgcggggccctgggacgggagggctaggcgctggcgggcgggggtgcgccggagagtgccccggcgtg

SEQ ID NO: 11584 - DNA, 533 bp, Homo sapiens
  source 1..533: mol_type = other DNA
aggaaggagagaaaccccattcgcctcctctggcagagcccgaagctagcgggccggccgcgcgctcccccaagctgtcccggcgcttcgggaaccagtgcggggcgcgccgagcaggcggtgcggggcgagagcctggtgcgcagccctctgcctggagctggctcggcaaagccccgtaccagctgcgcgatgccagtgcgcactcgctcgggccaggggtcttcaggctttgtgcacagtccccgagcagcgctgcagtgccggagcccagcggcttcgcgcgggctgcgggcgctgggcaggatctgcgctggaggctcccgagcccagcgttgacactgcgccgcccgcagctctcccggcggcggctgctcacagtcctccgacgcgctcccgggtacccggcggcgcagaacacgccggggcactctccggcgcacccccgcccgccagcgcctagccctcccgtcccagggccccgcagcacgctgggacttggcctccccatcccggaagtgggcgcggcaaat

SEQ ID NO: 11585 - DNA, 470 bp, Homo sapiens
  source 1..470: mol_type = other DNA
tcagtagggactgagtctcctcattgagacttaacttcgcatttgggcaagtatttttgccaattcaggttccccagtaactcatgacacctgcagtctgctgcagagctctgcctagggtcaattagttaccaaaattgatacttattatggggagaatttataacagaatagatggcaagccatttttacaactctggctatgcccttggattgcacaggcaagattaggaaattaataacatagggaaaacatccctctcatttaactcttaaaagaagaacgggagcaatgagtacttttcctgctcagggacatgattcaaaggagaaaatgttcaggtgtttataagaacaagtaggccctggaatgcttgctcggaggcctgccatgaaggacaccctaccccgggggcaggatgaaggccaaccccaggaggccctaccaaggctgactgctgttaaaacca

SEQ ID NO: 11586 - DNA, 378 bp, Homo sapiens
  source 1..378: mol_type = other DNA
tcacctacattgaggtgagtcagcatagtatatgaacctaataacaggctcaaaggcagctgtgaaattctcagaacttatattcctagtctagaattccacaactaagtagacgaaagcatccctttagtactgatgatggcttaagtagttcatggaactagttaaaactaaaacccccagttccaaggcgggggcgcgccgaggcagggctgggaggaggccccggccccagccttactacgtttccttcagtgaggccacgaagacaggctccctgggcgcgcgcgccccgcccgacggaggcgtccagtggggaggtgtgcagggatggttgggaagcgctcaagccccgcccacgacgtcaggtggcggtag

SEQ ID NO: 11587 - DNA, 225 bp, Homo sapiens
  source 1..225: mol_type = other DNA
atttaccaaagaattaagtagccagttttcttcttaacaagttctcccatggttcatcactaaaatcttagattctagtcattaaaaacacctgactttttttaagtttgttgagagctgttgaaatttaaaggtattctcaacaatgagccatatccattggttaggaacgggattttccaacagaaaccattaaatttggtcctgaacgcatgtatattgatt

SEQ ID NO: 11588 - DNA, 508 bp, Homo sapiens
  source 1..508: mol_type = other DNA
ctaataattattttaattatagccattctggtttaattacattttatagaacctggatattttatcagttttatatccggcattttaagttttttttaagaaacattaatatttttacatacttctctcttttgaataatttttttgaagaaatcccctgcataatgtattgccaaattactttccaaagttactcttatattggagacgatatttaaattgtctccagacaaagatttgacaccattgagttttataatttaaaaaatgtgtttatttaattgatattaaaatggcacttcagccaagtaggactatagtcatgatgaaacaatgttgatttacaatttgattagtacttttcttaatatggaatagccattaactctcagtggcgtgatctcggctcactgccccgagtagctgggactacaggcatgtgggattacaggtgtgagccaccttgcatgtgttttataaacatttaaatgtttatagggtcaaatta

SEQ ID NO: 11589 - DNA, 301 bp, Homo sapiens
  source 1..301: mol_type = other DNA
gaagggaaaaaaaaaatgacattcctcttcccccaaaccagctatggtggcacatacctgtaatcccagctacagtaggctgggatcatgccactgcgctccagccgcaagactctgtctcaaagaaaattttgtggaacacctattttctcactgacatgaaaaatgtttcaaagatgaataacaaactgtagcatcttttatgtacagcgtatgtgagggaaccacatatatggctttgacatccttgttatgatgtcataatcatattgatatttatatatggaagcataccatggca

SEQ ID NO: 11590 - DNA, 461 bp, Homo sapiens
  source 1..461: mol_type = other DNA
ttaataaatgtatataaatgtccattaaaggcaagttgagtactcgtgttccccagagagctagttactttaaaatcaggagtctagagagaatctaactcaaaattttcatccacatatgcagaatctcaatctgagagttattatgaaaattaggaaattcacactctattatggaaaataggaaaaatatatagatattgcatattattattttacaaatatttaagtgccaactatgtgtcaaaacccgacatgtccctgcatttgaggaactgaaaggtcagggcctaaggagcttgggccttagctggttacaaagccatatattatgccatatatattaatagtatgcccacgcagctgctgattccaggtcccaggagtcgacactcgcgcagcgccttgctcacctgagtgggccgggcctcgggaaggaggcgcgccgcgcagtttgaccc

SEQ ID NO: 11591 - DNA, 502 bp, Homo sapiens
  source 1..502: mol_type = other DNA
tacagagtctgtcacagacagagactgttaagctctggcaccaagcacaggcatcttgcatctctgacatgttaatggtggatgccagcggaagcttacctacaggtgacctgcagcgggtacacatgattagttaaacaagtgttcagcatttcttaataaatgtatataaatgtccattaaaggcaagttgagtactcgtgttccccagagagctagttactttaaaatcaggagtctagagagaatctaactcaaaattttcatccacatatgcagaatctcaatctgagagttattatgaaaattaggaaattcacactctattatggaaaataggaaaaatatatagatattgcatattattattttacaaatatttaagtgccaactatgtgtcaaaacccgacatgtccctgcatttgaggaactgaaaggtcagggcctaaggagcttgggccttagctggttacaaagccatatattatgccatatatattaa

SEQ ID NO: 11592 - DNA, 202 bp, Homo sapiens
  source 1..202: mol_type = other DNA
tctctccagagagcagtgttccacctttctgggtcacctgagctgaccataaagctcaagtactactgaagtgaagcgcgttgctcacagctcgtctcccgaggccgagccacagcgcctgcgcacagaatccggggagggtggggaagagatgagcacccaggcctggagctgcacttttgggtgagggtccacctccaag

SEQ ID NO: 11593 - DNA, 605 bp, Homo sapiens
  source 1..605: mol_type = other DNA
tcagcatttttatatcatacttatttttatgaaaattatccagttagttatatttttcccatatggagagacagaaagcaactagcagtggaatctttccatgttgtagtgaaagcaatcactatttctgtgctctaagtgacttattttccatatatctagggcatattcttgaaatgtttcaaaatgttattattataaaatatcaagttactaaattactctaggaagtaatttcaaatattataataaagctcatattaattaatacccaaaacataaaaatctaagtgaacattatcttcttcaacataactgccttaagaatttctactttagtccattgatcttgccatcaattaaaaacactttcagggattcctcttaaaggtttgcatttagaacctgctgctttgtttcaaatgaacccagtggcagcaaatcctaattttttaagtgtagactttaatttttggatagagataattgtcatcagtagtctggtgaattgattaatgatccaactagaggactattagtagtataaactggctctgaagacttcagaaagaacacagattctcaggggccattggctgcccaca

SEQ ID NO: 11594 - DNA, 385 bp, Homo sapiens
  source 1..385: mol_type = other DNA
actgctgtctcaagatcagattattactgtagagaagatttttattttttgtttcattaacagattattataaagcaaaaagcatgttgttgcttaaaattttatatcacctccacaaacacatgattctagaggcattacgtatttgttatatttctagtatttttcatctgtaataacaaaggggaaaaaaatttaaacattttataagcctgattctttagtgacatcctttaaggtagtattcttccccattgaaaagatttttaactgtgggaaaaagataaataaataaataaataactttttttcttttttcccattcttccagctaacctgcaaatttaaaggttagctggagacatcacttaaaaataaatatata

SEQ ID NO: 11595 - DNA, 458 bp, Homo sapiens
  source 1..458: mol_type = other DNA
acgtatttgttatatttctagtatttttcatctgtaataacaaaggggaaaaaaatttaaacattttataagcctgattctttagtgacatcctttaaggtagtattcttccccattgaaaagatttttaactgtgggaaaaagataaataaataaataaataactttttttcttttttcccattcttccagctaacctgcaaatttaaaggttagctggagacatcacttaaaaataaatatataacgggcactgtgacttcctcgtgcgctggatgggcctgaggtcctgaaagggcctttccagccccccactacaaatgcggtaggggttcctgctggttccacagaggctgaagcagccccgccgccgccctcgccaccgcagccgccgccgccgcggcccctgcgttactgggggagacggtgccgctgcgacaggggaggacgcggctgga

SEQ ID NO: 11596 - DNA, 587 bp, Homo sapiens
  source 1..587: mol_type = other DNA
atgagctagatagaaaatatctcattaatttcttgagcttgtgaggcaagaaaatgacattcttatccaacagctggaaaagctgaaaaatagctttactataccctgagatgtggatatgaaagaatattgcatacacatataccctctcccttatttttaaggaatcaatatctgcttaaagaataagactagtgcagtgattttaatttactttaaaatagcttgaagcctcttattccatacattttttaaaactgtaaaaattcaggaaataactctttgcaaagtacaacacaagttgaagtgatttgtagtttcataaaaacgaatttgacattttattagaagttgcaaaccaccacatggttttgagttttgaattcatttgctttgcaaaattttatttgaatggaaatgccctcaagttacttccgccttgtgtatattcttttcgaaaaaaacaaactattatccatgtatttaaatggacgtaggaaattcaagaacaaaggaaatttaacatcatttcagtattacaatagaaatacagtatgtaaattaacccatattatctgtatgactgc

SEQ ID NO: 11597 - DNA, 487 bp, Homo sapiens
  source 1..487: mol_type = other DNA
accctcatcattaataatttataatgtaaggatagcaaataaattttcaaatcagtaaatatgaaagagttccgacttacatatacaaataactaattcttgttttatgatttaaaagcagtatttttacatcttttcacaaatatgtagggacttctgcaacagggctaaacccatttttcctaaactttattttgcactacaaatgttttttaatccccattgactaaaaaattaataaatggcatatgtttcattaggaagatggtgacagagatttcctgcttcagaaacgttggaagccactggtttaaaagcacccggaacagcagggtagaaaacacttgctatcatttcttttattttgaagtgagcttttatataaacacacgaaaccatctatttaattgggcagggaaaggaagtcccgcgcgttcgcgactcttcgcctccgctagagcgtgaccgtcacgccctccgccggggc

SEQ ID NO: 11598 - DNA, 460 bp, Homo sapiens
  source 1..460: mol_type = other DNA
gtttaagcaggctgttcatactttaaaactcatattgaatttcaaggtgttaaaatggccatttgcaaaagaacattttattctacgtagatatttgtaaatcaataacatgtcttatctgtattttcccatggcttaattaaaataaatgtactaatgtttaaaataatgaatttgattacttctttgtaaaatgcttttgtaataaagctatacatttataaatccctgaaaatgatagctgtcattattggattaatttagtccaaactacatattcagtattgtgatactacttttattttatttaaaaaaaatccacattttcatttttaacatcaactaattaaaataatatttttatcctaaagttatgatttaaaaatatctgtttggaacttagctcataaacaaatacagctttaaaaactgcctttttgcaatgtcaactgtaacattt

SEQ ID NO: 11599 - DNA, 371 bp, Homo sapiens
  source 1..371: mol_type = other DNA
ctctctccagcgctttaacgcatctgctgagaggacgtactttggggactgccaagaagcagcagacacaactcggctttgccaatacacccccttccctgactcgccgtctggggcgagctggagaaggggacctccccgcgtttccccctccttaaagaagttagggaacggggggagtgtcccccaccccgcccctccgaggagaggcagccccgcgagcagtgtgtgtacagttcgcattgccaacaacacgcgcgcgcggccgggtgcgcgcgcctgccagcgcacattcacacacatccgggtggggggagcggctgcgccgcgagcctccgagaaagcgcgagacacgccggcgcgtgcagctc

SEQ ID NO: 11600 - DNA, 345 bp, Homo sapiens
  source 1..345: mol_type = other DNA
taggaggaaaattattgcaaataaacctttgatttaccagcttcagtaagttgttcattgtagtttttaccttaacagttttataaaatcttaaaactccatgtggtgttgtgagctggtagcagcctgggggagagaaagtctttcttctctgctagttgattcctgtttttgtgaaacagctaagaaaaattagctgaaaattttccatttcattgcaactatgcattgtttactttactgtaaatatcttaatacatcatcctctgaatatgtaaattgcagagcactggagctttaccaaattgagagactcaaactggtgcttttgtctctctctctctg

SEQ ID NO: 11601 - DNA, 344 bp, Homo sapiens
  source 1..344: mol_type = other DNA
cttaaaactccatgtggtgttgtgagctggtagcagcctgggggagagaaagtctttcttctctgctagttgattcctgtttttgtgaaacagctaagaaaaattagctgaaaattttccatttcattgcaactatgcattgtttactttactgtaaatatcttaatacatcatcctctgaatatgtaaattgcagagcactggagctttaccaaattgagagactcaaactggtgcttttgtctctctctctctgtgattttgtgtacgattgtccacggacgccaaaacaatcacagagctgcttgatttgttttaaactcacagtagtgtaaatactgctg

SEQ ID NO: 11602 - DNA, 370 bp, Homo sapiens
  source 1..370: mol_type = other DNA
tttgagtttaaaaatgacatttatgatgatttcattagcttaaactcaccttaagcacaaagaaaacagttttatctgctttgaatatcttgtacatttatatttagcttctgataataatttcattttgatcacataagtatataatgtatgggtcattacttaaccatatcaagactactgttcacctgtatgtatttatatcatgaataaaattcaaactttaggcaacttgcttaaatgccaatttcttttaaattcttcacagatctattaaaaacagtttctagctcaaaaaaaaaatgtatgagctactcagatgttagctctggtttctatttgtgcatgtcagaattgtcttaaaagaaca

SEQ ID NO: 11603 - DNA, 505 bp, Homo sapiens
  source 1..505: mol_type = other DNA
ggctggtcggttgagccaccgctcccggccgaaggctggcttttttaccatcattgaaatcaagttagaatgcactgtctcttcataggtaacaagtaaatctttgtaatcaattggaataaattccaatgagctttttgaaaaaatgaaatttctgggatattattaatgacagtgaatccaatgcacattttcttcagtttaaaagaatcgaagaatgagttcgttctagctttctacaaatgaattctgcatttcattcacaatgaaataaaagaggtataccactaaagtactatatatctgtaaattactttacacagattaagctacaatatttaaacggaaagttgatcattagcttgccataggccaggctggggccagtaccacggcatccgcaagggtgccaaccttgtttgcaggaatactgtttgaaccaggaaagttcgatactgtaacagtgttttcgttcccaaagcctccgtcggtctggcgtctgggc

SEQ ID NO: 11604 - DNA, 571 bp, Homo sapiens
  source 1..571: mol_type = other DNA
aataaattccaatgagctttttgaaaaaatgaaatttctgggatattattaatgacagtgaatccaatgcacattttcttcagtttaaaagaatcgaagaatgagttcgttctagctttctacaaatgaattctgcatttcattcacaatgaaataaaagaggtataccactaaagtactatatatctgtaaattactttacacagattaagctacaatatttaaacggaaagttgatcattagcttgccataggccaggctggggccagtaccacggcatccgcaagggtgccaaccttgtttgcaggaatactgtttgaaccaggaaagttcgatactgtaacagtgttttcgttcccaaagcctccgtcggtctggcgtctgggcagccagggacctgcccattcactcccctttcccagccccgggagggcgcagcgcccgggtggggagcccgagccagcccaggccggctctggcctcctgacccagacagcgcagggcgcgagggatcgcgcggccgagcccgggtcgcgccgctcccagcatcggggccgctagccaagagat

SEQ ID NO: 11605 - DNA, 510 bp, Homo sapiens
  source 1..510: mol_type = other DNA
caaatgaattctgcatttcattcacaatgaaataaaagaggtataccactaaagtactatatatctgtaaattactttacacagattaagctacaatatttaaacggaaagttgatcattagcttgccataggccaggctggggccagtaccacggcatccgcaagggtgccaaccttgtttgcaggaatactgtttgaaccaggaaagttcgatactgtaacagtgttttcgttcccaaagcctccgtcggtctggcgtctgggcagccagggacctgcccattcactcccctttcccagccccgggagggcgcagcgcccgggtggggagcccgagccagcccaggccggctctggcctcctgacccagacagcgcagggcgcgagggatcgcgcggccgagcccgggtcgcgccgctcccagcatcggggccgctagccaagagataggccccctcgcaggggagccggctggagagggggcggagtgcgcggagtcagagccgcca

SEQ ID NO: 11606 - DNA, 567 bp, Homo sapiens
  source 1..567: mol_type = other DNA
cccaaagcctccgtcggtctggcgtctgggcagccagggacctgcccattcactcccctttcccagccccgggagggcgcagcgcccgggtggggagcccgagccagcccaggccggctctggcctcctgacccagacagcgcagggcgcgagggatcgcgcggccgagcccgggtcgcgccgctcccagcatcggggccgctagccaagagataggccccctcgcaggggagccggctggagagggggcggagtgcgcggagtcagagccgccaccgctgccgcagttgccgccactgcggcgtctgggctgagccggagggaggcgggaggacgcgcaggggcggccgccgccgtcgtcaggccaccggggcgaaaatgcggccgctgccggaggctcgctaactttccggggaagaggaggggtttgatccccatccccggggttcccgctgggtccacctcggacccctgggaccccgccgctcgctgtaacagttttcttcgcaagtttcaaatcaaaacttccccggggtggagttttctctaaaaacattttttttttta

SEQ ID NO: 11607 - DNA, 841 bp, Homo sapiens
  source 1..841: mol_type = other DNA
gatatagtgctgaaatattttcatataatctcaacacaaatgtcaatttaattgcacaatttttagagagaaatctgaatgtaaccttcacattaaacttcagtatgccttgctttgcatatattttttaaaatataggtaagacaagaaagtcatgtaactgttacaagaatgaattcagattttcacagtgtgaattacagggtgggaacaaaggtacctttccattttaagttcctgagatacctaacacatgaaatgagacctcttttatcacattggtaaaggcatgagtatcctatattcatgtcccttaaaaatacaaatgaaattgggatgtaaataataattataagacaaagaaatctcataagctgaactgtgtatttttaatctacatgggaagataaaatattcttggacaagataaaaattatcctggggttagtaaaatcatatgtaagaaaaatgtaattatagaaaatatggaaaatgcaatggccttaaaaactcaaaatctattaatgctctaaagaaatgtgcaattcctaaaattgaaaaaaaaatgatgcaggtcaatttgttgaagaaatgttcattgtgaaacataacatgttgcaataaatgtaggatctcagtccattatgataacaaccatgtactgcttgtgtatattctggtaagaattgttaattatggagccacaatgggaccaacaagagcttttactgtggccacagtattgctttctcaaattagtggcatatttcagataaagaaaggaagtcgtcttaacttgaaactgctgtgtcatttcttcttccttactgaaattccatag

SEQ ID NO: 11608 - DNA, 528 bp, Homo sapiens
  source 1..528: mol_type = other DNA
gttttgttgttgttagtacccagcatagtgactaaaaataaatgactaaaattcacacatagtattgaaataattgttttcattataattcctattcaggaatactttattcttgttgcagtagcatggtactactgcaacaatacttactaggtgacaagaattatgcaaaatacttttagtgaaaaactacatttaatttcacaacaaactgttattgcctattaaaattttacaaatgaggaaagaagcttagagagttcagtaacttgcccaagttcatatagttaatgctgtgccagcggtctcattgcatagaactatagaatcctatgatttgaaggggtctgagacagatcttatcatctattatttacacccatgtgatagtaactcatttcttttaacatatataggtattttttcaatcaagtggtaaactgttatagttcaagaggaatgagtaaatattaacaaccccctgtagcaagcttttgtcaatcacaatctagacaagattagtcttaa

SEQ ID NO: 11609 - DNA, 480 bp, Homo sapiens
  source 1..480: mol_type = other DNA
aacagcgatggtattagatgcaattgctcctgaattagggcatgaaatgaattcagctttggtgcaccaatgtgatgactctgctcgataggcctagcaccatctcacatcagaaaacaatctaagaatcttcgctgactttagggatgtaagatacggtttcttaaaaaagcaattgaggaaagggcactccacaacgcaatattgtcttttttttctctctttaccctgaaaataaactgagaagttagtattgggataactatggaattctccggacgcccagagaatcccttcggagaccaggtcagggtcactgagcttgcccagcagggcgccgcctcggacgccgccccgcctctcaccttgccagcgccgcgctcgggccgcgaaggtgcgtgcggcgctcggtgattggcggcggcccggagctgcccggctgccattggctgcccggccccctttgttcccgggtccggg

SEQ ID NO: 11610 - DNA, 378 bp, Homo sapiens
  source 1..378: mol_type = other DNA
aaaacatgggtcaaaaattagttaaggctctttgatttatgcagcacaacatatcaataaacagaattcttttttttccagaataagggtggggcaaaagagaaaaacgagaagactgtctttttgcaccccctagtgaagctagttaaagaattagtggcaataaatcacttaattgtacagtgatgggttacccctgagccttaattaagacctctcaaagcagctctcaaattaggaatggttgccatgatccagattcttttatggaaccctacagatgcgttttggaatcaggtttttaaagtcccttttatagcaaataaatactaattaagaagcaatttcagctgcagtcattgcttattataataattg

SEQ ID NO: 11611 - DNA, 254 bp, Homo sapiens
  source 1..254: mol_type = other DNA
ctgcaagataatcacagatgtgactgcatcttagaagttcctgaatctttcaagacagtctggtctgcaatccccagctactcggggcaggagaatcgacctcagatctgaaggcacaaactctagggccagggcgttcgctgcacttgcaggtcacctagcactcaggtacctagcactcaggtacattgtggctcctatgtgtgttagaattttatgtgaaattaacatttaattctcacggagcagctgag

SEQ ID NO: 11612 - DNA, 382 bp, Homo sapiens
  source 1..382: mol_type = other DNA
caatccccagctactcggggcaggagaatcgacctcagatctgaaggcacaaactctagggccagggcgttcgctgcacttgcaggtcacctagcactcaggtacctagcactcaggtacattgtggctcctatgtgtgttagaattttatgtgaaattaacatttaattctcacggagcagctgagctccaggaaggccgttgtcttccctgggacgacttgccactcctacgggcccccagaagggtgaccaggaggccctcctcgtcccagctgccggcgtcgccgcccactgcagggcccgggctgtgactcgtggggacggttccctgcgccccggcgggggaggtgggcggggaggggcggcggggcgccggggcg

SEQ ID NO: 11613 - DNA, 491 bp, Homo sapiens
  source 1..491: mol_type = other DNA
cagctactcggggcaggagaatcgacctcagatctgaaggcacaaactctagggccagggcgttcgctgcacttgcaggtcacctagcactcaggtacctagcactcaggtacattgtggctcctatgtgtgttagaattttatgtgaaattaacatttaattctcacggagcagctgagctccaggaaggccgttgtcttccctgggacgacttgccactcctacgggcccccagaagggtgaccaggaggccctcctcgtcccagctgccggcgtcgccgcccactgcagggcccgggctgtgactcgtggggacggttccctgcgccccggcgggggaggtgggcggggaggggcggcggggcgccggggcggggctcgggacggccgggctgggagctggagcccacagcgggaagcggccgccgcccgggcctcgcagggctaggcgaggcgagggggggcggggccgggcgctacgggaagggga

SEQ ID NO: 11614 - DNA, 555 bp, Homo sapiens
  source 1..555: mol_type = other DNA
ctccagctttttttttaaaataatttcaagtgatactttgacttttgactgcatatggaagcataagtaacatgtcctttcatttttggataatgagtttcctgattaattacagctcaagagtaaaatgactgattactatttaattcattttgtgcttctttacaataaagtaaagacagaacaaaatactttaatcgctatcacattttttttaagtctagtcaattagaaaagtcaaaaaaaaaaatcttctctggtaataaacttgaagctttaaataattctacaattataaacattttgtgtattttgcaaatatggcataacctgttggcataaaattccattgttccagaaaatatcggtaataaaattatagaaaagttaaagatcttcatttcttatttcgaagcgtttgggagacatttcagaaacggatgggaaatgttaaattctgcatgcctgcttaagtttccatccacccctccctctgtgaaacagggagacacatggcatctctgcaggcgctctccccgggacgagagcagggaa

SEQ ID NO: 11615 - DNA, 501 bp, Homo sapiens
  source 1..501: mol_type = other DNA
acattttttttaagtctagtcaattagaaaagtcaaaaaaaaaaatcttctctggtaataaacttgaagctttaaataattctacaattataaacattttgtgtattttgcaaatatggcataacctgttggcataaaattccattgttccagaaaatatcggtaataaaattatagaaaagttaaagatcttcatttcttatttcgaagcgtttgggagacatttcagaaacggatgggaaatgttaaattctgcatgcctgcttaagtttccatccacccctccctctgtgaaacagggagacacatggcatctctgcaggcgctctccccgggacgagagcagggaagcgcgggagaaacgttctcactcgctctctgctcgctgcgggcgctccccgccctctgctgccggatgtgcctagacccggcgcagcacacgtccgggccaaccgcgagacctttggcgggcggccaggaggctccctcccagccaccgcc

SEQ ID NO: 11616 - DNA, 312 bp, Homo sapiens
  source 1..312: mol_type = other DNA
ggcatctctgcaggcgctctccccgggacgagagcagggaagcgcgggagaaacgttctcactcgctctctgctcgctgcgggcgctccccgccctctgctgccggatgtgcctagacccggcgcagcacacgtccgggccaaccgcgagacctttggcgggcggccaggaggctccctcccagccaccgccccacgggccagcatgtccgccggctcgggcgttcggagcactcctctggcgttggcaccgctgaggaatccccccttgtcgcgggacccccgcggtccggccctgcctgctgggggtccc

SEQ ID NO: 11617 - DNA, 510 bp, Homo sapiens
  source 1..510: mol_type = other DNA
cccttgtcgcgggacccccgcggtccggccctgcctgctgggggtcccgagtcctggggacagtccccgggactctccgccaggcgcccagaccggcaggtcccgcaggcggcgcgcggtgtgtttgttccaaagttcttgaaccatctcaagaacgagagaggtagacctcccctcctccacgcgctggagctctgcccgggtgtggaaacctcgtcttccaacacgtagctgcccttcagccacccgcccgcagcctgggagtgccctgagggtgggtcggagcgctcagggcgagagcgactcggcttagggagtccgggagaagcctgcggctgccccctcgccgccgaggtcctgcgggtcctgcgggtcctgcgtgctgagccggggcgtgcgcgggcgggggccttcggaccgcgcggcggggcctgccctgacccctggcggcgggcgggggaggcaggcgcgccctgcagagtacagtgtcctctgcctcttaaaaagctg

SEQ ID NO: 11618 - DNA, 649 bp, Homo sapiens
  source 1..649: mol_type = other DNA
ctcttttttaaaaatcatcataagatttcaacattcaagaattaaacttttgttctgtttcagggttaaactcctctgttgttcataatgaaatcattgggacccgggtgggaggccgagagcaaagctcgcgcccttcccggggtcagcgagcggggtgccaggagggtgcgcgccctgcatctgagcccggggtgacactcgcctcccaagcgccaggagggggagactcggtcccgcttatctccggctgtgctaacttcagactgcctgagctgggggacagccagggcgagaaaacttctccacctagaaagtttcacggaaacgcgacccccgcggggccaggcgcggcgcggacggcaggaagggcgggggccctctgggtggtgccagtccccacctcagcggtcctcggaacccgcggactaggggacgcgaggcagacagacacgtgctggggcgggcaggcgagcgcctcagtctggtcgcctggcggtgcctccggccccaacgcgcccgggccgccgcgggccgcgcgcgccgatgcccggctgagtcactggcagggcagcgcggagtgcggccggcgggcgggcggggcgctgggctcagcccggccgcaggtgacccggaggccctcgccgcc

SEQ ID NO: 11619 - DNA, 497 bp, Homo sapiens
  source 1..497: mol_type = other DNA
gttaacagaattggagggcattgagtttaactcacataactctttctttttgtcattccaggaaaaagttacccctaaggtaaagctagcatgtaacttcagactatttcacctaattaaaaatgaactcataatatttcatgaattaaagaatggagtgaggtgttgaaatctcctgccatggaaatgcccagcccttgggaagttgtattaggcaagttataaatcttaccacaggaaggccaaagattataatctttattgcttaggagagtcatatttcaaagactttactaatctgaaacctataggtggttgtgacaatagcagatatggcttacatgacataaggggcaattatatttattatatctgcagccaagactgtatacttttaccttcatactatactgaaatgcaatatcataattgtttttgaactcaaaggcctaacatataataaaagcatataatttgcaagcagtctctagtcaaag

SEQ ID NO: 11620 - DNA, 537 bp, Homo sapiens
  source 1..537: mol_type = other DNA
tttagtgcacccatcacctgagcagtgtaccccacttataagtgagaacataaaatatttggtttcccatggtgtatatacccacatttgctctatccactcattggttaaagaaccaaaaaatatttgttggatgaataactttcaattatagagggtcgtgatgtgtattttaatgaaagccaactatcttctctaatatttgaaaaaacaatgtttaaaaggcttctatttgtacaccttttcacgtactcatcgcagactgagcccatatggtcacagtggggagagcacgctgcactcaagatgctagcaagcctgcagcaggcggcccagcgagacacggtcccccgcccggccaccaggcgcccgcgcacgcgcacagccgcgctcagtccgcgagggccgggtcgagggaggcggggctcccggggtgcgcgtgcgcggcggcctgagcggcgggcccctcccttagcgggggcgcgcggcgctgaggaccgcacggaaacggggaagtcaggtggccgctgccgccgc

SEQ ID NO: 11621 - DNA, 476 bp, Homo sapiens
  source 1..476: mol_type = other DNA
tccaattctttgttcaaaacgccaagttttactgagattccatgtatcagtgttagacacaaaaattagtaaaaatttaaatccattatgtatgccgtaataggccctatatgtgaaaagttaaaggagcttatttaattatgaaggaaactattatacaagtaagcaaaacaatttataataaaatattctttatgctcagaattttaaaaatagatgtagactggaaaacctgattaccatcttgaaaatttcagctgagaaaacattttagaataaaagaaacattttattcaaaacaatgtttaaaatggactttctgttagaggtggccgtttcacagtcaaaattatcccagagaattgtttatattaaaaacaggctgagaatatggaggataaacattcatctgtcaagatttctctggaaaatccctgcgctgcttcaagctagccggcgacaggagcgcacctcct

SEQ ID NO: 11622 - DNA, 542 bp, Homo sapiens
  source 1..542: mol_type = other DNA
attatgtatgccgtaataggccctatatgtgaaaagttaaaggagcttatttaattatgaaggaaactattatacaagtaagcaaaacaatttataataaaatattctttatgctcagaattttaaaaatagatgtagactggaaaacctgattaccatcttgaaaatttcagctgagaaaacattttagaataaaagaaacattttattcaaaacaatgtttaaaatggactttctgttagaggtggccgtttcacagtcaaaattatcccagagaattgtttatattaaaaacaggctgagaatatggaggataaacattcatctgtcaagatttctctggaaaatccctgcgctgcttcaagctagccggcgacaggagcgcacctcctcctgagcctgaatcctgataagggagcagagtagggtttaccactgcaattgaattttgggcagctgctgtgagcctcagtttccctacctatagaattctctttctaaatattagcataataaatataaatggacggggcaggggccac

SEQ ID NO: 11623 - DNA, 537 bp, Homo sapiens
  source 1..537: mol_type = other DNA
cttgaaaatttcagctgagaaaacattttagaataaaagaaacattttattcaaaacaatgtttaaaatggactttctgttagaggtggccgtttcacagtcaaaattatcccagagaattgtttatattaaaaacaggctgagaatatggaggataaacattcatctgtcaagatttctctggaaaatccctgcgctgcttcaagctagccggcgacaggagcgcacctcctcctgagcctgaatcctgataagggagcagagtagggtttaccactgcaattgaattttgggcagctgctgtgagcctcagtttccctacctatagaattctctttctaaatattagcataataaatataaatggacggggcaggggccacgtgatcgctccacgaaagccacttgtagggaccaaggaaaagccggcgcgcccgcggcccgcgcgatttcccgccgagcccgcgtccccggcggcgggcgggctccgggggcgcccgggccgcggcggcggcggcggcgcgagctgcgcctccg

SEQ ID NO: 11624 - DNA, 684 bp, Homo sapiens
  source 1..684: mol_type = other DNA
atgtatatatatttactttttgtgcatttcagtattttaaaaacataacaaaactctttttttggcttgtgttggatagctaatgaaagttcatatgcttctagtactttttctttaaaaacagatttataagaatatggtaacacaggaagacattttttgttccagtgagtcaagagataaaatattttcaattatttctttgtgtggttactcatacagaggtatacacaggtgtgtgcacacagccttaaaagaaatttaggagaaatacatgtatgtaaatatattcctagagcagcgtttttcacatttgaacaatagttgcaaaatagctagtaatggaattgcctgcatttgagtactcactgtgtgccaagcagtgttctaagtacttaagattactattttactgttacatttgtatgtatttatgtgcctagaatatatgtgtaatagtatacatattttcacatacttgtgattgagtgtacaatccttgatctgtcaatctaccataagctttgagaagataacaatgaactcttctgtaattacttctaaagacagataatgtttctcaaaccaagaagactgatatgcatgatgtctttgtggttaattgctataaagccaatatttaaactctcctggagcccctggagcctctggctcaagcagcgc

SEQ ID NO: 11625 - DNA, 565 bp, Homo sapiens
  source 1..565: mol_type = other DNA
cctgacttcagtctaatcatgtaagcatcattgttctttcattactgaaagttacttcttttcccttttgtaattcacagtacataacaattagtagtaaaaccagtatttccagcattttacagaggtatggtttttatcagaatataaagtgcaaagaactggaatatttcataagccgtatttcaaaaactgacttatttatatacatttctggaattgtctttgattttgttatttgaatattatatataaatttggagaaaaattatattgagcagttcttaacagtgttcttttatccatgattgatgttatagttttttgaaaccagtattaagcagagaaaaccacactgagaattttaaatgttattattaaatttactaaaatctaatttttagaataaacagtttttgaaataaaatatacttaaggtggaattagtaaatgtaacatgttttatgggcatgtgtacagaagtcgtaaatgataacagtgaccataaacacgcttatttttggtattttcgcaaatacggaacttcattcattgaacaagtctc

SEQ ID NO: 11626 - DNA, 423 bp, Homo sapiens
  source 1..423: mol_type = other DNA
cgccacaaggcgcacaggctgagcgcccaggcggcaggaggtgcaagggcgcacacccccggcgaacgcctgttgcgctccgcagctccggagaggagctgggtgcccgagggtcatggaccctcctgggtgagaatcatctctgggcggatggcctcggcaatccggaacgcacgctccgagagcccacggatgctctttggcctggcgccaggcgcagcaccccctccctcggctgcgcccggaggggagcagagcggacggggcgcgcgggaggcgcgcagagctttcgggctgcaggcgctcgctgcgcctggtgggcgaggcggtccgggctggcctttatcgctcgctcgagtctcgccactcgtcgcagacgcgagcggggggcgggggcgcggcgaggcgccggcggccgtgacg

SEQ ID NO: 11627 - DNA, 341 bp, Homo sapiens
  source 1..341: mol_type = other DNA
ttccccagagcacgctcctcgggcgggcagtgagtccctccgcccgggcccaagcccctctctcttggctgggcgggggcccaggtccaggaccgagggtcccttaacctccacaaggcgcacaggctgagcgcccaggcggcaggaggtgcaagggcgcacacccccggcgaacgcctgttgcgctccgcagctccggagaggagctgggtgcccgagggtcatggaccctcctgggtgagaatcatctctgggcggatggcctcggcaatccggaacgcacgctccgagagcccacggatgctctttggcctggcgccaggcgcagcaccccctccctc

SEQ ID NO: 11628 - DNA, 412 bp, Homo sapiens
  source 1..412: mol_type = other DNA
ctctgagcctctaaagtaaataatttcaaaatcttttatcagagaatctgcaagaaataatagtgcatggctattatcttgagatacatataatattctgtggtggcaaagaaaatcactgtgttaccaacatctagaagttctaccatctagaaccaacatctacacttcatagcggggaagtgttagcttctaaatctaaggtgagatctaagatcacatgaaatgtaaagtccgtctcccaggggatagtctagtcttacttgccgttaacaagtaaggcattccttgcagagcaagaatttcatcatttcatcaagcaaatactagtgccagggaggagagcagcgcgccgctgtgcgcctgcgctggagggctccagactggagcgcttccacggcgacgccccacc

SEQ ID NO: 11629 - DNA, 406 bp, Homo sapiens
  source 1..406: mol_type = other DNA
tagtagcacttggctgtgctaagtaatccctagcatttattgaatgaatgcatttagaaataaaaatacttacctctgagcctctaaagtaaataatttcaaaatcttttatcagagaatctgcaagaaataatagtgcatggctattatcttgagatacatataatattctgtggtggcaaagaaaatcactgtgttaccaacatctagaagttctaccatctagaaccaacatctacacttcatagcggggaagtgttagcttctaaatctaaggtgagatctaagatcacatgaaatgtaaagtccgtctcccaggggatagtctagtcttacttgccgttaacaagtaaggcattccttgcagagcaagaatttcatcatttcatcaagcaaatactagtgc

SEQ ID NO: 11630 - DNA, 202 bp, Homo sapiens
  source 1..202: mol_type = other DNA
ccgcggaacttttcggttgatatacgaaaggcacattttccttcccttttcaaaatgcaccttgcaacggaagctggtggcagcgggtcctgggtctggcggaccctgacgcgaaggagggtctaggaagctctccggggagccggttctcccgccgccgcgactgtcgcccacctgcgggatgggcctggtgctgggcggt

SEQ ID NO: 11631 - DNA, 562 bp, Homo sapiens
  source 1..562: mol_type = other DNA
tcatctcatgaaaaatcttctgagacgtgtaattcccataaaatctatttttacaaatacggcttttgtttgtacacgtgtcctcacacgtagggagtaatttttttaaattctctcaaaagtagaggacatgacatttagcttttaaagctatgacatttaacacttctcagttagtccttcaggagagatctgctacacattccctgaaaaggattgtcaaatcgttttcatctgagaattgtttttggagaaacactagagtcaaggtgtgtatatatatagggagataaaaacacccagaattcacccagtccccgcgcagggccgcagcggagccaggtcgtgcgcgcacctccacgagcccgcggctggcgccaccgggcgcgggacgcggggcgcggggcgggaccgaggcggggcgctccggcgcgcagcgggttaagcggggcggtggcgaggggcggagggagtgccgcggctcccggctcccggctccaggcgcccgcgtcccggacagcagcgggttaagtgccgcccgcgcggagacggctgagtccgg

SEQ ID NO: 11632 - DNA, 253 bp, Homo sapiens
  source 1..253: mol_type = other DNA
gttgacaccaatttgttagcagagccaagattagaaccaagtttggtgcagaaaggtagaccatcctggcgtggcagaagcgtggacattcgttttctaagggatgttgcatttagtttctttaaaaagtaaaaacacctcttattttcggcttctgctgcagaaaacgcgcacgcgcatcccaatttccgactcacagggctgcggagcagcaactctcacgatatttgctgcgacccgcaggcgctatccg

SEQ ID NO: 11633 - DNA, 485 bp, Homo sapiens
  source 1..485: mol_type = other DNA
ttaattcataagtgaatatgttatgggagttttttctcttattacatacttttctacaatatgctaatatttgatcatcagaaatgtgtcaaatgatggtgtatatactttatttctattggtatttatatttaatgaaaccactttaaagttgtcaatcaatcatgaaagcagagctccgcagcgatggagtcgaggtcggagtgcgcctcccacgcggcaccccggtgtgtcatggggcacggttcccatccctcgtctctagccagcgccctgagaggcctctcctctagccccagaggagccgggggccactgtccctttattctacgggagactctctgagcgctggaagaagcaggtctcgccgtggccccgccgcagcaaagccctgctgcttacaaatcatgacttctgaggcgggcaaggacgccacgcccaactccgtaaatggcgtttgcccatgcgcgcgtccttttggtggg

SEQ ID NO: 11634 - DNA, 324 bp, Homo sapiens
  source 1..324: mol_type = other DNA
ccccttgagccacatctggttttgaaaatccgagaggcagaagcaaggcacgggtcccctttctcctctcaaaggcaggagacgcctttcctaacctgcgcggggagcccggggagatgcaggaccacccactggcggggaagcagctagcagccctcccgcgcccccgcgctgccgagcgccttctgcctccgcgctcggacgagagcccgtgccggccccggccccggccccaccgcgccaacgccgcccgcccggccgccccgcagccccgccgccccgcagccccgcaccgcgctggccaggctcccgcgacagtggccc

SEQ ID NO: 11635 - DNA, 327 bp, Homo sapiens
  source 1..327: mol_type = other DNA
tttttccgagaggcagaagcaaggcacgggtcccctttctcctctcaaaggcaggagacgcctttcctaacctgcgcggggagcccggggagatgcaggaccacccactggcggggaagcagctagcagccctcccgcgcccccgcgctgccgagcgccttctgcctccgcgctcggacgagagcccgtgccggccccggccccggccccaccgcgccaacgccgcccgcccggccgccccgcagccccgccgccccgcagccccgcaccgcgctggccaggctcccgcgacagtggcccgcctggcttgagcttttctcctcttcc

SEQ ID NO: 11636 - DNA, 395 bp, Homo sapiens
  source 1..395: mol_type = other DNA
ttatttgccacaaaagtaatcctagaatgagcagtactgtgaacaacacatccacattttatgtggaggatttctgtcttctaaaagggaagattcttttggaaggatggtaatacttcatgaatttctagtttaaaaaaattagattttccaaagatccactactattcaaaacaatcttatcgtgagaaattttggaaagcttgagttacttctaagagttaaaaatgtagtgcactgaattgggttgggccaccaaatattatcatataataaaagcctgcttctctatgcttcctttggggactctcgctgggtgacggcttgtgcagctggccctggctgccgccgctgcctcgtccggactcggagaggacttgggcttccagcaactg

SEQ ID NO: 11637 - DNA, 367 bp, Homo sapiens
  source 1..367: mol_type = other DNA
taccaataattttcctagcctaacccaggacaaccatgttgtgagactgcatgtctattgcaaggaaatccaagtccaggtaatttatttgccacaaaagtaatcctagaatgagcagtactgtgaacaacacatccacattttatgtggaggatttctgtcttctaaaagggaagattcttttggaaggatggtaatacttcatgaatttctagtttaaaaaaattagattttccaaagatccactactattcaaaacaatcttatcgtgagaaattttggaaagcttgagttacttctaagagttaaaaatgtagtgcactgaattgggttgggccaccaaatattatcatataataaaagcctg

SEQ ID NO: 11638 - DNA, 410 bp, Homo sapiens
  source 1..410: mol_type = other DNA
aacaatatctagcatttattgagtgcaagagtttttaataaaaaacaatttaaaaagaaactactaaatatataacagcctattagaaatcaaggctgcatccgtaattcatggctgctcactgtgatgatgaagattattattattattatttgcggatgcagattgtatgtatagatcaattacatgaaatgtatattcactccatagtctcagtataaactattttaaaattacacgtaagccaaccaggtgtctcttttatattttagagtgaataatgaggataaattccagtagagagaacaggtgaaaagttgttcctagttgtgttatgcaggtgcatacaacaccgcatttcggattctgttacgcactcagcgcgtcattgcggcaagcgcctcaggcgc

SEQ ID NO: 11639 - DNA, 555 bp, Homo sapiens
  source 1..555: mol_type = other DNA
aaaagtgaagcatcactttatttttctcttgtcataagattaaggactctgaacctatacataaaataatatttttctcacaagcaaggaactctagatgcccatttctctgaatctgtgctagctgggcacccctagggggcgctccgtctctcaaggggctgacagcagcgtgcctctgggtgaggctcactctaggggtgtggcctcacggagaacctcaacccacgaaacaagtttgaaaacctcttcagggccctgggtatccagagttcacaaagcgatttcctttcgccttgacagccagcaaaagtggcagaattagactgagctgattctggacaaagcccactgtgtacctttatctactgggcaaaagtatgaagcatcagatcattgaaagacccaattaattagtccaggaaaggagtaataaggtgatctgagttccatactaagacactgaggtccagacagtacttgtgaccctcttatcctcagaagagccaattggctaaggctatttgtttttccaattctgtattaggaaaaaga

SEQ ID NO: 11640 - DNA, 605 bp, Homo sapiens
  source 1..605: mol_type = other DNA
ctgggcacccctagggggcgctccgtctctcaaggggctgacagcagcgtgcctctgggtgaggctcactctaggggtgtggcctcacggagaacctcaacccacgaaacaagtttgaaaacctcttcagggccctgggtatccagagttcacaaagcgatttcctttcgccttgacagccagcaaaagtggcagaattagactgagctgattctggacaaagcccactgtgtacctttatctactgggcaaaagtatgaagcatcagatcattgaaagacccaattaattagtccaggaaaggagtaataaggtgatctgagttccatactaagacactgaggtccagacagtacttgtgaccctcttatcctcagaagagccaattggctaaggctatttgtttttccaattctgtattaggaaaaagaagttgcaaatcatttggggaaatgagctgctgtttccaaagtggggaagcccacggtttcggacacagggctgacagcgctgctccagcagcccccagggccagaggaacccggccttagctccgccccgctctgcccggccccgggtggctgcgatgccgaggtcctctgctc

SEQ ID NO: 11641 - DNA, 470 bp, Homo sapiens
  source 1..470: mol_type = other DNA
aattataagtaataagtgatctgagttccatactaagacactgaggtccagacagtacttgtgaccctcttatcctcagaagagccaattggctaaggctatttgtttttccaattctgtattaggaaaaagaagttgcaaatcatttggggaaatgagctgctgtttccaaagtggggaagcccacggtttcggacacagggctgacagcgctgctccagcagcccccagggccagaggaacccggccttagctccgccccgctctgcccggccccgggtggctgcgatgccgaggtcctctgctcccgccgggcgtgcagcgggcgcgcgcgcgtgccgagtggttttcatcagcaatccattaggaaatcatggaaactttttttttcctggctaaaaggatgtttgaacttttcaaattgcgtatgccctttttatgttaaaagccgtgaatacttacagtgcttt

SEQ ID NO: 11642 - DNA, 395 bp, Homo sapiens
  source 1..395: mol_type = other DNA
tcacatgttgctacagtcatgtcgtcattctaaagatgaggatcagagtcagtccataaccttttctgaatcatattgttaaggattctattaattcaccagcaacggaatgattttgccctatttagggaaaatggctcaatttcattgatttttgaagcttttcacagactaatttagaaagatactttgtgaacttaaaaaacaaacaaagccctttttaaattctggattgaagaattcagggtttatgaaagcccttcttagatttctcacttttggatttgagaaatcgagacagccttaagtgacttattagtgcaaatgaatgtcagtgacgtccactttgatatgtttcccataattcccacgtgttgtgggaggaacgagataat

SEQ ID NO: 11643 - DNA, 569 bp, Homo sapiens
  source 1..569: mol_type = other DNA
caggcatgtgctgccacccatcaataaattttaactttttgtaagatttatgtacattgcatgatagtaagtgatgaaataggctgaaatctacatatattttacattttcatggcatatctttttcttaatttttaaaatattacttactttgagctttttaaaaaatcgttgcaaatttccaaaatttttcccaatatatttattgaaaaaacaatctacatatcaaacccatgttgttcctcccccacaaggactgagacgccctgagggtgggacatatagtccctaatatataatagtcactctaataattttgaatgaaacatcaattatcagagagttttggcaatgcctggactgatttctctatgtatgcattatgagctcgatattgagctgatgctatggggcaataaaggaaatataattataattaaccattttaaataataagctttctacatgtgtgaaagaactagagaactagttttaatattgtccataaactaggtagaaagatagtaacagctttcataatataaaggacaggtttgaccctttcacaa

SEQ ID NO: 11644 - DNA, 370 bp, Homo sapiens
  source 1..370: mol_type = other DNA
ttataaatacacagcaggtatttaataagtacgtttttaaaaatgtgtcttgggcagggaccctcccaccagatcagagcacatctctcatgtactctagaactcatatggcagatgagatgctagactggaatcttctctttcgcttgcactctctaaagtctcctgacagtggtactcaaaaagattattctcctgtgaggttgttggtgggatgggtgggactcatcaaacccacgctttcggaaggtcacccaggtctggacacgctgtccctgaggccagtgcccggagcgccccccgcggagccgctctcagatgatgagatgcggggccgctgctcagccaatcaggctccaggcgcggccag

SEQ ID NO: 11645 - DNA, 771 bp, Homo sapiens
  source 1..771: mol_type = other DNA
ggaagacaatgagaattcatttcatgctttctcccctgaaactccagaattcatagttactattagtttgtgtgttttatataaagctaaaatttggtagattattaattctatattaacacactatagtcaaaccctatttttaaatgcaatttaatttctattctgtcaaatactaggtaacagttattcattattttagaatatggatctgaattatgaaataattttgcattctaaggtcttatgtagtaagatttggataattcccaattatcaacacaattgtaggaaatctcctgagaaaaaatatttctaacgattgtgtatcttataatttaaaaaataaacgtgacttggaaaatgcaaggatcagaattctaatgacgctggacagtaggattttcagaatcagaggtccttggttgatctgaccatctcagctatctcaagatatataagatgacctaactggcgcatctctaggatgggtgggtcatttaaaagacggcggtgacacatttttctccctcccgtagtgccacccggcgcagggccgctgcggcggcggcagctcccacgtggcaagttgtgcagcgcctggccgggggcggtgggcgggaccgcagacccctccctccgctctccggcccttccctctggccggcccgggcgcccgcttggtcctccaccgccagggggcgggcgcggcttcccggcggcgggggcccattggtcgcggccgggaagcgtgggaggaggcccagcggc

SEQ ID NO: 11646 - DNA, 504 bp, Homo sapiens
  source 1..504: mol_type = other DNA
aaatctcagagatagaaaccctcagagataacagatggtaatgttttttcagaccttttattcctaggtccagactctacaaatgcaaatgtccccattaagagacagctttgcaggagtacttctgtttgcaggccatctgaacagccatctcaaaaaattatattttgggctgggcgcataccagaagcaggtggatcactagagagatcgagaccaccccatttctactaaagtcccagctactcagtgtgccactgcactccagtctggtgacagagtgggactctgtcacaaaaaacaaacaaaaaaaactatattttggggtgaaatatttttatttcttttgcaaagttagttgcacagtgctgtagaagtataggtattacccattttttctttgttaggaatgataaattactcttcaaaaggtttaattgtataagacatgcccagacatgtccagacatgccttgtattatttaccctgtttagaaaagttta

SEQ ID NO: 11647 - DNA, 384 bp, Homo sapiens
  source 1..384: mol_type = other DNA
tttggcttcaaattaattcaacaaatattcagggaacacctattgattttttcagaaggtatgcattatacattttttgcatacccttcgtctggcaggaccaccgccgtgttgaaagtccccccagacagctgtgcccagcacggcagtttcgttggggcaaaggtcaacctctggctgtgcgggacaatgggtgtccgttctgcgaacactggaactggcagcggactgggatccggacccagagcggcagccgcgcccctccgccccccgcgcgaccccgggtccgaggcacgctcccagcggagcggtcctgcgcccccgccccctccaggagccgcggcgcgcacagccgggctggagcgcgcacccggcactgaggct

SEQ ID NO: 11648 - DNA, 286 bp, Homo sapiens
  source 1..286: mol_type = other DNA
caactctacttacagataaaattctaatttggggttgacacctgtaatcccgtgtcctggtcaactctaccacaaataaataaataaataattttctctgcaattggagttcaataacattggacattgccatatgcacatgaacacactctaaaactgttgtaagaactgttatctggcttcacagggttgtgacaaggcgagccacggacagttactacccagctaagaacgcaggtcagagatcagagatcatagcaactggcagcgccgccgatttgacgtc

SEQ ID NO: 11649 - DNA, 270 bp, Homo sapiens
  source 1..270: mol_type = other DNA
attaatttaaagtgagaaggcaataacattttaaaaggtagtaagatttcttaagccaggtggccaatggccctcaggcctttctgttaaggtcttaaacaggagaatctagttagaaaattctcttggaagagatactcagagatgcttctcagacattcttaaaatttgacttaagaacgtattttccaggaaagtgattaaatgacccctgttcaaaccatctctcagccttggggggatggagccgccccaggacctggccagacc

SEQ ID NO: 11650 - DNA, 384 bp, Homo sapiens
  source 1..384: mol_type = other DNA
agtgtcatgtgccttagtcagatatgtttgagctgaatcagtatcattttgcacatataaaaacagtttaaaaagtaagcctcgttggttttctttttttgccgattcgggttggggagatgtctcggccgctccccctaaccccacctgctggaggagcagccccggtggacgcttacacgggccatcgcgctcggccgctgtgctagggctccaggcgggcccgggcagcagcggcggcgcgcgcacgcgcactccgcggccccgcgcggctctagttccccacctgcgtccgggcgctcgggcggctccgcctctgccggcgggctctggggaaccgctgggtcggcgcgcccggggctggcggagcaattcctgaggcgc

SEQ ID NO: 11651 - DNA, 458 bp, Homo sapiens
  source 1..458: mol_type = other DNA
taaagacaagttgctaacttgaggtttactggatcatcaatttgcagattccctgataattatgtagtctgtatcagcacaacagtatcataagccttcaaaggtcttaaaatagagggtttatataacacttcatggttattttggttttctatcaaaagagacaatagcatttgctataaattttgtagaagacccttgcaatacattgacactgaaattccaactattagttgctatttcaatttacacactggcacattgtgaacaaacaaccagcttcatggttcaaagaaagcagggaaagaacagtttttccttgaaaacccagaggagcaaatggtctttgatttctcatgaaaagtctttctcttcatgttaattgtgatagtaaaacaataaaaaatgagatttaattttaacttgtgttggaatattaatccaagttggttatttaa

SEQ ID NO: 11652 - DNA, 519 bp, Homo sapiens
  source 1..519: mol_type = other DNA
acttttttgtatgcaaacatgatagaggttgctttttaaacaataagatttaaacattttcatttgaatagataatacataaaaaaataggaagagtgaaaatcctccatctattagacatacgcaaatatgtagttacacctgtaacattgtgcatacatatttacagatctgtctcatttatgcatttatggatgaatttatgtatttatgtttcaaagattgataaatgtcactacctaacaatctaaaacttttatatagtaagagtatttaattattaggactcataaaacaaacagtttgatggaatttaacaaaattaagatctgtactcattttcagtatacttacacatatatacagagatagatgtataaaatgtttgttgcagcactatttttaatagtaaaaaactatctcatggcggggcctcggagccaagacgaggttgagtagactctcgccttgtggggcggcggagtcagaggtctggcagcgctgtctgcgcagacctac

SEQ ID NO: 11653 - DNA, 254 bp, Homo sapiens
  source 1..254: mol_type = other DNA
ttagacaaaatttagtttattaactaatttagtgattaacaaaagttcttctaagcagaattatttgatagctactatctcccttttctctttggctgccaggaagctgagagccaagttgttagtttaacaaaagcaagtaggcaccggattttttttatatctgtaaaattaaactgctgttttcacaagtgtaaaagatcttggagccttcccacccctgccgtgctccggcaggaagaggtggtgccagg

SEQ ID NO: 11654 - DNA, 304 bp, Homo sapiens
  source 1..304: mol_type = other DNA
ccttaaaaagtaaaattcaaattttgtataatggcaaacaaaatcacctggaatttatatatacatttttaattttagaacagttaccaaattatttattaatacactcattattctttgaattccaggatgtgaaatcccattttagaaattatgtcccagtaactgacacatagtgagtggttatggtctgatatcatttcatctggaaataagatgatgtatttcatccatagggctttggttcactttcattttactaaactgagaaaggaaccctccagggtgacagagtggcgacctc

SEQ ID NO: 11655 - DNA, 306 bp, Homo sapiens
  source 1..306: mol_type = other DNA
ttccttaaaaagtaaaattcaaattttgtataatggcaaacaaaatcacctggaatttatatatacatttttaattttagaacagttaccaaattatttattaatacactcattattctttgaattccaggatgtgaaatcccattttagaaattatgtcccagtaactgacacatagtgagtggttatggtctgatatcatttcatctggaaataagatgatgtatttcatccatagggctttggttcactttcattttactaaactgagaaaggaaccctccagggtgacagagtggcgacctc

SEQ ID NO: 11656 - DNA, 577 bp, Homo sapiens
  source 1..577: mol_type = other DNA
tgtatatatataatatgtagtgattaagtcatatatataatttcaaattagcatctcttcaggccagatacaaatctgggctcagattctagctctctcacttcttagctctaatctgagtgtgtactagttaagtacaggcactataatgcttaacactggaatggcataatgtcagtccttaataaatcatatccagtattattatttgtatttttatcatttgcaagtctagatttttactagtaatcatggtgagtaggaagaagagaaagacacctctctgtactttcataaatgagaatcatgttattcatctcacagtatttatgattagaaaaacttattgaagtgctttgtaaactgcaaagtaggataaaattatgaaatactatattattatgaccttttggagtattgtggagacatttctcaaccctaagattataatgaaagaatcttttcatggccatcaagtcattttcaaaataaattttatttccctgttgtttgaatacaaagtgagaagaactgtgttactccttatctgtaaatatggccctggccagtatctgat

SEQ ID NO: 11657 - DNA, 643 bp, Homo sapiens
  source 1..643: mol_type = other DNA
tttacgcaacaaaaatatgtttaatgtggagaacagtgagatgcatatttgataattcactgcagtctgcatcatcaaaatttcgtcttaagccgtttagtatttaacttacagaagaaagggggttatcttagataacttttaatatcctaaggtattttccaattcactactttgaatttaaatgtgacacatacattaaacccgcgtgacacgccaggcaggcggtggaagtcaagtgctgggagagactcccacagctgaagtttgggacaaagttggacccgcagagcgagcttcacgctgcagaaggaggggccctgggtcctcactgacgcttcgcaaaggtgtacgtccgcccagggaaggccggcggcgcagcgacggcgaggagtccccatccatagcagtagctgggttcgggtacccaaccgcctgcgccccattccacttagctccgcgcggtccgcgcctcggccggaagggggcgtggcttcgggcccgcgccgcgaggcccgccgccgagtgggggggtttctcccgggccgcagccgcgcgtttccggcgcgctcccccgcgccctgcccgcccccgctgccatgttggattgtgcggccgccgccgccgctgcgggagggttggg

SEQ ID NO: 11658 - DNA, 386 bp, Homo sapiens
  source 1..386: mol_type = other DNA
ttggtccaattccaagaagtcagcctcattatgacctccatgatgggtttttgattgcaatattgtcttggattgttacttagataattggaaaagtctttttcttccaatgtctttatgagcaagggacaattcttgagcttacagaaggaaaagtagagtgacattgtttttctgaccatggataccataccatggacaggaataaaaactaattcaggtttgttcatgctatcagatgttgacataagcaataattatattgtttctaatctccagtcagcttctcaataaatgggaggttttgttgaaaaagatcccccctctacaaagcaaagttttttatctgtgatcttggcacaccttgatgtggctcacataaattc

SEQ ID NO: 11659 - DNA, 499 bp, Homo sapiens
  source 1..499: mol_type = other DNA
atggtgcatcctgaagggaatacctgaggaggtgagggggcatgcgattggaggggaccctgctgctcaccgccccgcacccgcccctagcccgggctcggggacctgtcaggctggtttcgacagctggggaattaacctgtcccgcccatccctagcctcgagccgcgcaggctccgcgcctccggctcctccgagtggaagccgctacaaatagtggtgaaccaccaggggatcccgtcccagtcgagcttcgcgggcgcgcgcagcggctggagcgcgggggcgaggccgggccacctccccttcccggccgcgcactgcctggcccgcggcggttccaggcaccacccttcccgtccgggctgagcccgctgtggcagtgactagctcccgcggctagcggcactgtccaccgacgagcgcggcggcacgccgtccagcagcctgcttcgccccgtcgtcaagcggggttggaatcccgcttctcctcggcagc

SEQ ID NO: 11660 - DNA, 423 bp, Homo sapiens
  source 1..423: mol_type = other DNA
catggacagccgtgctgggagtgctgagtaacccatggtaggatgcttcccaactcagtgtaatggtgcatcctgaagggaatacctgaggaggtgagggggcatgcgattggaggggaccctgctgctcaccgccccgcacccgcccctagcccgggctcggggacctgtcaggctggtttcgacagctggggaattaacctgtcccgcccatccctagcctcgagccgcgcaggctccgcgcctccggctcctccgagtggaagccgctacaaatagtggtgaaccaccaggggatcccgtcccagtcgagcttcgcgggcgcgcgcagcggctggagcgcgggggcgaggccgggccacctccccttcccggccgcgcactgcctggcccgcggcggttccaggcaccacccttcccgtc

SEQ ID NO: 11661 - DNA, 379 bp, Homo sapiens
  source 1..379: mol_type = other DNA
cccagacatactggtgtgatagcaggacatatttgtaccatctagaatcagactgattagaactcctaaacttactgtaaaatagtgctaatgagtatagtgcttacaagaattactgtaaagactaaatagcaaaactcttggtatatagctggcactcaggatagacatggctatagagtgccctccgtaaatatttgtgtattaggctgtatgcctactaggtaccaagcactgtgctatagaggactgcagttttcgtggtctaaagccttttagggaccatgggtcctgagctcccaaatccgctggccgacttggccccgcctaccttgggcccactgggggcggagcctgcggcgcctcgctgacgtcactt

SEQ ID NO: 11662 - DNA, 439 bp, Homo sapiens
  source 1..439: mol_type = other DNA
tgaacttcagtttttttaaggaggaaacaacggaggcggctctctcgcccccaagaagcggcccttggttggcacccacgtgacccaactccactttcaagtttgagatgcttcgaaaattgttggcaggaaaaaaatgttcaacttttgccatttcagttccactgaacagagcgagagtttggtggccgagcagcccgtctccgtgggcgcgcacgccgcatcgcgggccttcggctctcggtcggcccgagactccggccgcggccctggtgtcccccgccccggttccctcccctcggacacggccctcgcgccggcggccccggtcccctccccaccggccgcggcgggcacagcgcgtcgcctacccacaggcgggggcgccggccgggcgcatgcgcgcggcgctcccgggcgtgccggccacactcccccc

SEQ ID NO: 11663 - DNA, 440 bp, Homo sapiens
  source 1..440: mol_type = other DNA
tccagttcaactgaacaagcatttgttaggcctaataatgcctggcaatttgctattctcctctcagatgttaaaatgaggcaagatcttcaccttcggcaaagcggccagcgcctggactgagaggcggggcccgcaggtctgtgaccccgccgcccaaggccgggaaagctaagcccctaggggcagcggccggccactgaaaatgggggcaggggccgctgcggagcgatgaatcctttcctcagccgcgctcgggctgccggttcggcggccacaggcctggcaggcgcgttcacgggacccaggccagcagcggcaactcgcggagcttcagctcccctaggagccagagccgggggaggcggggccgagagccgggggcggggcccggacgggggcgggcccgcggtgacgtcgggagggcagcgacgcgcgga

SEQ ID NO: 11664 - DNA, 474 bp, Homo sapiens
  source 1..474: mol_type = other DNA
cagttcaactgaacaagcatttgttaggcctaataatgcctggcaatttgctattctcctctcagatgttaaaatgaggcaagatcttcaccttcggcaaagcggccagcgcctggactgagaggcggggcccgcaggtctgtgaccccgccgcccaaggccgggaaagctaagcccctaggggcagcggccggccactgaaaatgggggcaggggccgctgcggagcgatgaatcctttcctcagccgcgctcgggctgccggttcggcggccacaggcctggcaggcgcgttcacgggacccaggccagcagcggcaactcgcggagcttcagctcccctaggagccagagccgggggaggcggggccgagagccgggggcggggcccggacgggggcgggcccgcggtgacgtcgggagggcagcgacgcgcggaggcggcggcggagcctcctcctgctgctgctgcgcc

SEQ ID NO: 11665 - DNA, 652 bp, Homo sapiens
  source 1..652: mol_type = other DNA
agcccctaggggcagcggccggccactgaaaatgggggcaggggccgctgcggagcgatgaatcctttcctcagccgcgctcgggctgccggttcggcggccacaggcctggcaggcgcgttcacgggacccaggccagcagcggcaactcgcggagcttcagctcccctaggagccagagccgggggaggcggggccgagagccgggggcggggcccggacgggggcgggcccgcggtgacgtcgggagggcagcgacgcgcggaggcggcggcggagcctcctcctgctgctgctgcgccccatccccccgcggccggccagttccagcccgcaccccgcgtcggtgcccgcgcccctccccgggccccgccatgggcctcaccgccggatcttcgggaagaagcagatgcgcagatcgagcgcgcggcccggaccggggcgccggccccggcgcagcccttccgcccccgcgtccctccacctgggtctctggccccgagtcacccacctcataacgccccggggcctctgctctcgggcgggtcccggtctgcatcgccgaccccggggcctgacacccggagctgcgggcctgggtggggtgaagctccctccgccccagcccggctggtaagaagggaggattccg

SEQ ID NO: 11666 - DNA, 402 bp, Homo sapiens
  source 1..402: mol_type = other DNA
ggcgccggccccggcgcagcccttccgcccccgcgtcccacctgggtctctggccccgagtcacccacctcataacgccccggggcctctgctctcgggcgggtcccggtctgcatcgccgaccccggggcctgacacccggagctgcgggcctgggtggggtgaagctccctccgccccagcccggctggtaagaagggaggattccgctggaggcgtgaagttgggggagattgtcaccaccatcccaaccatggacgaagcagggagcgggagcgccgcggcgggccctcgcggggtctgctcccaggagctgaccctgacaccagatacagctatttggcagggtggatgtgacctagccccgccctgttgaccgcaatgtagaaacagtggaatatc

SEQ ID NO: 11667 - DNA, 302 bp, Homo sapiens
  source 1..302: mol_type = other DNA
tgaagttgggggagattgtcaccaccatcccaaccatggacgaagcagggagcgggagcgccgcggcgggccctcgcggggtctgctcccaggagctgaccctgacaccagatacagctatttggcagggtggatgtgacctagccccgccctgttgaccgcaatgtagaaacagtggaatatccttccagaattgttggcctaggctgggcccccaggccaaggaagaagcaggattctgggaccaggctgcctgaagcttctatagagttctgtaaacttctgtagagtttactagaggt

SEQ ID NO: 11668 - DNA, 588 bp, Homo sapiens
  source 1..588: mol_type = other DNA
gccgcgctcgggctgccggttcggcggccacaggcctggcaggcgcgttcacgggacccaggccagcagcggcaactcgcggagcttcagctcccctaggagccagagccgggggaggcggggccgagagccgggggcggggcccggacgggggcgggcccgcggtgacgtcgggagggcagcgacgcgcggaggcggcggcggagcctcctcctgctgctgctgcgccccatccccccgcggccggccagttccagcccgcaccccgcgtcggtgcccgcgcccctccccgggccccgccatgggcctcaccgccggatcttcgggaagaagcagatgcgcagatcgagcgcgcggcccggaccggggcgccggccccggcgcagcccttccgcccccgcgtccctccacctgggtctctggccccgagtcacccacctcataacgccccggggcctctgctctcgggcgggtcccggtctgcatcgccgaccccggggcctgacacccggagctgcgggcctgggtggggtgaagctccctccgccccagcccggctggtaagaagggaggattccgctggaggcg

SEQ ID NO: 11669 - DNA, 472 bp, Homo sapiens
  source 1..472: mol_type = other DNA
atctgctgatgaactccagaagatggtgagtacccagagccctgggaactgagccctcagcttgggggagtgatctctgtctttgtggacagacacattgtgtatctcacctggagtgcaatggtgcaatctctgggaatgttggccaggctggtcttgacaacctcaggtgatccacccgtcttggtctcccaaagtgctgggattacaggagtgagccactgcgcccggccgcattctcatgtctttacatctgagtctgagaagatgtggcaaagagaaacattttacattcctgccttttccatttggaaatgttgtcattttgcctaggcaagtactcaaattaggaaaaggtctttcttttcttttttttttccaatcaagatggtagaggagacgcagcctgggtcccaccttctcttctcctctctcagctgcaggaggacgagctgcgggatgcagtgctgct

SEQ ID NO: 11670 - DNA, 600 bp, Homo sapiens
  source 1..600: mol_type = other DNA
ctggagtgcaatggtgcaatctctgggaatgttggccaggctggtcttgacaacctcaggtgatccacccgtcttggtctcccaaagtgctgggattacaggagtgagccactgcgcccggccgcattctcatgtctttacatctgagtctgagaagatgtggcaaagagaaacattttacattcctgccttttccatttggaaatgttgtcattttgcctaggcaagtactcaaattaggaaaaggtctttcttttcttttttttttccaatcaagatggtagaggagacgcagcctgggtcccaccttctcttctcctctctcagctgcaggaggacgagctgcgggatgcagtgctgctggtatttgccaacaagcaggacatgcccaacgccatgcccgtgagcgagctgactgacaagctggggctacagcacttacgcagccgcacggtaggggtcctgcccacctggtgctgaatcctgcctcttgagggaagctgcaggctgggacagagatataaaggcattccttttgggccacctgtgccacccaaggcacaggtctgtacgatggtctggactggctgtcccgctgtc

SEQ ID NO: 11671 - DNA, 373 bp, Homo sapiens
  source 1..373: mol_type = other DNA
cctgtggtcccagcacctcaggaggctgaggcgggaggatcgcttgagcttgggagatcaaggctgcagtcaactgagatgcactccaacctgctgccttggatcctagccaggcttagagagattctttggaggggaaagatacccttgcaggagctctatctgcccagccagatgtcctacccactggcagagcagctggggttgaggagggggtaatttgatgtcaactgattaacttagatttttcttggttatcttgaacttaacaaaatacttgagttgcaagggagccaagaactcacttccttgggagaaaggaggttgctttctatcctgttaccagaatgatcagcctatgcgccagggccct

SEQ ID NO: 11672 - DNA, 443 bp, Homo sapiens
  source 1..443: mol_type = other DNA
ctcaacgaatattagtagcgtgaagcgagccttttccctaacgtcacgggagcagctgggaagagaccgaagaacgagggtcactctcccctgactacaaaaagggcgcgcggccgcgtggcctccatacttttagccaaggtaaaatgtcggaggagattcctccaggactctgcctgcgtggctccaccctcccaggccgcattcccgggtacagcggcgcccacctaggtgggtatacaagtgtgcgcccctgaggccaggcgaggtcaggcgggagggcgcggctggctccgcccctggggctcccatggccccccgcgccccgcggccacaccaccgttttggggaccaagaggcggggctccgcgagcagggtgcctattggcctgagggccggcgggctctgggcgctaattgggcggagggcgacgcttgcgcgt

SEQ ID NO: 11673 - DNA, 847 bp, Homo sapiens
  source 1..847: mol_type = other DNA
cgccgcgcgcaggggccccgctgctgctgctgccgccgctagccagcggggactatgttcctgggctccggagcgtttcccgcagccgcgacccccgctgctcacgccgctgcagcagtccgctggcggcgcggccactgagggcgccgggagccgaagccgcgaactcgctccctccgcacaaagccggagccggcggcgcgccgggggccgggcagcggcgggcggcgacgggcggttgcgcgccgccgggggctgcggccgccgccgccgccggacccgcgcccgcccccggactctctgaaggggcctgcggtgcgggcgcgaccgcgggcgccgcgcgctcctccggccggcggaccgggtccgagcgcagccgccacgccgctggtcctcgggggccggacggagcgccgccccgcgtgccggcagccggcggactggagaactgacgtttttgtctcttccaccctccgagaagaggcgaggagaggggagggcgaaggcgccgcgaacacctcctcttctcgccgctccgcgagctcacgaccgcaatcagctgccgccggcccggagcggccgacgccgggagagggagcgcagcatccagcgagtgcggcctgggcggcttcggggcgcccccgcactccctccggcggcggcccgcagagcgggccggggccgccggagcgcactttggcgatgaagcgccttcccccgcggctggagcgagccggtgccatggtggcgccgctccttgggcggaggggggggcatgcacctgcatagcccgccgggccttggctctcccaggcgcgcctcaactccgcggcttcgccggctccgg

SEQ ID NO: 11674 - DNA, 670 bp, Homo sapiens
  source 1..670: mol_type = other DNA
ataggcctgggttcctagcccattgctattccttaaacccccactttgtacgtaggaaatacggagttgagcacagtatgtccagagtgtccccaaaggccacagtgcccgcctggagccctccagagagcgtgcactccctggggtgccagccagagaccttcagaacccccaaccccgcaatctgggtcggggagcctggcgcactgcgggccgctccctctaaccctgggcttccctggcgtccagggccgtcggggccgagtcccgattcgctcccaccccgaagccgcgccaggaccaacgagggcgcagccgtatgccccagcccgctccgcggagcccctcacagccacccccgccccgaccgcgccccgcgcggctcgaagcaccttcccaaggggctggtccttgcgccatagtcgcgccggagcctctggagggacatccagccacccccaaatttttgggaggtacccaagggtgcgcgcgtggctcctggcgcgccgaggccctccctcgaggccccgcgaggtgcacactgcgggcccagggctagcagccgcccggcacgtcgctaccctgaggggcggggcgggagctggcgctagaaatgcgccggggcctgcggggcagttgcgcaagttgtgatcgggccgctataagaggg

SEQ ID NO: 11675 - DNA, 383 bp, Homo sapiens
  source 1..383: mol_type = other DNA
accagcctgggcaacatggtgaccggtgcacctgtagttccagctactcaggaggctgaaggaggactgcttgaacctgggaggtcgaggctgcagtaagcatagttagagctcagtatatatttattgaaataataattgtgtactatctgtgatgtatatgatatataatttgtggaggcacttcagaaaataagtatatcagatcctgagttacgcccggggctttaaacagggtagaaattatttatttttattttgtatattaagaaaaaaaattactttttggaggccttccaaagctgtaacactagggtagaaattattgatgcctgctagggcagggggcggagccccgctccagaagctacgccccggggcgc

SEQ ID NO: 11676 - DNA, 488 bp, Homo sapiens
  source 1..488: mol_type = other DNA
tcttgaaccccggggctcaagcgatcagcagtctggcagacatttctgaaacagtatttttgagagatcagttttagcgaaaagacatgtcacacagggattggcatttggcagttcaccggtgaagtgggcactgctgtgtagcagtgcaactgttgaaaaccaccaggtaccaagctgtgcaatcttgggcaaattcggtaattttctgtgtcttcatttaattgtctgcaaagtggcgagtagaattgtccattgtacttctacgggtgccatcctggggcaggctgccatgtgtgcgcgtgtgtgcgcgcgccctctgacctgcgagtctcgccaggctcacagcgaggcgcccgccgcggctgattgacagcgctgggtgaatgagcgcgcgtggaggcgcccggcaccgaggtggccgcggctccgcgctgctgtgagcgcctgcctgcccgcccgggtgtggggggaccgcgggtggcggc

SEQ ID NO: 11677 - DNA, 347 bp, Homo sapiens
  source 1..347: mol_type = other DNA
tcaaatagctgggactcttgaaccccggggctcaagcgatcagcagtctggcagacatttctgaaacagtatttttgagagatcagttttagcgaaaagacatgtcacacagggattggcatttggcagttcaccggtgaagtgggcactgctgtgtagcagtgcaactgttgaaaaccaccaggtaccaagctgtgcaatcttgggcaaattcggtaattttctgtgtcttcatttaattgtctgcaaagtggcgagtagaattgtccattgtacttctacgggtgccatcctggggcaggctgccatgtgtgcgcgtgtgtgcgcgcgccctctgacctgcgagt

SEQ ID NO: 11678 - DNA, 498 bp, Homo sapiens
  source 1..498: mol_type = other DNA
aaaataaaataaaatttccagtgcatgagaattatcagctgtttattttcatctactttgtctcctgaaataaattgcctgagggcaaggactctcaatcaccgttcacaatgataagtaagtggacaaacaagtttgagtatgttacggggtaacataacaaggtaaagtacctccagactaggtcctgttccttaaggatccctctccccgctctctaacgtggagggctgagcacgactctctcgccccagcgcgggaggtctgcggtctgcgtgagacgcaaggagaagccctgcctctggagtccagctcctttcctcttcttcctcggaaggggcggcagggaaggggacggggttctttccagtcccaccccccgatgtaccctcgctgaatctgggatgggcagcgccggggagagcggggagcccagggcggagcccagtcgactcccggattcccctgccccgcccccggcacgaggccccgccccgg

SEQ ID NO: 11679 - DNA, 309 bp, Homo sapiens
  source 1..309: mol_type = other DNA
gattagtaaggcagcctagccccccaaaggctcacgcctgtagccccagcagcgagactgtctctatttaaaaaaaaaaaagcagagcttgcagagcttttccttgaaatttagtgcacccgaaatccccttcacggcggggcttcacggacacgaaggccatgcagagagggagacgggacaatccccaaaccccgttgcccgcggggtggggccgcggacgtgcgccacgtcgtgtgcgtcccgggcgtgcgtgcggcctccagtgcgcgtgcgcgtaccctcctggggcgtgctcgcggctagcgg

SEQ ID NO: 11680 - DNA, 512 bp, Homo sapiens
  source 1..512: mol_type = other DNA
ccttttttaaaaaaatctttccctttattctgacattatgacattaaataaagtccaagagatattgctcaaataacttatgtcataacatactttcttctagattcttttgagagtctatttgtattagatctagaaatagaaatgtaaggctgaaatgtattactatgacaaactgtatgtgtgtattacaatcttaattgtgctaataaggataattataataaatataatatggatgattcaaaaaggttagatggttataattaaaaaaaaattgtccttggatattccatttgatttgctaaaaaatatatatacacactgtgtatacatatacacccacactatgaactcaactcttataatgattcaagattattcctgttttacaactgtggggaacctgctcaagtggaatgtctcccactttctgcgagatacgactcctccggggagaatttccccctgcctacgtcttctgaaagagggcgtggcccgcaggaagttct

SEQ ID NO: 11681 - DNA, 397 bp, Homo sapiens
  source 1..397: mol_type = other DNA
ccaagtttatatcatttaagttttaaaggctggggtcaggtgttccagacccccagctactcgggtgagccgagatcacgccatcaaaaaaaaaaaaaaaaaagttttaataattgctgtgtttaacaactggtttgtagctcctgaaaatgtaacaaccagctctcgtgacctgtttttccaaataaataagcttctcagtttagttaacaggtgtccatttctttaaaaaaaaaaaaaaatctccttttctcccatgagatggggtagggaagatgaactccctttttcctatccttagacttccctgggcaggtgaaaagattaaagcctgtatgttcccaagagggagaaaagagcctggcacatcctctgtccttctgacaggccctcccag

SEQ ID NO: 11682 - DNA, 418 bp, Homo sapiens
  source 1..418: mol_type = other DNA
catggctcactgcagccttgctttcccaggctcaagcgatccttttgcctcagcctctcaggtagctggggctacaggcacatgccacgattttttaaggctgagtgtctcctgaaaaattttaaaaagctctcttttctatttgggttctcatgaggtaatccttcgtcaaatcagcctgaagaactgaacaatggtgaacccagctgggcttttctgtctctaatgagacactgctcttctccaatttggggagagggaaatattattaattagcattctttattatcattaggttatcaatagttaatcttttgttttttaaataaactacatacttaatgcgtatctgtgaaaatcccagtgaaaaaatgggcaaaagtgattatgccattttcaggtcatagccttaaaagga

SEQ ID NO: 11683 - DNA, 301 bp, Homo sapiens
  source 1..301: mol_type = other DNA
ccagctactctcgcgcacattgtactccagcctgagcaaaaaaaaaatttagaatttggtccaaattagaaaacagtttatgctgtcactctccaagagggggaacagcttgggacctagcagagctgctcaggataagaaaaattacttctgcttcttcagtttgacctcctaagggaagtaagtcctgcagaagtaaccagcctgccgcggcagaatgcagatgcaactgcttaacctgcatgtcgggggtgaaaggaaaagggaggctcctttgcacttccccccagggcttggccag

SEQ ID NO: 11684 - DNA, 380 bp, Homo sapiens
  source 1..380: mol_type = other DNA
tatttgttttaatttcatgacatgaaattaaattttcagggacatgcaacgggttcggcccattcccttcacttaacattactgagctgggcagtcattttatagcagaatttggcaaagtgtactggactgattcagtcggattaattccgccctgaatggggacgtggcggccacacggccgcgcccacgccacccgcagtacggggctggggctggggctggggctggagcccgccgtcccaacaatcccggggacgagagttgggcgggaatccgctccacgcaactcggcgcggtcccggggacgtggcgcttcgattgagaccaatcgggaggccgccggcgaggcgggggcggggtgcggacccgcttccggt

SEQ ID NO: 11685 - DNA, 265 bp, Homo sapiens
  source 1..265: mol_type = other DNA
ccaaagtgctgggatggccaactcatctatatatttatgatctgctgaggtgcagacccacctccctggcgctggatgccctagacctctaggcattgtcaagtccagggggcagatgagttgaggaaaacttaactgatcctttctatagaatctcttatcctctgaagaacacaatcggctttggggccacaaaaggtttaggtagtggtttagggatttctaatcccaaactttgtccttgggaggtttaggattagtattg

SEQ ID NO: 11686 - DNA, 244 bp, Homo sapiens
  source 1..244: mol_type = other DNA
aagaagggcttccttcccgtgctccatcttgaatatgtgagagtgacctctagtaatcctcacactgttacactcccagtgccatgacagtttacaaatgccatggcaacccttgtttagcatatcatcaagaaataaccaaaaaaagctggatccggatccctttcctgcagcgggcggcacatcagtcgtgcccactctgagcgggctactgtgggggcgtggctcgcagcccaccgggtgt

SEQ ID NO: 11687 - DNA, 457 bp, Homo sapiens
  source 1..457: mol_type = other DNA
catgtcttccagctcctcgaggctctgggatctgtaatcccagtggaggtgcctgactcaaggaccctcttgcttgcacagaaagagggcgtgcgggaaggggtagggctgcgaccgctcccctcccctctcctcccgcgctcaggagtctccggggctgcaggaggtgtagggtctgcagtcccggatgcggccggtgcgcggaagcctcagtcccaggccggaccgggcccgaggggcggctctgacctgggcccgggcagctccagcccgcggctcccgcgccggctccggcgcccgcctccatgaccgctcccgccgccgccttccgcctccctgagcagaagccgcagccgcgagcccggggacccgagccgggtgcgcagggagggagggagggcggacgagggggcggggcctggccgggcctcctgacaccgccccccgccgctcgccg

SEQ ID NO: 11688 - DNA, 628 bp, Homo sapiens
  source 1..628: mol_type = other DNA
ccgggccctgacacctggtgcagaagggtccctgggcacagcagaccccggggggacccgccgccagaaccaggggatctcgctcctccctcttggggcagccataagcctaggagctcctgacgctgtccgggccccgcggctccccgcgctctctaggggagagccttggggcgtatccggggtcgcgctcaccctcccgcgccgccccctgcacgggctcggagctcccgagtgctgggagggcttccgggcggcggcgagcggcggggggcggtgtcaggaggcccggccaggccccgccccctcgtccgccctccctccctccctgcgcacccggctcgggtccccgggctcgcggctgcggcttctgctcagggaggcggaaggcggcggcgggagcggtcatggaggcgggcgccggagccggcgcgggagccgcgggctggagctgcccgggcccaggtcagagccgcccctcgggcccggtccggcctgggactgaggcttccgcgcaccggccgcatccgggactgcagaccctacacctcctgcagccccggagactcctgagcgcgggaggagaggggaggggagcggtcgcagccctaccccttcccgcacgccc
